(19) United States
(12) Patent Application Publication
(10) Pub. No.: US 2002/0132753 A1
(43) Pub. Date: Sep. 19, 2002

(54) Nucleic acids, proteins, and antibodies

(76) Inventors: Craig A. Rosen, Laytonsville, MD (US); Steven M. Ruben, Olney, MD (US); Steven C. Barash, Rockville, MD (US)

Correspondence Address: HUMAN GENOME SCIENCES INC, 9410 KEY WEST AVENUE, ROCKVILLE, MD, 20850

(21) Appl. No.: 09/764,864

(22) Filed: Jan. 17, 2001

Related U.S. Application Data
(60) Provisional application No. 60/179,065, filed on Jan. 31, 2000.
(60) Provisional application No. 60/180,628, filed on Feb. 4, 2000.
(60) Provisional application No. 60/214,886, filed on Jun. 28, 2000.
(60) Provisional application No. 60/217,487, filed on Jul. 11, 2000.
(60) Provisional application No. 60/225,758, filed on Aug. 14, 2000.
(60) Provisional application No. 60/220,963, filed on Jul. 26, 2000.
(60) Provisional application No. 60/217,496, filed on Jul. 11, 2000.
(60) Provisional application No. 60/225,447, filed on Aug. 14, 2000.
(60) Provisional application No. 60/218,290, filed on Jul. 14, 2000.
(60) Provisional application No. 60/225,757, filed on Aug. 14, 2000.
(60) Provisional application No. 60/226,868, filed on Aug. 22, 2000.
(60) Provisional application No. 60/216,647, filed on Jul. 7, 2000.
(60) Provisional application No. 60/225,267, filed on Aug. 14, 2000.
(60) Provisional application No. 60/216,880, filed on Jul. 7, 2000.
(60) Provisional application No. 60/225,270, filed on Aug. 14, 2000.
(60) Provisional application No. 60/251,869, filed on Dec. 8, 2000.
(60) Provisional application No. 60/235,834, filed on Sep. 27, 2000.
(60) Provisional application No. 60/234,274, filed on Sep. 21, 2000.
(60) Provisional application No. 60/234,223, filed on Sep. 21, 2000.
(60) Provisional application No. 60/228,924, filed on Aug. 30, 2000.
(60) Provisional application No. 60/224,518, filed on Aug. 14, 2000.
(60) Provisional application No. 60/236,369, filed on Sep. 29, 2000.
(60) Provisional application No. 60/224,519, filed on Aug. 14, 2000.
(60) Provisional application No. 60/220,964, filed on Jul. 26, 2000.
(60) Provisional application No. 60/241,809, filed on Oct. 20, 2000.
(60) Provisional application No. 60/249,299, filed on Nov. 17, 2000.
(60) Provisional application No. 60/236,327, filed on Sep. 29, 2000.
(60) Provisional application No. 60/241,785, filed on Oct. 20, 2000.
(60) Provisional application No. 60/244,617, filed on Nov. 1, 2000.
(60) Provisional application No. 60/225,268, filed on Aug. 14, 2000.
(60) Provisional application No. 60/236,368, filed on Sep. 29, 2000.
(60) Provisional application No. 60/251,856, filed on Dec. 8, 2000.
(60) Provisional application No. 60/251,868, filed on Dec. 8, 2000.
(60) Provisional application No. 60/229,344, filed on Sep. 1, 2000.
(60) Provisional application No. 60/234,997, filed on Sep. 25, 2000.
(60) Provisional application No. 60/229,343, filed on Sep. 1, 2000.
(60) Provisional application No. 60/229,345, filed on Sep. 1, 2000.
(60) Provisional application No. 60/229,287, filed on Sep. 1, 2000.
(60) Provisional application No. 60/229,513, filed on Sep. 5, 2000.
(60) Provisional application No. 60/231,413, filed on Sep. 8, 2000.
(60) Provisional application No. 60/229,509, filed on Sep. 5, 2000.
(60) Provisional application No. 60/236,367, filed on Sep. 29, 2000.
(60) Provisional application No. 60/237,039, filed on Oct. 2, 2000.
(60) Provisional application No. 60/237,038, filed on Oct. 2, 2000.
(60) Provisional application No. 60/236,370, filed on Sep. 29, 2000.
(60) Provisional application No. 60/236,802, filed on Oct. 2, 2000.
(60) Provisional application No. 60/237,037, filed on Oct. 2, 2000.
(60) Provisional application No. 60/237,040, filed on Oct. 2, 2000.
(60) Provisional application No. 60/240,960, filed on Oct. 20, 2000.
(60) Provisional application No. 60/239,935, filed on Oct. 13, 2000.

(51) Int. Cl. A61K 31/00; C12Q 1/68; C07H 21/02

(52) U.S. Cl. 514/1; 536/23.1; 435/6; 435/69.1; 435/325; 435/320.1

(57) ABSTRACT

The present invention relates to novel proteins. More specifically, isolated nucleic acid molecules are provided encoding novel polypeptides. Novel polypeptides and antibodies that bind to these polypeptides are provided. Also provided are vectors, host cells, and recombinant and synthetic methods for producing human polynucleotides and/or polypeptides, and antibodies. The invention further relates to diagnostic and therapeutic methods useful for diagnosing, treating, preventing and/or prognosing disorders related to these novel polypeptides. The invention further relates to screening methods for identifying agonists and antagonists of polynucleotides and polypeptides of the invention. The present invention further relates to methods and/or compositions for inhibiting or enhancing the production and function of the polypeptides of the present invention.

### STATEMENT UNDER 37 C.F.R. §1.77(b)(4)

[0001] This application refers to a “Sequence Listing” listed below, which is provided as an electronic document on two identical compact discs (CD-R), labeled “Copy 1” and “Copy 2.” These compact discs each contain the following files, which are hereby incorporated in their entirety herein:

| Document | File Name | Size in bytes | Date of Creation |
|---|---|---|---|
| Sequence Listing | PTZ23_seqList.txt | 3,853,268 | 01/15/2001 |
| V Viewer Setup | SetupDLL.exe | 695,808 | 12/19/2000 |
| File | | | |
| V Viewer Help | v.cnt | 7,984 | 01/05/2001 |
| File Controller | | | |
| V Viewer | v.exe | 753,664 | 12/19/2000 |
| Program File | | | |
| V Viewer Help | v.hlp | 447,766 | 01/05/2001 |
| File | | | |

[0002] The Sequence Listing may be viewed on an IBM-PC machine running the MS-Windows operating system by using the V viewer software, licensed by HGS, Inc., included on the compact discs (see World Wide Web URL: http://www.fileviewer.com).

### FIELD OF THE INVENTION

[0003] The present invention relates to novel proteins. More specifically, isolated nucleic acid molecules are provided encoding novel polypeptides. Novel polypeptides and antibodies that bind to these polypeptides are provided. Also provided are vectors, host cells, and recombinant and synthetic methods for producing human polynucleotides and/or polypeptides, and antibodies. The invention further relates to diagnostic and therapeutic methods useful for diagnosing, treating, preventing and/or prognosing disorders related to these novel polypeptides. The invention further relates to screening methods for identifying agonists and antagonists of polynucleotides and polypeptides of the invention. The present invention further relates to methods and/or compositions for inhibiting or enhancing the production and function of the polypeptides of the present invention.

### BACKGROUND OF THE INVENTION

[0004] While the human genome encodes tens of thousands of functional proteins, it is believed that individual cells express only a subset of the total genetic repertoire. This selective gene expression underlies the diversity of cellular phenotypes found in the body. For example, many genes exhibit tissue-specific expression profiles which are thought to contribute to functions and properties, as well as disease states, unique to the tissue [Maeda et al., Gene 190: 227-35 (1997); Cha et al., J. Biol. Chem. 275: 18358-65 (2000); Perou et al., Nature 406: 747-52 (2000)]. Furthermore, the subset of genes expressed in a given cell may vary in response to extracellular signalling molecules, across developmental stages, or in pathological conditions.

[0005] The precise coordination of gene expression depends on regulatory proteins known as transcription factors [see Chapter 9, Molecular Biology of the Cell, Third Edition, Albert et al. Editors]. These factors, often functioning as homo- or hetero-dimers, interact with the basal transcriptional machinery of the cell (including RNA polymerases and associated factors) by binding short stretches of defined DNA sequences. Well-characterized examples of such DNA regulatory regions are the cAMP response element (CRE), the TPA response element (TRE), and the serum response element (SRE). In this way, transcription factors can act as activators or suppressors of gene expression.

[0006] Transcription factors can be classified according to structural motifs contained within the DNA-binding region of the polypeptide. These motifs can determine the DNA sequence binding specificity, as well as the nature of the transcriptional control (i.e. activation or repression).

[0007] One of the most common DNA-binding motifs, the Helix-Turn-Helix (HTH), is composed of two alpha helices linked by a short amino acid chain (the “turn”). The carboxyl-terminal helix contributes to the DNA-recognition properties of the transcription factor. An important subset of HTH domain-containing transcription factors are the homeodomain proteins, which comprise a large class of transcription factors thought to be involved in developmental regulation of gene expression.

[0008] Another major class of transcription regulatory proteins incorporate zinc as structural features of the polypeptide. Among important examples of these so-called zinc finger proteins are the intracellular hormone receptors (e.g. Vitamin D receptor, estrogen receptors, progesterone receptors, thyroid hormone receptors), Sp1, and Egr/KROX proteins. This class of regulatory proteins has been implicated in a number of processes, including cell proliferation and differentiation; signal transduction; and adaptive cellular responses, such as long term potentiation of neural synapses.

[0009] The leucine zipper motif defines another class of transcription factors. Repetitive stretches of leucine residues at every seventh position allow dimerization with other leucine zipper motifs. Dimerized leucine zipper proteins form a Y-shaped structure which can bind DNA and regulate transciption. Both homodimers and heterodimers may be formed, with the specific amino acid sequence of the leucine zipper domain determining the dimerization specificity of the protein. Noteable examples of leucine zipper transcription factors are CREB and CREM, which bind the cAMP Response Element DNA regulatory region; and the proto-oncogenes Fos and Jun, which are involved in normal transcriptional control as well as transformation of normal cells into highly proliferative cancerous cells.

[0010] Because of the fundamental importance of gene regulatory control in development, signal transduction, cellular adaptative responses, aging, neoplastic diseases, as well as many other normal and pathological processes, transcription factors are a major focus of biomedical research. Improved understanding of how gene expression is coordinated under normal and pathological conditions, as well as in different tissues, will allow a more sophisticated approach to the treatment of human disease.

[0011] Thus there exists a clear need for identifying and exploiting novel transcription factor polynucleotides and polypeptides. Although structurally related, such proteins may possess diverse and multifaceted functions in a variety of cell and tissue types. The purified transcription factor polypeptides of the invention are research tools useful for the identification, characterization and purification of additional proteins involved in the regulation of gene transcription. Furthermore, the identification of new transcription factor polynucleotides and polypeptides permits the development of a range of derivatives, agonists and antagonists at the nucleic acid and protein levels which in turn have applications in the treatment and diagnosis of a range of conditions such as, for example, developmental and neoplastic disorders, amongst other conditions.

### SUMMARY OF THE INVENTION

[0012] The present invention relates to novel proteins. More specifically, isolated nucleic acid molecules are provided encoding novel polypeptides. Novel polypeptides and antibodies that bind to these polypeptides are provided. Also provided are vectors, host cells, and recombinant and synthetic methods for producing human polynucleotides and/or polypeptides, and antibodies. The invention further relates to diagnostic and therapeutic methods useful for diagnosing, treating, preventing and/or prognosing disorders related to these novel polypeptides. The invention further relates to screening methods for identifying agonists and antagonists of polynucleotides and polypeptides of the invention. The present invention further relates to methods and/or compositions for inhibiting or enhancing the production and function of the polypeptides of the present invention.

### DETAILED DESCRIPTION

[0013] Tables

[0014] Table 1A summarizes some of the polynucleotides encompassed by the invention (including cDNA clones related to the sequences (Clone ID N0:Z), contig sequences (contig identifier (Contig ID:) and contig nucleotide sequence identifier (SEQ ID NO:X)) and further summarizes certain characteristics of these polynucleotides and the polypeptides encoded thereby. The first column provides the gene number in the application for each clone identifier. The second column provides a unique clone identifier, “Clone ID NO:Z”, for a cDNA clone related to each contig sequence disclosed in Table 1A. The third column provides a unique contig identifier, “Contig ID:” for each of the contig sequences disclosed in Table 1A. The fourth column provides the sequence identifier, “SEQ ID NO:X”, for each of the contig sequences disclosed in Table 1A. The fifth column, “ORF (From-To)”, provides the location (i.e., nucleotide position numbers) within the polynucleotide sequence of SEQ ID NO:X that delineate the preferred open reading frame (ORF) that encodes the amino acid sequence shown in the sequence listing and referenced in Table 1A as SEQ ID NO:Y (column 6). Column 7 lists residues comprising predicted epitopes contained in the polypeptides encoded by each of the preferred ORFs (SEQ ID NO:Y). Identification of potential immunogenic regions was performed according to the method of Jameson and Wolf (CABIOS, 4; 181-186 (1988)); specifically, the Genetics Computer Group (GCG) implementation of this algorithm, embodied in the program PEPTIDESTRUCTURE (Wisconsin Package v10.0, Genetics Computer Group (GCG), Madison, Wis.). This method returns a measure of the probability that a given residue is found on the surface of the protein. Regions where the antigenic index score is greater than 0.9 over at least 6 amino acids are indicated in Table 1A as “Predicted Epitopes”. In particular embodiments, polypeptides of the invention comprise, or alternatively consist of, one, two, three, four, five or more of the predicted epitopes described in Table 1A. It will be appreciated that depending on the analytical criteria used to predict antigenic determinants, the exact address of the determinant may vary slightly. Column 8, “Tissue Distribution” shows the expression profile of tissue, cells, and/or cell line libraries which express the polynucleotides of the invention. The first number in column 8 (preceding the colon), represents the tissue/cell source identifier code corresponding to the key provided in Table 4. Expression of these polynucleotides was not observed in the other tissues and/or cell libraries tested. For those identifier codes in which the first two letters are not “AR”, the second number in column 8 (following the colon), represents the number of times a sequence corresponding to the reference polynucleotide sequence (e.g., SEQ ID NO:X) was identified in the tissue/cell source. Those tissue/cell source identifier codes in which the first two letters are “AR” designate information generated using DNA array technology. Utilizing this technology, cDNAs were amplified by PCR and then transferred, in duplicate, onto the array. Gene expression was assayed through hybridization of first strand cDNA probes to the DNA array. cDNA probes were generated from total RNA extracted from a variety of different tissues and cell lines. Probe synthesis was performed in the presence of ³³P dCTP, using oligo(dT) to prime reverse transcription. After hybridization, high stringency washing conditions were employed to remove non-specific hybrids from the array. The remaining signal, emanating from each gene target, was measured using a Phosphorimager. Gene expression was reported as Phosphor Stimulating Luminescence (PSL) which reflects the level of phosphor signal generated from the probe hybridized to each of the gene targets represented on the array. A local background signal subtraction was performed before the total signal generated from each array was used to normalize gene expression between the different hybridizations. The value presented after “[array code]:” represents the mean of the duplicate values, following background subtraction and probe normalization. One of skill in the art could routinely use this information to identify normal and/or diseased tissue(s) which show a predominant expression pattern of the corresponding polynucleotide of the invention or to identify polynucleotides which show predominant and/or specific tissue and/or cell expression. Column 9 provides the chromosomal location of polynucleotides corresponding to SEQ ID NO:X. Chromosomal location was determined by finding exact matches to EST and cDNA sequences contained in the NCBI (National Center for Biotechnology Information) UniGene database. Given a presumptive chromosomal location, disease locus association was determined by comparison with the Morbid Map, derived from Online Mendelian Inheritance in Man (Online Mendelian Inheritance in Man, OMIM™. McKusick-Nathans Institute for Genetic Medicine, Johns Hopkins University (Baltimore, Md.) and National Center for Biotechnology Information, National Library of Medicine (Bethesda, Md.) 2000. World Wide Web URL: http://www.ncbi.nlm.nih.gov/omim/). If the putative chromosomal location of the Query overlaps with the chromosomal location of a Morbid Map entry, an OMIM identification number is disclosed in column 10 labeled “OMIM Disease Reference(s)”. A key to the OMIM reference identification numbers is provided in Table 5.

[0015] Table 1B summarizes additional polynucleotides encompassed by the invention (including cDNA clones related to the sequences (Clone ID NO:Z), contig sequences (contig identifier (Contig ID:) contig nucleotide sequence identifiers (SEQ ID NO:X)), and genomic sequences (SEQ ID NO:B). The first column provides a unique clone identifier, “Clone ID NO:Z”, for a cDNA clone related to each contig sequence. The second column provides the sequence identifier, “SEQ ID NO:X”, for each contig sequence. The third column provides a unique contig identifier, “Contig ID:” for each contig sequence. The fourth column, provides a BAC identifier “BAC ID NO:A” for the BAC clone referenced in the corresponding row of the table. The fifth column provides the nucleotide sequence identifier, “SEQ ID NO:B” for a fragment of the BAC clone identified in column four of the corresponding row of the table. The sixth column, “Exon From-To”, provides the location (i.e., nucleotide position numbers) within the polynucleotide sequence of SEQ ID NO:B which delineate certain polynucleotides of the invention that are also exemplary members of polynucleotide sequences that encode polypeptides of the invention (e.g., polypeptides containing amino acid sequences encoded by the polynucleotide sequences delineated in column six, and fragments and variants thereof).

[0016] Table 2 summarizes homology and features of some of the polypeptides of the invention. The first column provides a unique clone identifier, “Clone ID NO:Z”, corresponding to a cDNA clone disclosed in Table 1A. The second column provides the unique contig identifier, “Contig ID:” corresponding to contigs in Table 1A and allowing for correlation with the information in Table 1A. The third column provides the sequence identifier, “SEQ ID NO:X”, for the contig polynucleotide sequence. The fourth column provides the analysis method by which the homology/identity disclosed in the Table was determined. Comparisons were made between polypeptides encoded by the polynucleotides of the invention and either a non-redundant protein database (herein referred to as “NR”), or a database of protein families (herein referred to as “PFAM”) as further described below. The fifth column provides a description of the PFAM/NR hit having a significant match to a polypeptide of the invention. Column six provides the accession number of the PFAM/NR hit disclosed in the fifth column. Column seven, “Score/Percent Identity”, provides a quality score or the percent identity, of the hit disclosed in columns five and six. Columns 8 and 9, “NT From” and “NT To” respectively, delineate the polynucleotides in “SEQ ID NO:X” that encode a polypeptide having a significant match to the PFAM/NR database as disclosed in the fifth and sixth columns. In specific embodiments polypeptides of the invention comprise, or alternatively consist of, an amino acid sequence encoded by a polynucleotide in SEQ ID NO:X as delineated in columns 8 and 9, or fragments or variants thereof.

[0017] Table 3 provides polynucleotide sequences that may be disclaimed according to certain embodiments of the invention. The first column provides a unique clone identifier, “Clone ID”, for a cDNA clone related to contig sequences disclosed in Table 1A. The second column provides the sequence identifier, “SEQ ID NO:X”, for contig sequences disclosed in Table 1A. The third column provides the unique contig identifier, “Contig ID:”, for contigs disclosed in Table 1A. The fourth column provides a unique integer ‘a’ where ‘a’ is any integer between 1 and the final nucleotide minus 15 of SEQ ID NO:X, and the fifth column provides a unique integer ‘b’ where ‘b’ is any integer between 15 and the final nucleotide of SEQ ID NO:X, where both a and b correspond to the positions of nucleotide residues shown in SEQ ID NO:X, and where b is greater than or equal to a +14. For each of the polynucleotides shown as SEQ ID NO:X, the uniquely defined integers can be substituted into the general formula of a-b, and used to describe polynucleotides which may be preferably excluded from the invention. In certain embodiments, preferably excluded from the invention are at least one, two, three, four, five, ten, or more of the polynucleotide sequence(s) having the accession number(s) disclosed in the sixth column of this Table (including for example, published sequence in connection with a particular BAC clone). In further embodiments, preferably excluded from the invention are the specific polynucleotide sequence(s) contained in the clones corresponding to at least one, two, three, four, five, ten, or more of the available material having the accession numbers identified in the sixth column of this Table (including for example, the actual sequence contained in an identified BAC clone).

[0018] Table 4 provides a key to the tissue/cell source identifier code disclosed in Table 1A, column 8. Column 1 provides the tissue/cell source identifier code disclosed in Table 1A, Column 8. Columns 2-5 provide a description of the tissue or cell source. Codes corresponding to diseased tissues are indicated in column 6 with the word “disease”. The use of the word “disease” in column 6 is non-limiting. The tissue or cell source may be specific (e.g. a neoplasm), or may be disease-associated (e.g., a tissue sample from a normal portion of a diseased organ). Furthermore, tissues and/or cells lacking the “disease” designation may still be derived from sources directly or indirectly involved in a disease state or disorder, and therefore may have a further utility in that disease state or disorder. In numerous cases where the tissue/cell source is a library, column 7 identifies the vector used to generate the library.

[0019] Table 5 provides a key to the OMIM reference identification numbers disclosed in Table 1A, column 10. OMIM reference identification numbers (Column 1) were derived from Online Mendelian Inheritance in Man (Online Mendelian Inheritance in Man, OMIM. McKusick-Nathans Institute for Genetic Medicine, Johns Hopkins University (Baltimore, Md.) and National Center for Biotechnology Information, National Library of Medicine, (Bethesda, Md.) 2000. World Wide Web URL: http://www.ncbi.nlm.nih.gov/omim/). Column 2 provides diseases associated with the cytologic band disclosed in Table 1A, column 9, as determined using the Morbid Map database.

[0020] Table 6 summarizes ATCC Deposits, Deposit dates, and ATCC designation numbers of deposits made with the ATCC in connection with the present application.

[0021] Table 7 shows the cDNA libraries sequenced, and ATCC designation numbers and vector information relating to these cDNA libraries.

[0022] Table 8 provides a physical characterization of clones encompassed by the invention. The first column provides the unique clone identifier, “Clone ID NO:Z”, for certain cDNA clones of the invention, as described in Table 1A. The second column provides the size of the cDNA insert contained in the corresponding cDNA clone.

[0023] Definitions

[0024] The following definitions are provided to facilitate understanding of certain terms used throughout this specification.

[0025] In the present invention, “isolated” refers to material removed from its original environment (e.g., the natural environment if it is naturally occurring), and thus is altered “by the hand of man” from its natural state. For example, an isolated polynucleotide could be part of a vector or a composition of matter, or could be contained within a cell, and still be “isolated” because that vector, composition of matter, or particular cell is not the original environment of the polynucleotide. The term “isolated” does not refer to genomic or cDNA libraries, whole cell total or mRNA preparations, genomic DNA preparations (including those separated by electrophoresis and transferred onto blots), sheared whole cell genomic DNA preparations or other compositions where the art demonstrates no distinguishing features of the polynucleotide/sequences of the present invention.

[0026] As used herein, a “polynucleotide” refers to a molecule having a nucleic acid sequence encoding SEQ ID NO:Y or a fragment or variant thereof; a nucleic acid sequence contained in SEQ ID NO:X (as described in column 3 of Table 1A) or the complement thereof; a cDNA sequence contained in Clone ID NO:Z (as described in column 2 of Table 1A and contained within a library deposited with the ATCC); a nucleotide sequence encoding the polypeptide encoded by a nucleotide sequence in SEQ ID NO:B as defined in column 6 of Table 1B or a fragment or variant thereof; or a nucleotide coding sequence in SEQ ID NO:B as defined in column 6 of Table 1B or the complement thereof. For example, the polynucleotide can contain the nucleotide sequence of the full length cDNA sequence, including the 5′ and 3′ untranslated sequences, the coding region, as well as fragments, epitopes, domains, and variants of the nucleic acid sequence. Moreover, as used herein, a “polypeptide” refers to a molecule having an amino acid sequence encoded by a polynucleotide of the invention as broadly defined (obviously excluding poly-Phenylalanine or poly-Lysine peptide sequences which result from translation of a polyA tail of a sequence corresponding to a cDNA).

[0027] In the present invention, “SEQ ID NO:X” was often generated by overlapping sequences contained in multiple clones (contig analysis). A representative clone containing all or most of the sequence for SEQ ID NO:X is deposited at Human Genome Sciences, Inc. (HGS) in a catalogued and archived library. As shown, for example, in column 2 of Table 1A, each clone is identified by a cDNA Clone ID (identifier generally referred to herein as Clone ID NO:Z). Each Clone ID is unique to an individual clone and the Clone ID is all the information needed to retrieve a given clone from the HGS library. Furthermore, certain clones disclosed in this application have been deposited with the ATCC on Oct. 5, 2000, having the ATCC designation numbers PTA 2574 and PTA 2575; and on Jan. 5, 2001, having the depositor reference numbers TS-1, TS-2, AC-1, and AC-2. In addition to the individual cDNA clone deposits, most of the cDNA libraries from which the clones were derived were deposited at the American Type Culture Collection (hereinafter “ATCC”). Table 7 provides a list of the deposited cDNA libraries. One can use the Clone ID NO:Z to determine the library source by reference to Tables 6 and 7. Table 7 lists the deposited cDNA libraries by name and links each library to an ATCC Deposit. Library names contain four characters, for example, “HTWE.” The name of a cDNA clone (Clone ID) isolated from that library begins with the same four characters, for example “HTWEP07”. As mentioned below, Table 1A correlates the Clone ID names with SEQ ID NO:X. Thus, starting with an SEQ ID NO:X, one can use Tables 1, 6 and 7 to determine the corresponding Clone ID, which library it came from and which ATCC deposit the library is contained in. Furthermore, it is possible to retrieve a given cDNA clone from the source library by techniques known in the art and described elsewhere herein. The ATCC is located at 10801 University Boulevard, Manassas, Va. 20110-2209, USA. The ATCC deposits were made pursuant to the terms of the Budapest Treaty on the international recognition of the deposit of microorganisms for the purposes of patent procedure.

[0028] In specific embodiments, the polynucleotides of the invention are at least 15, at least 30, at least 50, at least 100, at least 125, at least 500, or at least 1000 continuous nucleotides but are less than or equal to 300 kb, 200 kb, 100 kb, 50 kb, 15 kb, 10 kb, 7.5 kb, 5 kb, 2.5 kb, 2.0 kb, or 1 kb, in length. In a further embodiment, polynucleotides of the invention comprise a portion of the coding sequences, as disclosed herein, but do not comprise all or a portion of any intron. In another embodiment, the polynucleotides comprising coding sequences do not contain coding sequences of a genomic flanking gene (i.e., 5′ or 3′ to the gene of interest in the genome). In other embodiments, the polynucleotides of the invention do not contain the coding sequence of more than 1000, 500, 250, 100, 50, 25, 20, 15, 10, 5, 4, 3, 2, or 1 genomic flanking gene(s).

[0029] A “polynucleotide” of the present invention also includes those polynucleotides capable of hybridizing, under stringent hybridization conditions, to sequences contained in SEQ ID NO:X, or the complement thereof (e.g., the complement of any one, two, three, four, or more of the polynucleotide fragments described herein), the polynucleotide sequence delineated in columns 8 and 9 of Table 2 or the complement thereof, and/or cDNA sequences contained in Clone ID NO:Z (e.g., the complement of any one, two, three, four, or more of the polynucleotide fragments, or the cDNA clone within the pool of cDNA clones deposited with the ATCC, described herein), and/or the polynucleotide sequence delineated in column 6 of Table 1B or the complement thereof. “Stringent hybridization conditions” refers to an overnight incubation at 42 degree C. in a solution comprising 50% formamide, 5×SSC (750 mM NaCl, 75 mM trisodium citrate), 50 mM sodium phosphate (pH 7.6), 5× Denhardt's solution, 10% dextran sulfate, and 20 μg/ml denatured, sheared salmon sperm DNA, followed by washing the filters in 0.1×SSC at about 65 degree C.

[0030] Also contemplated are nucleic acid molecules that hybridize to the polynucleotides of the present invention at lower stringency hybridization conditions. Changes in the stringency of hybridization and signal detection are primarily accomplished through the manipulation of formamide concentration (lower percentages of formamide result in lowered stringency); salt conditions, or temperature. For example, lower stringency conditions include an overnight incubation at 37 degree C. in a solution comprising 6×SSPE (20×SSPE =3M NaCl; 0.2M NaH₂PO₄; 0.02M EDTA, pH 7.4), 0.5% SDS, 30% formamide, 100 ug/ml salmon sperm blocking DNA; followed by washes at 50 degree C. with 1×SSPE, 0.1% SDS. In addition, to achieve even lower stringency, washes performed following stringent hybridization can be done at higher salt concentrations (e.g. 5×SSC).

[0031] Note that variations in the above conditions may be accomplished through the inclusion and/or substitution of alternate blocking reagents used to suppress background in hybridization experiments. Typical blocking reagents include Denhardt's reagent, BLOTTO, heparin, denatured salmon sperm DNA, and commercially available proprietary formulations. The inclusion of specific blocking reagents may require modification of the hybridization conditions described above, due to problems with compatibility.

[0032] Of course, a polynucleotide which hybridizes only to polyA+ sequences (such as any 3′ terminal polyA+ tract of a cDNA shown in the sequence listing), or to a complementary stretch of T (or U) residues, would not be included in the definition of “polynucleotide,” since such a polynucleotide would hybridize to any nucleic acid molecule containing a poly (A) stretch or the complement thereof (e.g., practically any double-stranded cDNA clone generated using oligo dT as a primer).

[0033] The polynucleotide of the present invention can be composed of any polyribonucleotide or polydeoxribonucleotide, which may be unmodified RNA or DNA or modified RNA or DNA. For example, polynucleotides can be composed of single- and double-stranded DNA, DNA that is a mixture of single- and double-stranded regions, single- and double-stranded RNA, and RNA that is mixture of single- and double-stranded regions, hybrid molecules comprising DNA and RNA that may be single-stranded or, more typically, double-stranded or a mixture of single- and double-stranded regions. In addition, the polynucleotide can be composed of triple-stranded regions comprising RNA or DNA or both RNA and DNA. A polynucleotide may also contain one or more modified bases or DNA or RNA backbones modified for stability or for other reasons. “Modified” bases include, for example, tritylated bases and unusual bases such as inosine. A variety of modifications can be made to DNA and RNA; thus, “polynucleotide” embraces chemically, enzymatically, or metabolically modified forms.

[0034] The polypeptide of the present invention can be composed of amino acids joined to each other by peptide bonds or modified peptide bonds, i.e., peptide isosteres, and may contain amino acids other than the 20 gene-encoded amino acids. The polypeptides may be modified by either natural processes, such as posttranslational processing, or by chemical modification techniques which are well known in the art. Such modifications are well described in basic texts and in more detailed monographs, as well as in a voluminous research literature. Modifications can occur anywhere in a polypeptide, including the peptide backbone, the amino acid side-chains and the amino or carboxyl termini. It will be appreciated that the same type of modification may be present in the same or varying degrees at several sites in a given polypeptide. Also, a given polypeptide may contain many types of modifications. Polypeptides may be branched, for example, as a result of ubiquitination, and they may be cyclic, with or without branching. Cyclic, branched, and branched cyclic polypeptides may result from posttranslation natural processes or may be made by synthetic methods. Modifications include acetylation, acylation, ADP-ribosylation, amidation, covalent attachment of flavin, covalent attachment of a heme moiety, covalent attachment of a nucleotide or nucleotide derivative, covalent attachment of a lipid or lipid derivative, covalent attachment of phosphotidylinositol, cross-linking, cyclization, disulfide bond formation, demethylation, formation of covalent cross-links, formation of cysteine, formation of pyroglutamate, formylation, gamma-carboxylation, glycosylation, GPI anchor formation, hydroxylation, iodination, methylation, myristoylation, oxidation, pegylation, proteolytic processing, phosphorylation, prenylation, racemization, selenoylation, sulfation, transfer-RNA mediated addition of amino acids to proteins such as arginylation, and ubiquitination. (See, for instance, PROTEINS—STRUCTURE AND MOLECULAR PROPERTIES, 2nd Ed., T. E. Creighton, W. H. Freeman and Company, New York (1993); POSTTRANSLATIONAL COVALENT MODIFICATION OF PROTEINS, B. C. Johnson, Ed., Academic Press, New York, pgs. 1-12 (1983); Seifter et al., Meth. Enzymol. 182:626-646 (1990); Rattan et al., Ann. N.Y. Acad. Sci. 663:48-62 (1992)).

[0035] “SEQ ID NO:X” refers to a polynucleotide sequence described, for example, in Tables 1A or 2, while “SEQ ID NO:Y” refers to a polypeptide sequence described in column 6 of Table 1A. SEQ ID NO:X is identified by an integer specified in column 4 of Table 1A. The polypeptide sequence SEQ ID NO:Y is a translated open reading frame (ORF) encoded by polynucleotide SEQ ID NO:X. “Clone ID NO:Z” refers to a cDNA clone described in column 2 of Table 1A.

[0036] “A polypeptide having functional activity” refers to a polypeptide capable of displaying one or more known functional activities associated with a full-length (complete) protein. Such functional activities include, but are not limited to, biological activity, antigenicity [ability to bind (or compete with a polypeptide for binding) to an anti-polypeptide antibody], immunogenicity (ability to generate antibody which binds to a specific polypeptide of the invention), ability to form multimers with polypeptides of the invention, and ability to bind to a receptor or ligand for a polypeptide.

[0037] The polypeptides of the invention can be assayed for functional activity (e.g. biological activity) using or routinely modifying assays known in the art, as well as assays described herein. Specifically, one of skill in the art may routinely assay transcription factor polypeptides (including fragments and variants) of the invention for activity using assays as described in Examples 67, 68, 69, and 70.

[0038] “A polypeptide having biological activity” refers to a polypeptide exhibiting activitty similar to, but not necessarily identical to, an activity of a polypeptide of the present invention, including mature forms, as measured in a particular biological assay, with or without dose dependency. In the case where dose dependency does exist, it need not be identical to that of the polypeptide, but rather substantially similar to the dose-dependence in a given activity as compared to the polypeptide of the present invention (i.e., the candidate polypeptide will exhibit greater activity or not more than about 25-fold less and, preferably, not more than about tenfold less activity, and most preferably, not more than about three-fold less activity relative to the polypeptide of the present invention).

[0039] Table 1A summarizes some of the polynucleotides encompassed by the invention (including contig sequences (SEQ ID NO:X) and clones (Clone ID NO:Z) and further summarizes certain characteristics of these polynucleotides and the polypeptides encoded thereby.

TABLE 1A

| | | | | | AA | | Tissue Distribution | | |
|---|---|---|---|---|---|---|---|---|---|
| | | | | | SEQ | | Library code: count | | OMIM |
| Gene | Clone ID | Contig | SEQ ID | ORF | ID | | (see Table IV for | Cytologic | Disease |
| No: | NO: Z | ID: | NO: X | (From-To) | NO: Y | Predicted Epitopes | Library Codes) | Band | Reference(s): |
| 1 | H2CBN05 | 1227632 | 11 | 590-1132 | 798 | Asp-10 to Asn-15. | AR061: 2, AR089: 2 | | |
| | | | | | | | H0457: 4, H0616: 3, | | |
| | | | | | | | L0665: 3, S0474: 2, | | |
| | | | | | | | L0794: 2, L0659: 2, | | |
| | | | | | | | L0779: 2, H0423: 2, | | |
| | | | | | | | H0171: 1, H0685: 1, | | |
| | | | | | | | H0675: 1, H0013: 1, | | |
| | | | | | | | L0105: 1, H0581: 1, | | |
| | | | | | | | T0110: 1, S0214: 1, | | |
| | | | | | | | H0622: 1, H0561: 1, | | |
| | | | | | | | S0002: 1, H0529: 1, | | |
| | | | | | | | L0762: 1, L0667: 1, | | |
| | | | | | | | L0766: 1, L0805: 1, | | |
| | | | | | | | L0655: 1, L0658: 1, | | |
| | | | | | | | L0790: 1, H0702: 1, | | |
| | | | | | | | H0468: 1, H0521: 1, | | |
| | | | | | | | L0748: 1, L0777: 1, | | |
| | | | | | | | L0758: 1 and L0366: 1. | | |
| | | 907901 | 472 | 173-664 | 1259 | Pro-1 to Lys-8, | | | |
| | | | | | | Phe-49 to Pro-67, | | | |
| | | | | | | Leu-88 to Trp-100. | | | |
| 2 | HA5BC03 | 1152324 | 12 | 1-672 | 799 | Ala-72 to Gly-85, | AR089: 0, AR061: 0 | | |
| | | | | | | Gly-97 to Asp-110, | H0617: 12, L0794: 6, | | |
| | | | | | | Trp-133 to Phe-140, | L0789: 5, L0759: 5, | | |
| | | | | | | Pro-165 to Leu-174, | L0770: 4, L0805: 4, | | |
| | | | | | | Arg-216 to Asp-224. | L0664: 4, L0665: 4, | | |
| | | | | | | | H0519: 4, H0333: 3, | | |
| | | | | | | | S0336: 3, L0769: 3, | | |
| | | | | | | | L0758: 3, H0484: 2, | | |
| | | | | | | | H0599: 2, H0014: 2, | | |
| | | | | | | | L0764: 2, L0648: 2, | | |
| | | | | | | | L0804: 2, L0653: 2, | | |
| | | | | | | | L0748: 2, L0439: 2, | | |
| | | | | | | | L0749: 2, L0750: 2, | | |
| | | | | | | | L0777: 2, L0755: 2, | | |
| | | | | | | | H0556: 1, H0686: 1, | | |
| | | | | | | | H0685: 1, H0664: 1, | | |
| | | | | | | | H0393: 1, H0550: 1, | | |
| | | | | | | | S6016: 1, H0392: 1, | | |
| | | | | | | | L0622: 1, S0280: 1, | | |
| | | | | | | | L0021: 1, H0253: 1, | | |
| | | | | | | | S0010: 1, H0434: 1, | | |
| | | | | | | | H0263: 1, H0544: 1, | | |
| | | | | | | | H0545: 1, H0009: 1, | | |
| | | | | | | | T0010: 1, H0428: 1, | | |
| | | | | | | | H0424: 1, H0031: 1, | | |
| | | | | | | | H0181: 1, H0708: 1, | | |
| | | | | | | | H0090: 1, H0038: 1, | | |
| | | | | | | | H0063: 1, H0087: 1, | | |
| | | | | | | | T0041: 1, H0494: 1, | | |
| | | | | | | | S0306: 1, H0633: 1, | | |
| | | | | | | | S0344: 1, S0422: 1, | | |
| | | | | | | | H0529: 1, L0371: 1, | | |
| | | | | | | | L0772: 1, L0773: 1, | | |
| | | | | | | | L0768: 1, L0766: 1, | | |
| | | | | | | | L0803: 1, L0375: 1, | | |
| | | | | | | | L0651: 1, L0776: 1, | | |
| | | | | | | | L0657: 1, L0659: 1, | | |
| | | | | | | | L0783: 1, L0809: 1, | | |
| | | | | | | | L0791: 1, L0666: 1, | | |
| | | | | | | | S0374: 1, L0438: 1, | | |
| | | | | | | | H0547: 1, H0684: 1, | | |
| | | | | | | | H0658: 1, H0670: 1, | | |
| | | | | | | | S3012: 1, L0744: 1, | | |
| | | | | | | | L0751: 1, L0747: 1, | | |
| | | | | | | | L0779: 1, L0780: 1, | | |
| | | | | | | | L0595: 1, S0194: 1 and | | |
| | | | | | | | S0396: 1. | | |
| | | 907743 | 473 | 201-815 | 1260 | Pro-16 to Gly-21, | | | |
| | | | | | | Ala-53 to Gly-66. | | | |
| 3 | HADCD02 | 1154783 | 13 | 303-929 | 800 | Pro-69 to Asn-78, | AR061: 0, AR-089: 0 | | |
| | | | | | | Glu-93 to Glu-106, | L0741: 14, L0803: 9, | | |
| | | | | | | Leu-143 to Leu-150, | L0766: 7, L0769: 5, | | |
| | | | | | | Pro-156 to Ser-167. | L0761: 5, L0794: 5, | | |
| | | | | | | | L0771: 3, L0774: 3, | | |
| | | | | | | | L0742: 3, L0750: 3, | | |
| | | | | | | | L0779: 3, L0753: 3, | | |
| | | | | | | | L0759: 3, H0427: 2, | | |
| | | | | | | | L0763: 2, L0666: 2, | | |
| | | | | | | | L0740: 2, L0731: 2, | | |
| | | | | | | | L0757: 2, H0484: 1, | | |
| | | | | | | | H0009: 1, L0770: 1, | | |
| | | | | | | | L0638: 1, L0662: 1, | | |
| | | | | | | | L0775: 1, L0806: 1, | | |
| | | | | | | | L0776: 1, H0436: 1, | | |
| | | | | | | | L0745: 1, L0749: 1, | | |
| | | | | | | | L0777: 1 and L0755: 1. | | |
| | | 919843 | 474 | 276-1151 | 1261 | | | | |
| 4 | HAHCK43 | 1227734 | 14 | 3-1178 | 801 | Arg-18 to Gly-23, | AR061: 125, AR089: | | |
| | | | | | | Pro-28 to Pro-34, | 68 | | |
| | | | | | | Arg-70 to Val-75, | L0751: 7, L0748: 5, | | |
| | | | | | | Arg-145 to Ser-154, | L0438: 4, H0556: 3, | | |
| | | | | | | Ser-215 to Glu-227. | H0024: 3, S0002: 3, | | |
| | | | | | | | L0439: 3, L0777: 3, | | |
| | | | | | | | L0603: 3, H0052: 2, | | |
| | | | | | | | H0286: 2, H0551: 2, | | |
| | | | | | | | L0747: 2, L0731: 2, | | |
| | | | | | | | L0601: 2, H0543: 2, | | |
| | | | | | | | H0624: 1, H0170: 1, | | |
| | | | | | | | H0265: 1, H0685: 1, | | |
| | | | | | | | H0657: 1, H0662: 1, | | |
| | | | | | | | H0458: 1, S0356: 1, | | |
| | | | | | | | S0358: 1, S0360: 1, | | |
| | | | | | | | S0046: 1, H0619: 1, | | |
| | | | | | | | H0645: 1, S0222: 1, | | |
| | | | | | | | H0392: 1, H0592: 1, | | |
| | | | | | | | H0497: 1, H0333: 1, | | |
| | | | | | | | H0069: 1, H0635: 1, | | |
| | | | | | | | H0599: 1, H0086: 1, | | |
| | | | | | | | H0009: 1, H0012: 1, | | |
| | | | | | | | H0620: 1, S0050: 1, | | |
| | | | | | | | H0373: 1, L0163: 1, | | |
| | | | | | | | H0266: 1, H0039: 1, | | |
| | | | | | | | S0036: 1, H0264: 1, | | |
| | | | | | | | H0280: 1, L0475: 1, | | |
| | | | | | | | L0369: 1, L0640: 1, | | |
| | | | | | | | L0772: 1, L0645: 1, | | |
| | | | | | | | L0764: 1, L0773: 1, | | |
| | | | | | | | L0768: 1, L0775: 1, | | |
| | | | | | | | L0378: 1, L0806: 1, | | |
| | | | | | | | L0776: 1, L0659: 1, | | |
| | | | | | | | L0382: 1, L0666: 1, | | |
| | | | | | | | L0665: 1, H0702: 1, | | |
| | | | | | | | L0565: 1, H0520: 1, | | |
| | | | | | | | H0658: 1, H0670: 1, | | |
| | | | | | | | H0672: 1, S0328: 1, | | |
| | | | | | | | H0518: 1, H0521: 1, | | |
| | | | | | | | S0390: 1, S0037: 1, | | |
| | | | | | | | S0027: 1, L0749: 1, | | |
| | | | | | | | L0750: 1, L0779: 1, | | |
| | | | | | | | L0780: 1, L0752: 1, | | |
| | | | | | | | H0445: 1, H0707: 1 and | | |
| | | | | | | | S0446: 1. | | |
| | | 974679 | 475 | 1-522 | 1262 | Lys-2 to Gln-9, | | | |
| | | | | | | Gln-33 to Gly-38, | | | |
| | | | | | | Leu-52 to Ser-57, | | | |
| | | | | | | Leu-86 to Leu-92, | | | |
| | | | | | | Lys-95 to Gln-102. | | | |
| 5 | HAIBU93 | 121849 | 15 | 1-1419 | 802 | Pro-13 to Pro-18, | AR089: 8, AR061: 5 | | |
| | | | | | | Pro-24 to Leu-32, | L0758: 12, H0556: 8, | | |
| | | | | | | Glu-51 to His-59, | L0748: 7, H0599: 6, | | |
| | | | | | | Leu-83 to Trp-91, | L0769: 6, L0439: 6, | | |
| | | | | | | Thr-113 to Gln-120, | L0747: 6, S0360: 5, | | |
| | | | | | | Pro-133 to Asp-138, | H0271: 5, L0770: 4, | | |
| | | | | | | Arg-141 to Gln-146, | L-766: 4, L0775: 4, | | |
| | | | | | | Arg-151 to Ser-150, | H0265: 3, S0132: 3, | | |
| | | | | | | Tyr-160 to Cys-175, | S0222: 3, H0620: 3, | | |
| | | | | | | Asn-183 to Asn-188, | H0038: 3, H0412: 3, | | |
| | | | | | | Trp-221 to Lys-231, | L0659: 3, L0438: 3, | | |
| | | | | | | Ser-271 to Arg-283, | L0759: 3, H0663: 2, | | |
| | | | | | | Phe-345 to Gly-350, | H0664: 2, S0420: 2, | | |
| | | | | | | Ser-381 to Asp-386, | S0376: 2, H0597: 2, | | |
| | | | | | | Gly-417 to Ser-422, | L0471: 2, H0012: 2, | | |
| | | | | | | Tyr-462 to Arg-467. | S0388: 2, H0416: 2, | | |
| | | | | | | | H0617: 2, H0068: 2, | | |
| | | | | | | | H0646: 2, L0646: 2, | | |
| | | | | | | | L0662: 2, L0776: 2, | | |
| | | | | | | | H0144: 2, L0352: 2, | | |
| | | | | | | | H0659: 2, H0518: 2, | | |
| | | | | | | | S0404: 2, H0555: 2, | | |
| | | | | | | | L0744: 2, L0779: 2, | | |
| | | | | | | | L0777: 2, L0757: 2, | | |
| | | | | | | | S0434: 2, L0596: 2, | | |
| | | | | | | | H0542: 2, H0543: 2, | | |
| | | | | | | | S0134: 1, S0356: 1, | | |
| | | | | | | | S0358: 1, S0046: 1, | | |
| | | | | | | | L0717: 1, H0351: 1, | | |
| | | | | | | | H0369: 1, H0392: 1, | | |
| | | | | | | | L0623: 1, H0486: 1, | | |
| | | | | | | | S0280: 1, L0021: 1, | | |
| | | | | | | | T0048: 1, H0318: 1, | | |
| | | | | | | | S0049: 1, H0052: 1, | | |
| | | | | | | | H0194: 1, H0231: 1, | | |
| | | | | | | | L0738: 1, H0327: 1, | | |
| | | | | | | | H0178: 1, H0024: 1, | | |
| | | | | | | | H0320: 1, H0107: 1, | | |
| | | | | | | | S6028: 1, H0266: 1, | | |
| | | | | | | | H0030: 1, H0031: 1, | | |
| | | | | | | | H0644: 1, H0181: 1, | | |
| | | | | | | | H0182: 1, H0606: 1, | | |
| | | | | | | | H0673: 1, L0455: 1, | | |
| | | | | | | | H0135: 1, H0591: 1, | | |
| | | | | | | | H0634: 1, H0616: 1, | | |
| | | | | | | | H0087: 1, S0038: 1, | | |
| | | | | | | | L0351: 1, H0494: 1, | | |
| | | | | | | | H0561: 1, S0142: 1, | | |
| | | | | | | | S0344: 1, S0002: 1, | | |
| | | | | | | | L0369: 1, L0640: 1, | | |
| | | | | | | | L0371: 1, L0761: 1, | | |
| | | | | | | | L0667: 1, L0372: 1, | | |
| | | | | | | | L0764: 1, L0648: 1, | | |
| | | | | | | | L0768: 1, L0794: 1, | | |
| | | | | | | | L0774: 1, L0655: 1, | | |
| | | | | | | | L0656: 1, L0517: 1, | | |
| | | | | | | | L0788: 1, L0666: 1, | | |
| | | | | | | | L0664: 1, S0428: 1, | | |
| | | | | | | | S0374: 1, T0068: 1, | | |
| | | | | | | | H0519: 1, H0682: 1, | | |
| | | | | | | | H0684: 1, H0658: 1, | | |
| | | | | | | | H0359: 1, S0380: 1, | | |
| | | | | | | | S0152: 1, H0521: 1, | | |
| | | | | | | | L0751: 1, L0745: 1, | | |
| | | | | | | | L0749: 1, L0756: 1, | | |
| | | | | | | | L0755: 1, L0731: 1, | | |
| | | | | | | | H0445: 1, L0599: 1, | | |
| | | | | | | | H0423: 1, H0422: 1, | | |
| | | | | | | | H0677: 1 and H0008: 1. | | |
| | | 907830 | 476 | 1-1851 | 1263 | Pro-13 to Pro-18, | | | |
| | | | | | | Pro-24 to Leu-32, | | | |
| | | | | | | Glu-51 to His-59, | | | |
| | | | | | | Leu-83 to Trp-91, | | | |
| | | | | | | Thr-113 to Gln-120, | | | |
| | | | | | | Pro-133 to Asp-138, | | | |
| | | | | | | Arg-141 to Gln-146, | | | |
| | | | | | | Arg-151 to Ser-156, | | | |
| | | | | | | Tyr-160 to Cys-175, | | | |
| | | | | | | Asn-183 to Asn-188, | | | |
| | | | | | | Trp-221 to Lys-231, | | | |
| | | | | | | Ser-271 to Arg-283, | | | |
| | | | | | | Phe-345 to Gly-350, | | | |
| | | | | | | Ser-381 to Asp-386, | | | |
| | | | | | | Gly-417 to Ser-422, | | | |
| | | | | | | Tyr-462 to Asn-471, | | | |
| | | | | | | Glu-505 to Leu-553, | | | |
| | | | | | | Ser-555 to Asp-561, | | | |
| | | | | | | Thr-566 to His-576, | | | |
| | | | | | | Ser-582 to Gln-587. | | | |
| 6 | HAJAT23 | 1214870 | 16 | 3-374 | 803 | | AR089: 7, AR061: 2, | | |
| | | | | | | | L0803: 4, L0777: 4, | | |
| | | | | | | | L0662: 3, H0521: 3, | | |
| | | | | | | | S0360: 1, H0561: 2, | | |
| | | | | | | | L0809: 2, L0779: 2, | | |
| | | | | | | | L0759: 2, H0170: 1, | | |
| | | | | | | | T0002: 1, H0580: 1, | | |
| | | | | | | | H0545: 1, H0375: 1, | | |
| | | | | | | | H0428: 1, H0040: 1, | | |
| | | | | | | | H0413: 1, H0633: 1, | | |
| | | | | | | | L0769: 1, L0773: 1, | | |
| | | | | | | | L0766: 1, L0650: 1, | | |
| | | | | | | | L0806: 1, L0805: 1, | | |
| | | | | | | | L0659: 1, L0666: 1, | | |
| | | | | | | | H0519: 1, H0690: 1, | | |
| | | | | | | | H0555: 1, L0755: 1 and | | |
| | | | | | | | L0592: 1. | | |
| | | 907954 | 477 | 2-373 | 1264 | Cys-1 to Lys6, | | | |
| | | | | | | His-38 to Ser-43, | | | |
| | | | | | | Glu-68 to Glu-92, | | | |
| | | | | | | Arg-97 to Glu-109. | | | |
| 7 | HAMFW25 | 1217025 | 17 | 2-1351 | 804 | Glu-26 to Ser-37, | AR089: 10, AR061: 2 | | |
| | | | | | | Asp-39 to Ser-45, | H0695: 47, H0580: 6, | | |
| | | | | | | Leu-76 to Asn-82, | H0052: 3, S0218: 2, | | |
| | | | | | | Gln-118 to Ile-131, | S0356: 2, S0036: 2, | | |
| | | | | | | Tyr-172 to His-177, | H0543: 2, H0265: 1, | | |
| | | | | | | Asp-188 to Gln-196, | H0556: 1, S0134: 1, | | |
| | | | | | | Lys-202 to Asn-211, | S0358: 1, H0329: 1, | | |
| | | | | | | Ser-223 to Gln-233, | S6016: 1, H0036: 1, | | |
| | | | | | | Gln-326 to Gly-338, | H0545: 1, H0012: 1, | | |
| | | | | | | Glu-342 to Asn-347, | H0201: 1, T0010: 1, | | |
| | | | | | | Gly-354 to Glu-359, | H0328: 1, H0124: 1, | | |
| | | | | | | Ile-364 to Arg-377, | H0087: 1, L0351: 1, | | |
| | | | | | | Cys-386 to Asp-391, | H0650: 1, L0770: 1, | | |
| | | | | | | Ser-422 to Ser-431, | H0547: 1, L0485: 1 and | | |
| | | | | | | Ser-434 to Thr-440. | H0542: 1. | | |
| | | 888176 | 478 | 104-1072 | 1265 | Arg-1 to Ser-7, | | | |
| | | | | | | Leu-38 to Asn-44, | | | |
| | | | | | | Gln-80 to Ile-93, | | | |
| | | | | | | Tyr-134 to His-139, | | | |
| | | | | | | Asp-150 to Gln-158, | | | |
| | | | | | | Lys-164 to Asn-173, | | | |
| | | | | | | Ser-185 to Gln-195. | | | |
| 8 | HBGOG26 | 1152234 | 18 | 741-1 | 805 | Gln-6 to Trp-18, | AR061: 5, AR089: 3 | | |
| | | | | | | Gly-90 to Gln-99, | H0617: 2, L0805: 2, | | |
| | | | | | | Ala-101 to Gly-111, | S6024: 1, H0484: 1, | | |
| | | | | | | Arg-177 to Pro-189, | H0549: 1, S0049: 1, | | |
| | | | | | | Pro-216 to Gly-222, | H0051: 1, L0769: 1, | | |
| | | | | | | Phe-227 to Val-232. | L0667: 1, L0364: 1, | | |
| | | | | | | | L0776: 1, L0788: 1, | | |
| | | | | | | | S0374: 1, L0748: 1, | | |
| | | | | | | | L0749: 1 and L0752: 1. | | |
| | | 907663 | 479 | 1-675 | 1266 | His-1 to Pro-6, | | | |
| | | | | | | Lys-27 to Glu-35. | | | |
| 9 | HBGOK19 | 1152235 | 19 | 614-3 | 806 | Gln-9 to His-16, | AR089: 0, AR061: 0 | | |
| | | | | | | Arg-94 to Gln-105, | H0617: 1, H0413: 1 | | |
| | | | | | | Ser-108 to Arg-113, | and H0520: 1. | | |
| | | | | | | Gly-129 to Glu-137. | | | |
| | | 813012 | 480 | 2-496 | 1267 | Leu-12 to Tyr-21, | | | |
| | | | | | | Gly-50 to Thr-55, | | | |
| | | | | | | Ser-66 to Lys-73, | | | |
| | | | | | | Arg-75 to Ala-86, | | | |
| | | | | | | Pro-97 to Glu-103. | | | |
| 10 | HBING74 | 1228275 | 20 | 466-1518 | 807 | Ala-1 to Pro-7, | AR089: 4, AR061: 1 | | |
| | | | | | | Arg-24 to Val-30, | H0618: 7, H0424: 6, | | |
| | | | | | | Ala-34 to Asp-39, | L0758: 6, H0556: 5, | | |
| | | | | | | Ala-70 to Gln-76, | L0777: 5, H0370: 2, | | |
| | | | | | | Leu-205 to Tyr-210, | H0013: 2, H0253: 2, | | |
| | | | | | | Arg-300 to Pro-309, | H0038: 2, H0616: 2, | | |
| | | | | | | Pro-338 to Gly-346. | L0776: 2, L0666: 2, | | |
| | | | | | | | L0665: 2, S0126: 2, | | |
| | | | | | | | H0672: 2, L0602: 2, | | |
| | | | | | | | L0439: 2, L0752: 2, | | |
| | | | | | | | L0731: 2, L0595: 2, | | |
| | | | | | | | T0002: 1, S0134: 1, | | |
| | | | | | | | H0657: 1, H0661: 1, | | |
| | | | | | | | S0356: 1, S0132: 1, | | |
| | | | | | | | H0549: 1, H0586: 1, | | |
| | | | | | | | H0587: 1, H0574: 1, | | |
| | | | | | | | H0046: 1, H0105: 1, | | |
| | | | | | | | H0373: 1, H0688: 1, | | |
| | | | | | | | H0553: 1, H0673: 1, | | |
| | | | | | | | L0435: 1, H0561: 1, | | |
| | | | | | | | H0509: 1, H0131: 1, | | |
| | | | | | | | L0769: 1, L0639: 1, | | |
| | | | | | | | L0372: 1, L0800: 1, | | |
| | | | | | | | L0641: 1, L0773: 1, | | |
| | | | | | | | L0648: 1, L0768: 1, | | |
| | | | | | | | L0386: 1, L0803: 1, | | |
| | | | | | | | L0775: 1, L0523: 1, | | |
| | | | | | | | L0805: 1, L0655: 1, | | |
| | | | | | | | L0659: 1, L0664: 1, | | |
| | | | | | | | L0438: 1, H0547: 1, | | |
| | | | | | | | H0519: 1, H0593: 1, | | |
| | | | | | | | H0660: 1, H0539: 1, | | |
| | | | | | | | H0696: 1, L0754: 1, | | |
| | | | | | | | L0749: 1, L0599: 1, | | |
| | | | | | | | S0026: 1, H0665: 1, | | |
| | | | | | | | S0192: 1, H0452: 1, | | |
| | | | | | | | H0543: 1, H0542: 1, | | |
| | | | | | | | H0677: 1. | | |
| | | 966489 | 481 | 383-1504 | 1268 | Arg-47 to Val-53, | | | |
| | | | | | | Ala-57 to Asp-62, | | | |
| | | | | | | Ala-93 to Gln-99, | | | |
| | | | | | | Leu-228 to Tyr-233, | | | |
| | | | | | | Arg-323 to Pro-332, | | | |
| | | | | | | Pro-361 to Gly-369. | | | |
| 11 | HBODN93 | 1162537 | 21 | 80-1177 | 808 | His-12 to Lys-17, | AR089: 5, AR061: 3 | | |
| | | | | | | Gln-22 to Glu-31, | S0364: 4, S0366: 2, | | |
| | | | | | | Cys-52 to Ala-61, | H0599: 3, H0373: 2, | | |
| | | | | | | Tyr-71 to Ser-77, | L0622: 1, L0623: 1, | | |
| | | | | | | Ser-82 to Arg-87, | H0050: 1, L0163: 1, | | |
| | | | | | | Tyr-118 to Ser-131, | L0790: 1 and L0759: 1. | | |
| | | | | | | Glu-137 to Asn-144, | | | |
| | | | | | | Gly-178 to Leu-183, | | | |
| | | | | | | Leu-204 to His-216, | | | |
| | | | | | | Val-218 to Asp-227, | | | |
| | | | | | | As-234 to Leu-240, | | | |
| | | | | | | Ile-244 to Lys-251, | | | |
| | | | | | | Tyr-262 to Thr-270, | | | |
| | | | | | | Gly-309 to Gly-314, | | | |
| | | | | | | Gly-338 to Glu-345, | | | |
| | | | | | | Glu-348 to Gln-366. | | | |
| | | 907780 | 482 | 81-446 | 1269 | His-12 to Lys-17, | | | |
| | | | | | | Gln-22 to Glu-31, | | | |
| | | | | | | Cys-52 to Ala-61, | | | |
| | | | | | | Tyr-71 to Ser-77, | | | |
| | | | | | | Ser-82 to Arg-87. | | | |
| 12 | HDPYD63 | 1224874 | 22 | 34-1311 | 809 | Pro-2 to Trp-18, | AR089: 2, AR061: 1, | | |
| | | | | | | Arg-36 to Cys-48, | H0521: 2, H0638: 1, | | |
| | | | | | | Arg-110 to Gly-120, | H0580: 1, H0618: 1, | | |
| | | | | | | Pro-145 to Ala-150, | H0553: 1, H0268: 1, | | |
| | | | | | | Leu-155 to Asp-175, | H0560: 1, L0763: 1, | | |
| | | | | | | Gly-203 to Glu-210, | H0519: 1, S0152: 1, | | |
| | | | | | | Pro-277 to Gln-287, | H0555: 1, L0595: 1 and | | |
| | | | | | | Ala-291 to Thr-296, | H0665: 1. | | |
| | | | | | | Pro-302 to Ser-315, | | | |
| | | | | | | Val-324 to Ser-332, | | | |
| | | | | | | Cys-341 to Gln-350, | | | |
| | | | | | | Ala-356 to Gly-362, | | | |
| | | | | | | Arg-402 to Val-413. | | | |
| | | 908036 | 483 | 3-692 | 1270 | | | | |
| 13 | HDQHZ11 | 1199932 | 23 | 245-1417 | 810 | Ser-2 to Asn-7, | AR089: 1, AR061: 0 | | |
| | | | | | | Pro-48 to Ala-53, | L0803: 9, L0439: 4, | | |
| | | | | | | Ser-130 to Glu-135, | L0777: 4, L0755: 4, | | |
| | | | | | | Tyr-140 to Trp-146, | L0555: 3, H0052: 3, | | |
| | | | | | | Asp-150 to Leu-157, | H0615: 3, L0774: 3, | | |
| | | | | | | Ser-162 to The-168, | L0438: 3, H0521: 3, | | |
| | | | | | | Arg-188 to Lys-199, | L0752: 3, L0415: 2, | | |
| | | | | | | Ala-265 to Ala-271, | L0157: 2, L0641: 2, | | |
| | | | | | | Ser-285 to Gly-308, | L0565: 2, L0478: 2, | | |
| | | | | | | Thr-315 to Glu-329, | H0170: 1, S0114: 1, | | |
| | | | | | | Ala-350 to Ser-366, | H0650: 1, H0341: 1, | | |
| | | | | | | Arg-378 to Gly-384. | S0001: 1, H0580: 1, | | |
| | | | | | | | H0329: 1, L0717: 1, | | |
| | | | | | | | H0587: 1, H0574: 1, | | |
| | | | | | | | H0486: 1, T0082: 1, | | |
| | | | | | | | S0346: 1, S0474: 1, | | |
| | | | | | | | H0581: 1, H0196: 1, | | |
| | | | | | | | H0050: 1, L0471: 1, | | |
| | | | | | | | S0388: 1, H0328: 1, | | |
| | | | | | | | H0644: 1, S0366: 1, | | |
| | | | | | | | H0163: 1, H0591: 1, | | |
| | | | | | | | H0038: 1, H0040: 1, | | |
| | | | | | | | H0634: 1, H0623: 1, | | |
| | | | | | | | S0144: 1, L0643: 1, | | |
| | | | | | | | L0648: 1, L0662: 1, | | |
| | | | | | | | L0794: 1, L0387: 1, | | |
| | | | | | | | L0766: 1, L0805: 1, | | |
| | | | | | | | L0634: 1, L0659: 1, | | |
| | | | | | | | L0791: 1, L0666: 1, | | |
| | | | | | | | L0663: 1, H0144: 1, | | |
| | | | | | | | H0547: 1, H0435: 1, | | |
| | | | | | | | H0696: 1, S0027: 1, | | |
| | | | | | | | L0779: 1, L0731: 1, | | |
| | | | | | | | L0759: 1, L0594: 1, | | |
| | | | | | | | L0603: 1, L0366: 1, | | |
| | | | | | | | S0242: 1, H0423: 1 and | | |
| | | | | | | | S0456: 1. | | |
| | | 966087 | 484 | 230-1273 | 1271 | Ser-2 to Asn-7, | | | |
| | | | | | | Pro-48 to Ala-53, | | | |
| | | | | | | Ser-130 to Glu-135, | | | |
| | | | | | | Tyr-140 to Trp-146, | | | |
| | | | | | | Asp-150 to Leu-157, | | | |
| | | | | | | Ser-162 to Thr-168, | | | |
| | | | | | | Arg-188 to Lys-199, | | | |
| | | | | | | Ala-265 to Ala-271, | | | |
| | | | | | | Ser-285 to Gly-308, | | | |
| | | | | | | Thr-315 to Glu-329. | | | |
| 14 | HE8MO05 | 1197906 | 24 | 481-2 | 811 | Asp-34 to Gln-39, | AR-61: 4, AR089: 3 | | |
| | | | | | | Glu-44 to Pro-51, | L0777: 5, S0300: 2, | | |
| | | | | | | Pro-124 to Gly-133. | H0144: 2, L0750: 2, | | |
| | | | | | | | L0591: 2, L0622: 1, | | |
| | | | | | | | H0013: 1, T0082: 1, | | |
| | | | | | | | H0553: 1, H0169: 1, | | |
| | | | | | | | L0598: 1, L0369: 1, | | |
| | | | | | | | L0763: 1, L0807: 1, | | |
| | | | | | | | L0790: 1, L0792: 1, | | |
| | | | | | | | H0704: 1, L0749: 1, | | |
| | | | | | | | L0753: 1, L0758: 1 and | | |
| | | | | | | | L0599: 1. | | |
| | | 851468 | 485 | 2-442 | 1272 | Ala-47 to Leu-55, | | | |
| | | | | | | Thr-70 to Asp-83, | | | |
| | | | | | | Gly-91 to Asp-96, | | | |
| | | | | | | Lys-131 to Leu-141. | | | |
| 15 | HE8TO43 | 1151645 | 25 | 1-336 | 812 | Gly-1 to Gly-9, | AR061: AR089: 3 | | |
| | | | | | | Gln-29 to Ser-49, | H0622: 2, H0013: 1 | | |
| | | | | | | Ser-51 to Asp-60, | and L0750: 1. | | |
| | | | | | | Cys-90 to Glu-96. | | | |
| | | 930895 | 486 | 3-284 | 1273 | Gln-11 to Ser-31, | | | |
| | | | | | | Ser-33 to Asp-42, | | | |
| | | | | | | Cys-72 to Glu-78. | | | |
| 16 | HEEAA93 | 936268 | 26 | 1-840 | 813 | Pro-3 to Gly-8, | AR089: 6, AR061: 2 | | |
| | | | | | | Pro-28 to Asn-39, | H0589: 2, H0549: 1, | | |
| | | | | | | His-111 to Glu-116, | H0575: 1, H0031: 1, | | |
| | | | | | | Gln-124 to Ala-131, | H0135: 1, H0551: 1, | | |
| | | | | | | Thr-135 to Thr-141, | S0144: 1, S0142: 1, | | |
| | | | | | | Glu-200 to Asp-206, | L0662: 1, L0803: 1, | | |
| | | | | | | Asp-213 to Ser-227. | L0775: 1, L0663: 1, | | |
| | | | | | | | H0144: 1, H0519: 1, | | |
| | | | | | | | H0521: 1, L0592: 1 and | | |
| | | | | | | | H0136: 1. | | |
| 17 | HEMFK40 | 1155404 | 27 | 574-113 | 814 | Lys-1 to Asn-10, | AR089: 12, AR061: 7 | | |
| | | | | | | Ser-28 to Gly-37, | L0750: 9, L0758: 8, | | |
| | | | | | | Pro-42 to Gln-47, | L0769: 6, L0752: 6, | | |
| | | | | | | His-56 to Gly-62, | L0731: 6, L0774: 5, | | |
| | | | | | | Pro-87 to Gly-96. | L0775: 5, L0747: 4, | | |
| | | | | | | | L0759: 4, H0014: 3, | | |
| | | | | | | | L0764: 3, L0767: 3, | | |
| | | | | | | | L0766: 3, L0665: 3, | | |
| | | | | | | | L0757: 3, H0637: 2, | | |
| | | | | | | | S0046: 2, H0424: 2, | | |
| | | | | | | | L0762: 2, L0773: 2, | | |
| | | | | | | | L0768: 2, L0782: 2, | | |
| | | | | | | | L0783: 2, L0748: 2, | | |
| | | | | | | | L0745: 2, L0749: 2, | | |
| | | | | | | | L0753: 2, L0590: 2, | | |
| | | | | | | | L0600: 2, H0624: 1, | | |
| | | | | | | | H0170: 1, H0685: 1, | | |
| | | | | | | | H0294: 1, S0218: 1, | | |
| | | | | | | | H0657: 1, H0341: 1, | | |
| | | | | | | | H0125: 1, S0444: 1, | | |
| | | | | | | | H0580: 1, S0007: 1, | | |
| | | | | | | | H0333: 1, H0486: 1, | | |
| | | | | | | | T0109: 1, H0327: 1, | | |
| | | | | | | | H0546: 1, H0545: 1, | | |
| | | | | | | | H0009: 1, H0375: 1, | | |
| | | | | | | | S0003: 1, T0006: 1, | | |
| | | | | | | | H0031: 1, H0644: 1, | | |
| | | | | | | | H0038: 1, H0616: 1, | | |
| | | | | | | | H0087: 1, H0429: 1, | | |
| | | | | | | | H0494: 1, S0450: 1, | | |
| | | | | | | | H0633: 1, H0646: 1, | | |
| | | | | | | | S0144: 1, L0371: 1, | | |
| | | | | | | | L0770: 1, L0646: 1, | | |
| | | | | | | | L0374: 1, L0662: 1, | | |
| | | | | | | | L0386: 1, L0776: 1, | | |
| | | | | | | | L0658: 1, L0526: 1, | | |
| | | | | | | | L0792: 1, H0659: 1, | | |
| | | | | | | | S0328: 1, S0330: 1, | | |
| | | | | | | | H0627: 1, L0740: 1, | | |
| | | | | | | | L0596: 1, S0276: 1, | | |
| | | | | | | | H0542: 1 and H0352: 1. | | |
| | | 869076 | 487 | 158-472 | 1274 | Asn-23 to Gly-28, | | | |
| | | | | | | Cys-41 to Asp-47, | | | |
| | | | | | | Gln-82 to Glu-88. | | | |
| 18 | HEPBV26 | 965419 | 28 | 3-614 | 815 | Phe-4 to Gln-9, | AR061: 151, AR089: | | |
| | | | | | | Thr-36 to Gln-41, | 113 | | |
| | | | | | | Gly-58 to Cys-66, | H0675: 1, H0150: 1 | | |
| | | | | | | Glu-75 to Arg-81, | and L0772: 1. | | |
| | | | | | | Asp-170 to Val-175. | | | |
| 19 | HETAD36 | 1143220 | 29 | 222-1 | 816 | | AR061: 0, AR089: 0 | | |
| | | | | | | | H0046: 1, L0471: 1 | | |
| | | | | | | | and H0591: 1. | | |
| | | 916429 | 488 | 342-704 | 1275 | Pro-20 to Ala-25. | | | |
| 20 | HFIXH90 | 1162699 | 30 | 2-325 | 817 | Phe-6 to Gly-11, | AR089: 1, AR061: 1 | | |
| | | | | | | Ser-32 to Ser-45, | L0758: 5, S0422: 4, | | |
| | | | | | | Ser-47 to Asp-56, | L0759: 3, H0624: 2, | | |
| | | | | | | Cys-86 to Glu-92. | H0144: 2, L0777: 2, | | |
| | | | | | | | S0242: 2, H0171: 1, | | |
| | | | | | | | L0717: 1, H0497: 1, | | |
| | | | | | | | H0333: 1, H0253: 1, | | |
| | | | | | | | H0031: 1, H0111: 1, | | |
| | | | | | | | H0634: 1, H0616: 1, | | |
| | | | | | | | L0666: 1, L0750: 1, | | |
| | | | | | | | L0779: 1 and S0396: 1. | | |
| | | 771388 | 489 | 3-314 | 1276 | Gln-1 to Gly-7, | | | |
| | | | | | | Ser-28 to Ser-41, | | | |
| | | | | | | Ser-43 to Asp-52, | | | |
| | | | | | | Cys-82 to Glu-88. | | | |
| 21 | HHATO16 | 1222423 | 31 | 103-2076 | 818 | | AR089: 3, AR061: 1 | | |
| | | | | | | | L0659: 5, L0745: 5, | | |
| | | | | | | | S0412: 5, L0766: 4, | | |
| | | | | | | | L0439: 4, H0547: 3, | | |
| | | | | | | | H0651: 3, L0747: 3, | | |
| | | | | | | | L0758: 3, L0759: 3, | | |
| | | | | | | | H0046: 2, H0024: 2, | | |
| | | | | | | | L0805: 2, S0374: 2, | | |
| | | | | | | | H0521: 2, L0751: 2, | | |
| | | | | | | | L0755: 2, L0731: 2, | | |
| | | | | | | | H0445: 2, L0595: 2, | | |
| | | | | | | | H0265: 1, H0341: 1, | | |
| | | | | | | | S0418: 1, S0360: 1, | | |
| | | | | | | | H0550: 1, S0049: 1, | | |
| | | | | | | | T0115: 1, L0163: 1, | | |
| | | | | | | | S0003: 1, H0428: 1, | | |
| | | | | | | | H0634: 1, H0616: 1, | | |
| | | | | | | | H0100: 1, S0422: 1, | | |
| | | | | | | | L0770: 1, L0637: 1, | | |
| | | | | | | | L0761: 1, L0803: 1, | | |
| | | | | | | | L0774: 1, L0666: 1, | | |
| | | | | | | | L0665: 1, H0519: 1, | | |
| | | | | | | | H0648: 1, L0744: 1, | | |
| | | | | | | | L0740: 1, L0779: 1, | | |
| | | | | | | | L0366: 1 and S0192: 1. | | |
| | | 888975 | 490 | 278-1966 | 1277 | | | | |
| 22 | HHATO35 | 1226992 | 32 | 3-1325 | 819 | Asp-1 to Arg-12, | AR089: 1, AR061: 1 | | |
| | | | | | | Ala-54 to Ser-59, | L0439: 8, H0013: 6, | | |
| | | | | | | Tyr-64 to Tyr-69, | L0794: 5, H0624: 3, | | |
| | | | | | | Thr-74 to Pro-83, | H0556: 3, H0169: 3, | | |
| | | | | | | Ser-105 to Ser-110, | H0038: 3, L0803: 3, | | |
| | | | | | | Asn-120 to Arg-130, | L0777: 3, L0757: 3, | | |
| | | | | | | Glu-144 to Pro-149, | L0758: 3, H0677: 3, | | |
| | | | | | | Pro-155 to His-170, | S0418: 2, H0244: 2, | | |
| | | | | | | Asp-230 to His-237, | H0251: 2, H0266: 2, | | |
| | | | | | | Ser-275 to Arg-280, | H0494: 2, H0625: 2, | | |
| | | | | | | Arg-297 to Glu-306, | L0598: 2, H0529: 2, | | |
| | | | | | | Glu-331 to Glu-338, | L0761: 2, L0662: 2, | | |
| | | | | | | Tyr-354 to Thr-361, | L0766: 2, L0666: 2, | | |
| | | | | | | Ala-380 to Ser-391, | S0126: 2, S0380: 2, | | |
| | | | | | | Glu-408 to Val-421. | H0555: 2, S0028: 2, | | |
| | | | | | | | L0779: 2, H0422: 2, | | |
| | | | | | | | H0171: 1, H0265: 1, | | |
| | | | | | | | S0114: 1, L0002: 1, | | |
| | | | | | | | H0341: 1, S0212: 1, | | |
| | | | | | | | S0360: 1, H0580: 1, | | |
| | | | | | | | S0007: 1, S0046: 1, | | |
| | | | | | | | S0132: 1, H0619: 1, | | |
| | | | | | | | L0717: 1, H0549: 1, | | |
| | | | | | | | H0574: 1, H0632: 1, | | |
| | | | | | | | T0109: 1, H0599: 1, | | |
| | | | | | | | H0575: 1, T0082: 1, | | |
| | | | | | | | S0346: 1, H0318: 1, | | |
| | | | | | | | H0052: 1, H0046: 1, | | |
| | | | | | | | L0157: 1, H0123: 1, | | |
| | | | | | | | H0050: 1, H0644: 1, | | |
| | | | | | | | S0364: 1, H0591: 1, | | |
| | | | | | | | H0040: 1, H0268: 1, | | |
| | | | | | | | L0351: 1, H0429: 1, | | |
| | | | | | | | H0131: 1, S0150: 1, | | |
| | | | | | | | L0369: 1, L0770: 1, | | |
| | | | | | | | L0769: 1, L0363: 1, | | |
| | | | | | | | L0768: 1, L0804: 1, | | |
| | | | | | | | L0378: 1, L0806: 1, | | |
| | | | | | | | L0776: 1, L0665: 1, | | |
| | | | | | | | L0659: 1, L0529: 1, | | |
| | | | | | | | L0789: 1, L0790: 1, | | |
| | | | | | | | L0663: 1, L0665: 1, | | |
| | | | | | | | H0144: 1, S0374: 1, | | |
| | | | | | | | L0438: 1, H0658: 1, | | |
| | | | | | | | S0330: 1, H0539: 1, | | |
| | | | | | | | H0478: 1, S0390: 1, | | |
| | | | | | | | L0744: 1, L0748: 1, | | |
| | | | | | | | L0754: 1, L0745: 1, | | |
| | | | | | | | L0756: 1, L0480: 1, | | |
| | | | | | | | S0424: 1 and S0458: 1. | | |
| | | 972554 | 491 | 3-1397 | 1278 | | | | |
| 23 | HHBEE90 | 1197912 | 33 | 1-1293 | 820 | Asp-125 to Asp-131, | AR089: 16, AR061: 10 | | |
| | | | | | | Lys-148 to Cys-153, | L0805: 4, L0438: 3, | | |
| | | | | | | Ile-157 to Gly-162, | H0686: 1, H0657: 1, | | |
| | | | | | | Lys-170 to Phe-175, | H0255: 1, H0306: 1, | | |
| | | | | | | Leu-180 to Asn-192, | H0580: 1, L0717: 1, | | |
| | | | | | | Ala-200 to Thr-215, | H0310: 1, H0373: 1, | | |
| | | | | | | Ala-358 to Gln-414, | H0424: 1, L0761: 1, | | |
| | | | | | | Asp-421 to Asp-431. | L0468: 1, L0662: 1, | | |
| | | | | | | | L0766: 1, L0375: 1, | | |
| | | | | | | | L0807: 1, L0657: 1, | | |
| | | | | | | | L0789: 1, H0660: 1, | | |
| | | | | | | | L0439: 1, L0749: 1, | | |
| | | | | | | | L0779: 1, L0758: 1, | | |
| | | | | | | | H0453: 1 and H0422: 1. | | |
| | | 666834 | 492 | 1-363 | 1279 | Tyr-7 to Glu-12. | | | |
| 24 | HHBHK10 | 1204926 | 34 | 272-1513 | 821 | Cys-4 to Cys9, | AR061: 2, AR089: 1 | | |
| | | | | | | Ser-20 to Gly-29, | H0599: 2, H0393: 1, | | |
| | | | | | | Lys-71 to Asp-82, | H0373: 1, H0560: 1 and | | |
| | | | | | | Gln-128 to Glu-133, | L0759: 1. | | |
| | | | | | | Leu-155 to Lys-160, | | | |
| | | | | | | Lys-168 to Leu-173, | | | |
| | | | | | | Glu-185 to Met-191, | | | |
| | | | | | | Arg-197 to Leu-203, | | | |
| | | | | | | Arg-290 to Gly-307, | | | |
| | | | | | | Phe-328 to Glu-340, | | | |
| | | | | | | Ser-357 to Phe-362, | | | |
| | | | | | | Gly-394 to Arg-401. | | | |
| | | 966448 | 493 | 34-585 | 1280 | | | | |
| 25 | HHEWX25 | 1091674 | 35 | 1284-847 | 822 | Thr-81 to Gly-86, | Ar089: 2, AR061: 1 | | |
| | | | | | | Ser-103 to Tyr-110. | H0124: 15, S0358: 2, | | |
| | | | | | | | L0749: 2, H0543: 2, | | |
| | | | | | | | H0265: 1, S0222: 1, | | |
| | | | | | | | H0581: 1, H0674: 1, | | |
| | | | | | | | H0163: 1, L0438: 1, | | |
| | | | | | | | H0520: 1 and L0439: 1. | | |
| | | 907813 | 494 | 111-38 | 1281 | Lys-9 to Gly-17, | | | |
| | | | | | | Ala-38 to Trp-44. | | | |
| 26 | HISDU47 | 1204962 | 36 | 476-2752 | 823 | | AR089: 1, AR061: 1 | | |
| | | | | | | | H0457: 4, S0010: 3, | | |
| | | | | | | | H0370: 2, S0192: 2, | | |
| | | | | | | | S0342: 1, H0650: 1, | | |
| | | | | | | | H0459: 1, S0358: 1, | | |
| | | | | | | | H0465: 1, S0346: 1, | | |
| | | | | | | | L0471: 1, H0014: 1, | | |
| | | | | | | | H0252: 1, H0553: 1, | | |
| | | | | | | | H0040: 1, H0488: 1, | | |
| | | | | | | | H0100: 1, H0646: 1, | | |
| | | | | | | | H0144: 1, H0539: 1, | | |
| | | | | | | | H0518: 1, H0521: 1, | | |
| | | | | | | | L0439: 1, L0745: 1, | | |
| | | | | | | | L0604: 1 and S0242: 1. | | |
| | | 940720 | 495 | 3-1802 | 1282 | | | | |
| 27 | HJTAC77 | 1197913 | 37 | 1-1062 | 824 | Arg-1 to His-10, | AR054: 264, AR051: | | |
| | | | | | | Tyr-14 to Asp-20, | 255, AR050: 243, | | |
| | | | | | | Phe-51 to Asp-56, | AR089: 50, AR061: 20 | | |
| | | | | | | Leu-107 to Ser-115, | H0040: 1, H0022: 1, | | |
| | | | | | | Glu-122 to Gly-138, | S0152: 1 and H0521: 1. | | |
| | | | | | | Thr-173 to Asp-181, | | | |
| | | | | | | Ile-210 to Pro-215, | | | |
| | | | | | | Arg-290 to Arg-297, | | | |
| | | | | | | Asn-300 to Glu-309, | | | |
| | | | | | | Cys-330 to Ser-335. | | | |
| | | 890680 | 496 | 1-246 | 1283 | Phe-34 to Asp-39. | | | |
| 28 | HKAKW19 | 1154644 | 38 | 523-59 | 825 | Lys-1 to Asn-10, | AR089: 19, AR061: 9 | | |
| | | | | | | Ser-28 to Gly-37, | L0750: 9, L0758: 8, | | |
| | | | | | | Pro-42 to Gln-47, | L0769: 6, L0752: 6, | | |
| | | | | | | His-56 to Gly-62, | L0731: 6, L0774: 5, | | |
| | | | | | | Pro-87 to Gly-96, | L0775: 5, L0747: 4, | | |
| | | | | | | Pro-139 to Lys-154. | L0759: 4, H0014: 3, | | |
| | | | | | | | L0764: 3, L0767: 3, | | |
| | | | | | | | L0766: 3, L0665: 3, | | |
| | | | | | | | L0757: 3, H0637: 2, | | |
| | | | | | | | S0046: 2, H0424: 2, | | |
| | | | | | | | L0762: 2, L0773: 2, | | |
| | | | | | | | L0768: 2, L0782: 2, | | |
| | | | | | | | L0783: 2, L0748: 2, | | |
| | | | | | | | L0745: 2, L0749: 2, | | |
| | | | | | | | L0753: 2, L0590: 2, | | |
| | | | | | | | L0600: 2, H0624: 1, | | |
| | | | | | | | H0170: 1, H0685: 1, | | |
| | | | | | | | H0294: 1, S0218: 1, | | |
| | | | | | | | H0657: 1, H0341: 1, | | |
| | | | | | | | H0125: 1, S0444: 1, | | |
| | | | | | | | H0580: 1, S0007: 1, | | |
| | | | | | | | H0333: 1, H0486: 1, | | |
| | | | | | | | T0109: 1, H0327: 1, | | |
| | | | | | | | H0546: 1, H0545: 1, | | |
| | | | | | | | H0009: 1, H0375: 1, | | |
| | | | | | | | S0003: 1, T0006: 1, | | |
| | | | | | | | H0031: 1, H0644: 1, | | |
| | | | | | | | H0038: 1, H0616: 1, | | |
| | | | | | | | H0087: 1, H0429: 1, | | |
| | | | | | | | H0494: 1, S0450: 1, | | |
| | | | | | | | H0633: 1, H0646: 1, | | |
| | | | | | | | S0144: 1, L0371: 1, | | |
| | | | | | | | L0770: 1, L0646: 1, | | |
| | | | | | | | L0374: 1, L0662: 1, | | |
| | | | | | | | L0386: 1, L0776: 1, | | |
| | | | | | | | L0658: 1, L0526: 1, | | |
| | | | | | | | L0792: 1, H0659: 1, | | |
| | | | | | | | S0328: 1, S0330: 1, | | |
| | | | | | | | H0627: 1, L0740: 1, | | |
| | | | | | | | L0596: 1, S0276: 1, | | |
| | | | | | | | H0542: 1 and H0352: 1. | | |
| | | 932475 | 497 | 3-374 | 1284 | Thr-6 to Gly-13, | | | |
| | | | | | | Asn-59 to Gly-64, | | | |
| | | | | | | Cys-77 to Asp-83, | | | |
| | | | | | | Gln-118 to Glu-124. | | | |
| 29 | HKB1E70 | 1152341 | 39 | 1-354 | 826 | Ser-22 to Asp-32, | AR0089: 14, AR0061: 3 | | |
| | | | | | | Ala-71 to Glu-76, | L0747: 9, L0766: 7, | | |
| | | | | | | Glu-84 to Phe-89, | L0750: 7, L0759: 6, | | |
| | | | | | | Val-98 to Leu-106. | L0749: 4, S0022: 3, | | |
| | | | | | | | L0770: 3, L0803: 3, | | |
| | | | | | | | L0755: 3, L0580: 2, | | |
| | | | | | | | S0007: 2, H0486: 2, | | |
| | | | | | | | H0031: 2, L0764: 2, | | |
| | | | | | | | L0804: 2, L0774: 2, | | |
| | | | | | | | L0775: 2, L0776: 2, | | |
| | | | | | | | H0435: 2, S0026: 2, | | |
| | | | | | | | H0653: 2, H0657: 1, | | |
| | | | | | | | H0384: 1, S0358: 1, | | |
| | | | | | | | T0008: 1, S0132: 1, | | |
| | | | | | | | H0318: 1, L0471: 1, | | |
| | | | | | | | H0356: 1, H0687: 1, | | |
| | | | | | | | H0553: 1, H0494: 1, | | |
| | | | | | | | L0598: 1, L0763: 1, | | |
| | | | | | | | L0769: 1, L0630: 1, | | |
| | | | | | | | L0772: 1, L0662: 1, | | |
| | | | | | | | L0767: 1, L0364: 1, | | |
| | | | | | | | L0794: 1, L0649: 1, | | |
| | | | | | | | L0658: 1, L0383: 1, | | |
| | | | | | | | L0382: 1, L0789: 1, | | |
| | | | | | | | H0689: 1, H0690: 1, | | |
| | | | | | | | H0658: 1, H0518: 1, | | |
| | | | | | | | H0134: 1, H0214: 1, | | |
| | | | | | | | H0436: 1, L0478: 1, | | |
| | | | | | | | L0756: 1, L0752: 1, | | |
| | | | | | | | L0731: 1, H0445: 1, | | |
| | | | | | | | H0707: 1, L0592: 1 and | | |
| | | | | | | | H0423: 1. | | |
| | | 865383 | 498 | 15-407 | 1285 | | | | |
| 30 | HLMIY60 | 1153900 | 40 | 553-2 | 827 | Pro-19 to Arg-27, | AR061: 1, AR089: 0 | | |
| | | | | | | Ser-60 to Gly-72, | H0619: 2, H0556: 1, | | |
| | | | | | | Ile-99 to Pro-108, | H0255: 1, H0575: 1, | | |
| | | | | | | Ala-114 to Gly-144, | H0622: 1, S0150: 1, | | |
| | | | | | | Glu-156 to Gln-167, | L0794: 1, L0766: 1, | | |
| | | | | | | Gly-172 to Arg-177. | S0052: 1 and S0152: 1. | | |
| | | 908026 | 499 | 1-246 | 1286 | Arg-22 to Glu-37, | | | |
| | | | | | | Cys-62 to Cys-67. | | | |
| 31 | HLWEE08 | 870452 | 41 | 2-340 | 828 | Leu-1 to Asp-7, | AR089: 0, AR061: 0 | | |
| | | | | | | Lys-15 to Glu-21, | L0438: 4, L0766: 2, | | |
| | | | | | | Cys-75 to Ala-81. | L0651: 2, S0424: 2, | | |
| | | | | | | | H0255: 1, H0450: 1, | | |
| | | | | | | | H0497: 1, H0553: 1, | | |
| | | | | | | | H0059: 1, S0002: 1, | | |
| | | | | | | | L0769: 1, L0637: 1, | | |
| | | | | | | | L0761: 1, L0641: 1, | | |
| | | | | | | | L0645: 1, L0794: 1, | | |
| | | | | | | | L0805: 1, L0776: 1, | | |
| | | | | | | | L0666: 1, L0665: 1, | | |
| | | | | | | | H0144: 1, L0779: 1, | | |
| | | | | | | | L0777: 1 and L0592: 1. | | |
| 32 | HLWFP10 | 963412 | 42 | 284-748 | 829 | Arg-1 to Cys-10, | AR089: 1, AR061: 1 | | |
| | | | | | | Thr-28 to Ala-38, | L0769: 3, H0553: 1, | | |
| | | | | | | Pro-40 to Glu-51, | H0519: 1, H0444: 1 and | | |
| | | | | | | Trp-95 to Cys-106, | H0352: 1. | | |
| | | | | | | Glu-123 to Asp-129, | | | |
| | | | | | | Thr-137 to Lys-146. | | | |
| 33 | HMAFD64 | 1197916 | 43 | 458-1546 | 830 | Pro-20 to Ala-25, | AR089: AR061: 4 | | |
| | | | | | | Ser-102 to Glu-107, | L0803: 9, L0777: 4, | | |
| | | | | | | Tyr-112 to Trp-118, | L0755: 4, L0005: 3, | | |
| | | | | | | Asp-122 to Leu-129, | H0615: 3, L0774: 3, | | |
| | | | | | | Ser-134 to Thr-140, | L0438: 3, H0521: 3, | | |
| | | | | | | Arg-160 to Lys-171, | L0439: 3, L0752: 3, | | |
| | | | | | | Ala-327 to Ala-243, | L0415: 2, H0052: 2, | | |
| | | | | | | Ser-257 to Gly-280, | L0157: 2, L0641: 2, | | |
| | | | | | | Thr-287 to Glu-301, | L0565: 2, L0748: 2, | | |
| | | | | | | Ala-322 to Ser-338, | H0170: 1, S0114: 1, | | |
| | | | | | | Arg-350 to Gly-356. | H0650: 1, H0341: 1, | | |
| | | | | | | | S0001: 1, H0580: 1, | | |
| | | | | | | | H0329: 1, L0717: 1, | | |
| | | | | | | | H0587: 1, H0574: 1, | | |
| | | | | | | | H0486: 1, T0082: 1, | | |
| | | | | | | | S0346: 1, S0474: 1, | | |
| | | | | | | | H0581: 1, H0196: 1, | | |
| | | | | | | | H0050: 1, L0471: 1, | | |
| | | | | | | | S0388: 1, H0328: 1, | | |
| | | | | | | | H0644: 1, S0366: 1, | | |
| | | | | | | | H0163: 1, H0591: 1, | | |
| | | | | | | | H0038: 1, H0040: 1, | | |
| | | | | | | | H0634: 1, S0144: 1, | | |
| | | | | | | | L0643: 1, L0648: 1, | | |
| | | | | | | | L0662: 1, L0794: 1, | | |
| | | | | | | | L0387: 1, L0766: 1, | | |
| | | | | | | | L0805: 1, L0634: 1, | | |
| | | | | | | | L0634: 1, L0791: 1, | | |
| | | | | | | | L0666: 1, L0663: 1, | | |
| | | | | | | | H0144: 1, H0547: 1, | | |
| | | | | | | | H0435: 1, H0696: 1, | | |
| | | | | | | | S0027: 1, L0779: 1, | | |
| | | | | | | | L0731: 1, L0759: 1, | | |
| | | | | | | | L0594: 1, L0603: 1, | | |
| | | | | | | | L0366: 1, S0242: 1, | | |
| | | | | | | | H0423: 1 and S0456: 1. | | |
| | | 966086 | 500 | 438-812 | 1287 | Pro-20 to Ala-25, | | | |
| | | | | | | Ser-102 to Glu-107, | | | |
| | | | | | | Tyr-112 to Trp-118. | | | |
| 34 | HMEKQ25 | 907891 | 44 | 197-1300 | 831 | Trp-1 to Ser-15, | AR054: 27, AR051: | | |
| | | | | | | Lys-51 to Asn-63, | 14, AR061: 6, AR089: | | |
| | | | | | | His-84 to Gly-89, | 3, AR050: 1 | | |
| | | | | | | Arg-117 to Gln-122, | L0599: 2, H0369: 1, | | |
| | | | | | | Lys-240 to Glu-245. | H0266: 1, H0416: 1, | | |
| | | | | | | | H0551: 1, L0761: 1, | | |
| | | | | | | | L0774: 1, L0352: 1, | | |
| | | | | | | | L0740: 1, L0754: 1 and | | |
| | | | | | | | S0031: 1. | | |
| 35 | HMIAL66 | 1197918 | 45 | 1-1908 | 832 | Ser-6 to Ile-11, | AR089: 3, AR061: 2 | | |
| | | | | | | Pro-29 to Ser-45, | H0046: 13, L0439: 6, | | |
| | | | | | | Ser-52 to Gly-79, | S0360: 3, H0024: 3, | | |
| | | | | | | Asp-85 to Gly-105, | L0769: 3, H0520: 3, | | |
| | | | | | | Gly-115 to Gly-123, | L0748: 3, L0749: 3, | | |
| | | | | | | Val-127 to Arg-152, | H0624: 2, H0100: 2, | | |
| | | | | | | Arg-166 to Asp-176, | L0805: 2, L0592: 2, | | |
| | | | | | | Lys-209 to Arg-228, | H0685: 1, H0661: 1, | | |
| | | | | | | Gly-236 to Glu-245, | H0664: 1, H0449: 1, | | |
| | | | | | | Thr-270 to Asp-275, | S0420: 1, S0376: 1, | | |
| | | | | | | Pro-277 to Ser-294, | S0007: 1, S0300: 1, | | |
| | | | | | | Arg-299 to Gly-339, | L0717: 1, H0013: 1, | | |
| | | | | | | His-346 to Lys-362, | H0156: 1, L0021: 1, | | |
| | | | | | | Arg-370 to Leu-379, | H0575: 1, S0010: 1, | | |
| | | | | | | Ser-382 to Glu-387, | L0738: 1, H0178: 1, | | |
| | | | | | | Leu-389 to Ala-400, | H0018: 1, S6028: 1, | | |
| | | | | | | Thr-406 to Pro-412, | H0188: 1, H0687: 1, | | |
| | | | | | | Ser-428 to Tyr-433, | H0252: 1, H0428: 1, | | |
| | | | | | | Pro-440 to Ser-448, | H0553: 1, S0036: 1, | | |
| | | | | | | Glu-461 to Ser-472, | H0038: 1, H0264: 1, | | |
| | | | | | | Gly-486 to Val-496, | S0038: 1, H0561: 1, | | |
| | | | | | | Pro-561 to Ser-566. | S0450: 1, S0002: 1, | | |
| | | | | | | | L0803: 1, L0651: 1, | | |
| | | | | | | | L0776: 1, L0789: 1, | | |
| | | | | | | | S0330: 1, S0332: 1, | | |
| | | | | | | | H0704: 1, L0740: 1, | | |
| | | | | | | | L0780: 1, L0758: 1, | | |
| | | | | | | | L0759: 1, H0595: 1, | | |
| | | | | | | | L0595: 1, S0026: 1, | | |
| | | | | | | | H0543: 1, H0423: 1 and | | |
| | | | | | | | H0008: 1. | | |
| | | 959764 | 501 | 533-1915 | 1288 | Gln-2 to Asp-7, | | | |
| | | | | | | Lys-34 to Arg-53, | | | |
| | | | | | | Gly-61 to Glu-70. | | | |
| 36 | HOEOE25 | 907806 | 46 | 2-625 | 833 | Lys-95 to Asp-103, | L0766: 4, L0517: 2, | | |
| | | | | | | Pro-108 to Leu-115, | S0126: 2, L0794: 1 and | | |
| | | | | | | Lys-150 to Leu-158, | L0366: 1. | | |
| | | | | | | Leu-162 to Trp-167, | | | |
| | | | | | | Leu-177 to Lys-186, | | | |
| | | | | | | Glu-201 to Gln-208. | | | |
| 37 | HOGEB51 | 1091696 | 47 | 1-798 | 834 | Leu-50 to Pro-57, | AR089: 1, AR061: 0 | | |
| | | | | | | Arg-88 to Arg-95. | H0489: 2 and H0435: | | |
| | | | | | | | 1. | | |
| | | 908025 | 502 | 2-442 | 1289 | Leu-24 to Pro-31, | | | |
| | | | | | | Arg-62 to Arg-69, | | | |
| | | | | | | Lys-86 to Arg-94. | | | |
| 38 | HPJDO64 | 1217040 | 48 | 55-1563 | 835 | Ala-13 to Pro-18, | AR061: 1, AR089: 1 | | |
| | | | | | | Leu-62 to Cys-68, | L0439: 8, H0657: 3, | | |
| | | | | | | Pro-108 to Lys-118, | S0212: 3, S0418: 3, | | |
| | | | | | | Gln-132 to Leu-140, | L0748: 3, L0759: 3, | | |
| | | | | | | Glu-160 to Ala-171, | L0764: 2, L0776: 2, | | |
| | | | | | | Ala-175 to Ser-182, | S0152: 2, L0777: 2, | | |
| | | | | | | Pro-188 to Ser-200, | L0755: 2, H0136: 2, | | |
| | | | | | | Ser-222 to Asp-229, | H0543: 2, S0420: 1, | | |
| | | | | | | Arg-234 to Leu-241, | L0471: 1, S0214: 1, | | |
| | | | | | | Ser-244 to Pro-252, | S0426: 1, L0642: 1, | | |
| | | | | | | Arg-262 to Lys-269, | L0766: 1, L0774: 1, | | |
| | | | | | | Gln-276 to Leu-282, | L0655: 1, H0539: 1, | | |
| | | | | | | Asn-314 to Arg-319, | L0750: 1, L0779: 1, | | |
| | | | | | | Lys-336 to Ile-343, | H0444: 1 and S0276: 1. | | |
| | | | | | | Ser-348 to Glu-357, | | | |
| | | | | | | Gln-364 to Lys-371, | | | |
| | | | | | | Thr-383 to Lys-391, | | | |
| | | | | | | Phe-410 to Ser-431, | | | |
| | | | | | | Ser-442 to Ser-451, | | | |
| | | | | | | His-469 to Ala-488, | | | |
| | | | | | | Glu-493 to Asn-503. | | | |
| | | 839585 | 503 | 2-514 | 1290 | Leu-77 to Cys-83, | | | |
| | | | | | | Pro-123 to Glu-133, | | | |
| | | | | | | Gln-147 to Leu-155. | | | |
| 39 | HPMGN27 | 115395 | 49 | 3-605 | 836 | His-1 to Gly-7, | AR061: 4, AR089: 2, | | |
| | | | | | | Ser-10 to Ser-66, | L0748: 4, L0794: 2, | | |
| | | | | | | Gly-72 to Gly-81, | L0659: 2, L0517: 2, | | |
| | | | | | | Ser-83 to His-91, | L0021: 1, H0318: 1, | | |
| | | | | | | Asn-115 to Ile-130, | H0266: 1, H0031: 1, | | |
| | | | | | | Tyr-154 to Lys-162, | L0564: 1, L0772: 1, | | |
| | | | | | | Pro-164 to His-170, | L0662: 1, L0768: 1, | | |
| | | | | | | Trp-177 to Ser-182. | L0803: 1, H0144: 1, | | |
| | | | | | | | S0374: 1, H0519: 1, | | |
| | | | | | | | H0435: 1, L0749: 1, | | |
| | | | | | | | L0779: 1 and L0758: 1. | | |
| | | 946275 | 504 | 1413-817 | 1291 | Ser-8 and Ser-64, | | | |
| | | | | | | Gly-70 to Gly-79, | | | |
| | | | | | | Ser-81 to His-89, | | | |
| | | | | | | Asn-113 to Ile-128, | | | |
| | | | | | | Tyr-152 to Lys-160, | | | |
| | | | | | | Pro-162 to His-168, | | | |
| | | | | | | Trp-175 to Thr-181. | | | |
| 40 | HSSGC06 | 121039 | 50 | 2-694 | 837 | Gln-7 to Gly-12. | AR061: 1, AR089: 1, | | |
| | | | | | | | L0749: 6, H0038: 4, | | |
| | | | | | | | L0758: 4, H0619: 3, | | |
| | | | | | | | H0050: 3, H0591: 2, | | |
| | | | | | | | L0772: 3, S0358: 2, | | |
| | | | | | | | H0587: 2, H0024: 2, | | |
| | | | | | | | H0135: 2, T0042: 2, | | |
| | | | | | | | S0150: 2, H0641: 2, | | |
| | | | | | | | H0529: 2, L0375: 2, | | |
| | | | | | | | L0665: 2, S0332: 2, | | |
| | | | | | | | L0748: 2, L0756: 2, | | |
| | | | | | | | L0786: 2, L0596: 2, | | |
| | | | | | | | L0591: 2, L0599: 2, | | |
| | | | | | | | H0265: 1, S0134: 1, | | |
| | | | | | | | S0218: 1, H0341: 1, | | |
| | | | | | | | S0132: 1, S0278: 1, | | |
| | | | | | | | H0592: 1, T0114: 1, | | |
| | | | | | | | H0427: 1, H0002: 1, | | |
| | | | | | | | H0097: 1, H0575: 1, | | |
| | | | | | | | S0182: 1, H0581: 1, | | |
| | | | | | | | H0596: 1, H0046: 1, | | |
| | | | | | | | H0457: 1, H0012: 1, | | |
| | | | | | | | H0416: 1, H0687: 1, | | |
| | | | | | | | H0286: 1, H0553: 1, | | |
| | | | | | | | H0068: 1, H0163: 1, | | |
| | | | | | | | H0616: 1, H0551: 1, | | |
| | | | | | | | H0022: 1, L0770: 1, | | |
| | | | | | | | L0769: 1, L0764: 1, | | |
| | | | | | | | L0766: 1, L0775: 1, | | |
| | | | | | | | L0805: 1, L0659: 1, | | |
| | | | | | | | L0809: 1, L0664: 1, | | |
| | | | | | | | H0547: 1, H0658: 1, | | |
| | | | | | | | S0152: 1, H0521: 1, | | |
| | | | | | | | H0696: 1, H0134: 1, | | |
| | | | | | | | L0611: 1, L0750: 1, | | |
| | | | | | | | L0780: 1, L0731: 1, | | |
| | | | | | | | L0757: 1 and L0601: 1. | | |
| | | 974921 | 505 | 2-694 | 1292 | Gln-7 to Gly-12, | | | |
| | | | | | | Leu-60 to Pro-65, | | | |
| | | | | | | Arg-85 to Lys-99, | | | |
| | | | | | | Ser-132 to Pro-145, | | | |
| | | | | | | Pro-150 to Asp-155, | | | |
| | | | | | | Pro-183 to Asn-193, | | | |
| | | | | | | Arg-200 to Tyr-206. | | | |
| 41 | HTAJO65 | 1186469 | 51 | 708-1 | 838 | His-9 to Arg-15, | AR061: 6, AR089: 2 | | |
| | | | | | | Arg-108 to Asp-115, | L0751: 4, H0634: 3, | | |
| | | | | | | Ser-199 to Arg-210. | H0550: 2, L0758: 2, | | |
| | | | | | | | L0601: 2, H0484: 1, | | |
| | | | | | | | H0483: 1, H0580: 1, | | |
| | | | | | | | H0393: 1, H0635: 1, | | |
| | | | | | | | H0618: 1, H0318: 1, | | |
| | | | | | | | H0544: 1, H0083: 1, | | |
| | | | | | | | H0271: 1, H0615: 1, | | |
| | | | | | | | L0483: 1, H0628: 1, | | |
| | | | | | | | H0494: 1, H0509: 1, | | |
| | | | | | | | H0132: 1, S0210: 1, | | |
| | | | | | | | S0002: 1, L0771: 1, | | |
| | | | | | | | L0766: 1, L0803: 1, | | |
| | | | | | | | L0658: 1, L0384: 1, | | |
| | | | | | | | L0664: 1, H0520: 1, | | |
| | | | | | | | H0660: 1, L0740: 1, | | |
| | | | | | | | L0731: 1, H0542: 1, | | |
| | | | | | | | H0543: 1, H0423: 1 and | | |
| | | | | | | | H0506: 1. | | |
| | | 907753 | 506 | 76-948 | 1293 | Ser-9 to Tyr-15, | | | |
| | | | | | | Leu-44 to Ser-55, | | | |
| | | | | | | Ala-60 to Pro-68, | | | |
| | | | | | | Ala-104 to Ala-133, | | | |
| | | | | | | Leu-135 to Arg-143, | | | |
| | | | | | | Gln-200 to Lys-213, | | | |
| | | | | | | Glu-265 to Pro-271. | | | |
| 42 | HTECC09 | 1064313 | 52 | 3-365 | 839 | Arg-1 to Pro-6. | AR089: 39, AR061: 19 | | |
| | | | | | | | H0038: 1 | | |
| | | 678659 | 507 | 3-365 | 1294 | Arg-1 to Pro-6. | | | |
| 43 | HTEJS34 | 1153919 | 53 | 1-513 | 840 | His-26 to Thr-39, | AR089: 4, AR061: 3, | | |
| | | | | | | Pro-139 to His-160. | L0748: 19, L0766: 10, | | |
| | | | | | | | S0126: 10, L0731: 10, | | |
| | | | | | | | L0742: 7, H0038: 6, | | |
| | | | | | | | L0758: 6, H0266: 5, | | |
| | | | | | | | L0770: 5, S0360: 4, | | |
| | | | | | | | L0747: 4, L0779: 4, | | |
| | | | | | | | L0752: 4, H0543: 4, | | |
| | | | | | | | H0624: 3, S0240: 3, | | |
| | | | | | | | H0333: 3, L0471: 3, | | |
| | | | | | | | H0083: 3, H0617: 3, | | |
| | | | | | | | H0616: 3, S0344: 3, | | |
| | | | | | | | L0774: 3, L0775: 3, | | |
| | | | | | | | H0670: 3, L0757: 3, | | |
| | | | | | | | L0599: 3, S0026: 3, | | |
| | | | | | | | H0657: 2, L0470: 2, | | |
| | | | | | | | S0007: 2, H0599: 2, | | |
| | | | | | | | S0010: 2, H0309: 2, | | |
| | | | | | | | H0597: 2, L0163: 2, | | |
| | | | | | | | H0040: 2, T0041; 2, | | |
| | | | | | | | H0641: 2, L0769: 2, | | |
| | | | | | | | L0768: 2, L0375: 2, | | |
| | | | | | | | L0806: 2, L0805: 2, | | |
| | | | | | | | L0517: 2, L0666: 2, | | |
| | | | | | | | H0144: 2, H0547: 2, | | |
| | | | | | | | H0659: 2, H0672: 2, | | |
| | | | | | | | L0743: 2, L0439: 2, | | |
| | | | | | | | L0750: 2, L0777: 2, | | |
| | | | | | | | L0755: 2, L0759: 2, | | |
| | | | | | | | L0596: 2, L0588: 2, | | |
| | | | | | | | L0361: 2, H0170: 1, | | |
| | | | | | | | H0265: 1, H0159: 1, | | |
| | | | | | | | H0295: 1, T0049: 1, | | |
| | | | | | | | S0134: 1, S0116: 1, | | |
| | | | | | | | H0341: 1, S0212: 1, | | |
| | | | | | | | H0255: 1, H0662: 1, | | |
| | | | | | | | S0356: 1, S0358: 1, | | |
| | | | | | | | S0444: 1, H0340: 1, | | |
| | | | | | | | H0208: 1, S0045: 1, | | |
| | | | | | | | S0132: 1, H0393: 1, | | |
| | | | | | | | S0278: 1, S0222: 1, | | |
| | | | | | | | H0431: 1, H0370: 1, | | |
| | | | | | | | S0414: 1, L0622: 1, | | |
| | | | | | | | H0069: 1, H0427: 1, | | |
| | | | | | | | H0036: 1, H0004: 1, | | |
| | | | | | | | H0318: 1, H0581: 1, | | |
| | | | | | | | S0049: 1, H0196: 1, | | |
| | | | | | | | H0194: 1, H0263: 1, | | |
| | | | | | | | H0204: 1, H0327: 1, | | |
| | | | | | | | H0544: 1, H0546: 1, | | |
| | | | | | | | H0545: 1, H0009: 1, | | |
| | | | | | | | H0562: 1, H0023: 1, | | |
| | | | | | | | S0051: 1, H0354: 1, | | |
| | | | | | | | H0594: 1, S6028: 1, | | |
| | | | | | | | H0188: 1, H0687: 1, | | |
| | | | | | | | T0006: 1, H0031: 1, | | |
| | | | | | | | H0644: 1, H0181: 1, | | |
| | | | | | | | H0606: 1, H0032: 1, | | |
| | | | | | | | H0383: 1, H0673: 1, | | |
| | | | | | | | H0169: 1, H0361: 1, | | |
| | | | | | | | H0388: 1, H0124: 1, | | |
| | | | | | | | H0135: 1, H0163: 1, | | |
| | | | | | | | H0634: 1, L0151: 1, | | |
| | | | | | | | H0087: 1, H0551: 1, | | |
| | | | | | | | T0067: 1, H0477: 1, | | |
| | | | | | | | H0264: 1, T0042: 1, | | |
| | | | | | | | H0560: 1, H0366: 1, | | |
| | | | | | | | S0294: 1, H0509: 1, | | |
| | | | | | | | H0633: 1, L0520: 1, | | |
| | | | | | | | L0640: 1, L0638: 1, | | |
| | | | | | | | L0772: 1, L0771: 1, | | |
| | | | | | | | L0794: 1, L0522: 1, | | |
| | | | | | | | L0803: 1, L0650: 1, | | |
| | | | | | | | L0378: 1, L0776: 1, | | |
| | | | | | | | L0655: 1, L0783: 1, | | |
| | | | | | | | L0809: 1, L0663: 1, | | |
| | | | | | | | H0520: 1, H0519: 1, | | |
| | | | | | | | S0380: 1, S0146: 1, | | |
| | | | | | | | H0134: 1, H0555: 1, | | |
| | | | | | | | H0576: 1, S3014: 1, | | |
| | | | | | | | L0740: 1, S0031: 1, | | |
| | | | | | | | H0445: 1, L0595: 1, | | |
| | | | | | | | L0366: 1, H0136: 1, | | |
| | | | | | | | S0276: 1 and H0422: 1. | | |
| | | 961546 | 508 | 1-513 | 1295 | | | | |
| 44 | HTEMK07 | 1152259 | 54 | 90-944 | 841 | Ala-18 to His-32, | AR061: 4, AR089: 2, | | |
| | | | | | | Tyr-51 to Phe-56, | L0758: 8, H0038: 4, | | |
| | | | | | | Asn-100 to Arg-106, | S0422: 3, H0423: 3, | | |
| | | | | | | His-140 to Gly-153, | S0420: 2, H0427: 2, | | |
| | | | | | | Ser-167 to Gly-193, | H0083: 2, H0615: 2, | | |
| | | | | | | Ser-205 to Asp-214, | H0090: 2, L0804: 2, | | |
| | | | | | | Trp-237 to Thr-244, | L0756: 2, L0759: 2, | | |
| | | | | | | Asp-268 to Gln-274. | S0040: 1, H0657: 1, | | |
| | | | | | | Asp-268 to Gln-274, | S0040: 1, H0657: 1, | | |
| | | | | | | | S0116: 1, H0662: 1, | | |
| | | | | | | | H0638: 1, H0125: 1, | | |
| | | | | | | | H0580: 1, H0497: 1, | | |
| | | | | | | | L0021: 1, L0471: 1, | | |
| | | | | | | | H0510: 1, H0266: 1, | | |
| | | | | | | | H0622: 1, H0634: 1, | | |
| | | | | | | | H0616: 1, H0623: 1, | | |
| | | | | | | | T0042: 1, H0560: 1, | | |
| | | | | | | | H0646: 1, L0770: 1, | | |
| | | | | | | | L0773: 1, L0766: 1, | | |
| | | | | | | | L0388: 1, L0650: 1, | | |
| | | | | | | | L0659: 1, L0526: 1, | | |
| | | | | | | | L0787: 1, S0374: 1, | | |
| | | | | | | | H0547: 1, H0593: 1, | | |
| | | | | | | | H0435: 1, H0659: 1, | | |
| | | | | | | | H0660: 1, H0648: 1, | | |
| | | | | | | | H0672: 1, L0744: 1, | | |
| | | | | | | | L0747: 1, L0779: 1, | | |
| | | | | | | | H0542: 1, H0543: 1 and | | |
| | | | | | | | S0424: 1. | | |
| | | 964546 | 509 | 198-1052 | 1296 | Ala-18 to His-32, | | | |
| | | | | | | Tyr-51 to Phe-56. | | | |
| 45 | HTENY81 | 1224812 | 55 | 2-1267 | 842 | Arg-1 to Pro-7, | AR089: 12, AR061: 11 | | |
| | | | | | | Ala-23 to Ile-29, | H0616: 2, L0766: 2, | | |
| | | | | | | Arg-114 to His-120, | T0040: 1, H0038: 1, | | |
| | | | | | | Pro-126 to Pro-132, | L0438: 1, L0777: 1, | | |
| | | | | | | Glu-141 to Glu-149, | L0752: 1, L0759: 1 and | | |
| | | | | | | Asn-165 to Thr-175, | S0260: 1. | | |
| | | | | | | Asn-192 to Arg-198, | | | |
| | | | | | | Tyr-205 to Ser-210, | | | |
| | | | | | | Ser-217 to Ser-224, | | | |
| | | | | | | Gly-286 to Leu-307, | | | |
| | | | | | | Arg-322 to Asn-332, | | | |
| | | | | | | Asn-345 to Asp-370, | | | |
| | | | | | | Glu-401 to Ser-406. | | | |
| | | 935236 | 510 | 3112-1847 | 1297 | Arg-1 to Pro-7, | | | |
| | | | | | | Ala-23 to Ile-29, | | | |
| | | | | | | Arg-114 to His-120, | | | |
| | | | | | | Pro-126 to Pro-132, | | | |
| | | | | | | Gln-141 to Glu-149, | | | |
| | | | | | | Asn-165 to Thr-175, | | | |
| | | | | | | Asn-192 to Arg-198, | | | |
| | | | | | | Tyr-205 to Ser-210, | | | |
| | | | | | | Ser-217 to Ser-224. | | | |
| 46 | HTLHB07 | 1152265 | 56 | 188-1039 | 843 | Leu-145 to Val-152, | AR061: 12, AR089: 10 | | |
| | | | | | | Val-160 to Arg-165, | H0038: 2, S0126: 2, | | |
| | | | | | | Pro-187 to Lys-192, | H0341: 1, H0618: 1, | | |
| | | | | | | Ala-217 to Arg-223, | H0253: 1, H0622: 1, | | |
| | | | | | | Phe-234 to His-239, | H0135: 1, H0560: 1, | | |
| | | | | | | Leu-253 to Asn-265, | H0509: 1, S0150: 1, | | |
| | | | | | | Leu-273 to Pro-284. | L0773: 1, L0657: 1 and | | |
| | | | | | | | L0758: 1. | | |
| | | 952180 | 511 | 166-471 | 1298 | | | | |
| 47 | HTPAG88 | 1124687 | 57 | 112-720 | 844 | Ser-3 to Arg-9, | AR061: 3, AR089: 2 | | |
| | | | | | | Arg-12 to Pro-21, | H0268: 3, H0370: 2, | | |
| | | | | | | Asp-49 to Lys-55, | H0039: 2, L0483: 2, | | |
| | | | | | | Ser-70 to Ser-77, | L0766: 2, H0581: 1, | | |
| | | | | | | Ser-82 to Ser-89, | H0622: 1, H0623: 1, | | |
| | | | | | | Pro-111 to Glu-118, | S0002: 1, L0800: 1, | | |
| | | | | | | Ala-156 to Lys-161, | L0803: 1, S0152: 1, | | |
| | | | | | | Arg-190 to Lys-197. | H0522: 1, S0044: 1, | | |
| | | | | | | | L0751: 1 and L0593: 1. | | |
| | | 968786 | 512 | 4-612 | 1299 | Ser-3 to Arg-9, | | | |
| | | | | | | Arg-12 to Pro-21, | | | |
| | | | | | | Asp-49 to Lys-55, | | | |
| | | | | | | Ser-70 to Ser-77, | | | |
| | | | | | | Ser-82 to Ser-89, | | | |
| | | | | | | Pro-111 to Glu-118, | | | |
| | | | | | | Ala-156 to Lys-161, | | | |
| | | | | | | Arg-190 to Lys-197. | | | |
| 48 | HUSGT72 | 1154801 | 58 | 71-559 | 845 | Phe-56 to Asp-72, | AR-61: 2, AR089: 2 | | |
| | | | | | | Gln-84 to Leu-93, | S0360: 2, H0309: 1, | | |
| | | | | | | Ser-96 to Pro-109, | H0412: 1, L0745: 1 and | | |
| | | | | | | Pro-116 to Glu-126, | H0422: 1. | | |
| | | | | | | Arg-134 to Glu-147, | | | |
| | | | | | | Glu-155 to Lys-163. | | | |
| | | 908031 | 513 | 112-765 | 1300 | Phe-56 to Asn-72, | | | |
| | | | | | | Gln-84 to Leu-93, | | | |
| | | | | | | Ser-96 to Pro-109, | | | |
| | | | | | | Pro-116 to Glu-126. | | | |
| 49 | HUVHL02 | 1215034 | 59 | 553-116 | 846 | Ile-2 to Asn-11, | AR089: 5, AR061: 5, | | |
| | | | | | | Arg-14 to Tyr-20, | L0748: 14, S0422: 5, | | |
| | | | | | | Pro-26 to Val-32, | L0766: 5, S0126: 3, | | |
| | | | | | | Met-34 to Asp-39, | H0171: 2, H0650: 2, | | |
| | | | | | | Arg-45 to Trp-51, | S0418: 2, L0717: 2, | | |
| | | | | | | Gly-110 to Glu-115, | L0796: 2, L0792: 2, | | |
| | | | | | | Thr-131 to Glu-136. | L0664: 2, H0659: 2, | | |
| | | | | | | | L0744: 2, L0751: 2, | | |
| | | | | | | | L0747: 2, S0026: 2, | | |
| | | | | | | | H0542: 2, H0624: 1, | | |
| | | | | | | | H0657: 1, S0116: 1, | | |
| | | | | | | | H0341: 1, S0358: 1, | | |
| | | | | | | | S0222: 1, H0559: 1, | | |
| | | | | | | | H0581: 1, H0421: 1, | | |
| | | | | | | | H0251: 1, H0083: 1, | | |
| | | | | | | | S6028: 1, H0286: 1, | | |
| | | | | | | | H0616: 1, H0623: 1, | | |
| | | | | | | | H0494: 1, L0764: 1, | | |
| | | | | | | | L0651: 1, S0052: 1, | | |
| | | | | | | | H0520: 1, S0152: 1, | | |
| | | | | | | | L0779: 1, L0777: 1, | | |
| | | | | | | | L0601: 1, H0667: 1, | | |
| | | | | | | | H0136: 1, S0276: 1, | | |
| | | | | | | | H0423: 1 and S0424: 1. | | |
| | | 907665 | 514 | 2-400 | 1301 | Pro-6 to Glu-12, | | | |
| | | | | | | Ile-24 to Asn-30, | | | |
| | | | | | | Lys-42 to Ser-47. | | | |
| 50 | HWABK01 | 1226267 | 60 | 1-2316 | 847 | Thr-69 to Pro-75, | AR089: 4, AR061: 1 | | |
| | | | | | | Glu-80 to Glu-86, | H0423: 7, H0090: 4, | | |
| | | | | | | Asp-101 to Asp-106, | S0222: 3, H0422: 3, | | |
| | | | | | | Asp-113 to Thr-120, | H0250: 2, H0039: 2, | | |
| | | | | | | Asn-126 to Asp-131, | H0622: 2, H0591: 2, | | |
| | | | | | | Pro-173 to Gly-179. | H0521: 2, L0439: 2, | | |
| | | | | | | | L0752: 2, H0707: 2, | | |
| | | | | | | | H0185: 1, H0222: 1, | | |
| | | | | | | | T0049: 1, H0650: 1, | | |
| | | | | | | | S0116: 1, S0212: 1, | | |
| | | | | | | | H0662: 1, S0354: 1, | | |
| | | | | | | | S0376: 1, H0619: 1, | | |
| | | | | | | | L0717: 1, H0586: 1, | | |
| | | | | | | | H0587: 1, H0013: 1, | | |
| | | | | | | | L0021: 1, H0004: 1, | | |
| | | | | | | | H0581: 1, S6028: 1, | | |
| | | | | | | | H0266: 1, S0366: 1, | | |
| | | | | | | | H0488: 1, H0646: 1, | | |
| | | | | | | | S0002: 1, L0645: 1, | | |
| | | | | | | | L0378: 1, H0698: 1, | | |
| | | | | | | | L0438: 1, H0689: 1, | | |
| | | | | | | | H0658: 1, L0584: 1, | | |
| | | | | | | | L0605: 1, L0591: 1 and | | |
| | | | | | | | S0026: 1. | | |
| | | 916033 | 515 | 2-811 | 1302 | Tyr-58 to Asn-67. | | | |
| 51 | HWAFH10 | 1194813 | 61 | 482-811 | 848 | Asn-5 to Leu-17, | AR089: 3, AR061: 1 | | |
| | | | | | | Ala-78 to Gln-85, | L0766: 4, H0620: 3, | | |
| | | | | | | Gly-105 to Arg-110. | L0663: 3, L0749: 3, | | |
| | | | | | | | L0731: 3, S0026: 3, | | |
| | | | | | | | S0422: 2, L0764: 2, | | |
| | | | | | | | L0655: 2, L0606: 2, | | |
| | | | | | | | L0665: 2, L0439: 2, | | |
| | | | | | | | L0759: 2, S0114: 1, | | |
| | | | | | | | H0650: 1, H0369: 1, | | |
| | | | | | | | H0600: 1, H0581: 1, | | |
| | | | | | | | H0421: 1, H0014: 1, | | |
| | | | | | | | H0271: 1, H0615: 1, | | |
| | | | | | | | H0591: 1, H0038: 1, | | |
| | | | | | | | H0040: 1, H0063: 1, | | |
| | | | | | | | H0412: 1, H0494: 1, | | |
| | | | | | | | L0598: 1, L0520: 1, | | |
| | | | | | | | L0761: 1, L0662: 1, | | |
| | | | | | | | L0767: 1, L0649: 1, | | |
| | | | | | | | L0803: 1, L0775: 1, | | |
| | | | | | | | L0805: 1, L0809: 1, | | |
| | | | | | | | L0664: 1, L0438: 1, | | |
| | | | | | | | H0658: 1, H0672: 1, | | |
| | | | | | | | H0436: 1, L0747: 1 and | | |
| | | | | | | | S0196: 1. | | |
| | | 908034 | 516 | 262-795 | 1303 | Pro-10 to Ser-49, | | | |
| | | | | | | Ile-76 to Leu-85, | | | |
| | | | | | | Ala-146 to Gln-153, | | | |
| | | | | | | Gly-173 to Arg-178. | | | |
| 52 | HWLEP14 | 1118995 | 62 | 32-1348 | 849 | Pro-11 to Arg-21, | AR051: 2, AR0-61: 1, | | |
| | | | | | | Gly-34 to Ser-41, | AR089: 1, AR050: 1, | | |
| | | | | | | Pro-65 to Asn-72, | AR054: 1 | | |
| | | | | | | Ser-80 to Gln-85 | L0664: 3, S0354: 2, | | |
| | | | | | | Phe-124 to Cys-129, | H0617: 2, H0509: 2, | | |
| | | | | | | Asp-210 to Arg-215, | H0670: 2, L0601: 2, | | |
| | | | | | | Cys-219 to Ser-225, | H0170: 1, H0510: 1, | | |
| | | | | | | Gly-266 to Phe-271, | H0622: 1, H0604: 1, | | |
| | | | | | | Pro-275 to Leu-284 | L0662: 1, H0689: 1 and | | |
| | | | | | | Ser-332 to Lys-327, | H0683: 1. | | |
| | | | | | | Gln-344 to Thr-350, | | | |
| | | | | | | Ala-373 to Arg-387, | | | |
| | | | | | | Leu-401 to Lys-418. | | | |
| | | 907661 | 517 | 584-111 | 1304 | Ser-41 to Lys-46, | | | |
| | | | | | | Gln-63 to Thr-69, | | | |
| | | | | | | Ala-92 to Arg-106. | | | |
| | | | | | | Leu-120 to Lys-137. | | | |
| | | 907999 | 518 | 29-931 | 1305 | Asp-35 to Arg-40, | | | |
| | | | | | | Cys-44 to Ser-50, | | | |
| | | | | | | Gly-91 to Phe-96, | | | |
| | | | | | | Pro-100 to Leu-109, | | | |
| | | | | | | Ser-147 to Lys-152. | | | |
| 53 | HWLEP57 | 1178824 | 63 | 338-1012 | 850 | Arg-29 to Ala-48, | AR089: 1, AR061: 1 | | |
| | | | | | | Thr-59 to Asp-64, | L0373: 3, L0754: 3, | | |
| | | | | | | Ala-147 to Ser-160, | L0005: 2, S0354: 2, | | |
| | | | | | | Gly-168 to Leu-174, | H0331: 2, L0157: 2, | | |
| | | | | | | Val-178 to Ser-184, | L0646: 2, L0803: 2, | | |
| | | | | | | Val-203 to Ala-219. | L0659: 2, L0748: 2, | | |
| | | | | | | | L0581: 2, H0170: 1, | | |
| | | | | | | | S0376: 1, H0574: 1, | | |
| | | | | | | | H0632: 1, H0590: 1, | | |
| | | | | | | | H0596: 1, H0046: 1, | | |
| | | | | | | | H0510: 1, S00214: 1, | | |
| | | | | | | | H0598: 1, H0509: 1, | | |
| | | | | | | | L0598: 1, L0649: 1, | | |
| | | | | | | | S0406: 1 and S0434: 1. | | |
| | | 939458 | 519 | 525-1019 | 1306 | | | | |
| 54 | HWLFR20 | 907968 | 64 | 172-495 | 851 | | AR089: 1, AR061: 1, | | |
| | | | | | | | S0007: 2, S0354: 1, | | |
| | | | | | | | N0006: 1, H0622: 1 and | | |
| | | | | | | | H0478: 1. | | |
| 55 | HDQGP59 | 1137749 | 65 | 97-849 | 852 | Cys-1 to Arg-9, | AR089: 20, AR061: 6 | | |
| | | | | | | Pro-27 to Ser-36, | L0777: 8, L0766: 6, | | |
| | | | | | | Asp-78 to Lys-85, | L0809: 5, L0747: 4, | | |
| | | | | | | Asp-94 to Cys-101, | L0759: 4, L0794: 3, | | |
| | | | | | | Ile-130 to His-149, | L0776: 3, H0402: 2, | | |
| | | | | | | Gly-160 to Glu-194, | S0007: 2, H0497: 2, | | |
| | | | | | | Ala-210 to Ser-223, | L0763: 2, L0662: 2, | | |
| | | | | | | Ser-227 to Lys-239, | S0027: 2, L0740: 2, | | |
| | | | | | | Thr-241 to Ser-250. | L0751: 2, L0752: 2, | | |
| | | | | | | | L0731: 2, L0596: 2, | | |
| | | | | | | | L0588: 2, L0593: 2, | | |
| | | | | | | | H0662: 1, H0306: 1, | | |
| | | | | | | | H0580: 1, H0640: 1, | | |
| | | | | | | | H0411: 1, H0642: 1, | | |
| | | | | | | | T0040: 1, L0105: 1, | | |
| | | | | | | | H0327: 1, H0544: 1, | | |
| | | | | | | | H0545: 1, H0009: 1, | | |
| | | | | | | | S0051: 1, S0003: 1, | | |
| | | | | | | | H0090: 1, H0551: 1, | | |
| | | | | | | | H0494: 1, L0520: 1, | | |
| | | | | | | | L0770: 1, L0639: 1, | | |
| | | | | | | | L0803: 1, L0804: 1, | | |
| | | | | | | | L0775: 1, L0805: 1, | | |
| | | | | | | | L0655: 1, L0629: 1, | | |
| | | | | | | | L0519: 1, L0663: 1, | | |
| | | | | | | | H0547: 1, H0648: 1, | | |
| | | | | | | | H0651: 1, S0380: 1, | | |
| | | | | | | | H0521: 1, S0206: 1, | | |
| | | | | | | | L0744: 1, L0756: 1, | | |
| | | | | | | | L0779: 1, L0755: 1, | | |
| | | | | | | | L0758: 1, S0394: 1, | | |
| | | | | | | | H0543: 1 and H0506: 1. | | |
| | | 908260 | 520 | 87-839 | 1307 | Cys-1 to Arg-9, | | | |
| | | | | | | Pro-27 to Ser-36, | | | |
| | | | | | | Asp-78 to Lys-85, | | | |
| | | | | | | Asp-94 to Cys-101, | | | |
| | | | | | | Ile-130 to His-149, | | | |
| | | | | | | Gly-160 to Glu-194, | | | |
| | | | | | | Ala-210 to Ser-223, | | | |
| | | | | | | Ser-227 to Lys-239, | | | |
| | | | | | | Thr-241 to Ser-250. | | | |
| 56 | HE9OO78 | 1189361 | 66 | 321-1 | 853 | His-32 to Arg-46. | AR089: 46, AR061: 9 | | |
| | | | | | | | S0218: 1, H0580: 1, | | |
| | | | | | | | H0428: 1, L0659: 1, | | |
| | | | | | | | H0144: 1, L0748: 1, | | |
| | | | | | | | L0779: 1 and H0445: 1. | | |
| | | 916517 | 521 | 28-336 | 1308 | Cys-8 to His-13, | | | |
| | | | | | | Gly-36 to Glu-41, | | | |
| | | | | | | His-69 to Gly-80, | | | |
| | | | | | | Ala-83 to Cys-88. | | | |
| 57 | HFIYY25 | 1128990 | 67 | 3-587 | 854 | Tyr-59 to Tyr-67, | AR061: 2, AR089: 1 | | |
| | | | | | | Arg-70 to Leu-77, | L0766: 4, H0090: 3, | | |
| | | | | | | Lys-79 to Asn-86, | H0266: 2, H0529: 2, | | |
| | | | | | | Asn-98 to Val-111, | L0803: 2, L0774: 2, | | |
| | | | | | | Ser-114 to Ser-153, | L0754: 2, L0747: 2, | | |
| | | | | | | Thr-159 to Lys-195. | L0779: 2, L0759: 2, | | |
| | | | | | | | S0114: 1, H0583: 1, | | |
| | | | | | | | H0638: 1, S0356: 1, | | |
| | | | | | | | S0376: 1, H0676: 1, | | |
| | | | | | | | S0410: 1, H0580: 1, | | |
| | | | | | | | H0619: 1, S0222: 1, | | |
| | | | | | | | H0318: 1, H0373: 1, | | |
| | | | | | | | S0003: 1, H0328: 1, | | |
| | | | | | | | H0040: 1, H0616: 1, | | |
| | | | | | | | H0412: 1, H0772: 1, | | |
| | | | | | | | L0800: 1, L0789: 1, | | |
| | | | | | | | L0664: 1, H0144: 1, | | |
| | | | | | | | H0689: 1, H0682: 1, | | |
| | | | | | | | H0672: 1, H0539: 1, | | |
| | | | | | | | S0378: 1, L0751: 1, | | |
| | | | | | | | L0745: 1, L0749: 1, | | |
| | | | | | | | L0750: 1, L0731: 1, | | |
| | | | | | | | L0758: 1, L0593: 1, | | |
| | | | | | | | S0242: 1 and S0194: 1. | | |
| | | 575060 | 522 | 1-315 | 1309 | | | | |
| 58 | HHFBZ57 | 961502 | 68 | 62‥523 | 855 | Gly-23 to Ser-31, | AR089: 69, AR061: 22 | | |
| | | | | | | Ala-38 to Gly-50, | L0804: 3, L0779: 2, | | |
| | | | | | | Trp-52 to Phe-61, | H0445: 2, S0040: 1, | | |
| | | | | | | Pro-71 to Asp-76, | S0360: 1, S0408: 1, | | |
| | | | | | | Asp-82 to Phe-87, | H0619: 1, H0530: 1, | | |
| | | | | | | His-96 to Leu-101, | H0545: 1, H0050: 1, | | |
| | | | | | | Phe-109 to His-124, | L0800: 1, L0767: 1, | | |
| | | | | | | Pro-149 to Ser-154. | L0803: 1, L0775: 1, | | |
| | | | | | | | L0789: 1, S0330: 1, | | |
| | | | | | | | L0740: 1, L0747: 1, | | |
| | | | | | | | L0750: 1, L0758: 1 and | | |
| | | | | | | | S0424: 1. | | |
| 59 | HLTFA51 | 908283 | 69 | 114-1721 | 856 | | AR061: 3, AR089: 3 | | |
| | | | | | | | L0805: 3, L0794: 2, | | |
| | | | | | | | L0791: 2, L0777: 2, | | |
| | | | | | | | H0229: 1, H0592: 1, | | |
| | | | | | | | L0622: 1, H0486: 1, | | |
| | | | | | | | H0597: 1, L0041: 1, | | |
| | | | | | | | L0471: 1, H0399: 1, | | |
| | | | | | | | S0003: 1, H0553: 1, | | |
| | | | | | | | L0055: 1, H0598: 1, | | |
| | | | | | | | H0090: 1, H0634: 1, | | |
| | | | | | | | L0763: 1, L0642: 1, | | |
| | | | | | | | L0764: 1, L0766: 1, | | |
| | | | | | | | L0803: 1, L0804: 1, | | |
| | | | | | | | L0606: 1, L0542: 1, | | |
| | | | | | | | L0783: 1, L0809: 1, | | |
| | | | | | | | L0666: 1, L0663: 1, | | |
| | | | | | | | H0690: 1, H0672: 1, | | |
| | | | | | | | H0521: 1, H0696: 1, | | |
| | | | | | | | H0555: 1, H0478: 1, | | |
| | | | | | | | L0740: 1, L0752: 1, | | |
| | | | | | | | L0757: 1, S0031: 1, | | |
| | | | | | | | H0343: 1, L0591: 1, | | |
| | | | | | | | S0026: 1, H0543: 1, | | |
| | | | | | | | S0456: 1 and G0506: 1. | | |
| 60 | HMWEU15 | 1194780 | 70 | 233-991 | 857 | Asn-24 to Arg-34, | AR061: 8, AR089: 3 | | |
| | | | | | | Asn-46 to Lys-55, | L0766: 20, L0749: 15, | | |
| | | | | | | His-101 to Cys-110, | L0748: 13, L0777: 10, | | |
| | | | | | | Ile-123 to Ser-146, | H0341: 6, L0740: 6, | | |
| | | | | | | Cys-154 to Tyr-160 | H0560: 3, L0805: 3, | | |
| | | | | | | Cys-164 to Pro-174, | H0144: 3, L0779: 3, | | |
| | | | | | | Ile-188 to Gln-197, | H0650: 2, H0656: 2, | | |
| | | | | | | Ile-228 to Lys-253. | H0013: 2, H0156: 2, | | |
| | | | | | | | S0003: 2, H0591: 2, | | |
| | | | | | | | H0551: 2, H0264: 2, | | |
| | | | | | | | H0268: 2, L0598: 2, | | |
| | | | | | | | L0803: 2, S0374: 2, | | |
| | | | | | | | L0438: 2, L0780: 2, | | |
| | | | | | | | L0752: 2, L0758: 2, | | |
| | | | | | | | H0423: 2, H0624: 1, | | |
| | | | | | | | H0685: 1, S0430: 1, | | |
| | | | | | | | H0661: 1, H0449: 1, | | |
| | | | | | | | H0458: 1, S0420: 1, | | |
| | | | | | | | L0005: 1, H0580: 1, | | |
| | | | | | | | S0045: 1, S0046: 1, | | |
| | | | | | | | H0619: 1, S0222: 1, | | |
| | | | | | | | H0486: 1, H0581: 1, | | |
| | | | | | | | H0194: 1, T0103: 1, | | |
| | | | | | | | H0544: 1, L0157: 1, | | |
| | | | | | | | H0320: 1, H0083: 1, | | |
| | | | | | | | H0428: 1, H0040: 1, | | |
| | | | | | | | H0477: 1, H0488: 1, | | |
| | | | | | | | H0412: 1, H0623: 1, | | |
| | | | | | | | L0564: 1, S0464: 1, | | |
| | | | | | | | H0646: 1, L0520: 1, | | |
| | | | | | | | L0769: 1, L0772: 1, | | |
| | | | | | | | L0773: 1, L0364: 1, | | |
| | | | | | | | L0650: 1, L0378: 1, | | |
| | | | | | | | L0776: 1, L0657: 1, | | |
| | | | | | | | L0789: 1, L0791: 1, | | |
| | | | | | | | L0666: 1, L0665: 1, | | |
| | | | | | | | H0547: 1, H0519: 1, | | |
| | | | | | | | H0670: 1, H0539: 1, | | |
| | | | | | | | S0152: 1, H0521: 1, | | |
| | | | | | | | S0044: 1, L0754: 1, | | |
| | | | | | | | L0747: 1, L0750: 1, | | |
| | | | | | | | L0731: 1, L0589: 1, | | |
| | | | | | | | L0608: 1, L0366: 1, | | |
| | | | | | | | S0192: 1, S0194: 1, | | |
| | | | | | | | H0543: 1 and H0422: 1. | | |
| | | 779437 | 523 | 233-463 | 1310 | Asn-24 to Arg-34, | | | |
| | | | | | | Asn-46 to Asn-56, | | | |
| | | | | | | Thr-61 to Trp-66. | | | |
| 61 | HSKNJ36 | 1201009 | 71 | 421-2 | 858 | Lys-1 to His-6, | AR061: 2, AR089: 2 | | |
| | | | | | | Tyr-9 to His-15. | L0438: 10, L0740: 8, | | |
| | | | | | | | L0766: 7, L0745: 7, | | |
| | | | | | | | L0747: 7, S0045: 5, | | |
| | | | | | | | L0769: 5, L0777: 5, | | |
| | | | | | | | S0418: 4, S0360: 4, | | |
| | | | | | | | H0052: 4, L0657: 4, | | |
| | | | | | | | L0666: 4, L0665: 4, | | |
| | | | | | | | L0748: 4, L0779: 4, | | |
| | | | | | | | L0731: 4, L0758: 4, | | |
| | | | | | | | S0356: 3, S0222: 3, | | |
| | | | | | | | H0009: 3, H0622: 3, | | |
| | | | | | | | H0644: 3, L0771: 3, | | |
| | | | | | | | L0768: 3, L0651: 3, | | |
| | | | | | | | L0809: 3, S0152: 3, | | |
| | | | | | | | S0027: 3, L0439: 3, | | |
| | | | | | | | L0750: 3, H0265: 2, | | |
| | | | | | | | T0049: 2, H0650: 2, | | |
| | | | | | | | S0354: 2, S0358: 2, | | |
| | | | | | | | S0010: 2, L0471: 2, | | |
| | | | | | | | L0456: 2, H0040: 2, | | |
| | | | | | | | H0551: 2, H0494: 2, | | |
| | | | | | | | S0372: 2, L0646: 2, | | |
| | | | | | | | L0764: 2, L0803: 2, | | |
| | | | | | | | L0804: 2, L0774: 2, | | |
| | | | | | | | L0775: 2, L0653: 2, | | |
| | | | | | | | L0654: 2, L0659: 2, | | |
| | | | | | | | H0672: 2, L0602: 2, | | |
| | | | | | | | S0206: 2, L0757: 2, | | |
| | | | | | | | S0026: 2, H0542: 2, | | |
| | | | | | | | H0583: 1, H0657: 1, | | |
| | | | | | | | S0001: 1, S0282: 1, | | |
| | | | | | | | S0420: 1, H0431: 1, | | |
| | | | | | | | H0587: 1, H0497: 1, | | |
| | | | | | | | T0039: 1, T0040: 1, | | |
| | | | | | | | H0013: 1, H0599: 1, | | |
| | | | | | | | H0042: 1, H0618: 1, | | |
| | | | | | | | H0318: 1, H0309: 1, | | |
| | | | | | | | H0263: 1, L0738: 1, | | |
| | | | | | | | H0178: 1, H0012: 1, | | |
| | | | | | | | H0024: 1, S0050: 1, | | |
| | | | | | | | H0687: 1, S0003: 1, | | |
| | | | | | | | L0483: 1, T0006: 1, | | |
| | | | | | | | H0165: 1, H0212: 1, | | |
| | | | | | | | H0124: 1, H0068: 1, | | |
| | | | | | | | H0090: 1, L0351: 1, | | |
| | | | | | | | S0438: 1, H0509: 1, | | |
| | | | | | | | S0142: 1, L0598: 1, | | |
| | | | | | | | L0369: 1, L0770: 1, | | |
| | | | | | | | L0641: 1, L0648: 1, | | |
| | | | | | | | L0662: 1, L0794: 1, | | |
| | | | | | | | L0522: 1, L0806: 1, | | |
| | | | | | | | L0776: 1, L0629: 1, | | |
| | | | | | | | L0526: 1, L0664: 1, | | |
| | | | | | | | S0428: 1, H0144: 1, | | |
| | | | | | | | H0519: 1, H0689: 1, | | |
| | | | | | | | H0690: 1, H0682: 1, | | |
| | | | | | | | H0660: 1, H0666: 1, | | |
| | | | | | | | L0355: 1, H0521: 1, | | |
| | | | | | | | H0134: 1, H0436: 1, | | |
| | | | | | | | S3012: 1, S0037: 1, | | |
| | | | | | | | S0028: 1, L0471: 1, | | |
| | | | | | | | L0754: 1, L0746: 1, | | |
| | | | | | | | L0780: 1, L0752: 1, | | |
| | | | | | | | L0592: 1, L0599: 1, | | |
| | | | | | | | L0594: 1, L0595: 1, | | |
| | | | | | | | L0366: 1, H0667: 1, | | |
| | | | | | | | H0136: 1, S0192: 1, | | |
| | | | | | | | H0506: 1 and H0352: 1. | | |
| | | 958227 | 524 | 117-284 | 1311 | | | | |
| 62 | HTEDF22 | 1153917 | 72 | 2-565 | 859 | Ile-1 to Trp-12, | AR061: AR089: 3 | | |
| | | | | | | His-33 to Gly-40, | L0758: 2 and H0038: | | |
| | | | | | | Pro-42 to Gly-61, | 1. | | |
| | | | | | | Gly-73 to Lys-80, | | | |
| | | | | | | Cys-92 to Ile-98, | | | |
| | | | | | | Lys-100 to Thr-115, | | | |
| | | | | | | Arg-124 to Ser-136, | | | |
| | | | | | | His-142 to Ala-148, | | | |
| | | | | | | | Ser-166 to Gln-172. | | |
| | | 908406 | 525 | 1-303 | 1312 | Pro-2 to Trp-7, | | | |
| | | | | | | His-28 to Gly-35, | | | |
| | | | | | | Pro-37 to Gly-56, | | | |
| | | | | | | Gly-68 to Lys-75. | | | |
| 63 | HUSIJ74 | 1154803 | 73 | 99-851 | 860 | Asn-20 to Glu-28, | AR089: 2, AR061: 1 | | |
| | | | | | | Thr-65 to Pro-75, | L0731: 8, L0750: 5, | | |
| | | | | | | Glu-93 to Ile-99, | L0593: 4, H0009: 3, | | |
| | | | | | | Gly-111 to Pro-118, | L0662: 3, L0768: 3, | | |
| | | | | | | Gln-125 to Gln-139, | L0747: 3, L0591: 3, | | |
| | | | | | | Thr-150 to Ala-161, | L0592: 3, S0354: 2, | | |
| | | | | | | Pro-177 to Lys-187, | L0774: 2, H0547: 2, | | |
| | | | | | | Glu-192 to Lys-251. | L0749: 2, L0779: 2, | | |
| | | | | | | | L0752: 2, L0758: 2, | | |
| | | | | | | | S0031: 2, S0218: 1, | | |
| | | | | | | | S0029: 1, S0360: 1, | | |
| | | | | | | | S0045: 1, H0369: 1, | | |
| | | | | | | | S0222: 1, H0431: 1, | | |
| | | | | | | | T0040: 1, H0013: 1, | | |
| | | | | | | | H0318: 1, S0474: 1, | | |
| | | | | | | | H0052: 1, L0738: 1, | | |
| | | | | | | | H0544: 1, H0545: 1, | | |
| | | | | | | | H0046: 1, T0010: 1, | | |
| | | | | | | | H0188: 1, S0214: 1, | | |
| | | | | | | | H0591: 1, H0040: 1, | | |
| | | | | | | | H0412: 1, S0038: 1, | | |
| | | | | | | | H0100: 1, H0494: 1, | | |
| | | | | | | | S0142: 1, S0344: 1, | | |
| | | | | | | | H0529: 1, L0763: 1, | | |
| | | | | | | | L0772: 1, L0764: 1, | | |
| | | | | | | | L0767: 1, L0381: 1, | | |
| | | | | | | | L0375: 1, L0654: 1, | | |
| | | | | | | | L0776: 1, L0382: 1, | | |
| | | | | | | | H0144: 1, H0519: 1, | | |
| | | | | | | | H0539: 1, S3014: 1, | | |
| | | | | | | | S0032: 1, L0748: 1, | | |
| | | | | | | | L0751: 1, L0777: 1, | | |
| | | | | | | | L0755: 1, L0757: 1, | | |
| | | | | | | | L0596: 1, S0026: 1 and | | |
| | | | | | | | H0542: 1. | | |
| | | 963637 | 526 | 99-875 | 1313 | Asn-20 to Glu-28, | | | |
| | | | | | | Thr-65 to Pro-75, | | | |
| | | | | | | Glu-93 to Ile-99, | | | |
| | | | | | | Gly-111 to Pro-118, | | | |
| | | | | | | Gln-125 to Gln-139, | | | |
| | | | | | | Thr-150 to Ala-161, | | | |
| | | | | | | Pro-177 to Lys-187, | | | |
| | | | | | | Glu-192 to Lys-250. | | | |
| 64 | HWHGP91 | 1182053 | 74 | 1-1602 | 861 | Leu-14 to Leu-21, | AR061: 1, AR089: 0 | | |
| | | | | | | Lys-48 to Cys-56, | L0748: 8, L0750: 4, | | |
| | | | | | | Asn-58 to Asp-68, | H0486: 3, S0422: 3, | | |
| | | | | | | Ser-79 to Glu-84, | L0598: 3, L0771: 3, | | |
| | | | | | | Ala-92 to Arg-100, | S0376: 2, H0586: 2, | | |
| | | | | | | Asp-164 to Glu-172, | H0457: 2, H0031: 2, | | |
| | | | | | | Ile-178 to Val-184, | H0591: 2, L0763: 2, | | |
| | | | | | | Arg-203 to Arg-210, | L0662: 2, L0766: 2, | | |
| | | | | | | Lys-240 to Gly-266, | S0126: 2, L0747: 2, | | |
| | | | | | | His-281 to Phe-291, | L0777: 2, L0755: 2, | | |
| | | | | | | Leu-295 to Thr-306, | L0759: 2, H0543: 2, | | |
| | | | | | | Thr-323 to Thr-332, | H0556: 1, L0470: 1, | | |
| | | | | | | Glu-346 to Arg-352, | S0418: 1, L0005: 1, | | |
| | | | | | | Pro-385 to Leu-390, | H0580: 1, H0632: 1, | | |
| | | | | | | Pro-395 to Glu-409, | H0013: 1, H0036: 1, | | |
| | | | | | | Ser-424 to Glu-429, | L0157: 1, L0471: 1, | | |
| | | | | | | Ile-462 to Ser-467, | H0398: 1, H0615: 1, | | |
| | | | | | | Asp-474 to Thr-479, | H0111: 1, H0383: 1, | | |
| | | | | | | Asn-521 to Glu-534. | H0634: 1, H0623: 1, | | |
| | | | | | | | H0022: 1, L0770: 1, | | |
| | | | | | | | L0764: 1, L0773: 1, | | |
| | | | | | | | L0804: 1, L0666: 1, | | |
| | | | | | | | L0663: 1, L0664: 1, | | |
| | | | | | | | L0665: 1, H0144: 1, | | |
| | | | | | | | H0547: 1, H0519: 1, | | |
| | | | | | | | H0659: 1, H0666: 1, | | |
| | | | | | | | H0648: 1, S0380: 1, | | |
| | | | | | | | S0152: 1, L0751: 1, | | |
| | | | | | | | L0749: 1 and H0542: 1. | | |
| | | 958083 | 527 | 1-1491 | 1314 | Lys-11 to Cys-19, | | | |
| | | | | | | Asn-21 to Asp-31, | | | |
| | | | | | | Ser-42 to Glu-47, | | | |
| | | | | | | Ala-55 to Arg-63. | | | |
| 65 | HWLDO07 | 1152277 | 75 | 302-3 | 862 | | AR089: 3, AR061: 2 | | |
| | | | | | | | L0809: 3, S0132: 1, | | |
| | | | | | | | H0581: 1, H0015: 1, | | |
| | | | | | | | H0090: 1, H0561: 1, | | |
| | | | | | | | L0766: 1, L0783: 1, | | |
| | | | | | | | S0374: 1, S0152: 1, | | |
| | | | | | | | S0028: 1, L0755: 1 and | | |
| | | | | | | | H0543: 1. | | |
| | | 968923 | 528 | 70-585 | 1315 | Ser-14 to Leu-22, | | | |
| | | | | | | Ser-26 to Gly-33, | | | |
| | | | | | | Gly-37 to Leu-48, | | | |
| | | | | | | Leu-55 to Asp-77, | | | |
| | | | | | | Asp-101 to Arg-106, | | | |
| | | | | | | Lys-115 to Lys-131, | | | |
| | | | | | | Cys-139 to His-144. | | | |
| 66 | HWMGS22 | 1152428 | 76 | 3-1136 | 863 | Thr-1 to Thr-9, | AR061: 1, AR089: 0 | | |
| | | | | | | Thr-71 to Asn-76, | H0038: 2, L0779: 2, | | |
| | | | | | | Ala-118 to Ser-130, | L0758: 2, S0358: 1, | | |
| | | | | | | Ser-157 to Ser-168, | L0623: 1, H0618: 1, | | |
| | | | | | | His-182 to Pro-197, | H0253: 1, H0163: 1, | | |
| | | | | | | Gln-255 to Gly-260, | L0774: 1 and S0152: 1. | | |
| | | | | | | Pro-269 to Pro-276, | | | |
| | | | | | | Asn-312 to Asn-321, | | | |
| | | | | | | Gly-328 to Lys-338, | | | |
| | | | | | | Pro-340 to Ser-363. | | | |
| | | 967700 | 529 | 2-1126 | 1316 | Pro-1 to Thr-6, | | | |
| | | | | | | Thr-68 to Asn-73, | | | |
| | | | | | | Ala-115 to Ser-127, | | | |
| | | | | | | Ser-154 to Ser-165, | | | |
| | | | | | | His-179 to Pro-194, | | | |
| | | | | | | Gln-252 to Gly-257, | | | |
| | | | | | | Pro-266 to Pro-273, | | | |
| | | | | | | Asn-309 to Asn-318, | | | |
| | | | | | | Gly-325 to Lys-335, | | | |
| | | | | | | Pro-337 to Gly-345. | | | |
| 67 | HDAAQ07 | 1227648 | 77 | 469-1062 | 864 | | AR089: 3, AR061: 1 | | |
| | | | | | | | L0574: 6, L0666: 4, | | |
| | | | | | | | L0731: 4, L0794: 3, | | |
| | | | | | | | L0766: 3, H0659: 3, | | |
| | | | | | | | H0657: 2, H0341: 2, | | |
| | | | | | | | H0551: 2, L0598: 2, | | |
| | | | | | | | L0521: 2, L0526: 2, | | |
| | | | | | | | L0665: 2, H0435: 2, | | |
| | | | | | | | L0592: 2, L0485: 2, | | |
| | | | | | | | S0212: 1, S0222: 1, | | |
| | | | | | | | H0586: 1, H0497: 1, | | |
| | | | | | | | H0156: 1, H0046: 1, | | |
| | | | | | | | S0214: 1, H0615: 1, | | |
| | | | | | | | H0622: 1, H0553: 1, | | |
| | | | | | | | H0168: 1, H0598: 1, | | |
| | | | | | | | H0100: 1, H0429: 1, | | |
| | | | | | | | S0352: 1, S0440: 1, | | |
| | | | | | | | S0422: 1, UNKWN: 1, | | |
| | | | | | | | L0771: 1, L0803: 1, | | |
| | | | | | | | L0804: 1, L0774: 1, | | |
| | | | | | | | L0375: 1, L0651: 1, | | |
| | | | | | | | L0805: 1, L0776: 1, | | |
| | | | | | | | L0518: 1, L0791: 1, | | |
| | | | | | | | L0792: 1, L0663: 1, | | |
| | | | | | | | H0547: 1, S0126: 1, | | |
| | | | | | | | H0690: 1, H0666: 1, | | |
| | | | | | | | H0539: 1, S0044: 1, | | |
| | | | | | | | H0436: 1, S0028: 1, | | |
| | | | | | | | L0777: 1, L0759: 1, | | |
| | | | | | | | H0707: 1 and H0506: 1. | | |
| | | 953219 | 530 | 211-546 | 1317 | Lys-1 to Thr-6, | | | |
| | | | | | | Thr-8 to Asp-14. | | | |
| 68 | HTEBC74 | 1222351 | 78 | 90-2348 | 865 | Pro-43 to Asn-50, | AR054: 7, AR051: 2, | | |
| | | | | | | Asn-101 to Thr-107, | AR089: 1, AR061: 0 | | |
| | | | | | | Asp-186 to Lys-191, | L0663: 2, H0038: 1, | | |
| | | | | | | Ser-208 to Thr-213, | H0672: 1 and L0779: 1. | | |
| | | | | | | Asn-227 to Asn-235, | | | |
| | | | | | | Lys-247 to Arg-254, | | | |
| | | | | | | Arg-371 to Lys-379, | | | |
| | | | | | | Gly-414 to Phe-420, | | | |
| | | | | | | Gly-452 to Arg-458. | | | |
| | | 887782 | 531 | 1-321 | 1318 | Pro-32 to Asn-39. | | | |
| 69 | H2LAC34 | 1155406 | 79 | 3-995 | 866 | Arg-33 to Gln-44, | AR061: 4, AR089: 2 | | |
| | | | | | | His-47 to Ala-53, | H0457: 5, L0759: 3, | | |
| | | | | | | Asn-64 to Pro-72, | H0620: 2, H0031: 2, | | |
| | | | | | | Arg-89 to Lys-99, | L0806: 2, L0776: 2, | | |
| | | | | | | Asp-101 to Cys-107, | L0657: 2, L0439: 2, | | |
| | | | | | | Lys-115 to Asn-132, | H0419: 1, S0360: 1, | | |
| | | | | | | Lys-144 to Cys-161, | S0408: 1, S0046: 1, | | |
| | | | | | | Cys-167 to Asn-173, | H0393: 1, T0115: 1, | | |
| | | | | | | Arg-179 to Lys-185, | H0123: 1, T0010: 1, | | |
| | | | | | | Pro-187 to Arg-194, | H0553: 1, L0055: 1, | | |
| | | | | | | Lys-196 to Met-203, | T0041: 1, S0150: 1, | | |
| | | | | | | Leu-219 to Ser-227, | L0769: 1, L0773: 1, | | |
| | | | | | | Pro-247 to Glu-263, | L0768: 1, L0387: 1, | | |
| | | | | | | Thr-284 to Gln-289, | L0766: 1, L0649: 1, | | |
| | | | | | | Ala-300 to Ser-312. | L0774: 1, L0775: 1, | | |
| | | | | | | | L0635: 1, L0789: 1, | | |
| | | | | | | | L0438: 1, H0520: 1, | | |
| | | | | | | | H0547: 1, H0689: 1, | | |
| | | | | | | | L0748: 1, L0751: 1, | | |
| | | | | | | | L0779: 1, L0752: 1, | | |
| | | | | | | | L0731: 1, L0757: 1 and | | |
| | | | | | | | S0424: 1. | | |
| | | 908478 | 532 | 35-502 | 1319 | Arg-42 to Gln-53, | | | |
| | | | | | | His-56 to Ala-62, | | | |
| | | | | | | Asn-73 to Pro-81. | | | |
| 70 | H2MBH48 | 1197893 | 80 | 463-1188 | 867 | Glu-15 to Lys-27, | AR089: 6, AR061: 6 | | |
| | | | | | | His-42 to Lys-51, | T0109: 1 and L0601: 1. | | |
| | | | | | | Arg-68 to Pro-75, | | | |
| | | | | | | His-98 to Cys-109, | | | |
| | | | | | | Arg-153 to Phe-161, | | | |
| | | | | | | His-183 to Arg-196, | | | |
| | | | | | | Thr-212 to Tyr-217, | | | |
| | | | | | | Leu-225 to Gln-230. | | | |
| | | 908926 | 533 | 103-411 | 1320 | His-17 to Lys-26, | | | |
| | | | | | | Gln-47 to Glu-53, | | | |
| | | | | | | His-78 to Ala-85. | | | |
| 71 | HADDT27 | 908924 | 81 | 1-363 | 868 | Glu-1 to Tyr-10, | AR089: 1, AR061: 0 | | |
| | | | | | | Arg-30 to Cys-43, | H0427:1 and T0010: | | |
| | | | | | | Arg-55 to Gly-62, | 1. | | |
| | | | | | | Pro-65 to Gly-72, | | | |
| | | | | | | His-88 to Gly-100, | | | |
| | | | | | | Glu-113 to Pro-121. | | | |
| 72 | HADEU45 | 1154784 | 82 | 2-742 | 869 | Glu-140 to His-150, | AR089: 5, AR061: 1 | | |
| | | | | | | Ala-159 to Tyr-164, | L0439: 2, S0040: 1, | | |
| | | | | | | Gln-181 to Tyr-192, | H0329: 1, H0427: 1, | | |
| | | | | | | Arg-212 to Val-221. | L0471: 1, H0014: 1, | | |
| | | | | | | | H0547: 1, H0187: 1 and | | |
| | | | | | | | H0436: 1. | | |
| | | 909260 | 534 | 1-462 | 1321 | His-18 to Asn-38, | | | |
| | | | | | | Thr-47 to Ile-53, | | | |
| | | | | | | His-74 to Cys-85. | | | |
| 73 | HAGGF27 | 1134356 | 83 | 704-534 | 870 | Glu-8 to Asn-17. | AR089: 10, AR061: 6 | | |
| | | | | | | | S0346: 1, H0052: 1, | | |
| | | | | | | | S0051: 1, H0428: 1 and | | |
| | | | | | | | S0021: 1. | | |
| | | 682710 | 535 | 267-422 | 1322 | | | | |
| 74 | HAMGP61 | 1175397 | 84 | 74-1675 | 871 | Lys-1 to Pro-7, | AR061: 61, AR089: 48 | | |
| | | | | | | Pro-11 to Cys-26, | L0766: 5, S0328: 3, | | |
| | | | | | | Pro-44 to Gly-51, | L0776: 2, L0740: 2, | | |
| | | | | | | Arg-60 to Leu-66, | L0745: 2, H0656: 1, | | |
| | | | | | | Leu-105 to Asn-110, | S0003: 1, H0268: 1, | | |
| | | | | | | Val-114 to Ala-121, | H0560: 1, L0764: 1, | | |
| | | | | | | Ser-169 to Thr-175, | L0773: 1, S0136: 1 and | | |
| | | | | | | Glu-181 to Lys-188, | L0777: 1. | | |
| | | | | | | Pro-214 to Gly-236, | | | |
| | | | | | | Lys-246 to Val-254, | | | |
| | | | | | | Val-261 to Lys-271, | | | |
| | | | | | | Glu-274 to Lys-288, | | | |
| | | | | | | His-319 to Ile-327, | | | |
| | | | | | | Ser-345 to Ala-361, | | | |
| | | | | | | Thr-398 to Asn-411, | | | |
| | | | | | | Glu-426 to Ser-431, | | | |
| | | | | | | His-434 to Lys-459. | | | |
| | | 925843 | 536 | 74-943 | 1323 | Lys-1 to Pro-7, | | | |
| | | | | | | Pro-11 to Cys-26, | | | |
| | | | | | | Pro-44 to Gly-51, | | | |
| | | | | | | Arg-60 to Leu-66, | | | |
| | | | | | | Leu-105 to Asn-110, | | | |
| | | | | | | Val-114 to Ala-121, | | | |
| | | | | | | Ser-169 to Thr-175, | | | |
| | | | | | | Glu-181 to Lys-188, | | | |
| | | | | | | Pro-214 to Gly-236. | | | |
| 75 | HAMHT22 | 968753 | 85 | 288-746 | 872 | Leu-7 to Asp-27, | AR089: 2, AR061: 1 | | |
| | | | | | | Lys-29 to Pro-49, | | | |
| | | | | | | Thr-72 to Lys-85, | | | |
| | | | | | | Met-95 to Lys-100, | | | |
| | | | | | | Gly-121 to Lys-130. | | | |
| 76 | HATEE95 | 1155408 | 86 | 498-154 | 873 | Asn-1 to Asp-8, | AR061: 4, AR089: 2 | | |
| | | | | | | Ser-41 to Ser-51, | L0600: 4, H0156: 1, | | |
| | | | | | | Ser-63 to Leu-78, | L0655: 1, L0352: 1, | | |
| | | | | | | Ser-99 to Ala-104, | L0439: 1, L0604: 1 and: | | |
| | | | | | | Phe-106 to Gln-112. | 1. | | |
| | | 908958 | 537 | 3-314 | 1324 | Gln-6 to Leu-11, | | | |
| | | | | | | Leu-13 to Gln-20, | | | |
| | | | | | | Val-29 to His-35, | | | |
| | | | | | | Ile-42 to Ser-57, | | | |
| | | | | | | Ala-61 to Thr-67, | | | |
| | | | | | | Thr-82 to His-93, | | | |
| | | | | | | His-97 to Met-104. | | | |
| 77 | HBGMT12 | 1165291 | 87 | 1-810 | 874 | Gly-1 to Ser-6, | AR061: 5, AR089: 3 | | |
| | | | | | | Ser-13 to Asp-24, | H0617: 2, H0038: 2, | | |
| | | | | | | Asp-37 to Gly-53, | L0596: 2, H0204: 1, | | |
| | | | | | | Ser-65 to Gly-87, | L0662: 1, L0664: 1 and | | |
| | | | | | | Thr-91 to Ala-97, | L0665: 1. | | |
| | | | | | | Arg-131 to Arg-141, | | | |
| | | | | | | Thr-165 to Cys-172, | | | |
| | | | | | | Tyr-201 to Lys-207, | | | |
| | | | | | | Gly-218 to Asp-223, | | | |
| | | | | | | Ala-256 to Lys-270. | | | |
| | | 908935 | 538 | 88-558 | 1325 | | | | |
| 78 | HBGPJ37 | 1133633 | 88 | 1-525 | 875 | Arg-14 to Glu-24, | AR061: 6, AR089: 5 | | |
| | | | | | | Ser-33 to His-41, | H0617: 2, L0779: 2, | | |
| | | | | | | Glu-43 to Cys-53, | L0794: 1, L0791: 1, | | |
| | | | | | | Pro-76 to Ala-89, | H0682: 1 and L0747: 1. | | |
| | | | | | | Glu-91 to Ala-106, | | | |
| | | | | | | Leu-134 to Gln-142, | | | |
| | | | | | | Phe-150 to Asp-155, | | | |
| | | | | | | Lys-165 to Asn-173. | | | |
| | | 908692 | 539 | 1-525 | 1326 | Arg-14 to Glu-24, | | | |
| | | | | | | Ser-33 to His-41, | | | |
| | | | | | | Glu-43 to Cys-53, | | | |
| | | | | | | Pro-76 to Ala-89, | | | |
| | | | | | | Glu-91 to Ala-106, | | | |
| | | | | | | Leu-134 to Gln-142, | | | |
| | | | | | | Phe-150 to Asp-155, | | | |
| | | | | | | Lys-165 to Asn-173. | | | |
| 79 | HBIOS05 | 1226362 | 89 | 794-2686 | 876 | Pro-44 to Met-56, | AR089: 4, AR061: 2 | | |
| | | | | | | Arg-91 to Thr-104, | H0593: 4 | | |
| | | | | | | Ala-117 to Ala-122, | | | |
| | | | | | | Ala-159 to Gly-164, | | | |
| | | | | | | Glu-179 to Leu-192, | | | |
| | | | | | | Pro-195 to Pro-201, | | | |
| | | | | | | Tyr-215 to Asp-222, | | | |
| | | | | | | Gln-242 to Arg-250, | | | |
| | | | | | | Ser-296 to Leu-307, | | | |
| | | | | | | Ser-365 to Leu-374, | | | |
| | | | | | | Arg-432 to Arg-439, | | | |
| | | | | | | Ser-466 to Arg-472, | | | |
| | | | | | | Ala-496 to Ala-501, | | | |
| | | | | | | Asp-599 to Pro-607, | | | |
| | | | | | | Val-611 to Gly-617, | | | |
| | | | | | | Pro-620 to Asp-625. | | | |
| | | 930776 | 540 | 3-437 | 1327 | Met-44 to Gly-49, | | | |
| | | | | | | Gln-105 to Gln-120. | | | |
| 80 | HBJCD80 | 1124609 | 90 | 68-592 | 877 | Ala-31 to Tyr-38, | AR061: 2, AR089: 1 | | |
| | | | | | | Ser-59 to Ala-72, | L0758: 2, H0318: 1, | | |
| | | | | | | Thr-99 to Tyr-113, | H0309: 1, H0616: 1, | | |
| | | | | | | Ser-142 to Asn-147. | H0623: 1, L0804: 1 and | | |
| | | | | | | L0595: 1. | | | |
| | | 766265 | 541 | 2-505 | 1328 | Ala-24 to Tyr-31, | | | |
| | | | | | | Ser-52 to Ala-65, | | | |
| | | | | | | Thr-92 to Tyr-106. | | | |
| 81 | HBJLR31 | 900883 | 91 | 3-956 | 878 | His-7 to Gly-17, | AR061: 4, AR089: 3, | | |
| | | | | | | Gly-28 to Gln-33, | AR051: 2, AR050: 1, | | |
| | | | | | | Asp-51 to Ala-59, | AR054: 1 | | |
| | | | | | | Glu-94 to Glu-101, | H0318: 1 | | |
| | | | | | | Pro-118 to Val-123, | | | |
| | | | | | | Pro-143 to Gly-152, | | | |
| | | | | | | Gln-203 to Glu-211, | | | |
| | | | | | | Ser-213 to Thr-226, | | | |
| | | | | | | Ser-233 to Gln-239, | | | |
| | | | | | | Arg-274 to Ser-279, | | | |
| | | | | | | His-288 to Pro-294. | | | |
| 82 | HBMTY04 | 1161434 | 92 | 113-664 | 879 | Pro-11 to His-30, | AR089: 17, AR061: 12 | | |
| | | | | | | His-60 to Ser-69, | L0731: 3, S0116: 1, | | |
| | | | | | | Met-128 to Gly-133, | S0003: 1, H0328: 1, | | |
| | | | | | | Val-162 to Lys-176. | L0375: 1, S0152: 1, | | |
| | | | | | | | S0027: 1, L0747: 1 and | | |
| | | | | | | | L0759: 1. | | |
| | | 908630 | 542 | 3-644 | 1329 | Ser-25 to Leu-30, | | | |
| | | | | | | Met-52 to His-66, | | | |
| | | | | | | His-96 to Ser-105, | | | |
| | | | | | | Met-164 to Gly-169. | | | |
| 83 | HBMXV17 | 1180381 | 93 | 27-416 | 880 | Pro-43 to His-59, | AR061: 2, AR089: 1 | | |
| | | | | | | Arg-73 to Thr-80. | H0046: 7, L0774: 2, | | |
| | | | | | | | S0116: 1, H0431: 1, | | |
| | | | | | | | L0804: 1, L0666: 1 and | | |
| | | | | | | | L0361: 1. | | |
| | | 799661 | 543 | 27-338 | 1330 | Pro-43 to Thr-60. | | | |
| 84 | HBNMF62 | 1197896 | 94 | 1015-1770 | 881 | Trp-1 to Gly-11, | AR089: 2, AR061: 1 | | |
| | | | | | | Ser-27 to Pro-36, | L0754: 7, L0748: 4, | | |
| | | | | | | Pro-38 to Ala-45, | S0007: 3, L0771: 3, | | |
| | | | | | | Gly-48 to Lys-57, | L0749: 3, L0750: 3, | | |
| | | | | | | Phe-72 to Tyr-77, | L0600: 3, L0717: 2, | | |
| | | | | | | Asn-79 to Ser-93, | H0618: 2, H0046: 2, | | |
| | | | | | | Ser-117 to Tyr-122, | H0561: 2, S0422: 2, | | |
| | | | | | | His-144 to Leu-150, | L0763: 2, L0637: 2, | | |
| | | | | | | Cys-186 to Asp-194, | L0794: 2, L0659: 2, | | |
| | | | | | | Gln-212 to Pro-218, | H0660: 2, L0439: 2, | | |
| | | | | | | Glu-235 to Gln-244. | L0755: 2, T0002: 1, | | |
| | | | | | | | H0583: 1, H0671: 1, | | |
| | | | | | | | S0354: 1, S6016: 1, | | |
| | | | | | | | H0586: 1, L0021: 1, | | |
| | | | | | | | H0052: 1, S0051: 1, | | |
| | | | | | | | T0010: 1, H0083: 1, | | |
| | | | | | | | H0553: 1, H0135: 1, | | |
| | | | | | | | H0063: 1, H0633: 1, | | |
| | | | | | | | L0639: 1, L0646: 1, | | |
| | | | | | | | L0649: 1, L0375: 1, | | |
| | | | | | | | L0655: 1, L0545: 1, | | |
| | | | | | | | L0647: 1, L0664: 1, | | |
| | | | | | | | L0665: 1, H0670: 1, | | |
| | | | | | | | H0672: 1, S0378: 1, | | |
| | | | | | | | H0696: 1, L0751: 1, | | |
| | | | | | | | L0752: 1, L0758: 1, | | |
| | | | | | | | L0759: 1, L0596: 1, | | |
| | | | | | | | L0608: 1 and H0423: 1. | | |
| | | 909051 | 544 | 269-1174 | 1331 | Pro-13 to Gly-25, | | | |
| | | | | | | Arg-47 to Gly-54, | | | |
| | | | | | | Pro-74 to Lys-81, | | | |
| | | | | | | His-87 to Trp-93, | | | |
| | | | | | | Glu-107 to Arg-121. | | | |
| 85 | HBWAG76 | 767711 | 95 | 462-40 | 882 | | AR089: 5, AR061: 2 | | |
| | | | | | | | S0001: 1 and S0021: 1. | | |
| | | 769922 | 545 | 3-200 | 1332 | | | | |
| 86 | HBWBG94 | 1227633 | 96 | 3-1733 | 883 | Ile-10 to Glu-15, | AR089: 17, AR061: 6 | | |
| | | | | | | Glu-22 to Asp-33, | L0382: 2, H0539: 2, | | |
| | | | | | | Thr-52 to Asp-65, | L0604: 2, S0046: 1, | | |
| | | | | | | Ser-73 to Gly-90, | H0587: 1, H0013: 1, | | |
| | | | | | | Arg-103 to Val-125, | H0266: 1, L0455: 1, | | |
| | | | | | | His-134 to Lys-141, | H0038: 1, S0038: 1, | | |
| | | | | | | His-162 to Arg-179, | S0386: 1, L0805: 1, | | |
| | | | | | | Phe-191 to Thr-206, | L0659: 1, L0791: 1, | | |
| | | | | | | Lys-212 to Glu-219, | H0519: 1, H0696: 1, | | |
| | | | | | | Ser-225 to Asn-231, | H0694: 1, L0748: 1, | | |
| | | | | | | Gly-246 to Gln-252, | L0747: 1, L0779: 1, | | |
| | | | | | | Pro-263 to Ser-271, | L0755: 1, H0665: 1 and | | |
| | | | | | | Tyr-275 to Gly-293, | L0697: 1. | | |
| | | | | | | His-309 to Val-328, | | | |
| | | | | | | His-337 to Tyr-343, | | | |
| | | | | | | Ser-366 to Phe-380, | | | |
| | | | | | | Ser-394 to Glu-403, | | | |
| | | | | | | Gly-423 to Asn-429, | | | |
| | | | | | | Lys-446 to Gln-456, | | | |
| | | | | | | Thr-478 to Gln-484, | | | |
| | | | | | | Arg-489 to Arg-518, | | | |
| | | | | | | His-533 to Gly-545, | | | |
| | | | | | | Arg-559 to Pro-566. | | | |
| | | 908988 | 546 | 1-396 | 1333 | Arg-1 to Gln-11, | | | |
| | | | | | | Thr-33 to Gln-39, | | | |
| | | | | | | Arg-44 to Arg-73, | | | |
| | | | | | | His-88 to Gly-100, | | | |
| | | | | | | Arg-114 to Pro-121. | | | |
| 87 | HCABL26 | 1153875 | 97 | 2-430 | 884 | Gly-1 to His-11, | AR061: 1, AR089: 1 | | |
| | | | | | | Ser-33 to Cys-48, | H0125: 1 and S0037: 1. | | |
| | | | | | | Asn-86 to Arg-93, | | | |
| | | | | | | Ala-119 to Pro-132. | | | |
| | | 921130 | 547 | 3-836 | 1334 | Ser-18 to Gly-32, | | | |
| | | | | | | Asn-71 to Arg-78, | | | |
| | | | | | | Ala-104 to Pro-117, | | | |
| | | | | | | Ser-133 to Ser-140. | | | |
| 88 | HCBAB76 | 1153876 | 98 | 140-667 | 885 | Arg-1 to Gly-31, | AR061: 9, AR089: 4 | | |
| | | | | | | Ser-52 to Arg-57. | L0769: 3, H0657: 2, | | |
| | | | | | | | H0661: 2, H0587: 2, | | |
| | | | | | | | H0494: 2, H0625: 2, | | |
| | | | | | | | L0772: 2, L0439: 2, | | |
| | | | | | | | L0588: 2, H0170: 1, | | |
| | | | | | | | H0159: 1, H0176: 1, | | |
| | | | | | | | H0438: 1, H0486: 1, | | |
| | | | | | | | T0040: 1, H0563: 1, | | |
| | | | | | | | H0373: 1, H0266: 1, | | |
| | | | | | | | H0124: 1, H0616: 1, | | |
| | | | | | | | L0369: 1, L0770: 1, | | |
| | | | | | | | L0372: 1, L0764: 1, | | |
| | | | | | | | L0773: 1, L0363: 1, | | |
| | | | | | | | L0767: 1, L0775: 1, | | |
| | | | | | | | L0776: 1, L0809: 1, | | |
| | | | | | | | L0367: 1, S0044: 1, | | |
| | | | | | | | L0754: 1, L0747: 1, | | |
| | | | | | | | L0750: 1, L0756: 1, | | |
| | | | | | | | L0777: 1, S0434: 1, | | |
| | | | | | | | L0581: 1, H0665: 1 and | | |
| | | | | | | | S0424: 1. | | |
| | | 926750 | 548 | 144-533 | 1335 | Arg-1 to Gly-31, | | | |
| | | | | | | Ser-52 to Arg-57. | | | |
| 89 | HCE1Q39 | 1197897 | 99 | 2-1126 | 886 | Tyr-6 to Val-20, | AR089: 1, AR061: 0 | | |
| | | | | | | Gly-24 to Gln-38. | L0806: 5, H0295: 4, | | |
| | | | | | | | L0769: 4, L0783: 4, | | |
| | | | | | | | H0494: 3, L0774: 3, | | |
| | | | | | | | H0545: 2, H0024: 2, | | |
| | | | | | | | L0763: 2, L0803: 2, | | |
| | | | | | | | L0665: 2, H0539: 2, | | |
| | | | | | | | L0750: 2, L0731: 2, | | |
| | | | | | | | L0759: 2, H0170: 1, | | |
| | | | | | | | S0358: 1, S0278: 1, | | |
| | | | | | | | S0222: 1, H0592: 1, | | |
| | | | | | | | H0052: 1, H0033: 1, | | |
| | | | | | | | H0424: 1, H0598: 1, | | |
| | | | | | | | H0641: 1, L0770: 1, | | |
| | | | | | | | L0630: 1, L0807: 1, | | |
| | | | | | | | L0659: 1, L0809: 1, | | |
| | | | | | | | L0787: 1, L0789: 1, | | |
| | | | | | | | L0666: 1, L0663: 1, | | |
| | | | | | | | H0519: 1, H0522: 1, | | |
| | | | | | | | H0478: 1, L0743: 1, | | |
| | | | | | | | L0439: 1, L0745: 1, | | |
| | | | | | | | L0779: 1, L0755: 1, | | |
| | | | | | | | L0758: 1 and H0667: 1. | | |
| | | 694820 | 549 | 2-337 | 1336 | | | | |
| 90 | HCE3V01 | 1151015 | 100 | 2014-1208 | 887 | Ser-1 to Gly-6, | AR089: 3, AR061: 2 | | |
| | | | | | | Arg-22 to Val-29, | L0794: 6, L0435: 3, | | |
| | | | | | | Thr-51 to Gly-62, | L0803: 3, H0144: 3, | | |
| | | | | | | His-74 to Glu-81. | L0777: 3, L0731: 3, | | |
| | | | | | | | H0624: 2, S0007: 2, | | |
| | | | | | | | L0766: 2, L0809: 2, | | |
| | | | | | | | L0438: 2, H0547: 2, | | |
| | | | | | | | L0439: 2, L0755: 2, | | |
| | | | | | | | H0052: 1, H0641: 1, | | |
| | | | | | | | L0369: 1, L0771: 1, | | |
| | | | | | | | L0650: 1, L0775: 1, | | |
| | | | | | | | L0375: 1, L0655: 1, | | |
| | | | | | | | L0791: 1, L0666: 1, | | |
| | | | | | | | H0670: 1, H0672: 1, | | |
| | | | | | | | S0013: 1, L0593: 1 and | | |
| | | | | | | | H0423: 1. | | |
| | | 908905 | 550 | 190-795 | 1337 | Arg-3 to Glu-14. | | | |
| 91 | HCEDM42 | 1153877 | 101 | 110-766 | 888 | Arg-7 to Gly-12, | AR061: 11, AR089: 4 | | |
| | | | | | | Met-42 to Ser-58, | L0439: 6, L0766: 5, | | |
| | | | | | | Gln-65 to Asn-73, | L0748: 4, S0356: 3, | | |
| | | | | | | Glu-91 to Ala-99, | L0747: 3, H0265: 2, | | |
| | | | | | | Pro-103 to Tyr-109, | H0556: 2, H0657: 2, | | |
| | | | | | | Arg-174 to Ala-179, | H0656: 2, H0333: 2, | | |
| | | | | | | His-189 to Gln-196, | H0581: 2, H0620: 2, | | |
| | | | | | | Asn-208 to Pro-219. | H0617: 2, H0625: 2, | | |
| | | | | | | | L0662: 2, S0126: 2, | | |
| | | | | | | | L0740: 2, L0601: 2, | | |
| | | | | | | | S0196: 2, H0685: 1, | | |
| | | | | | | | T0049: 1, H0484: 1, | | |
| | | | | | | | S0046: 1, S0278: 1, | | |
| | | | | | | | H0550: 1, H0592: 1, | | |
| | | | | | | | H0497: 1, H0486: 1, | | |
| | | | | | | | S0474: 1, H0052: 1, | | |
| | | | | | | | T0110: 1, H0597: 1, | | |
| | | | | | | | H0009: 1, H0083: 1, | | |
| | | | | | | | H0687: 1, H0169: 1, | | |
| | | | | | | | H0598: 1, H0040: 1, | | |
| | | | | | | | H0087: 1, H0264: 1, | | |
| | | | | | | | H0413: 1, H0056: 1, | | |
| | | | | | | | H0646: 1, S0142: 1, | | |
| | | | | | | | L0763: 1, L0769: 1, | | |
| | | | | | | | L0764: 1, L0774: 1, | | |
| | | | | | | | L0655: 1, L0659: 1, | | |
| | | | | | | | L0663: 1, H0547: 1, | | |
| | | | | | | | L0779: 1, L0780: 1, | | |
| | | | | | | | L0731: 1, L0588: 1, | | |
| | | | | | | | S0242: 1, H0543: 1 and | | |
| | | | | | | | S0456: 1. | | |
| | | 908467 | 551 | 110-766 | 1338 | Arg-7 to Gly-12, | | | |
| | | | | | | Met-42 to Ser-58, | | | |
| | | | | | | Gln-65 to Asn-73, | | | |
| | | | | | | Glu-91 to Ala-99, | | | |
| | | | | | | Pro-103 to Tyr-109, | | | |
| | | | | | | Arg-174 to Ala-179, | | | |
| | | | | | | His-189 to Gln-196, | | | |
| | | | | | | Asn-208 to Pro-219. | | | |
| 92 | HCEJG43 | 908879 | 102 | 3-458 | 889 | Cys-17 to Cys-22. | AR061: 1, AR089: 0 | 2q34-q35 | 100730, |
| | | | | | | | L0751: 2, H0265: 1, | | 118800, |
| | | | | | | | H0052: 1 and H0009: 1. | | 123660, |
| | | | | | | | | | 125660, |
| | | | | | | | | | 125660, |
| | | | | | | | | | 135600, |
| | | | | | | | | | 157655, |
| | | | | | | | | | 186860, |
| | | | | | | | | | 193500, |
| | | | | | | | | | 193500, |
| | | | | | | | | | 193500, |
| | | | | | | | | | 193500, |
| | | | | | | | | | 201460, |
| | | | | | | | | | 205100, |
| | | | | | | | | | 237300, |
| | | | | | | | | | 262000, |
| | | | | | | | | | 600266, |
| | | | | | | | | | 601277, |
| | | | | | | | | | 601318 |
| 93 | HCELA90 | 1124675 | 103 | 1273-2298 | 890 | Asp-1 to His-16. | AR089: 1, AR061: 1 | | |
| | | | | | | | H0124: 13, L0809: 7, | | |
| | | | | | | | L0601: 6, L0766: 3, | | |
| | | | | | | | L0666: 3, L0439: 3, | | |
| | | | | | | | S0358: 2, H0052: 2, | | |
| | | | | | | | H0670: 2, H0556: 1, | | |
| | | | | | | | S0420: 1, H0619: 1, | | |
| | | | | | | | H0614: 1, H0587: 1, | | |
| | | | | | | | H0581: 1, H0457: 1, | | |
| | | | | | | | H0024: 1, T0010: 1, | | |
| | | | | | | | H0078: 1, H0266: 1, | | |
| | | | | | | | H0031: 1, H0617: 1, | | |
| | | | | | | | H0135: 1, H0100: 1, | | |
| | | | | | | | L0762: 1, L0769: 1, | | |
| | | | | | | | L0373: 1, L0662: 1, | | |
| | | | | | | | L0363: 1, L0794: 1, | | |
| | | | | | | | L0803: 1, L0774: 1, | | |
| | | | | | | | L0775: 1, L0375: 1, | | |
| | | | | | | | L0806: 1, L0655: 1, | | |
| | | | | | | | L0657: 1, L0791: 1, | | |
| | | | | | | | L0664: 1, L0665: 1, | | |
| | | | | | | | S0374: 1, H0682: 1, | | |
| | | | | | | | H0658: 1, S0152: 1, | | |
| | | | | | | | L0747: 1, L0779: 1, | | |
| | | | | | | | L0752: 1, L0596: 1 and | | |
| | | | | | | | L0592: 1. | | |
| | | 951515 | 552 | 1232-207 | 1339 | Asp-1 to His-16. | | | |
| 94 | HCHBK37 | 1223379 | 104 | 2-1198 | 891 | Ser-6 to Lys-29, | AR061: 1, AR089: 1 | | |
| | | | | | | Asp-54 to Ala-59, | H0693: 9, H0484: 2, | | |
| | | | | | | Arg-92 to Phe-99, | H0483: 2, S0222: 2, | | |
| | | | | | | Gly-155 to Phe-165, | H0370: 2, L0666: 2, | | |
| | | | | | | Tyr-180 to Val-185, | H0547: 2, L0758: 2, | | |
| | | | | | | Phe-223 to Trp-230, | S0114: 1, H0255: 1, | | |
| | | | | | | Asp-258 to Gly-272, | H0669: 1, L0468: 1, | | |
| | | | | | | Pro-335 to Tyr-350, | H0485: 1, H0486: 1, | | |
| | | | | | | Lys-357 to Gly-370, | H0156: 1, H0318: 1, | | |
| | | | | | | Pro-376 to Gly-395. | H0597: 1, H0012: 1, | | |
| | | | | | | | H0620: 1, H0688: 1, | | |
| | | | | | | | T0023: 1, H0617: 1, | | |
| | | | | | | | H0606: 1, H0032: 1, | | |
| | | | | | | | H0551: 1, H0264: 1, | | |
| | | | | | | | H0412: 1, H0623: 1, | | |
| | | | | | | | H0646: 1, H0538: 1, | | |
| | | | | | | | S0210: 1, L0648: 1, | | |
| | | | | | | | L0803: 1, L0541: 1, | | |
| | | | | | | | L0647: 1, L0788: 1, | | |
| | | | | | | | L0665: 1, H0684: 1, | | |
| | | | | | | | H0435: 1, L0740: 1, | | |
| | | | | | | | L0747: 1, L0779: 1, | | |
| | | | | | | | L0759: 1, H0423: 1 and | | |
| | | | | | | | S0424: 1. | | |
| | | 706302 | 553 | 2-310 | 1340 | Ser-6 to Lys-29, | | | |
| | | | | | | Asp-54 to Ala-59. | | | |
| 95 | HCNBB29 | 1189000 | 105 | 85-714 | 892 | Gly-21 to Gln-26, | AR089: 1, AR061: 0 | | |
| | | | | | | Glu-75 to Met-80, | L0761: 4, L0759: 4, | | |
| | | | | | | Pro-94 to Ser-101, | H0556: 2, H0318: 2, | | |
| | | | | | | Pro-106 to Ala-111, | L0772: 2, L0764: 2, | | |
| | | | | | | Ser-129 to Ala-137. | L0809: 2, L0749: 2, | | |
| | | | | | | | H0395: 1, H0265: 1, | | |
| | | | | | | | H0657: 1, S0132: 1, | | |
| | | | | | | | L0622: 1, H0618: 1, | | |
| | | | | | | | H0581: 1, H0085: 1, | | |
| | | | | | | | H0620: 1, H0083: 1, | | |
| | | | | | | | H0266: 1, H0673: 1, | | |
| | | | | | | | H0169: 1, H0674: 1, | | |
| | | | | | | | H0163: 1, H0494: 1, | | |
| | | | | | | | L0065: 1, S0344: 1, | | |
| | | | | | | | L0773: 1, L0768: 1, | | |
| | | | | | | | L0766: 1, L0776: 1, | | |
| | | | | | | | L0518: 1, L0792: 1, | | |
| | | | | | | | H0682: 1, S3014: 1, | | |
| | | | | | | | L0743: 1, L0751: 1, | | |
| | | | | | | | L0747: 1, L0777: 1, | | |
| | | | | | | | L0755: 1 and H0542: 1. | | |
| | | 908655 | 554 | 137-862 | 1341 | Ser-8 to Gly-13, | | | |
| | | | | | | Ser-20 to Arg-35. | | | |
| 96 | HCRBE37 | 1197901 | 106 | 1-1083 | 893 | Gly-1 to Glu-13, | AR089: 7, AR061: 4 | | |
| | | | | | | Thr-33 to Tyr-40, | L0471: 4, L0555: 2, | | |
| | | | | | | Gln-59 to Gly-74, | L0748: 2, H0069: 1, | | |
| | | | | | | Thr-89 to Glu-97, | H0427: 1, H0327: 1, | | |
| | | | | | | Arg-116 to Lys-136, | H0239: 1, S0036: 1, | | |
| | | | | | | Arg-144 to Glu-153, | L0637: 1, H0519: 1, | | |
| | | | | | | Thr-160 to Asn-166, | H0672: 1 and L0595: 1. | | |
| | | | | | | Arg-172 to Phe-180, | | | |
| | | | | | | Ala-188 to Ser-193, | | | |
| | | | | | | Arg-200 to Tyr-208, | | | |
| | | | | | | Arg-228 to Cys-241, | | | |
| | | | | | | His-258 to Glu-265, | | | |
| | | | | | | Arg-284 to Tyr-292, | | | |
| | | | | | | Arg-312 to Cys-325, | | | |
| | | | | | | Arg-340 to Lys-357. | | | |
| | | 909197 | 555 | 2-157 | 1342 | Thr-13 to Gly-26, | | | |
| | | | | | | Gln-39 to Tyr-48. | | | |
| 97 | HCWEK76 | 964496 | 107 | 439-972 | 894 | His-6 to Ser-14, | AR089: 7, AR061: 2 | | |
| | | | | | | Ala-37 to Gly-45, | L0766: 7, L0752: 5, | | |
| | | | | | | Ala-67 to Lys-82, | L0759: 4, H0305: 3, | | |
| | | | | | | Thr-89 to Arg-95, | L0761: 3, L0771: 3, | | |
| | | | | | | Lys-116 to Glu-126, | L0794: 3,L0803: 3, | | |
| | | | | | | Ala-138 to Tyr-143, | L0805: 3, L0659: 3, | | |
| | | | | | | Pro-149 to Cys-173. | L0744: 3, L0764: 2, | | |
| | | | | | | | L0776: 2, H0648: 2, | | |
| | | | | | | | L0747: 2, L0750: 2, | | |
| | | | | | | | H0483: 1, H0586: 1, | | |
| | | | | | | | H0599: 1, H0545: 1, | | |
| | | | | | | | H0428: 1, H0551: 1, | | |
| | | | | | | | L0763: 1, L0637: 1, | | |
| | | | | | | | L0662: 1, L0768: 1, | | |
| | | | | | | | L0804: 1, L0806: 1, | | |
| | | | | | | | L0655: 1, L0661: 1, | | |
| | | | | | | | L0787: 1, L0665: 1, | | |
| | | | | | | | S0374: 1, H0520: 1, | | |
| | | | | | | | L0742: 1, L0740: 1, | | |
| | | | | | | | L0756: 1, L0779: 1, | | |
| | | | | | | | L0777: 1, L0755: 1 and | | |
| | | | | | | | L0592: 1. | | |
| 98 | HDAAO88 | 1165232 | 108 | 2-1642 | 895 | Lys-22 to Ser-41, | AR089: 1, AR061: 1 | | |
| | | | | | | Ala-65 to Lys-83, | L0754: 3, L0362: 3, | | |
| | | | | | | Asn-91 to Ser-107, | L0794: 2, H0624: 1, | | |
| | | | | | | Tyr-116 to Glu-124, | H0661: 1, H0638: 1, | | |
| | | | | | | Ile-131 to Met-138, | L0717: 1, H0497: 1, | | |
| | | | | | | Asp-156 to Tyr-162, | H0156: 1, H0575: 1, | | |
| | | | | | | Gln-210 to Glu-228, | S0049: 1, H0009: 1, | | |
| | | | | | | Gln-230 to Arg-250, | S0388: 1, H0267: 1, | | |
| | | | | | | Glu-255 to Lys-270, | H0031: 1, H0553: 1, | | |
| | | | | | | Asp-282 to Thr-288, | H0032: 1, H0623: 1, | | |
| | | | | | | His-296 to Asn-301, | L0638: 1, L0659: 1, | | |
| | | | | | | Ser-321 to Asn-333, | L0783: 1, H0547: 1, | | |
| | | | | | | Gln-381 to Thr-389, | H0436: 1, L0740: 1, | | |
| | | | | | | Tyr-435 to Pro-443, | L0779: 1, L0755: 1 and | | |
| | | | | | | Glu-468 to Arg-473, | H0136: 1. | | |
| | | | | | | Gly-510 to Lys-515, | | | |
| | | | | | | Lys-531 to Ala-537. | | | |
| | | 529461 | 556 | 49-717 | 1343 | Arg-28 to Ser-35, | | | |
| | | | | | | Ala-49 to Thr-65. | | | |
| 99 | HDAAS58 | 1223381 | 109 | 245-1330 | 896 | Asn-37 to Arg-45, | AR089: 2, AR061: 1 | | |
| | | | | | | Met-212 to Glu-217, | H0052: 3, L0768: 3, | | |
| | | | | | | Leu-267 to Lys-278, | L0766: 3, H0658: 3, | | |
| | | | | | | Ala-310 to Gln-315, | L0748: 3, L0750: 3, | | |
| | | | | | | Pro-333 to Asn-340, | H0657: 2, H0341: 2, | | |
| | | | | | | Glu-346 to Gly-360. | L0665: 2, L0438: 2, | | |
| | | | | | | | L0743: 2, L0744: 2, | | |
| | | | | | | | L0756: 2, L0777: 2, | | |
| | | | | | | | H0656: 1, H0393: 1, | | |
| | | | | | | | L0717: 1, H0497: 1, | | |
| | | | | | | | H0486: 1, H0263: 1, | | |
| | | | | | | | L0579: 1, L0163: 1, | | |
| | | | | | | | H0594: 1, H0688: 1, | | |
| | | | | | | | T0042: 1, L0769: 1, | | |
| | | | | | | | L0772: 1, L0643: 1, | | |
| | | | | | | | L0794: 1, L0649: 1, | | |
| | | | | | | | L0804: 1, L0774: 1, | | |
| | | | | | | | L0375: 1, L0776: 1, | | |
| | | | | | | | L0789: 1, L0792: 1, | | |
| | | | | | | | L0666: 1, H0144: 1, | | |
| | | | | | | | H0690: 1, L0754: 1, | | |
| | | | | | | | L0745: 1, L0747: 1, | | |
| | | | | | | | L0786: 1, L0780: 1, | | |
| | | | | | | | L0752: 1, H0542: 1 and | | |
| | | | | | | | H0352: 1. | | |
| | | 908616 | 557 | 521-1873 | 1344 | Cys-1 to Glu-17. | | | |
| 100 | HDAAT58 | 1096244 | 110 | 2-376 | 897 | Ser-1 to Ala-7, | AR089: 3, AR061: 1 | | |
| | | | | | | Thr-28 to Gln-45, | H0497: 1, L0657: 1 | | |
| | | | | | | Thr-56 to Gln-72, | and S0380: 1. | | |
| | | | | | | Phe-99 to Thr-109. | | | |
| | | 908999 | 558 | 2-376 | 1345 | Ser-1 to Ala-7. | | | |
| 101 | HDLAE04 | 908931 | 111 | 150-1175 | 898 | Leu-1 to Gln-19. | AR089: 16, AR061: 4 | | |
| | | | | | | | L0747: 4, H0201: 2, | | |
| | | | | | | | L0664: 2, L0438: 2, | | |
| | | | | | | | L0751: 2, S0358: 1, | | |
| | | | | | | | H0485: 1, H0156: 1, | | |
| | | | | | | | H0046: 1, H0014: 1, | | |
| | | | | | | | S6028: 1, T0023: 1, | | |
| | | | | | | | H0634: 1, L0794: 1, | | |
| | | | | | | | L0766: 1, L0803: 1, | | |
| | | | | | | | L0774: 1, L0655: 1, | | |
| | | | | | | | L0659: 1, L0809: 1, | | |
| | | | | | | | L0545: 1, L0666: 1, | | |
| | | | | | | | L0665: 1, H0435: 1, | | |
| | | | | | | | H0436: 1, S3014: 1, | | |
| | | | | | | | S0027: 1, L0439: 1, | | |
| | | | | | | | L0740: 1, L0777: 1, | | |
| | | | | | | | H0422: 1 and S0042: 1. | | |
| 102 | HDPHG78 | 1143020 | 112 | 218-1450 | 899 | Ser-29 to Cys-35, | AR089: 2, AR061: 1 | | |
| | | | | | | Val-43 to Asn-53, | H0521: 2, L0754: 2, | | |
| | | | | | | Ser-94 to Tyr-100, | H0583: 1, H0619: 1, | | |
| | | | | | | Glu-128 to Ala-140, | H0586: 1, H0251: 1, | | |
| | | | | | | Glu-149 to Lys-155, | H0179: 1, H0634: 1, | | |
| | | | | | | Ala-207 to Tyr-217, | H0623: 1, S0002: 1, | | |
| | | | | | | Lys-222 to Leu-227, | H0435: 1, S0152: 1, | | |
| | | | | | | Met-233 to Lys-238, | S0027: 1, L0748: 1, | | |
| | | | | | | His-262 to Phe-277, | H0445: 1 and L0595: 1. | | |
| | | | | | | His-290 to Asn-303, | | | |
| | | | | | | Thr-319 to Ser-336, | | | |
| | | | | | | Lys-343 to Phe-361, | | | |
| | | | | | | Asn-373 to Cys-382, | | | |
| | | | | | | Phe-389 to Phe-395. | | | |
| | | 957957 | 559 | 215-1447 | 1346 | Ser-29 to Cys-35, | | | |
| | | | | | | Val-43 to Asn-53, | | | |
| | | | | | | Ser-94 to Tyr-100. | | | |
| 103 | HDPJB85 | 1096339 | 113 | 1324-2895 | 900 | Ala-48 to Tyr-57, | AR089: 4, AR061: 1 | | |
| | | | | | | Cys-59 to Asp-65, | L0766: 7, H0590: 3, | | |
| | | | | | | Ile-78 to His-86, | S0003: 3, H0031: 3, | | |
| | | | | | | Pro-93 to Gly-128, | L0740: 3, H0624: 2, | | |
| | | | | | | Met-131 to Asn-146, | H0171: 2, H0581: 2, | | |
| | | | | | | Glu-153 to Tyr-158, | S0422: 2, H0144: 2, | | |
| | | | | | | Lys-170 to Ala-175, | H0444: 2, L0362: 2, | | |
| | | | | | | Tyr-208 to Leu-213, | H0294: 1, S0212: 1, | | |
| | | | | | | Gln-235 to Asp-253, | S0420: 1, H0580: 1, | | |
| | | | | | | Glu-258 to Thr-265, | S0132: 1, S0222: 1, | | |
| | | | | | | Val-269 to Glu-284, | T0040: 1, H0013: 1, | | |
| | | | | | | Glu-296 to Val-301, | H0427: 1, L0021: 1, | | |
| | | | | | | Thr-303 to Leu-320, | H0421: 1, H0052: 1, | | |
| | | | | | | Ser-323 to Asn-330, | L0040: 1, L0471: 1, | | |
| | | | | | | Lys-332 to Glu-352, | H0328: 1, H0615: 1, | | |
| | | | | | | Val-362 to Glu-367, | H0428: 1, L0483: 1, | | |
| | | | | | | Ala-404 to Asp-433, | H0553: 1, H0413: 1, | | |
| | | | | | | Asn-457 to Asn-466, | L0475: 1, H0625: 1, | | |
| | | | | | | Leu-486 to Pro-491, | S0450: 1, L0369: 1, | | |
| | | | | | | Ala-518 to Tyr-524. | L0638: 1, L0667: 1, | | |
| | | | | | | | L0800: 1, L0521: 1, | | |
| | | | | | | | L0662: 1, L0774: 1, | | |
| | | | | | | | L0775: 1, L0657: 1, | | |
| | | | | | | | L0512: 1, L0666: 1, | | |
| | | | | | | | L0664: 1, L0665: 1, | | |
| | | | | | | | H0670: 1, H0521: 1, | | |
| | | | | | | | H0555: 1, L0751: 1, | | |
| | | | | | | | L0754: 1, L0779: 1, | | |
| | | | | | | | L0777: 1, L0752: 1 and | | |
| | | | | | | | S0276: 1. | | |
| | | 954563 | 560 | 1323-2894 | 1347 | Ala-48 to Tyr-57, | | | |
| | | | | | | Cys-59 to Asp-65, | | | |
| | | | | | | Ile-78 to His-86, | | | |
| | | | | | | Pro-93 to Gly-128, | | | |
| | | | | | | Met-131 to Asn-146, | | | |
| | | | | | | Glu-153 to Tyr-158, | | | |
| | | | | | | Lys-170 to Ala-175, | | | |
| | | | | | | Tyr-208 to Leu-213, | | | |
| | | | | | | Gln-235 to Asp-253, | | | |
| | | | | | | Glu-258 to Thr-265, | | | |
| | | | | | | Val-269 to Glu-284, | | | |
| | | | | | | Glu-296 to Val-301, | | | |
| | | | | | | Thr-303 to Leu-320, | | | |
| | | | | | | Ser-323 to Asn-330, | | | |
| | | | | | | Lys-332 to Glu-352, | | | |
| | | | | | | Val-362 to Glu-367, | | | |
| | | | | | | Ala-404 to Asp-433, | | | |
| | | | | | | Asn-457 to Asn-466, | | | |
| | | | | | | Leu-486 to Pro-491, | | | |
| | | | | | | Ala-518 to Tyr-524. | | | |
| 104 | HDPJF03 | 923874 | 114 | 2-715 | 901 | Leu-14 to Asp-19, | AR089: 2, AR061: 2 | | |
| | | | | | | Glu-43 to Arg-50, | L0758: 3, L0662: 2, | | |
| | | | | | | Glu-55 to Lys-74, | L0748: 2, L0777: 2, | | |
| | | | | | | Lys-94 to Asp-110, | L0599: 2, S0114: 1, | | |
| | | | | | | Lys-114 to Glu-124, | S0001: 1, S6028: 1, | | |
| | | | | | | Val-129 to Arg-134. | S0250: 1, S0386: 1, | | |
| | | | | | | | S0382: 1, L0769: 1, | | |
| | | | | | | | L0639: 1, L0761: 1, | | |
| | | | | | | | L0794: 1, L0803: 1, | | |
| | | | | | | | L0805: 1, L0789: 1, | | |
| | | | | | | | H0521: 1, L0779: 1 and | | |
| | | | | | | | L0362: 1. | | |
| 105 | HDPKI74 | 958622 | 115 | 161-397 | 902 | Arg-4 to Leu-11. | AR089: 11, AR061: 7 | | |
| | | | | | | | H0583: 2, H0547: 2, | | |
| | | | | | | | H0305: 1, L0618: 1, | | |
| | | | | | | | H0619: 1, H0635: 1, | | |
| | | | | | | | H0052: 1, H0634: 1, | | |
| | | | | | | | H0488: 1, H0521: 1, | | |
| | | | | | | | H0555: 1, L0750: 1 and | | |
| | | | | | | | H0707: 1. | | |
| 106 | HDPNE20 | 1152331 | 116 | 395-736 | 903 | Thr-22 to His-42, | AR089: 1, AR061: 0 | | |
| | | | | | | Ser-68 to Lys-75. | L0766: 2, H0614: 1, | | |
| | | | | | | | H0013: 1, H0328: 1, | | |
| | | | | | | | S0152: 1 and H0522: 1. | | |
| | | 917330 | 561 | 2-301 | 1348 | Ser-4 to Lys-13, | | | |
| | | | | | | Ser-30 to Cys-42, | | | |
| | | | | | | Thr-58 to Tyr-65, | | | |
| | | | | | | Arg-85 to Asn-91. | | | |
| 107 | HDPOK83 | 1195328 | 117 | 716-195 | 904 | | AR061: 1, AR089: 1 | | |
| | | | | | | | H0136: 2, S0002: 1, | | |
| | | | | | | | H0521: 1 and H0522: 1. | | |
| | | 921394 | 562 | 123-476 | 1349 | Phe-92 to Glu-99. | | | |
| 108 | HDPOM13 | 944244 | 118 | 129-779 | 905 | Pro-17 to Glu-22, | AR089: 0, AR061: 0 | | |
| | | | | | | Ser-52 to His-60, | H0521: 8, H0522: 3, | | |
| | | | | | | Pro-69 to Asp-81, | H0644: 2, L0769: 2, | | |
| | | | | | | Ala-92 to Lys-103, | L0779: 2, H0580: 1, | | |
| | | | | | | Ser-119 to Gly-126, | H0549: 1, S0002: 1 and | | |
| | | | | | | Gln-136 to Gln-145, | L0791: 1. | | |
| | | | | | | Pro-167 to Lys-174. | | | |
| | | 950831 | 563 | 564-1 | 1350 | | | | |
| 109 | HDPRJ04 | 909040 | 119 | 3-419 | 906 | Lys-21 to His-27, | AR089: 0, AR061: 0 | | |
| | | | | | | Phe-44 to Arg-55, | H0521: 1 and L0758: | | |
| | | | | | | Lys-72 to Lys-80, | 1. | | |
| | | | | | | Glu-88 to Thr-94 | | | |
| 110 | HDPSB10 | 1134148 | 120 | 3-251 | 907 | Arg-1 to Pro-7, | AR089: 1, AR061: 0 | | |
| | | | | | | Arg-37 to Ala-42, | L0665: 1 and H0521: | | |
| | | | | | | Leu-50 to Trp-60, | 1. | | |
| | | | | | | Arg-72 to Arg-83. | | | |
| | | 961309 | 564 | 1-444 | 1351 | Met-14 to Pro-24, | | | |
| | | | | | | Lys-31 to Glu-36, | | | |
| | | | | | | His-70 to Gly-76. | | | |
| 111 | HDPSD12 | 1179711 | 121 | 1-1002 | 908 | Pro-1 to Lys-21, | AR089: 9, AR061: 1 | | |
| | | | | | | Asp-91 to Lys-96, | H0521: 4, H0522: 3, | | |
| | | | | | | Leu-175 to Phe-181, | H0644: 2 and H0549: 1. | | |
| | | | | | | Leu-183 to Ala-189, | | | |
| | | | | | | Glu-208 to Cys-215, | | | |
| | | | | | | Glu-236 to Ala-245, | | | |
| | | | | | | Cys-253 to Lys-270, | | | |
| | | | | | | Gly-277 to Asp-287, | | | |
| | | | | | | Gln-296 to Asp-306, | | | |
| | | | | | | His-312 to Leu-317, | | | |
| | | | | | | Leu-320 to Lys-327. | | | |
| | | 943027 | 565 | 2-388 | 1352 | Lys-1 to Lys-17, | | | |
| | | | | | | Asp-87 to Lys-92, | | | |
| | | | | | | His-113 to Asn-120. | | | |
| 112 | HDPST56 | 1223385 | 122 | 2-1345 | 909 | Gly-1 to Cys-10, | AR061: 5, AR089: 1 | | |
| | | | | | | Arg-25 to Gly-34, | L0717: 2, H0486: 2, | | |
| | | | | | | Thr-50 to Ile-62, | L0438: 2, L0439: 2, | | |
| | | | | | | Gln-108 to Lys-115, | L0777: 2, H0402: 1, | | |
| | | | | | | Arg-137 to Gly-151, | H0369: 1, S0280: 1, | | |
| | | | | | | Arg-165 to Val-174, | H0052: 1, H0687: 1, | | |
| | | | | | | Arg-193 to Lys-199, | S0003: 1, S0036: 1, | | |
| | | | | | | Arg-221 to Val-230, | T0067: 1, L0662: 1, | | |
| | | | | | | Arg-249 to Ile-258, | L0766: 1, L0659: 1, | | |
| | | | | | | Arg-276 to Val-286, | H0521: 1, H0696: 1 and | | |
| | | | | | | Arg-305 to Ile-314, | L0750: 1. | | |
| | | | | | | Gln-332 to Cys-343, | | | |
| | | | | | | Gln-360 to Thr-367, | | | |
| | | | | | | His-391 to Gly-403, | | | |
| | | | | | | Gln-416 to Gly-431. | | | |
| | | 908662 | 566 | 2-370 | 1353 | Gly-1 to Cys-10, | | | |
| | | | | | | Arg-25 to Gly-34, | | | |
| | | | | | | Thr-50 to Ile-62. | | | |
| 113 | HDPXK10 | 1223386 | 123 | 503-1426 | 910 | Lys-1 to Tyr-9, | AR089: 4, AR061: 1 | | |
| | | | | | | Lys-19 to Gly-47, | L0748: 6, L0805: 5, | | |
| | | | | | | His-63 to Tyr-69, | L0743: 4, L0751: 4, | | |
| | | | | | | Arg-79 to Lys-89, | L0438: 3, H0436: 3, | | |
| | | | | | | His-91 to Lys-104, | L0747: 3, L0599: 3, | | |
| | | | | | | His-119 to Asn-126, | S0114: 2, T0006: 2, | | |
| | | | | | | Ser-142 to Ala-155, | H0038: 2, L0371: 2, | | |
| | | | | | | Ala-261 to Ala-267, | L0768: 2, L0791: 2, | | |
| | | | | | | Ser-282 to Pro-291. | L0439: 2, L0740: 2, | | |
| | | | | | | | L0758: 2, L0759: 2, | | |
| | | | | | | | H0265: 1, H0185: 1, | | |
| | | | | | | | H0556: 1, S6026: 1, | | |
| | | | | | | | S0222: 1, H0486: 1, | | |
| | | | | | | | H0156: 1, S0474: 1, | | |
| | | | | | | | S0049: 1, H0271: 1, | | |
| | | | | | | | H0687: 1, H0644: 1, | | |
| | | | | | | | H0673: 1, L0455: 1, | | |
| | | | | | | | H0647: 1, L0764: 1, | | |
| | | | | | | | L0776: 1, L0537: 1, | | |
| | | | | | | | L0789: 1, H0690: 1, | | |
| | | | | | | | H0521: 1, H0576: 1, | | |
| | | | | | | | S0392: 1, H0626: 1, | | |
| | | | | | | | S0028: 1, L0749: 1, | | |
| | | | | | | | L0779: 1, L0366: 1, | | |
| | | | | | | | H0543: 1, H0422: 1 and | | |
| | | | | | | | H0677: 1. | | |
| | | 964148 | 567 | 126-671 | 1354 | Ser-5 to Thr-10, | | | |
| | | | | | | Gly-23 to Ser-33. | | | |
| 114 | HDQDG05 | 1204691 | 124 | 1-867 | 911 | Thr-2 to Arg-8, | AR089: 3, AR061: 2 | | |
| | | | | | | Glu-43 to Gly-61, | L0766: 9, L0745: 9, | | |
| | | | | | | Arg-66 to Arg-72, | L0754: 6, H0624: 5, | | |
| | | | | | | Pro-83 to Ser-89, | L0746: 5, L0598: 4, | | |
| | | | | | | Leu-94 to Phe-116, | H0521: 4, H0543: 4, | | |
| | | | | | | Arg-125 to Glu-140, | H0560: 3, H0529: 3, | | |
| | | | | | | Arg-232 to Gly-257, | L0665: 3, L0591: 3, | | |
| | | | | | | Ile-265 to Glu-273, | L0608: 3, H0657: 2, | | |
| | | | | | | Ser-281 to Leu-289. | H0638: 2, H0046: 2, | | |
| | | | | | | | S0422: 2, L0662: 2, | | |
| | | | | | | | L0649: 2, L0803: 2, | | |
| | | | | | | | L0659: 2, L0532: 2, | | |
| | | | | | | | L0666: 2, L0663: 2, | | |
| | | | | | | | H0144: 2, H0435: 2, | | |
| | | | | | | | L0751: 2, L0755: 2, | | |
| | | | | | | | L0759: 2, L0588: 2, | | |
| | | | | | | | L0362: 2, H0170: 1, | | |
| | | | | | | | H0265: 1, S0134: 1, | | |
| | | | | | | | S0116: 1, H0341: 1, | | |
| | | | | | | | S0212: 1, H0662: 1, | | |
| | | | | | | | H0402: 1, S0418: 1, | | |
| | | | | | | | L0005: 1, S0376: 1, | | |
| | | | | | | | H0580: 1, S0300: 1, | | |
| | | | | | | | L0717: 1, H0261: 1, | | |
| | | | | | | | H0586: 1, H0497: 1, | | |
| | | | | | | | H0013: 1, H0635: 1, | | |
| | | | | | | | H0581: 1, H0251: 1, | | |
| | | | | | | | L0157: 1, L0471: 1, | | |
| | | | | | | | H0201: 1, H0375: 1, | | |
| | | | | | | | S6028: 1, S0250: 1, | | |
| | | | | | | | H0428: 1, H0553: 1, | | |
| | | | | | | | H0644: 1, H0673: 1, | | |
| | | | | | | | S0036: 1, H0090: 1, | | |
| | | | | | | | H0040: 1, H0488: 1, | | |
| | | | | | | | S0210: 1, UNKWN: 1, | | |
| | | | | | | | L0645: 1, L0794: 1, | | |
| | | | | | | | L0661: 1, L0658: 1, | | |
| | | | | | | | L0809: 1, L0519: 1, | | |
| | | | | | | | L0790: 1, H0519: 1, | | |
| | | | | | | | H0658: 1, H0672: 1, | | |
| | | | | | | | H0539: 1, S0152: 1, | | |
| | | | | | | | H0134: 1, H0436: 1, | | |
| | | | | | | | L0777: 1, L0758: 1, | | |
| | | | | | | | S0026: 1, S0242: 1, | | |
| | | | | | | | H0542: 1, H0423: 1 and | | |
| | | | | | | | H0422: 1. | | |
| | | 964924 | 568 | 2-526 | 1355 | | | | |
| 115 | HDQHM27 | 1163999 | 125 | 1-477 | 912 | Arg-1 to Val-31, | AR089: 26, AR061: 2 | | |
| | | | | | | Val-40 to Glu-61, | L0657: 2, L0485: 2, | | |
| | | | | | | Pro-71 to Val-97, | L0362: 2, S0276: 2, | | |
| | | | | | | Cys-115 to Lys-124, | H0686: 1, H0685: 1, | | |
| | | | | | | Thr-147 to Arg-159. | S0134: 1, L07171: 1, | | |
| | | | | | | | T0048: 1, H0251: 1, | | |
| | | | | | | | L0163: 1, S0250: 1, | | |
| | | | | | | | H0553: 1, H0090: 1, | | |
| | | | | | | | L0564: 1, L0769: 1, | | |
| | | | | | | | L0764: 1, L0771: 1, | | |
| | | | | | | | L0363: 1, L0766: 1, | | |
| | | | | | | | L0789: 1, H0658: 1, | | |
| | | | | | | | H0521: 1, S0392: 1, | | |
| | | | | | | | L0779: 1, H0445: 1, | | |
| | | | | | | | S0434: 1, S0194: 1, | | |
| | | | | | | | H0542: 1, H0543: 1 and | | |
| | | | | | | | S0412: 1. | | |
| | | 908805 | 569 | 2-463 | 1356 | Pro-1 to Val-26, | | | |
| | | | | | | Val-35 to Glu-56, | | | |
| | | | | | | Pro-66 to Val-92, | | | |
| | | | | | | Cys-110 to Lys-119, | | | |
| | | | | | | Thr-142 to Arg-154. | | | |
| 116 | HDTFH41 | 1209542 | 126 | 3-539 | 913 | Lys-14 to Val-25, | AR089: 6, AR061: 3 | | |
| | | | | | | Ser-33 to Asn-48, | L0748: 17, L0766: 7, | | |
| | | | | | | Lys-70 to Tyr-77, | L0439: 7, L0740: 6, | | |
| | | | | | | Lys-98 to Tyr-105, | L0777: 6, L0608: 5, | | |
| | | | | | | Pro-135 to His-150, | L0809: 4, L0771: 3, | | |
| | | | | | | Thr-152 to Lys-165, | L0776: 3, L0758: 3, | | |
| | | | | | | Pro-173 to Ile-179. | H0486: 2, L0794: 2, | | |
| | | | | | | | L0754: 2, L0731: 2, | | |
| | | | | | | | H0445: 2, L0361: 2, | | |
| | | | | | | | L0481: 1, H0156: 1, | | |
| | | | | | | | H0318: 1, L0471: 1, | | |
| | | | | | | | H0687: 1, H0615: 1, | | |
| | | | | | | | H0428: 1, H0673: 1, | | |
| | | | | | | | S0422: 1, H0529: 1, | | |
| | | | | | | | L0769: 1, L0768: 1, | | |
| | | | | | | | L0803: 1, L0651: 1, | | |
| | | | | | | | L0805: 1, L0647: 1, | | |
| | | | | | | | L0787: 1, H0435: 1, | | |
| | | | | | | | H0648: 1, H0539: 1, | | |
| | | | | | | | L0749: 1, L0780: 1 and | | |
| | | | | | | | H0423: 1. | | |
| | | 712076 | 570 | 5-529 | 1357 | Lys-10 to Val-21, | | | |
| | | | | | | Ser-29 to Asn-44, | | | |
| | | | | | | Lys-66 to Tyr-73, | | | |
| | | | | | | Lys-94 to Tyr-101, | | | |
| | | | | | | Pro-131 to His-146, | | | |
| | | | | | | Thr-148 to Lys-161, | | | |
| | | | | | | Pro-169 to Ile-175. | | | |
| 117 | HDTFS83 | 1162406 | 127 | 3-968 | 914 | Ser-1 to Arg-6, | AR089: 3, AR061: 2 | | |
| | | | | | | Arg-20 to Gly-34, | L0748: 6, L0527: 2, | | |
| | | | | | | His-50 to Val-57, | L0657: 2, L0731: 2, | | |
| | | | | | | His-78 to Val-85, | L0758: 2, H0624: 1, | | |
| | | | | | | His-106 to Tyr-112, | H0486: 1, L0157: 1, | | |
| | | | | | | His-134 to Gly-146, | H0428: 1, H0034: 1, | | |
| | | | | | | Val-161 to His-172, | L0372: 1, L0776: 1, | | |
| | | | | | | Pro-189 to Gly-195, | L0659: 1, L0663: 1, | | |
| | | | | | | Thr-212 to Lys-224, | H0690: 1, H0435: 1, | | |
| | | | | | | Pro-228 to Asp-235, | H0658: 1, H0672: 1, | | |
| | | | | | | Gly-241 to Asn-252, | S0328: 1, L0747: 1, | | |
| | | | | | | Phe-282 to Gly-297, | L0750: 1, L0756: 1, | | |
| | | | | | | Asn-303 to Arg-308. | L0779: 1, L0752: 1, | | |
| | | | | | | | H0653: 1 and L0465: 1. | | |
| | | 909089 | 571 | 2-574 | 1358 | Arg-12 to Gly-26, | | | |
| | | | | | | His-42 to Val-49, | | | |
| | | | | | | His-70 to Val-77, | | | |
| | | | | | | His-98 to Tyr-104, | | | |
| | | | | | | His-126 to Gly-138, | | | |
| | | | | | | Val-153 to Trp-165. | | | |
| 118 | HDTFT81 | 909054 | 128 | 618-1115 | 915 | Asn-2 to Pro-7. | AR089: 9, AR061: 2 | | |
| | | | | | | | H0040: 3, H0046: 2, | | |
| | | | | | | | L0768: 2, L0794: 2, | | |
| | | | | | | | L0766: 2, L0663: 2, | | |
| | | | | | | | L0748: 2, S0134: 1, | | |
| | | | | | | | H0486: 1, H0013: 1, | | |
| | | | | | | | H0318: 1, H0581: 1, | | |
| | | | | | | | H0024: 1, H0188: 1, | | |
| | | | | | | | H0090: 1, S0002: 1, | | |
| | | | | | | | H0529: 1, L0658: 1, | | |
| | | | | | | | L0519: 1, L0647: 1, | | |
| | | | | | | | L0787: 1, H0144: 1, | | |
| | | | | | | | H0519: 1, H0521: 1, | | |
| | | | | | | | L0588: 1 and H0542: 1. | | |
| 119 | HDTID61 | 1049305 | 129 | 332-547 | 916 | Glu-21 to Cys-29, | AR089: 1, AR061: 0 | | |
| | | | | | | Cys-43 to Thr-53, | H0486: 2 | | |
| | | | | | | His-59 to Tyr-72. | | | |
| | | 908946 | 572 | 332-547 | 1359 | Glu-21 to Cys-29, | | | |
| | | | | | | Cys-43 to Thr-53, | | | |
| | | | | | | His-59 to Tyr-72. | | | |
| 120 | HDTKB09 | 1199540 | 130 | 2-484 | 917 | Pro-6 to Ile-27, | AR089: 2, AR061: 0 | | |
| | | | | | | Gln-45 to Cys-56, | L0717: 2, H0486: 2, | | |
| | | | | | | Lys-61 to Lys-66, | L0438: 2, L0439: 2, | | |
| | | | | | | Gln-73 to Thr-80, | L0777: 2, H0402: 1, | | |
| | | | | | | His-104 to Gly-116, | H0369: 1, S0280: 1, | | |
| | | | | | | Gln-129 to Gly-144. | H0687: 1, S0003: 1, | | |
| | | | | | | | L0662: 1, L0766: 1, | | |
| | | | | | | | L0659: 1, H0521: 1, | | |
| | | | | | | | H0696: 1 and L0750: 1. | | |
| | | 908466 | 573 | 2-463 | 1360 | Pro-3 to Ile-20, | | | |
| | | | | | | Gln-38 to Cys-49, | | | |
| | | | | | | Lys-54 to Lys-59, | | | |
| | | | | | | Gln-66 to Thr-73, | | | |
| | | | | | | His-97 to Gly-109. | | | |
| 121 | HDTLD17 | 908601 | 131 | 1-450 | 918 | | AR089: 1, AR061: 0 | | |
| | | | | | | | H0486: 3 | | |
| 122 | HE2DV73 | 1153878 | 132 | 3-506 | 919 | Phe-1 to Lys-14, | AR061: 4, AR089: 2 | | |
| | | | | | | Gly-37 to Cys-44, | S0136: 7, L0439: 6, | | |
| | | | | | | Lys-63 to Val-71, | L0777: 3, L0779: 2, | | |
| | | | | | | Arg-91 to Val-99, | L0592: 2, H0170: 1, | | |
| | | | | | | Ser-117 to Tyr-126, | H0686: 1, H0656: 1, | | |
| | | | | | | Phe-145 to Leu-154. | S0132: 1, H0374: 1, | | |
| | | | | | | | H0266: 1, H0551: 1, | | |
| | | | | | | | L0625: 1, L0521: 1, | | |
| | | | | | | | L0662: 1, L0794: 1, | | |
| | | | | | | | L0766: 1, L0381: 1, | | |
| | | | | | | | L0803: 1, L0659: 1, | | |
| | | | | | | | L0809: 1, L0663: 1, | | |
| | | | | | | | L0438: 1, H0659: 1, | | |
| | | | | | | | H0539: 1, L0752: 1 and | | |
| | | | | | | | L0595: 1. | | |
| | | 909246 | 574 | 2-562 | 1361 | | | | |
| 123 | HE2LG78 | 1217036 | 133 | 879-1 | 920 | Gln-251 to Ala-288. | AR089: 43, AR061: 10 | | |
| | | | | | | | S0358: 6, H0617: 4, | | |
| | | | | | | | L0777: 4, H0265: 3, | | |
| | | | | | | | H0556: 3, L0764: 3, | | |
| | | | | | | | L0766: 3, L0591: 3, | | |
| | | | | | | | H0624: 2, H0585: 2, | | |
| | | | | | | | H0393: 2, H0318: 2, | | |
| | | | | | | | H0412: 2, S0002: 2, | | |
| | | | | | | | L0372: 2, H0144: 2, | | |
| | | | | | | | L0747: 2, L0601: 2, | | |
| | | | | | | | H0686: 1, S0134: 1, | | |
| | | | | | | | H0341: 1, S0212: 1, | | |
| | | | | | | | H0255: 1, H0661: 1, | | |
| | | | | | | | S0418: 1, S0046: 1, | | |
| | | | | | | | S0278: 1, H0550: 1, | | |
| | | | | | | | H0013: 1, H0069: 1, | | |
| | | | | | | | H0635: 1, H0599: 1, | | |
| | | | | | | | H0590: 1, S0010: 1, | | |
| | | | | | | | H0052: 1, H0251: 1, | | |
| | | | | | | | H0085: 1, H0263: 1, | | |
| | | | | | | | H0597: 1, H0231: 1, | | |
| | | | | | | | H0178: 1, H0014: 1, | | |
| | | | | | | | H0373: 1, S0336: 1, | | |
| | | | | | | | H0292: 1, S0003: 1, | | |
| | | | | | | | H0428: 1, H0622: 1, | | |
| | | | | | | | T0006: 1, H0553: 1, | | |
| | | | | | | | L0456: 1, H0124: 1, | | |
| | | | | | | | H0090: 1, H0040: 1, | | |
| | | | | | | | H0634: 1, H0551: 1, | | |
| | | | | | | | T0067: 1, S0038: 1, | | |
| | | | | | | | H0494: 1, H0560: 1, | | |
| | | | | | | | H0641: 1, H0538: 1, | | |
| | | | | | | | L0640: 1, L0639: 1, | | |
| | | | | | | | L0381: 1, L0803: 1, | | |
| | | | | | | | L0651: 1, L0805: 1, | | |
| | | | | | | | L0783: 1, L0384: 1, | | |
| | | | | | | | L0528: 1, L0665: 1, | | |
| | | | | | | | S0374: 1, H0547: 1, | | |
| | | | | | | | S0126: 1, H0539: 1, | | |
| | | | | | | | S0152: 1, H0521: 1, | | |
| | | | | | | | S3014: 1, S0027: 1, | | |
| | | | | | | | L0749: 1, L0779: 1, | | |
| | | | | | | | L0485: 1, L0599: 1, | | |
| | | | | | | | L0604: 1, H0136: 1, | | |
| | | | | | | | H0542: 1 and H0423: 1. | | |
| | | 916611 | 575 | 57-1556 | 1362 | His-45 to Trp-50, | | | |
| | | | | | | Arg-52 to Lys-58, | | | |
| | | | | | | Glu-83 to Ser-88, | | | |
| | | | | | | His-108 to Arg-113. | | | |
| 124 | HE2PH12 | 909191 | 134 | 3-317 | 921 | Glu-14 to Asn-21. | AR061: 269, AR089: | | |
| | | | | | | | 214 | | |
| | | | | | | | H0171: 1, H0265: 1 | | |
| | | | | | | | and S0007: 1. | | |
| 125 | HE8MA36 | 706858 | 135 | 164-469 | 922 | | AR061: 14, AR089: 10 | | |
| | | | | | | | S0040: 2, L0766: 2, | | |
| | | | | | | | L0070: 2, L0759: 2, | | |
| | | | | | | | H0686: 1, H0013: 1, | | |
| | | | | | | | H0575: 1, H0039: 1, | | |
| | | | | | | | H0553: 1, H0598: 1, | | |
| | | | | | | | L0803: 1, H0519: 1, | | |
| | | | | | | | H0648: 1, H0518: 1, | | |
| | | | | | | | L0754: 1, L0745: 1, | | |
| | | | | | | | L0746: 1, L0779: 1, | | |
| | | | | | | | L0603: 1 and H0543: 1. | | |
| 126 | HE8MU06 | 909075 | 136 | 2-454 | 923 | Pro-13 to Gly-18, | AR089: 60, AR061: 38 | | |
| | | | | | | Cys-25 to Ser-31, | H0013: 2, T0039: 1, | | |
| | | | | | | Thr-37 to His-42, | H0031: 1, H0529: 1, | | |
| | | | | | | Gln-54 to Ser-64, | H0144: 1, L0438: 1, | | |
| | | | | | | Ser-84 to Phe-89, | L0439: 1 and L0747: 1. | | |
| | | | | | | His-131 to Arg-139. | | | |
| 127 | HE8NP11 | 1152902 | 137 | 2-394 | 924 | Gln-34 to Ser-39, | AR061: 4, AR089: 4 | | |
| | | | | | | Ala-69 to Met-78, | L0005: 8, L0731: 7, | | |
| | | | | | | Ser-82 to Gln-92. | L0157: 6, L0777: 4, | | |
| | | | | | | | L0770: 2, L0743: 2, | | |
| | | | | | | | L0750: 2, L0752: 2, | | |
| | | | | | | | S0222: 1, H0486: 1, | | |
| | | | | | | | H0013: 1, H0024: 1, | | |
| | | | | | | | H0032: 1, L0639: 1, | | |
| | | | | | | | L0662: 1, L0659: 1, | | |
| | | | | | | | L0783: 1, L0789: 1, | | |
| | | | | | | | L0791: 1, L0666: 1, | | |
| | | | | | | | L0665: 1, H0520: 1, | | |
| | | | | | | | H0547: 1, S0037: 1, | | |
| | | | | | | | L0439: 1, L0779: 1, | | |
| | | | | | | | L0757: 1, L0759: 1, | | |
| | | | | | | | L0592: 1 and H0653: 1. | | |
| | | 966201 | 576 | 2-394 | 1363 | Gln-34 to Ser-39, | | | |
| | | | | | | Ala-69 to Met-78. | | | |
| 128 | HE8OK79 | 1025100 | 138 | 3-830 | 925 | Glu-28 to Gln-39, | AR089: 1, AR061: 0 | | |
| | | | | | | Val-46 to Cys-86, | H0662: 1, H0013: 1, | | |
| | | | | | | Phe-90 to Gln-95, | H0046: 1 and S0174: 1. | | |
| | | | | | | Ser-104 to Arg-120, | | | |
| | | | | | | Ser-122 to Tyr-137, | | | |
| | | | | | | Lys-144 to Ser-150, | | | |
| | | | | | | Arg-157 to Thr-164, | | | |
| | | | | | | Ser-178 to Asn-197. | | | |
| | | 908619 | 577 | 3-461 | 1364 | Glu-28 to Gln-39, | | | |
| | | | | | | Val-46 to Cys-86, | | | |
| | | | | | | Phe-90 to Gln-95, | | | |
| | | | | | | Ser-104 to Arg-120. | | | |
| 129 | HE8OM15 | 1195124 | 139 | 3-1055 | 926 | Asn-15 to Gly-25, | AR089: 0, AR061: 0 | | |
| | | | | | | Pro-79 to Thr-84, | H0013: 2, S0212: 1, | | |
| | | | | | | Leu-91 to Ser-100, | H0581: 1, H0266: 1, | | |
| | | | | | | Ile-102 to Asn-107, | H0553: 1, L0749: 1 and | | |
| | | | | | | Phe-131 to Lys-166, | L0777: 1. | | |
| | | | | | | Phe-185 to Gly-192, | | | |
| | | | | | | Leu-195 to Cys-201, | | | |
| | | | | | | Leu-214 to Gln-219, | | | |
| | | | | | | Gln-236 to Asn-244, | | | |
| | | | | | | Thr-270 to Gly-275. | | | |
| | | 839876 | 578 | 3-749 | 1365 | Asn-15 to Gly-25, | | | |
| | | | | | | Pro-79 to Thr-84, | | | |
| | | | | | | Leu-91 to Ser-100, | | | |
| | | | | | | Ile-102 to Asn-107, | | | |
| | | | | | | Phe-131 to Lys-166, | | | |
| | | | | | | Phe-185 to Gly-192, | | | |
| | | | | | | Leu-195 to Cys-201, | | | |
| | | | | | | Leu-214 to Gln-219. | | | |
| 130 | HE8QM92 | 1216778 | 140 | 2-925 | 927 | Val-5 to Leu-16, | AR061: 4, AR089: 2, | | |
| | | | | | | Ser-19 to Ala-26, | S0328: 2, S0330: 2, | | |
| | | | | | | Ile-37 to Tyr-48, | H0624: 1, S0134: 1, | | |
| | | | | | | Ser-77 to Ser-83, | H0341: 1, S0420: 1, | | |
| | | | | | | Asp-124 to Ser-135, | H0645: 1, H0497: 1, | | |
| | | | | | | | H0013: 1, H0575: 1, | | |
| | | | | | | | S0003: 1, H0032: 1, | | |
| | | | | | | | H0591: 1, H0032: 1, | | |
| | | | | | | | S0422: 1, L0803: 1, | | |
| | | | | | | | L0663: 1, S0148: 1, | | |
| | | | | | | | H0520: 1, L0754: 1, | | |
| | | | | | | | L0759: 1 and H0542: 1. | | |
| | | 969463 | 579 | 1-927 | 1366 | Pro-8 to Leu-20, | | | |
| | | | | | | Ile-38 to Tyr-49, | | | |
| | | | | | | Ser-78 to Ser-84, | | | |
| | | | | | | Asp-125 to Asp-137, | | | |
| | | | | | | Asp-142 to Glu-159, | | | |
| | | | | | | Phe-167 to His-172, | | | |
| | | | | | | Thr-181 to Lys-186, | | | |
| | | | | | | Ser-188 to Cys-195, | | | |
| | | | | | | Glu-227 to Asp-233, | | | |
| | | | | | | Gln-238 to Lys-244, | | | |
| | | | | | | Ser-262 to Ser-268, | | | |
| | | | | | | Gly-284 to Asp-292. | | | |
| 131 | HE8QV82 | 1212645 | 41 | 2-493 | 928 | Gln-39 to Ser-46, | AR061: 1, AR089: 1 | | |
| | | | | | | Ser-57 to Thr-72, | L0439: 15, L0747: 7, | | |
| | | | | | | His-122 to Pro-127, | L0748: 6, L0756: 4, | | |
| | | | | | | Cys-133 to Lys-148, | L0779: 3, L0777: 3, | | |
| | | | | | | Thr-150 to Leu-159. | L0758: 3, L0759: 3, | | |
| | | | | | | | H0650: 2, H0671: 2, | | |
| | | | | | | | H0318: 2, L0763: 2, | | |
| | | | | | | | L0769: 2, L0438: 2, | | |
| | | | | | | | L0742: 2, L0754: 2, | | |
| | | | | | | | L0750: 2, L0757: 2, | | |
| | | | | | | | L0599: 2, S0114: 1, | | |
| | | | | | | | S0418: 1, S0360: 1, | | |
| | | | | | | | H0393: 1, H0013: 1, | | |
| | | | | | | | H0575: 1, H0052: 1, | | |
| | | | | | | | T0110: 1, H0327: 1, | | |
| | | | | | | | H0266: 1, H0135: 1, | | |
| | | | | | | | H0591: 1, H0560: 1, | | |
| | | | | | | | L0065: 1, S0210: 1, | | |
| | | | | | | | L0761: 1, L0772: 1, | | |
| | | | | | | | L0521: 1, L0768: 1, | | |
| | | | | | | | L0387: 1, L0766: 1, | | |
| | | | | | | | L0803: 1, L0650: 1, | | |
| | | | | | | | L0775: 1, L0655: 1, | | |
| | | | | | | | L0659: 1, L0783: 1, | | |
| | | | | | | | L0664: 1, H0520: 1, | | |
| | | | | | | | H0689: 1, H0435: 1, | | |
| | | | | | | | S0330: 1, S0378: 1, | | |
| | | | | | | | H0521: 1, L0780: 1, | | |
| | | | | | | | L0752: 1, L0755: 1, | | |
| | | | | | | | L0731: 1, L0591: 1 and | | |
| | | | | | | | S0242: 1. | | |
| | | 908620 | 580 | 1-486 | 1367 | Gln-37 to Ser-44, | | | |
| | | | | | | Ser-55 to Thr-70, | | | |
| | | | | | | His-120 to Pro-125, | | | |
| | | | | | | Cys-131 to Lys-146, | | | |
| | | | | | | Thr-148 to Leu-157. | | | |
| 132 | HE8UZ63 | 1194791 | 142 | 115-1518 | 929 | Leu-3 to Ser-12, | AR061: 3, AR089: 3 | | |
| | | | | | | Gln-14 to His-22, | L0794: 4, L0779: 3, | | |
| | | | | | | Pro-25 to Gln-32, | S0376: 2, H0620: 2, | | |
| | | | | | | Ser-37 to Ser-45, | H0063: 2, L0803: 2, | | |
| | | | | | | Pro-48 to Arg-57, | L0654: 2, L0758: 2, | | |
| | | | | | | Phe-59 to Ser-66, | H0013: 1, H0036: 1, | | |
| | | | | | | Met-121 to Thr-126, | H0052: 1, T0110: 1, | | |
| | | | | | | Glu-133 to Pro-143, | H0090: 1, H0040: 1, | | |
| | | | | | | Thr-151 to Lys-164, | H0429: 1, H0561: 1, | | |
| | | | | | | Arg-213 to Thr-222, | L0766: 1, L0659: 1, | | |
| | | | | | | Glu-227 to Arg-239, | L0790: 1, L0792: 1, | | |
| | | | | | | Lys-252 to His-257, | S0390: 1, L0777: 1, | | |
| | | | | | | Lys-262 to Arg-280, | L0755: 1, L0592: 1 and | | |
| | | | | | | Gly-296 to Ala-302, | S0458: 1. | | |
| | | | | | | Ser-311 to Gln-322, | | | |
| | | | | | | Ser-347 to Thr-358, | | | |
| | | | | | | Ser-372 to Val-381, | | | |
| | | | | | | Phe-388 to Gln-415, | | | |
| | | | | | | Asn-461 to Val-468. | | | |
| | | 959724 | 581 | 2-1213 | 1368 | | | | |
| 133 | HE9CJ74 | 908903 | 143 | 1-585 | 930 | Thr-17 to Gly-23. | AR061: 3, AR089: 2 | | |
| | | | | | | | H0144: 2, L0471: 1 | | |
| | | | | | | | and H0553: 1. | | |
| 134 | HE9MK11 | 1228114 | 144 | 320-1483 | 931 | Trp-10 to Ser-18, | AR061: 17, AR089: 11 | | |
| | | | | | | Ala-27 to Pro-45, | L0766: 9, L0745: 9, | | |
| | | | | | | Leu-59 to Lys-74, | L0754: 6, H0624: 5, | | |
| | | | | | | Tyr-83 to His-98, | L0746: 5, L0598: 4, | | |
| | | | | | | Glu-142 to Gly-160, | H0521: 4, H0543: 4, | | |
| | | | | | | Arg-165 to Arg-171, | H0560: 3, H0529: 3, | | |
| | | | | | | Pro-182 to Ser-188, | L0665: 3, L0591: 3, | | |
| | | | | | | Leu-193 to Asn-211, | L0608: 3, H0657: 2, | | |
| | | | | | | Leu-213 to Thr-219, | H0638: 2, H0046: 2, | | |
| | | | | | | Arg-224 to Glu-239, | S0422: 2, L0662: 2, | | |
| | | | | | | Arg-331 to Gly-356, | L0649: 2, L0803: 2, | | |
| | | | | | | Ile-364 to Glu-372, | L0659: 2, L0532: 2, | | |
| | | | | | | Ser-380 to Leu-388. | L0666: 2, L0663: 2, | | |
| | | | | | | | H0144: 2, H0435: 2, | | |
| | | | | | | | L0751: 2, L0755: 2, | | |
| | | | | | | | L0759: 2, L0588: 2, | | |
| | | | | | | | L0362: 2, H0170: 1, | | |
| | | | | | | | H0265: 1, S0134: 1, | | |
| | | | | | | | S0116: 1, H0341: 1, | | |
| | | | | | | | S0212: 1, H0662: 1, | | |
| | | | | | | | H0402: 1, S0418: 1, | | |
| | | | | | | | L0005: 1, S0376: 1, | | |
| | | | | | | | H0580: 1, S0300: 1, | | |
| | | | | | | | L0717: 1, H0261: 1, | | |
| | | | | | | | H0586: 1, H0497: 1, | | |
| | | | | | | | H0013: 1, H0635: 1, | | |
| | | | | | | | H0581: 1, H0251: 1, | | |
| | | | | | | | L0157: 1, L0471: 1, | | |
| | | | | | | | H0201: 1, H0375: 1, | | |
| | | | | | | | S6028: 1, S0250: 1, | | |
| | | | | | | | H0428: 1, H0553: 1, | | |
| | | | | | | | H0644: 1, H0673: 1, | | |
| | | | | | | | S0036: 1, H0090: 1, | | |
| | | | | | | | H0040: 1, H0488: 1, | | |
| | | | | | | | S0210: 1, UNKWN: 1, | | |
| | | | | | | | L0645: 1, L0794: 1, | | |
| | | | | | | | L0661: 1, L0658: 1, | | |
| | | | | | | | L0809: 1, L0519: 1, | | |
| | | | | | | | L0790: 1, H0519: 1, | | |
| | | | | | | | H0658: 1, H0672: 1, | | |
| | | | | | | | H0539: 1, S0152: 1, | | |
| | | | | | | | H0134: 1, H0436: 1, | | |
| | | | | | | | L0777: 1, L0758: 1, | | |
| | | | | | | | S0026: 1, S0242: 1, | | |
| | | | | | | | H0542: 1, H0423: 1 and | | |
| | | | | | | | H0422: 1. | | |
| | | 964925 | 582 | 136-1011 | 1369 | | | | |
| 135 | HE9NO76 | 1162542 | 145 | 1-852 | 932 | Thr-27 to Phe-32, | AR089: 1, AR061: 1 | | |
| | | | | | | Ser-48 to Lys-67, | H0144: 5, L0804: 3, | | |
| | | | | | | Arg-80 to Gly-94, | L0731: 3, H0581: 2, | | |
| | | | | | | Phe-97 to Thr-104, | L0438: 2, H0547: 2, | | |
| | | | | | | Gly-112 to Cys-125, | H0013: 1, L0040: 1, | | |
| | | | | | | Gln-135 to Gln-155, | L0638: 1, L0521: 1, | | |
| | | | | | | Ile-165 to Cys-183, | L0766: 1, L0803: 1, | | |
| | | | | | | Arg-191 to Lys-207, | L0747: 1, L0750: 1, | | |
| | | | | | | Asn-221 to Cys-230, | L0779: 1, L0777: 1, | | |
| | | | | | | Arg-276 to Asn-284. | L0758: 1 and H0543: 1. | | |
| | | 908918 | 583 | 2-655 | 1370 | Thr-27 to Phe-32, | | | |
| | | | | | | Ser-48 to Gly-56. | | | |
| 136 | HE9OL74 | 1151724 | 146 | 289-1101 | 933 | Lys-29 to Lys-36, | AR089: 1, AR061: 0 | | |
| | | | | | | Pro-40 to Ser-46, | L0439: 10, LO754: 5, | | |
| | | | | | | Lys-64 to Val-71, | H0486: 3, L0809: 3, | | |
| | | | | | | Val-76 to Gly-88, | L0748: 3, L0740: 3, | | |
| | | | | | | Trp-100 to Gly-116, | L0758: 3, T0010: 2, | | |
| | | | | | | Thr-177 to Phe-182, | L0804: 2, L0650: 2, | | |
| | | | | | | Ile-188 to Gly-215, | L0805: 2, L0438: 2, | | |
| | | | | | | Gly-228 to Glu-236, | L0747: 2, L0757: 2, | | |
| | | | | | | Lys-245 to Val-252, | S0001: 1, S0354: 1, | | |
| | | | | | | Gln-257 to Lys-271. | S0376: 1, S0360: 1, | | |
| | | | | | | | S0045: 1, H0013: 1, | | |
| | | | | | | | H0012: 1, S0048: 1, | | |
| | | | | | | | H0188: 1, H0428: 1, | | |
| | | | | | | | H0135: 1, H0038: 1, | | |
| | | | | | | | H0616: 1, H0380: 1, | | |
| | | | | | | | H0412: 1, L0435: 1, | | |
| | | | | | | | T0042: 1, H0494: 1, | | |
| | | | | | | | H0561: 1, H0641: 1, | | |
| | | | | | | | S0422: 1, L0369: 1, | | |
| | | | | | | | L0761: 1, L0363: 1, | | |
| | | | | | | | L0766: 1, L0803: 1, | | |
| | | | | | | | L0375: 1, L0766: 1, | | |
| | | | | | | | L0655: 1, L0788: 1, | | |
| | | | | | | | L0663: 1, L0665: 1, | | |
| | | | | | | | H0144: 1, S0374: 1, | | |
| | | | | | | | H0547: 1, H0658: 1, | | |
| | | | | | | | H0539: 1, H0627: 1, | | |
| | | | | | | | L0751: 1, L0749: 1, | | |
| | | | | | | | L0756: 1, L0779: 1, | | |
| | | | | | | | L0777: 1, L0599: 1, | | |
| | | | | | | | S0026: 1, S0192: 1 and | | |
| | | | | | | | H0423: 1. | | |
| | | 765044 | 584 | 2-259 | 1371 | Lys-1 to Cys-12, | | | |
| | | | | | | Thr-72 to Phe-77. | | | |
| 137 | HE9PI95 | 1152239 | 147 | 863-3 | 934 | Lys-19 to Lys-34, | AR089: 4, AR061: 4 | | |
| | | | | | | His-72 to Phe-78, | H0329: 1, H0393: 1, | | |
| | | | | | | Gly-102 to Glu-107, | L0435: 1, H0144: 1, | | |
| | | | | | | Gln-125 to Gly-131, | L0438: 1 and L0779: 1. | | |
| | | | | | | Glu-135 to Lys-146, | | | |
| | | | | | | His-156 to Ser-176, | | | |
| | | | | | | His-184 to Gln-191, | | | |
| | | | | | | Cys-193 to Phe-199, | | | |
| | | | | | | Pro-217 to Lys-225, | | | |
| | | | | | | Ser-241 to Gln-257, | | | |
| | | | | | | Arg-265 to Ser-277. | | | |
| | | 909160 | 585 | 1-342 | 1372 | Glu-1 to Ser-11, | | | |
| | | | | | | His-19 to Gln-26, | | | |
| | | | | | | Cys-28 to Phe-34, | | | |
| | | | | | | Pro-52 to Cys-58, | | | |
| | | | | | | Arg-66 to Glu-73. | | | |
| 138 | HE9QL92 | 1163068 | 148 | 1-723 | 935 | His-12 to Cys-23, | AR061: 1, AR089: 1 | | |
| | | | | | | His-40 to Tyr-46, | L0520: 4, L0747: 4, | | |
| | | | | | | His-68 to Lys-75, | H0040: 3, L0592: 2, | | |
| | | | | | | Thr-97 to Ser-115, | H0624: 1, H0650: 1, | | |
| | | | | | | Arg-122 to Cys-135, | S0212: 1, L0717: 1, | | |
| | | | | | | His-152 to Ile-159, | H0013: 1, H0615: 1, | | |
| | | | | | | Phe-167 to His-172, | L0763: 1, L0649: 1, | | |
| | | | | | | His-180 to Pro-185, | L0545: 1, H0144: 1, | | |
| | | | | | | His-208 to Tyr-214. | H0547: 1, H0682: 1, | | |
| | | | | | | | H0672: 1, L0740: 1 and | | |
| | | | | | | | L0758: 1. | | |
| | | 908460 | 586 | 2-487 | 1373 | His-12 to Cys-23, | | | |
| | | | | | | His-40 to Tyr-46, | | | |
| | | | | | | His-68 to Lys-75, | | | |
| | | | | | | Thr-97 to Gln-116. | | | |
| 139 | HE9TE84 | 1085611 | 149 | 3-725 | 936 | Ser-5 to Leu-11, | AR061: 7, AR089: 3 | | |
| | | | | | | Ser-34 to Ala-41, | H0556: 1, S0134: 1, | | |
| | | | | | | Val-45 to Ala-57, | H0052: 1, H0144: 1, | | |
| | | | | | | Gly-77 to Leu-83, | L0749: 1 and L0777: 1. | | |
| | | | | | | Pro-127 to Arg-132, | | | |
| | | | | | | Ser-137 to Ala-146, | | | |
| | | | | | | Thr-149 to Pro-162, | | | |
| | | | | | | Glu-169 to Thr-186, | | | |
| | | | | | | Arg-192 to Gly-202. | | | |
| | | 782311 | 587 | 193-654 | 1374 | Gly-13 to Leu-19, | | | |
| | | | | | | Pro-63 to Arg-68, | | | |
| | | | | | | Ser-73 to Ala-82, | | | |
| | | | | | | Thr-85 to Pro-98, | | | |
| | | | | | | Glu-105 to Thr-122, | | | |
| | | | | | | Arg-128 to Gly-138. | | | |
| 140 | HEMDJ83 | 1153885 | 150 | 136-771 | 937 | Arg-1 to His-6, | AR061: 24, AR089: 22 | | |
| | | | | | | Tyr-34 to Gln-41, | L0751: 11, L0789: 10, | | |
| | | | | | | Gln-54 to His-60, | L0803: 9, L0750: 8, | | |
| | | | | | | Gly-70 to Trp-76, | L0776: 7, L0779: 7, | | |
| | | | | | | Gln-82 to Pro-92, | L0769: 4, L0809: 3, | | |
| | | | | | | Pro-107 to Arg-115, | L0777: 3, H0352: 3, | | |
| | | | | | | Pro-123 to His-130, | S0046: 2, H0592: 2, | | |
| | | | | | | Arg-143 to Gly-160, | L0800: 2, L0774: 2, | | |
| | | | | | | Gly-176 to Arg-181, | L0806: 2, L0805: 2, | | |
| | | | | | | Asp-190 to Gly-198, | H0670: 2, S0028: 2, | | |
| | | | | | | Ser-200 to Phe-205. | L0743: 2, L0731: 2, | | |
| | | | | | | | S0040: 1, S0360: 1, | | |
| | | | | | | | H0411: 1, H0052: 1, | | |
| | | | | | | | H0457: 1, H0012: 1, | | |
| | | | | | | | H0266: 1, H0031: 1, | | |
| | | | | | | | H0169: 1, H0674: 1, | | |
| | | | | | | | H0634: 1, H0059: 1, | | |
| | | | | | | | H0100: 1, L0770: 1, | | |
| | | | | | | | L0637: 1, L0493: 1, | | |
| | | | | | | | L0783: 1, H0689: 1, | | |
| | | | | | | | H0682: 1, H0660: 1, | | |
| | | | | | | | H0696: 1, L0740: 1, | | |
| | | | | | | | L0780: 1, L0753: 1, | | |
| | | | | | | | L0759: 1, L0097: 1, | | |
| | | | | | | | S0242: 1, S0194: 1 and | | |
| | | | | | | | S0276: 1. | | |
| | | 792237 | 588 | 1-441 | 1375 | Pro-35 to Thr-42. | | | |
| 141 | HEOQC76 | 909032 | 151 | 106-657 | 938 | Ala-10 to Tyr-22, | AR089: 1, AR061: 1 | | |
| | | | | | | Phe-31 to Leu-37, | H0457: 3 and L0766: | | |
| | | | | | | Ser-59 to Leu-64, | 2. | | |
| | | | | | | Tyr-70 to Lys-90. | | | |
| 142 | HEORH04 | 1152241 | 152 | 417-653 | 939 | Pro-15 to Gly-21, | AR089: 3, AR061: 1 | | |
| | | | | | | Asn-33 to Asn-40. | L0438: 10, L0742: 6, | | |
| | | | | | | | L0771: 5, L0766: 5, | | |
| | | | | | | | L0803: 5, L0805: 5, | | |
| | | | | | | | L0748: 5, L0794: 4, | | |
| | | | | | | | L0779: 4, L0415: 3, | | |
| | | | | | | | H0013: 3, H0024: 3, | | |
| | | | | | | | L0804: 3, L0776: 3, | | |
| | | | | | | | L0439: 3, L0758: 3, | | |
| | | | | | | | H0004: 2, H0457: 2, | | |
| | | | | | | | S0036: 2, H0038: 2, | | |
| | | | | | | | L0770: 2, L0662: 2, | | |
| | | | | | | | L0809: 2, L0666: 2, | | |
| | | | | | | | L0753: 2, L0588: 2, | | |
| | | | | | | | S0026: 2, S6024: 1, | | |
| | | | | | | | H0402: 1, S0418: 1, | | |
| | | | | | | | S0420: 1, S0376: 1, | | |
| | | | | | | | S0360: 1, H0486: 1, | | |
| | | | | | | | T0039: 1, H0069: 1, | | |
| | | | | | | | H0318: 1, L0040: 1, | | |
| | | | | | | | L0471: 1, T0003: 1, | | |
| | | | | | | | H0014: 1, L0163: 1, | | |
| | | | | | | | H0428: 1, T0006: 1, | | |
| | | | | | | | H0032: 1, H0673: 1, | | |
| | | | | | | | L0455: 1, L0456: 1, | | |
| | | | | | | | H0591: 1, H0040: 1, | | |
| | | | | | | | H0100: 1, S0440: 1, | | |
| | | | | | | | S0426: 1, L0598: 1, | | |
| | | | | | | | H0529: 1, L0761: 1, | | |
| | | | | | | | L0655: 1, L0515: 1, | | |
| | | | | | | | L0659: 1, L0789: 1, | | |
| | | | | | | | L0790: 1, L0532: 1, | | |
| | | | | | | | L0663: 1, H0144: 1, | | |
| | | | | | | | S0374: 1, H0593: 1, | | |
| | | | | | | | H0670: 1, H0660: 1, | | |
| | | | | | | | H0672: 1, H0521: 1, | | |
| | | | | | | | H0436: 1, L0754: 1, | | |
| | | | | | | | L0750: 1, L0756: 1, | | |
| | | | | | | | L0777: 1, L0757: 1, | | |
| | | | | | | | L0759: 1, L0589: 1, | | |
| | | | | | | | L0591: 1 and L0698: 1. | | |
| | | 932782 | 589 | 399-599 | 1376 | Pro-15 to Gly-21, | | | |
| | | | | | | Asn-33 to Asn-40. | | | |
| 143 | HETBU05 | 1177927 | 153 | 3-1451 | 940 | Ser-4 to Tyr-11, | AR089: 7, AR061: 6 | | |
| | | | | | | Pro-57 to Leu-66, | L0747: 4, H0201: 2, | | |
| | | | | | | Arg-78 to Leu-89, | L0438: 2, H0485: 1, | | |
| | | | | | | Asn-97 to Asp-113, | H0046: 1, S6028: 1, | | |
| | | | | | | Asp-119 to Thr-126, | T0023: 1, L0794: 1, | | |
| | | | | | | Pro-131 to Lys-140, | L0774: 1, L0809: 1, | | |
| | | | | | | Lys-145 to Lys-154, | L0666: 1, H0435: 1, | | |
| | | | | | | Ser-169 to Lys-175, | H0436: 1, S3014: 1, | | |
| | | | | | | His-178 to His-184, | S0027: 1, L0439: 1, | | |
| | | | | | | His-206 to Gly-213, | L0740: 1, L0777: 1 and | | |
| | | | | | | Glu-229 to Cys-245, | H0422: 1. | | |
| | | | | | | Phe-249 to Gln-259, | | | |
| | | | | | | Ile-265 to Cys-273, | | | |
| | | | | | | Arg-288 to Gly-302, | | | |
| | | | | | | Gln-315 to Gly-325, | | | |
| | | | | | | Gln-343 to Lys-349, | | | |
| | | | | | | Cys-357 to Gly-366, | | | |
| | | | | | | His-374 to Gly-386, | | | |
| | | | | | | Thr-401 to Cys-410, | | | |
| | | | | | | Ser-431 to Asp-437, | | | |
| | | | | | | Val-441 to Ala-447, | | | |
| | | | | | | Ser-452 to Gly-459. | | | |
| | | 932852 | 590 | 3-614 | 1377 | | | | |
| 144 | HFANC50 | 1178745 | 154 | 2-739 | 941 | Val-8 to Ile-18, | AR061: 0, AR089: 0 | | |
| | | | | | | Phe-34 to Asp-39, | L0748: 3, L0439: 3, | | |
| | | | | | | His-47 to Tyr-53, | L0745: 2, L0747: 2, | | |
| | | | | | | Glu-70 to Lys-88, | S6026: 1, S0300: 1, | | |
| | | | | | | Lys-100 to Pro-108, | H0441: 1, H0052: 1, | | |
| | | | | | | His-131 to Glu-141, | S0003: 1, L0662: 1, | | |
| | | | | | | Ser-160 to Ile-186, | L0803: 1, L0784: 1, | | |
| | | | | | | Gly-189 to Cys-198, | L0655: 1, L0787: 1, | | |
| | | | | | | His-215 to Ala-229, | L0741: 1, L0749: 1 and | | |
| | | | | | | Tyr-237 to Thr-242. | L0752: 1. | | |
| | | 909221 | 591 | 3-638 | 1378 | Glu-14 to Lys-32, | | | |
| | | | | | | Phe-34 to Ile-46, | | | |
| | | | | | | Phe-62 to Asp-67, | | | |
| | | | | | | His-75 to Tyr-81, | | | |
| | | | | | | Glu-98 to Lys-116, | | | |
| | | | | | | Lys-128 to Pro-136, | | | |
| | | | | | | His-159 to Glu-169, | | | |
| | | | | | | Ser-188 to Gly-206. | | | |
| 145 | HFKIN35 | 1152244 | 155 | 612-82 | 942 | | AR061: 2, AR089: 1 | | |
| | | | | | | | L0794: 3, H0620: 2, | | |
| | | | | | | | H0486: 1, H0012: 1, | | |
| | | | | | | | L0666: 1, L0664: 1, | | |
| | | | | | | | H0696: 1 and L0366: 1. | | |
| | | 908695 | 592 | 3-422 | 1379 | His-28 to Gln-35, | | | |
| | | | | | | Pro-37 to Ser-42, | | | |
| | | | | | | Thr-57 to His-63, | | | |
| | | | | | | Pro-65 to Arg-74. | | | |
| 146 | HFKLV78 | 1152333 | 156 | 557-3 | 943 | Pro-15 to Ser-20, | AR089: 5, AR061: 4 | | |
| | | | | | | Pro-27 to Ser-35, | H0012: 1, H0620: 1, | | |
| | | | | | | Pro-37 to Trp-47, | L0536: 1, S0152: 1, | | |
| | | | | | | Glu-49 to Ser-59. | L0777: 1 and L0758: 1. | | |
| | | 908666 | 593 | 2-262 | 1380 | Leu-1 to Ser-15, | | | |
| | | | | | | Asp-20 to Glu-30, | | | |
| | | | | | | Thr-37 to Phe-44, | | | |
| | | | | | | Pro-50 to His-62, | | | |
| | | | | | | Arg-64 to Pro-75, | | | |
| | | | | | | Ala-81 to Ser-86. | | | |
| 147 | HFPEG38 | 1152248 | 157 | 1-783 | 944 | Pro-36 to Pro-41, | AR089: 1, AR061: 0 | | |
| | | | | | | Ala-89 to Glu-99, | L0600: 2, S0402: 1, | | |
| | | | | | | Phe-107 to Asn-112, | S0354: 1, S0222: 1, | | |
| | | | | | | Thr-121 to Gln-127, | H0328: 1, T0006: 1, | | |
| | | | | | | Arg-162 to Ser-167, | L0761: 1, L0646: 1, | | |
| | | | | | | Arg-177 to Tyr-182, | L0662: 1, L0527: 1, | | |
| | | | | | | Asp-245 to Phe-250. | L0384: 1, L0792: 1, | | |
| | | | | | | | H0539: 1, L0740: 1, | | |
| | | | | | | | L0779: 1, L0758: 1, | | |
| | | | | | | | H0595: 1 and L0594: 1. | | |
| | | 702985 | 594 | 1-372 | 1381 | Pro-36 to Pro-41, | | | |
| | | | | | | Ala-89 to Glu-99, | | | |
| | | | | | | Phe-107 to Asn-112. | | | |
| 148 | HFPFK09 | 1152335 | 158 | 3-443 | 945 | Phe-41 to Pro-46, | AR089: 30, AR061: 8 | | |
| | | | | | | Glu-136 to Thr-142. | L0665: 3, H0580: 1, | | |
| | | | | | | | S0222: 1, H0497: 1, | | |
| | | | | | | | L0475: 1, S0144: 1, | | |
| | | | | | | | L0766: 1, L0655: 1, | | |
| | | | | | | | L0659: 1, L0664: 1 and | | |
| | | | | | | | H0539: 1. | | |
| | | 909039 | 595 | 15-326 | 1382 | Leu-10 to Asn-15. | | | |
| 149 | HFPFV06 | 1152338 | 159 | 3-659 | 946 | His-1 to Lys-25, | AR061: 2, AR089: 1 | | |
| | | | | | | Asn-47 to Lys-53, | L0758: 3, L0759: 2, | | |
| | | | | | | Ala-71 to Phe-91, | S0342: 1, S0222: 1, | | |
| | | | | | | Ser-102 to Lys-107, | H0188: 1, L0653: 1, | | |
| | | | | | | Ile-110 to Thr-137, | H0539: and L0777: 1. | | |
| | | | | | | Lys-149 to Leu-155. | | | |
| | | 933827 | 596 | 100-702 | 1383 | Asp-1 to Lys-7. | | | |
| 150 | HFPGV06 | 1223393 | 160 | 433-1401 | 947 | Glu-8 to His-17, | AR089: 1, AR061: 0 | | |
| | | | | | | Ser-35 to Lys-43, | L0748: 2, L0785: 1, | | |
| | | | | | | Cys-51 to Asn-56, | S0222: 1, H0574: 1, | | |
| | | | | | | Arg-61 to Lys-66, | H0581: 1, L0109: 1, | | |
| | | | | | | Gly-72 to Lys-81, | H0052: 1, H0598: 1, | | |
| | | | | | | Gln-87 to Arg-97, | H0591: 1, L0763: 1, | | |
| | | | | | | Ile-126 to Gly-142, | L0766: 1, L0659: 1, | | |
| | | | | | | Pro-170 to Ala-177, | H0539: 1, H0436: 1, | | |
| | | | | | | Gln-210 to Ser-229, | L0740: 1, S0026: 1 and | | |
| | | | | | | Pro-234 to Ser-243, | H0543: 1. | | |
| | | | | | | Gly-248 to Thr-254, | | | |
| | | | | | | Cys-289 to Phe-296, | | | |
| | | | | | | Lys-304 to Asp-310, | | | |
| | | | | | | Arg-317 to His-323. | | | |
| | | 933817 | 597 | 426-572 | 1384 | Glu-8 to His-17. | | | |
| 151 | HFTBY36 | 1129412 | 161 | 167-1180 | 948 | Ala-7 to Lys-26, | AR089: 9, AR061: 2 | | |
| | | | | | | Pro-41 to His-46, | L0751: 2, L0777: 2, | | |
| | | | | | | Leu-50 to His-56, | H0254: 1, H0599: 1, | | |
| | | | | | | Gln-65 to Cys-72, | H0123: 1, L0772: 1, | | |
| | | | | | | Glu-94 to Ser-99, | L0764: 1, L0662: 1, | | |
| | | | | | | Lys-119 to Arg-124, | L0789: 1, L0747: 1 and | | |
| | | | | | | Asp-160 to Leu-169, | L0779: 1. | | |
| | | | | | | Ser-234 to Gln-239, | | | |
| | | | | | | Pro-262 to Lys-267, | | | |
| | | | | | | Ala-289 to Lys-295, | | | |
| | | | | | | Phe-303 to Ser-310. | | | |
| | | 909146 | 598 | 3-443 | 1385 | Lys-16 to Arg-21, | | | |
| | | | | | | Asp-57 to Leu-66, | | | |
| | | | | | | Ser-131 to Gln-136. | | | |
| 152 | HFVKA93 | 908885 | 162 | 3-551 | 949 | Ala-27 to Lys-40, | AR089: 4, AR061: 3 | | |
| | | | | | | Lys-49 to Lys-64. | H0329: 1, H0393: 1, | | |
| | | | | | | | L0435: 1, L0665: 1, | | |
| | | | | | | | H0144: 1, L0438: 1 and | | |
| | | | | | | | L0779: 1. | | |
| 153 | HGBDK80 | 1151040 | 163 | 713-291 | 950 | Thr-25 to Phe-30. | AR061: 3, AR089: 2 | | |
| | | | | | | | L0439: 2, S0040: 1, | | |
| | | | | | | | H0329: 1, H0427: 1, | | |
| | | | | | | | H0014: 1, H0187: 1 and | | |
| | | | | | | | H0436: 1. | | |
| | | 909249 | 599 | 1-405 | 1386 | Thr-22 to Phe-27. | | | |
| 154 | HHANU83 | 1155477 | 164 | 2-637 | 951 | Gly-1 to Ser-22, | AR089: 3, AR061: 3 | | |
| | | | | | | His-31 to Ser-50, | L0471: 1 and S0422: 1. | | |
| | | | | | | His-59 to Pro-82, | | | |
| | | | | | | His-87 to Thr-104, | | | |
| | | | | | | Phe-108 to Gly-119, | | | |
| | | | | | | Pro-148 to Leu-164, | | | |
| | | | | | | His-171 to Thr-177, | | | |
| | | | | | | Arg-202 to Lys-212. | | | |
| | | 909258 | 600 | 1-546 | 1387 | Thr-25 to Ser-43, | | | |
| | | | | | | His-52 to Ser-71, | | | |
| | | | | | | His-80 to Tyr-86. | | | |
| 155 | HHAVY06 | 1134110 | 165 | 246-386 | 952 | Val-13 to His-19, | AR061: 2, AR089: 1, | | |
| | | | | | | Val-36 to Lys-47. | L0794: 3, L0766: 2, | | |
| | | | | | | | L0779: 2, L0758: 2, | | |
| | | | | | | | S0418: 1, L0515: 1, | | |
| | | | | | | | L0647: 1 and L0740: 1. | | |
| | | 933829 | 601 | 3-326 | 1388 | His-1 to Leu-6, | | | |
| | | | | | | Thr-48 to Lys-56, | | | |
| | | | | | | Lys-100 to Thr-108. | | | |
| 156 | HHEKG31 | 1194802 | 166 | 600-1 | 953 | Ile-33 to Pro-44, | AR061: 1 | | |
| | | | | | | Pro-49 to Pro-58, | L0769: 2, L0740: 2, | | |
| | | | | | | Gly-107 to Ala-113. | L0779: 2, H0687: 1, | | |
| | | | | | | | L0779: 2, H0687: 1, | | |
| | | | | | | | L0770: 1, L0794: 1, | | |
| | | | | | | | L0766: 1, L0803: 1, | | |
| | | | | | | | L0805: 1, L0789: 1, | | |
| | | | | | | | L0792: 1 and H0542: 1. | | |
| | | 909270 | 602 | 1-240 | 1389 | Arg-19 to His-28, | | | |
| | | | | | | Glu-31 to Lys-29, | | | |
| | | | | | | Ala-48 to Pro-56, | | | |
| | | | | | | Phe-64 to Lys-71. | | | |
| 157 | HHENL35 | 1228115 | 167 | 48-2171 | 954 | His-7 to Leu-14, | AR089: 12, AR061: 2 | | |
| | | | | | | Pro-17 to Ser-23, | S0360: 3, S0358: 2, | | |
| | | | | | | Thr-105 to Thr-111, | H0644: 2, L0748: 2, | | |
| | | | | | | Thr-113 to Gln-119, | H0549: 1, H0550: 1, | | |
| | | | | | | His-132 to Thr-147, | H0622: 1, S0036: 1, | | |
| | | | | | | Ala-155 to Cys-173, | H0135: 1, H0040: 1, | | |
| | | | | | | Thr-197 to Lys-203, | H0059: 1, L0646: 1, | | |
| | | | | | | Arg-213 to Lys-218, | H0520: 1, S0152: 1, | | |
| | | | | | | Thr-225 to Thr-234, | S3014: 1, S0027: 1, | | |
| | | | | | | His-252 to Lys-259, | L0754: 1, L0747: 1, | | |
| | | | | | | Ala-266 to Ser-271, | L0777: 1, L0752: 1, | | |
| | | | | | | Ser-309 to Phe-314. | H0665: 1, H0543: 1 and | | |
| | | | | | | | H0423: 1. | | |
| | | 908615 | 603 | 2-742 | 1390 | Pro-1 to Gly-11, | | | |
| | | | | | | Glu-44 to Phe-52, | | | |
| | | | | | | Thr-120 to Thr-126. | | | |
| 158 | HHESX78 | 1154643 | 168 | 1-495 | 955 | His-14 to Ala-28, | AR089: 8, AR061: 3 | | |
| | | | | | | Ile-41 to Asp-62, | L0766: 4, H0657: 2, | | |
| | | | | | | His-70 to Cys-78, | S0114: 1, L0455: 1, | | |
| | | | | | | Gln-95 to Gln-105, | T0041: 1, L0774: 1, | | |
| | | | | | | His-126 to Asn-133, | H0689: 1, L0747: 1, | | |
| | | | | | | Ser-149 to Glu-156. | L0779: 1, L0592: 1, | | |
| | | | | | | | S0026: 1 and H0543: 1. | | |
| | | 909154 | 604 | 2-547 | 1391 | | | | |
| 159 | HHFHW96 | 1150915 | 169 | 1344-211 | 956 | Arg-9 to Gly-14, | AR061: 7, AR089: 3 | | |
| | | | | | | Arg-64 to His-72, | L0439: 4, H0265: 1, | | |
| | | | | | | Tyr-88 to Gly-94, | H0450: 1, H0619: 1, | | |
| | | | | | | Glu-121 to Glu-129, | T0082: 1, H0253: 1, | | |
| | | | | | | Pro-131 to Ser-137, | H0050: 1, H0024: 1, | | |
| | | | | | | Leu-171 to Lys-176, | H0290: 1, H0135: 1, | | |
| | | | | | | Arg-195 to Cys-205, | H0100: 1, L0435: 1, | | |
| | | | | | | Asp-207 to Ser-214, | T0042: 1, H0625: 1, | | |
| | | | | | | Thr-226 to Gly-237, | L0649: 1, S0053: 1 and | | |
| | | | | | | Ser-244 to His-249, | H0521: 1. | | |
| | | | | | | Pro-258 to Glu-263, | | | |
| | | | | | | His-281 to Pro-293. | | | |
| | | 914984 | 605 | 2-973 | 1392 | | | | |
| 160 | HHFLI65 | 1204698 | 170 | 3-1802 | 957 | Ser-12 to Ser-18, | AR089: 1, AR061: 0 | | |
| | | | | | | His-59 to Arg-67, | H0619: 2, L0717: 1, | | |
| | | | | | | Thr-118 to Cys-125, | H0013: 1, H0615: 1, | | |
| | | | | | | Ala-165 to Glu-170, | L0598: 1, L0796: 1, | | |
| | | | | | | Pro-182 to Ala-197, | L0806: 1, L0783: 1, | | |
| | | | | | | Ile-227 to Lys-238, | H0519: 1, H0658: 1, | | |
| | | | | | | Leu-265 to Tyr-275, | L0748: 1, L0439: 1 and | | |
| | | | | | | Pro-327 to Ser-332, | L0780: 1. | | |
| | | | | | | Glu-388 to Asp-394, | | | |
| | | | | | | His-459 to Gln-474, | | | |
| | | | | | | Ser-476 to Tyr-484, | | | |
| | | | | | | Gly-569 to Asp-576. | | | |
| | | 908698 | 606 | 2-553 | 1393 | Ser-6 to Ser-12, | | | |
| | | | | | | His-53 to Arg-61, | | | |
| | | | | | | Pro-99 to Cys-106, | | | |
| | | | | | | Ala-123 to Trp-132, | | | |
| | | | | | | Pro-156 to Lys-162. | | | |
| 161 | HHFMH56 | 1212648 | 171 | 1-999 | 958 | Pro-4 to Gly-9, | AR061: 3, AR089: 2 | | |
| | | | | | | Glu-36 to Asp-44, | H0170: 2, H0556: 2, | | |
| | | | | | | Asn-47 to Cys-60, | S0358: 2, S0422: 2, | | |
| | | | | | | Lys-71 to Gly-78, | L0803: 2, H0670: 2, | | |
| | | | | | | Tyr-81 to Gly-88, | L0750: 2, H0542: 2, | | |
| | | | | | | His-132 to Tyr-138, | S0360: 1, H0619: 1, | | |
| | | | | | | His-160 to Glu-167, | H0261: 1, H0036: 1, | | |
| | | | | | | Glu-190 to Gly-200, | S0250: 1, S0003: 1, | | |
| | | | | | | His-216 to GLu-223, | H0428: 1, S0036: 1, | | |
| | | | | | | His-244 to Gly-256, | S0210: 1, L0770: 1, | | |
| | | | | | | Thr-271 to Thr-292, | L0766: 1, L0774: 1, | | |
| | | | | | | His-300 to Tyr-306, | L0805: 1, L0809: 1, | | |
| | | | | | | Phe-315 to Arg-320. | L0666: 1, L0664: 1, | | |
| | | | | | | | H0684: 1, L07474: 1, | | |
| | | | | | | | L0779: 1, L0758: 1, | | |
| | | | | | | | S0031: 1 and L0366: 1. | | |
| | | 909279 | 607 | 3-584 | 1394 | Pro-1 to Gly-6. | | | |
| 162 | HHFOS26 | 1178803 | 172 | 73-891 | 959 | Ala-13 to Gly-20, | AR061: 3, AR089: 2 | | |
| | | | | | | Gly-30 to Met-58, | L0770: 4, L0439: 4, | | |
| | | | | | | Asn-78 to Val-83, | H0423: 3, L0659: 2, | | |
| | | | | | | Pro-100 to Tyr-111, | L0665: 2, H0593: 2, | | |
| | | | | | | His-119 to Asn-139, | H0436: 2, L0747: 2, | | |
| | | | | | | Thr-146 to Ser-165, | L0756: 2, L0759: 2, | | |
| | | | | | | Arg-173 to Tyr-181, | H0170: 1, S0114: 1, | | |
| | | | | | | Lys-188 to Ser-194, | H0645: 1, L0717: 1, | | |
| | | | | | | Arg-200 to Tyr-209, | H0581: 1, H0052: 1, | | |
| | | | | | | Arg-228 to Ala-251, | S0388: 1, H0673: 1, | | |
| | | | | | | Gln-267 to Ala-272. | H0135: 1, H0040: 1, | | |
| | | | | | | | H0646: 1, L0662: 1, | | |
| | | | | | | | L0803: 1, L0650: 1, | | |
| | | | | | | | L0806: 1, L0382: 1, | | |
| | | | | | | | S0330: 1, L0744: 1, | | |
| | | | | | | | L0749: 1, L0599: 1 and | | |
| | | | | | | | S0026: 1. | | |
| | | 931982 | 608 | 66-467 | 1395 | Ala-13 to Gly-20, | | | |
| | | | | | | Gly-30 to Met-58, | | | |
| | | | | | | Asn-78 to Val-83, | | | |
| | | | | | | Pro-100 to Tyr-111, | | | |
| | | | | | | His-119 to Lys-132. | | | |
| 163 | HHFOU24 | 1227643 | 173 | 1-2805 | 960 | Gln-7 to Ser-15, | AR089: 4, AR061: 4 | | |
| | | | | | | Gln-28 to Ile-34, | H0013: 8, S0010: 4, | | |
| | | | | | | Gln-63 to Ser-71, | H0052: 4, H0144: 4, | | |
| | | | | | | Ala-78 to Thr-87, | H0615: 3, L0805: 3, | | |
| | | | | | | Pro-105 to Val-115, | H0547: 3, L0747: 3, | | |
| | | | | | | Tyr-132 to Gly-137, | H0645: 2, S0049: 2, | | |
| | | | | | | Pro-155 to Asn-164, | H0009: 2, L0769: 2, | | |
| | | | | | | Leu-177 to Gly-186, | L0776: 2, L0665: 2, | | |
| | | | | | | Cys-193 to Ser-198, | H0519: 2, H0658: 2, | | |
| | | | | | | Asn-209 to Thr-218, | H0660: 2, L0602: 2, | | |
| | | | | | | Asp-239 to Glu-245, | H0555: 2, L0439: 2, | | |
| | | | | | | Tyr-296 to Cys-310, | L0750: 2, L0597: 2, | | |
| | | | | | | Lys-329 to Gln-336, | H0136: 2, H0423: 2, | | |
| | | | | | | Ser-351 to Arg-356, | H0624: 1, H0171: 1, | | |
| | | | | | | Ser-361 to Pro-366, | S0402: 1, H0294: 1, | | |
| | | | | | | Ser-394 to Ala-399. | S0114: 1, S0116: 1, | | |
| | | | | | | | H0341: 1, S0212: 1, | | |
| | | | | | | | H0483: 1, H0664: 1, | | |
| | | | | | | | S0360: 1, S0046: 1, | | |
| | | | | | | | H0619: 1, H0411: 1, | | |
| | | | | | | | H0369: 1, S0222: 1, | | |
| | | | | | | | H0438: 1, H0486: 1, | | |
| | | | | | | | H0156: 1, H0318: 1, | | |
| | | | | | | | H0581: 1, H0046: 1, | | |
| | | | | | | | H0457: 1, H0051: 1, | | |
| | | | | | | | H0416: 1, H0688: 1, | | |
| | | | | | | | H0644: 1, L0456: 1, | | |
| | | | | | | | H0135: 1, H0616: 1, | | |
| | | | | | | | H0059: 1, H0561: 1, | | |
| | | | | | | | S0344: 1, L0763: 1, | | |
| | | | | | | | L0646: 1, L0521: 1, | | |
| | | | | | | | L0766: 1, L0649: 1, | | |
| | | | | | | | L0789: 1, L0663: 1, | | |
| | | | | | | | L0438: 1, H0435: 1, | | |
| | | | | | | | H0436: 1, L0612: 1, | | |
| | | | | | | | L0748: 1, L0751: 1, | | |
| | | | | | | | L0779: 1, L0731: 1, | | |
| | | | | | | | L0758: 1, L0759: 1, | | |
| | | | | | | | L0686: 1, L0595: 1 and | | |
| | | | | | | | S0194: 1. | | |
| | | 909076 | 609 | 1-1089 | 1396 | Gln-7 to Ser-15, | | | |
| | | | | | | Gln-28 to Ile-34, | | | |
| | | | | | | Gln-63 to Ser-71, | | | |
| | | | | | | Ala-78 to Thr-87, | | | |
| | | | | | | Pro-105 to Val-115, | | | |
| | | | | | | Tyr-132 to Gly-137, | | | |
| | | | | | | Pro-155 to Asn-164, | | | |
| | | | | | | Leu-177 to Asp-185. | | | |
| 164 | HHPEF49 | 1153894 | 174 | 1-783 | 961 | Asn-1 to Lys-7, | AR061: 5, AR089: 4 | | |
| | | | | | | Asn-12 to Gln-20. | S0376: 1, H0013: 1, | | |
| | | | | | | His-31 to Gly-43, | H0051: 1, T0067: 1, | | |
| | | | | | | Ala-53 to Tyr-65, | L0438: 1 and L0748: 1. | | |
| | | | | | | Arg-82 to Asp-95, | | | |
| | | | | | | Arg-114 to Lys-123, | | | |
| | | | | | | His-144 to Glu-151, | | | |
| | | | | | | His-172 to Tyr-178, | | | |
| | | | | | | Gln-195 to Phe-215, | | | |
| | | | | | | Ile-227 to Thr-234. | | | |
| | | 810650 | 610 | 3-218 | 1397 | Lys-1 to Gly-9, | | | |
| | | | | | | Ala-19 to Tyr-31, | | | |
| | | | | | | Arg-48 to Glu-57. | | | |
| 165 | HHPFL91 | 796929 | 175 | 2-490 | 962 | | AR061: 22, AR089: 14 | | |
| | | | | | | | L0766: 10, L0740: 6, | | |
| | | | | | | | L0803: 5, L0752: 5, | | |
| | | | | | | | L0759: 5, L0794: 4, | | |
| | | | | | | | S0374: 4, L0750: 4, | | |
| | | | | | | | L0764: 3, H0171: 2, | | |
| | | | | | | | H0650: 2, S0360: 2, | | |
| | | | | | | | H0580: 2, H0586: 2, | | |
| | | | | | | | H0574: 2, L0741: 2, | | |
| | | | | | | | S0003: 2, H0553: 2, | | |
| | | | | | | | H0090: 2, H0591: 2, | | |
| | | | | | | | L0771: 2, L0754: 2, | | |
| | | | | | | | L0746: 2, L0747: 2, | | |
| | | | | | | | L0756: 2, L0731: 2, | | |
| | | | | | | | L0758: 2, H0542: 2, | | |
| | | | | | | | H0543: 2, H0170: 1, | | |
| | | | | | | | S0116: 1, S0212: 1, | | |
| | | | | | | | H0638: 1, H0208: 1, | | |
| | | | | | | | S0046: 1, S0414: 1, | | |
| | | | | | | | S0486: 1, H0635: 1, | | |
| | | | | | | | H0581: 1, H0024: 1, | | |
| | | | | | | | S0050: 1, H0051: 1, | | |
| | | | | | | | S0051: 1, T0010: 1, | | |
| | | | | | | | H0271: 1, S0214: 1, | | |
| | | | | | | | H0615: 1, L0483: 1, | | |
| | | | | | | | L0055: 1, H0673: 1, | | |
| | | | | | | | H0598: 1, H0551: 1, | | |
| | | | | | | | H0412: 1, L0475: 1, | | |
| | | | | | | | S0426: 1, L0598: 1, | | |
| | | | | | | | L0627: 1, L0772: 1, | | |
| | | | | | | | L0773: 1, L0521: 1, | | |
| | | | | | | | L0804: 1, L0806: 1, | | |
| | | | | | | | L0659: 1, L0809: 1, | | |
| | | | | | | | L0791: 1, L0663: 1, | | |
| | | | | | | | L0665: 1, S0216: 1, | | |
| | | | | | | | S0310: 1, H0648: 1, | | |
| | | | | | | | S0028: 1, L0745: 1, | | |
| | | | | | | | L0777: 1, L0780: 1, | | |
| | | | | | | | L0755: 1, S0031: 1, | | |
| | | | | | | | L0596: 1, L0588: 1, | | |
| | | | | | | | L0366: 1, H0665: 1, | | |
| | | | | | | | H0423: 1, H0422: 1 and | | |
| | | | | | | | L0465: 1. | | |
| 166 | HHPTA82 | 1077537 | 176 | 251-1144 | 963 | His-18 to Lys-23, | H0620: 2, L0521: 2, | | |
| | | | | | | Leu-65 to Asp-70, | L0747: 2, H0341: 1, | | |
| | | | | | | Lys-107 to Ser-115, | H0587: 1, L0021: 1, | | |
| | | | | | | Glu-192 to Gln-203, | S0112: 1, L0370: 1, | | |
| | | | | | | Arg-219 to Cys-229, | L0763: 1, L0662: 1, | | |
| | | | | | | Glu-246 to Glu-256. | L0779: 1 and L0755: 1. | | |
| | | 694018 | 611 | 127-564 | 1398 | Ile-1 to Ala-13, | | | |
| | | | | | | Val-41 to Cys-47, | | | |
| | | | | | | Glu-64 to Gly-79, | | | |
| | | | | | | Glu-92 to Cys-103. | | | |
| | | 779606 | 612 | 444-100 | 1399 | Pro-40 to Thr-65, | | | |
| | | | | | | Pro-67 to Asn-76. | | | |
| 167 | HHSGB32 | 1152251 | 177 | 3-311 | 964 | Arg-49 to Val-54. | AR089: 3, AR061: 2 | | |
| | | | | | | | H0519: 3, L0748: 2, | | |
| | | | | | | | L0749: 2, H0662: 1, | | |
| | | | | | | | S0388: 1, L0666: 1, | | |
| | | | | | | | L0663: 1 and H0435: 1. | | |
| | | 909220 | 613 | 1-330 | 1400 | | | | |
| 168 | HJPAY56 | 1201121 | 178 | 218-3 | 965 | | AR061: 4, AR089: 3 | | |
| | | | | | | | H0083: 1 and L0593: | | |
| | | | | | | | 1. | | |
| | | 909242 | 614 | 3-212 | 1401 | | | | |
| 169 | HJPDD85 | 961607 | 179 | 1-387 | 966 | Lys-7 to Tyr-12, | AR061: 2, AR089: 2 | | |
| | | | | | | Ala-37 to Tyr-64, | L0766: 4, L0803: 3, | | |
| | | | | | | Lys-101 to Glu-113. | L0761: 2, L0599: 2, | | |
| | | | | | | | H0263: 1, H0083: 1, | | |
| | | | | | | | H0056: 1, H0647: 1, | | |
| | | | | | | | L0646: 1, L0666: 1, | | |
| | | | | | | | H0672: 1, H0436: 1, | | |
| | | | | | | | L0754: 1 and H0422: 1. | | |
| 170 | HKAJU15 | 1154645 | 180 | 28-975 | 967 | Gly-2 to Ser-13, | AR089: 1, AR061: 0 | | |
| | | | | | | Ser-51 to Pro-61, | L0806: 5, H0295: 4, | | |
| | | | | | | Cys-65 to Arg-70, | L0769: 4, L0783: 4, | | |
| | | | | | | Arg-108 to Pro-118, | H0494: 3, L0774: 3, | | |
| | | | | | | Ala-140 to Gly-145, | H0545: 2, H0024: 2, | | |
| | | | | | | Pro-169 to Arg-183, | L0763: 2, L0803: 2, | | |
| | | | | | | Ser-201 to Glu-206, | L0665: 2, H0539: 2, | | |
| | | | | | | Pro-229 to Pro-261, | L0750: 2, L0731: 2, | | |
| | | | | | | Ala-267 to Arg-278, | L0759: 2, H0170: 1, | | |
| | | | | | | Gly-311 to Ser-316. | S0358: 1, S0278: 1, | | |
| | | | | | | | S0222: 1, H0592: 1, | | |
| | | | | | | | H0052: 1, H0033: 1, | | |
| | | | | | | | H0424: 1, H0598: 1, | | |
| | | | | | | | H0641: 1, L0770: 1, | | |
| | | | | | | | L0630: 1, L0807: 1, | | |
| | | | | | | | L0659: 1, L0809: 1, | | |
| | | | | | | | L0787: 1, L0789: 1, | | |
| | | | | | | | L0666: 1, L0663: 1, | | |
| | | | | | | | H0519: 1, H0522: 1, | | |
| | | | | | | | H0478: 1, L0743: 1, | | |
| | | | | | | | L0439: 1, L0745: 1, | | |
| | | | | | | | L0779: 1, L0755: 1, | | |
| | | | | | | | L0758: 1 and H0667: 1. | | |
| | | 768022 | 615 | 8-325 | 1402 | Gly-2 to Ser-13, | | | |
| | | | | | | Ser-51 to Pro-61, | | | |
| | | | | | | Cys-65 to Arg-70. | | | |
| 171 | HKAPC11 | 1193142 | 181 | 208-1446 | 968 | Tyr-7 to Tyr-12, | AR089: 1, AR061: 0 | | |
| | | | | | | Glu-40 to Ser-56, | H0251: 4, L0766: 4, | | |
| | | | | | | Glu-77 to Pro-100, | L0803: 4, L0439: 4, | | |
| | | | | | | Asn-140 to Lys-148, | L0752: 4, L0438: 3, | | |
| | | | | | | His-155 to Asn-161, | L0731: 3, L0759: 3, | | |
| | | | | | | His-183 to Ile-189, | S0132: 2, H0013: 2, | | |
| | | | | | | Cys-250 to Leu-260, | L0471: 2, H0616: 2, | | |
| | | | | | | Ser-276 to Gly-285, | H0494: 2, L0764: 2, | | |
| | | | | | | Asp-334 to Gly-339, | L0776: 2, H0520: 2, | | |
| | | | | | | Cys-364 to Gln-370. | L0754: 2, L0777: 2, | | |
| | | | | | | | L0362: 2, H0662: 1, | | |
| | | | | | | | S0420: 1, S0045: 1, | | |
| | | | | | | | S0222: 1, H0461: 1, | | |
| | | | | | | | H0486: 1, L0021: 1, | | |
| | | | | | | | H0599: 1, H0036: 1, | | |
| | | | | | | | T0003: 1, T0010: 1, | | |
| | | | | | | | H0355: 1, S0003: 1, | | |
| | | | | | | | H0553: 1, H0032: 1, | | |
| | | | | | | | H0598: 1, H0090: 1, | | |
| | | | | | | | H0634: 1, H0529: 1, | | |
| | | | | | | | L0646: 1, L0387: 1, | | |
| | | | | | | | L0806: 1, L0805: 1, | | |
| | | | | | | | L0606: 1, L0657: 1, | | |
| | | | | | | | L0663: 1, H0144: 1, | | |
| | | | | | | | S0374: 1, S0378: 1, | | |
| | | | | | | | H0555: 1, S0028: 1, | | |
| | | | | | | | S0206: 1, L0743: 1, | | |
| | | | | | | | L0745: 1, L0756: 1, | | |
| | | | | | | | L0753: 1, H0707: 1, | | |
| | | | | | | | L0595: 1 and H0423: 1. | | |
| | | 966122 | 616 | 208-834 | 1403 | Tyr-7 to Tyr-12, | | | |
| | | | | | | Glu-40 to Ser-56, | | | |
| | | | | | | Glu-77 to Pro-100, | | | |
| | | | | | | Asn-140 to Lys-148, | | | |
| | | | | | | His-155 to Asn-161, | | | |
| | | | | | | His-183 to Ile-189. | | | |
| 172 | HLFBE30 | 1153895 | 182 | 1-360 | 969 | Gln-27 to Thr-37, | AR061: 24, AR089: 19 | | |
| | | | | | | Gln-44 to Lys-62, | L0754: 2, T0003: 1, | | |
| | | | | | | Arg-76 to Arg-84, | L0662: 1, L0803: 1, | | |
| | | | | | | His-86 to Arg-99, | L0666: 1, L0779: 1, | | |
| | | | | | | Arg-108 to Gln-120. | L0777: 1, L0758: 1 and | | |
| | | | | | | | S0026: 1. | | |
| | | 909139 | 617 | 2-337 | 1404 | Gln-19 to Thr-29, | | | |
| | | | | | | Gln-36 to Lys-54, | | | |
| | | | | | | Arg-68 to Arg-76, | | | |
| | | | | | | His-78 to Arg-91, | | | |
| | | | | | | Arg-100 to Gln-112. | | | |
| 173 | HLHCB06 | 1150827 | 183 | 811-452 | 970 | His-7 to Cys-18, | AR089: 13, AR061: 6 | | |
| | | | | | | Thr-36 to Cys-46, | H0024: 2, H0645: 1, | | |
| | | | | | | Thr-64 to His-69, | H0272: 1 and S0028: 1. | | |
| | | | | | | His-91 to Lys-98. | | | |
| | | 908934 | 618 | 3-398 | 1405 | His-7 to Cys-18, | | | |
| | | | | | | Thr-36 to Cys-46, | | | |
| | | | | | | Thr-64 to His-69, | | | |
| | | | | | | His-91 to Lys-98. | | | |
| 174 | HLJBK38 | 1189741 | 184 | 1-393 | 971 | Pro-1 to Arg-6, | AR089: 84, AR061: 21 | | |
| | | | | | | Arg-71 to Gln-89. | S0360: 1, H0375: 1, | | |
| | | | | | | | T0067: 1, L0521: 1 and | | |
| | | | | | | | L0439: 1. | | |
| | | 908647 | 619 | 3-359 | 1406 | | | | |
| 175 | HLKAA78 | 1228118 | 185 | 2-1417 | 972 | Lys-6 to Lys-23, | AR089: 11, AR061: 4 | | |
| | | | | | | Pro-45 to Gly-52, | S0360: 8, L0748: 8, | | |
| | | | | | | Glu-125 to Lys-130, | L0659: 6, L0665: 6, | | |
| | | | | | | Ala-144 to Phe-155, | L0759: 6, L0789: 5, | | |
| | | | | | | Glu-158 to Asp-164, | L0743: 5, L0752: 5, | | |
| | | | | | | Ser-171 to Glu-179, | S0346: 4, H0059: 4, | | |
| | | | | | | Gln-188 to Leu-201, | L0662: 4, L0717: 3, | | |
| | | | | | | Val-215 to Glu-229, | H0644: 3, L0761: 3, | | |
| | | | | | | Asp-243 to Arg-253, | L0805: 3, L0776: 3, | | |
| | | | | | | Gly-258 to Ser-267, | S0028: 3, L0744: 3, | | |
| | | | | | | Ala-270 to Ala-275, | L0754: 3, L0749: 3, | | |
| | | | | | | Gly-293 to Lys-308, | L0731: 3, L0757: 3, | | |
| | | | | | | Pro-353 to Glu-360, | S0010: 2, S0144: 2, | | |
| | | | | | | Ala-370 to Leu-377, | L0771: 2, L0804: 2, | | |
| | | | | | | His-411 to Thr-416. | L0774: 2, L0806: 2, | | |
| | | | | | | | L0809: 2, L0664: 2, | | |
| | | | | | | | L0747: 2, L0758: 2, | | |
| | | | | | | | L0604: 2, H0656: 1, | | |
| | | | | | | | S0001: 1, S0356: 1, | | |
| | | | | | | | H0619: 1, H0392: 1, | | |
| | | | | | | | H0592: 1, H0574: 1, | | |
| | | | | | | | S0280: 1, H0599: 1, | | |
| | | | | | | | T0082: 1, H0581: 1, | | |
| | | | | | | | H0052: 1, H0544: 1, | | |
| | | | | | | | H0009: 1, H0081: 1, | | |
| | | | | | | | H0620: 1, H0286: 1, | | |
| | | | | | | | S0250: 1, H0591: 1, | | |
| | | | | | | | H0038: 1, H0264: 1, | | |
| | | | | | | | T0004: 1, H0100: 1, | | |
| | | | | | | | H0386: 1, S0344: 1, | | |
| | | | | | | | L0763: 1, L0667: 1, | | |
| | | | | | | | L0764: 1, L0773: 1, | | |
| | | | | | | | L0794: 1, L0766: 1, | | |
| | | | | | | | L0803: 1, L0650: 1, | | |
| | | | | | | | L0657: 1, L0666: 1, | | |
| | | | | | | | H0144: 1, L0352: 1, | | |
| | | | | | | | H0547: 1, H0660: 1, | | |
| | | | | | | | H0672: 1, S0328: 1, | | |
| | | | | | | | H0696: 1, S0404: 1, | | |
| | | | | | | | H0555: 1, H0436: 1, | | |
| | | | | | | | L0742: 1, L0750: 1, | | |
| | | | | | | | L0779: 1, S0031: 1, | | |
| | | | | | | | S0260: 1, L0584: 1, | | |
| | | | | | | | L0596: 1, L0591: 1 and | | |
| | | | | | | | H0506: 1. | | |
| | | 917505 | 620 | 122-1192 | 1407 | Glu-24 to Trp-29. | | | |
| 176 | HLQEF42 | 1133655 | 186 | 1-669 | 973 | Val-1 to Ser-24, | AR061: 4, AR089: 1, | | |
| | | | | | | Gln-40 to Thr-50, | H0393: 1, H0574: 1 | | |
| | | | | | | His-58 to Asp-72, | and S0386: 1. | | |
| | | | | | | Lys-89 to Gly-94. | | | |
| | | 908907 | 621 | 1-630 | 1408 | Val-1 to Ser-24, | | | |
| | | | | | | Gln-40 to Thr-50, | | | |
| | | | | | | His-58 to Asp-72, | | | |
| | | | | | | Lys-89 to Gly-94, | | | |
| 177 | HLSDA17 | 1162851 | 187 | 3-1091 | 974 | Pro-10 to Leu-15, | AR089: 3, AR061: 2 | | |
| | | | | | | Gly-34 to Lys-39, | L0740: 4, L0747: 3, | | |
| | | | | | | Tyr-108 to Thr-114, | L0750: 3, L0752: 3, | | |
| | | | | | | Ala-131 to Asn-138, | H0529: 2, L0761: 2, | | |
| | | | | | | Glu-155 to Leu-161, | L0766: 2, L0803: 2, | | |
| | | | | | | Leu-165 to Phe-177, | L0774: 2, L0666: 2, | | |
| | | | | | | Lys-237 to Asp-247, | L0588: 2, H0423: 2, | | |
| | | | | | | Arg-250 to Asp-265, | S0040: 1, H0638: 1, | | |
| | | | | | | Gln-294 to Glu-303, | S0354: 1, H0580: 1, | | |
| | | | | | | Arg-357 to Gln-362. | H0393: 1, S0222: 1, | | |
| | | | | | | | H0612: 1, H0497: 1, | | |
| | | | | | | | H0013: 1, S0280: 1, | | |
| | | | | | | | H0596: 1, L0157: 1, | | |
| | | | | | | | H0594: 1, S6028: 1, | | |
| | | | | | | | H0266: 1, H0687: 1, | | |
| | | | | | | | H0163: 1, H0040: 1, | | |
| | | | | | | | H0637: 1, L0373: 1, | | |
| | | | | | | | L0794: 1, L0804: 1, | | |
| | | | | | | | L0805: 1, L0655: 1, | | |
| | | | | | | | L0659: 1, L0783: 1, | | |
| | | | | | | | L0789: 1, H0365: 1, | | |
| | | | | | | | H0659: 1, H0672: 1, | | |
| | | | | | | | H0539: 1, H0521: 1, | | |
| | | | | | | | S0027: 1, L0777: 1, | | |
| | | | | | | | L0591: 1, S0194: 1 and | | |
| | | | | | | | H0422: 1. | | |
| | | 927392 | 622 | 2-1384 | 1409 | | | | |
| 178 | HLTIB64 | 1228119 | 188 | 3-599 | 975 | His-1 to Trp-10, | AR089: 12, AR061: 5 | | |
| | | | | | | His-18 to Pro-23, | L0754: 5, L0662: 3, | | |
| | | | | | | Phe-49 to Ser-69, | H0547: 3, H0659: 3, | | |
| | | | | | | Gly-72 to Phe-93, | S0242: 3, S0003: 2, | | |
| | | | | | | Lys-133 to Gly-139, | H0641: 2, L0653: 2, | | |
| | | | | | | Asn-159 to His-164, | H0658: 2, H0522: 2, | | |
| | | | | | | Thr-191 to Arg-199. | L0740: 2, H0171: 1, | | |
| | | | | | | | S6024: 1, S0418: 1, | | |
| | | | | | | | S0354: 1, L0717: 1, | | |
| | | | | | | | H0574: 1, H0596: 1, | | |
| | | | | | | | H0327: 1, H0266: 1, | | |
| | | | | | | | H0674: 1, H0591: 1, | | |
| | | | | | | | H0040: 1, H0634: 1, | | |
| | | | | | | | H0616: 1, H0063: 1, | | |
| | | | | | | | T0067: 1, H0647: 1, | | |
| | | | | | | | L0638: 1, L0641: 1, | | |
| | | | | | | | L0766: 1, L0790: 1, | | |
| | | | | | | | L0666: 1, H0520: 1, | | |
| | | | | | | | S0126: 1, S0328: 1, | | |
| | | | | | | | S0380: 1, H0696: 1, | | |
| | | | | | | | H0436: 1, L0753: 1, | | |
| | | | | | | | L0686: 1, S0434: 1, | | |
| | | | | | | | H0668: 1, S0196: 1, | | |
| | | | | | | | H0422: 1 and S0460: 1. | | |
| | | 958156 | 623 | 45-521 | 1410 | | | | |
| 179 | HLTIL56 | 1178815 | 189 | 2-1219 | 976 | Ala-1 to His-6, | AR061: 2, AR089: 2 | | |
| | | | | | | Pro-19 to Ser-30, | L0747: 4, H0014: 2, | | |
| | | | | | | Arg-37 to Tyr-47, | L0438: 2, L0754: 2, | | |
| | | | | | | Thr-53 to Ser-58, | L0745: 2, L0777: 2, | | |
| | | | | | | Lys-71 to Lys-80, | L0465: 2, S0114: 1, | | |
| | | | | | | Gln-92 to Glu-102, | L0002: 1, S0003: 1, | | |
| | | | | | | Phe-110 to Cys-134, | H0591: 1, L0766: 1, | | |
| | | | | | | Arg-149 to Cys-159, | H0648: 1, L0740: 1 and | | |
| | | | | | | Glu-161 to Tyr-168, | L0746: 1. | | |
| | | | | | | Arg-177 to Ser-193, | | | |
| | | | | | | Leu-200 to Cys-218, | | | |
| | | | | | | Gly-227 to Gly-247, | | | |
| | | | | | | Phe-250 to Gly-258, | | | |
| | | | | | | His-263 to Gly-275, | | | |
| | | | | | | Phe-278 to Asn-283, | | | |
| | | | | | | Thr-290 to Tyr-325, | | | |
| | | | | | | Ser-338 to Gly-359, | | | |
| | | | | | | Phe-362 to Asn-367, | | | |
| | | | | | | Arg-373 to Gln-392, | | | |
| | | | | | | Ser-394 to Asp-406. | | | |
| | | 909187 | 624 | 1-552 | 1411 | Pro-17 to Ser-28, | | | |
| | | | | | | Arg-35 to Tyr-45, | | | |
| | | | | | | Thr-51 to Ser-56, | | | |
| | | | | | | Lys-69 to Lys-78, | | | |
| | | | | | | Gln-90 to Glu-100, | | | |
| | | | | | | Phe-108 to Cys-132, | | | |
| | | | | | | Arg-147 to Cys-157, | | | |
| | | | | | | Glu-159 to Tyr-166, | | | |
| | | | | | | Arg-175 to Glu-184. | | | |
| 180 | HLWAF59 | 1194725 | 190 | 3-1301 | 977 | Thr-38 to Tyr-46, | AR089: 3, AR061: 1 | | |
| | | | | | | Lys-69 to Lys-83, | L0657: 2, L0485: 2, | | |
| | | | | | | Glu-87 to Leu-104, | L0362: 2, S0276: 2, | | |
| | | | | | | Lys-124 to Gln-148, | H0686: 1, H0685: 1, | | |
| | | | | | | Gln-154 to Ser-159, | S0134: 1, L0717: 1, | | |
| | | | | | | Glu-178 to Glu-191, | T0048: 1, H0251: 1, | | |
| | | | | | | Leu-195 to Glu-208, | L0163: 1, S0250: 1, | | |
| | | | | | | Lys-223 to Ala-230, | H0553: 1, H0090: 1, | | |
| | | | | | | Asn-233 to Arg-241, | L0564: 1, L0769: 1, | | |
| | | | | | | Gln-250 to Ser-259, | L0764: 1, L0771: 1, | | |
| | | | | | | Pro-261 to Val-305, | L0363: 1, L0766: 1, | | |
| | | | | | | Val-314 to Glu-335, | L0789: 1, H0658: 1, | | |
| | | | | | | Pro-345 to Val-371, | H0521: 1, S0392: 1, | | |
| | | | | | | Cys-389 to Lys-398, | L0779: 1, H0445: 1, | | |
| | | | | | | Thr-421 to Arg-433. | S0434: 1, S0194: 1, | | |
| | | | | | | | H0542: 1, H0543: 1 and | | |
| | | | | | | | S0412: 1. | | |
| | | 944901 | 625 | 13-1161 | 1412 | His-1 to Gly-12, | | | |
| | | | | | | Thr-52 to Tyr-60, | | | |
| | | | | | | Lys-83 to Lys-97, | | | |
| | | | | | | Glu-101 to Leu-118, | | | |
| | | | | | | Lys-138 to Gln-162, | | | |
| | | | | | | Gln-168 to Ser-173, | | | |
| | | | | | | Glu-192 to Glu-205, | | | |
| | | | | | | Leu-209 to Glu-222, | | | |
| | | | | | | Lys-237 to Ala-244, | | | |
| | | | | | | Asn-247 to Arg-255, | | | |
| | | | | | | Gln-264 to Ser-273, | | | |
| | | | | | | Pro-275 to Gln-311, | | | |
| | | | | | | Val-313 to Tyr-319, | | | |
| | | | | | | Glu-337 to Glu-344. | | | |
| 181 | HLWAZ29 | 1228153 | 191 | 2-787 | 978 | Asn-20 to Arg-27, | AR089: 6, AR061: 1 | | |
| | | | | | | Lys-64 to Gln-72, | L0794: 10, L0731: 6, | | |
| | | | | | | Asp-87 to Gln-92, | L0483: 5, L0749: 5, | | |
| | | | | | | Gly-111 to Leu-117, | L0805: 4, L0748: 4, | | |
| | | | | | | His-126 to Leu-131, | L0754: 4, L0747: 4, | | |
| | | | | | | Gly-205 to Leu-214, | L0662: 3, L0809: 3, | | |
| | | | | | | Pro-232 to Asp-239. | L0740: 3, L0777: 3, | | |
| | | | | | | | S0045: 2, H0052: 2, | | |
| | | | | | | | L0521: 2, L0774: 2, | | |
| | | | | | | | H0696: 2, L0745: 2, | | |
| | | | | | | | L0746: 2, L0752: 2, | | |
| | | | | | | | L0757: 2, L0759: 2, | | |
| | | | | | | | H0624: 1, H0170: 1, | | |
| | | | | | | | S6026: 1, H0369: 1, | | |
| | | | | | | | L0021: 1, H0118: 1, | | |
| | | | | | | | H0575: 1, L0105: 1, | | |
| | | | | | | | H0581: 1, H0235: 1, | | |
| | | | | | | | T0110: 1, H0150: 1, | | |
| | | | | | | | H0014: 1, H0266: 1, | | |
| | | | | | | | S0003: 1, H0615: 1, | | |
| | | | | | | | H0553: 1, H0038: 1, | | |
| | | | | | | | S0422: 1, H0529: 1, | | |
| | | | | | | | L0763: 1, L0500: 1, | | |
| | | | | | | | L0372: 1, L0768: 1, | | |
| | | | | | | | L0649: 1, L0803: 1, | | |
| | | | | | | | L0776: 1, L0659: 1, | | |
| | | | | | | | L0532: 1, L0666: 1, | | |
| | | | | | | | S0374: 1, H0689: 1, | | |
| | | | | | | | S0380: 1, H0579: 1, | | |
| | | | | | | | S0174: 1, L0751: 1, | | |
| | | | | | | | L0779: 1, L0755: 1, | | |
| | | | | | | | H0707: 1, S0434: 1, | | |
| | | | | | | | L0608: 1, H0423: 1 and | | |
| | | | | | | | H0422: 1. | | |
| | | 876461 | 626 | 3-1034 | 1413 | Asn-16 to Arg-23, | | | |
| | | | | | | Lys-60 to Gln-68, | | | |
| | | | | | | Asp-83 to Gln-88, | | | |
| | | | | | | Gly-107 to Leu-113, | | | |
| | | | | | | His-122 to Leu-127. | | | |
| 182 | HLWBU16 | 1162853 | 192 | 2-1444 | 979 | Lys-37 to Lys-45, | AR061: 1, AR089: 1 | | |
| | | | | | | His-99 to Pro-109, | L0777: 5, H0615: 3, | | |
| | | | | | | Glu-111 to Gln-130, | L0517: 3, L0740: 3, | | |
| | | | | | | His-184 to Lys-193, | L0599: 3, S0354: 2, | | |
| | | | | | | Glu-223 to Leu-229, | L0521: 2, L0663: 2, | | |
| | | | | | | Ser-285 to Leu-290, | L0439: 2, L0779: 2, | | |
| | | | | | | Lys-296 to Lys-304, | L0591: 2, T0002: 1, | | |
| | | | | | | Tyr-310 to Leu-318, | H0619: 1, H0013: 1, | | |
| | | | | | | Ser-320 to Asn-331, | H0427: 1, H0553: 1, | | |
| | | | | | | Gln-342 to Arg-371, | H0038: 1, L0520: 1, | | |
| | | | | | | Gln-400 to Glu-405, | L0769: 1, L0638: 1, | | |
| | | | | | | Asp-417 to Ser-422, | L0518: 1, L0809: 1, | | |
| | | | | | | Ser-440 to Asp-447, | H0547: 1, L0747: 1 and | | |
| | | | | | | Ala-476 to Glu-481. | H0444: 1. | | |
| | | 908886 | 627 | 3-362 | 1414 | Lys-33 to Lys-41, | | | |
| | | | | | | His-95 to Arg-105. | | | |
| 183 | HLYAB58 | 1155403 | 193 | 3-623 | 980 | Leu-11 to Pro-23, | AR089: 12, AR061: 6, | | |
| | | | | | | Gly-51 to Gln-57, | L0776: 4, L0777: 4, | | |
| | | | | | | Lys-90 to Gly-95, | L0663: 2, L0439: 2, | | |
| | | | | | | Asp-135 to Glu-141, | H0013: 1, H0004: 1, | | |
| | | | | | | Ser-148 to Glu-155, | H0318: 1, H0123: 1, | | |
| | | | | | | Glu-161 to Phe-167, | H0355: 1, H0647: 1, | | |
| | | | | | | Ser-187 to His-197. | L0774: 1, H0555: 1, | | |
| | | | | | | | L0745: 1, H0445: 1 and | | |
| | | | | | | | S0194: 1. | | |
| | | 885463 | 628 | 2-706 | 1415 | Pro-22 to Val-32, | | | |
| | | | | | | Leu-39 to Pro-51, | | | |
| | | | | | | Gly-79 to Gln-85, | | | |
| | | | | | | Lys-118 to Gly-123, | | | |
| | | | | | | Asp-163 to Glu-169, | | | |
| | | | | | | Ser-176 to Glu-183, | | | |
| | | | | | | Glu-189 to Phe-195, | | | |
| | | | | | | Ser-215 to His-225. | | | |
| 184 | HLYAF04 | 1198585 | 194 | 1-1770 | 981 | Ser-27 to Ser-71, | AR089: 13, AR061: 5 | | |
| | | | | | | Arg-74 to Glu-80, | H0046: 13, L0805: 6, | | |
| | | | | | | Ala-82 tp Ala-87, | H0521: 4, L0747: 4, | | |
| | | | | | | Lys-98 to His-129, | S0212: 3, S0420: 3, | | |
| | | | | | | Tyr-167 to Leu-173, | H0687: 3, H0102: 3, | | |
| | | | | | | Asp-231 to Leu-236, | L0803: 3, H0519: 3, | | |
| | | | | | | Arg-238 to Thr-244, | L0439: 3, L0731: 3, | | |
| | | | | | | Ile-255 to Tyr-260, | H0542: 3, H0650: 2, | | |
| | | | | | | Glu-280 to Gly-292, | H0441: 2, H0031: 2, | | |
| | | | | | | Asn-311 to Lys-316, | H0617: 2, L0770: 2, | | |
| | | | | | | Ile-338 to Gly-344, | L0637: 2, L0764: 2, | | |
| | | | | | | Gly-361 to Lys-367, | L0768: 2, L0804: 2, | | |
| | | | | | | Lys-384 to Gln-397, | L0776: 2, L0664: 2, | | |
| | | | | | | Ile-450 to Phe-462, | L0665: 2, L0438: 2, | | |
| | | | | | | His-530 to Tyr-539, | H0547: 2, L0748: 2, | | |
| | | | | | | Arg-579 to Gly-589. | L0751: 2, L0749: 2, | | |
| | | | | | | | L0777: 2, L0596: 2, | | |
| | | | | | | | L0588: 2, L0599: 2, | | |
| | | | | | | | L0593: 2, L0595: 2, | | |
| | | | | | | | H0543: 2, H0624: 1, | | |
| | | | | | | | H0265: 1, H0556: 1, | | |
| | | | | | | | S0114: 1, H0663: 1, | | |
| | | | | | | | S0418: 1, S0046: 1, | | |
| | | | | | | | H0393: 1, L0717: 1, | | |
| | | | | | | | H0587: 1, H0257: 1, | | |
| | | | | | | | H0486: 1, T0039: 1, | | |
| | | | | | | | T0114: 1, H0575: 1, | | |
| | | | | | | | H0274: 1, H0318: 1, | | |
| | | | | | | | H0545: 1, H0009: 1, | | |
| | | | | | | | H0012: 1, H0375: 1, | | |
| | | | | | | | H0615: 1, H0553: 1, | | |
| | | | | | | | H0181: 1, H0598: 1, | | |
| | | | | | | | H0090: 1, H0040: 1, | | |
| | | | | | | | T0041: 1, T0042: 1, | | |
| | | | | | | | H0429: 1, H0560: 1, | | |
| | | | | | | | S0450: 1, H0132: 1, | | |
| | | | | | | | S0210: 1, S0426: 1, | | |
| | | | | | | | L0762: 1, L0769: 1, | | |
| | | | | | | | L0761: 1, L0772: 1, | | |
| | | | | | | | L0646: 1, L0773: 1, | | |
| | | | | | | | L0775: 1, L0806: 1, | | |
| | | | | | | | L0653: 1, L0379: 1, | | |
| | | | | | | | L0657: 1, L0659: 1, | | |
| | | | | | | | L0789: 1, L0663: 1, | | |
| | | | | | | | H0144: 1, S0126: 1, | | |
| | | | | | | | H0670: 1, S0152: 1, | | |
| | | | | | | | S0044: 1, H0626: 1, | | |
| | | | | | | | S0027: 1, L0750: 1, | | |
| | | | | | | | L0752: 1, L0759: 1, | | |
| | | | | | | | H0445: 1, S0192: 1, | | |
| | | | | | | | H0422: 1 and H0506: 1. | | |
| | | 972743 | 629 | 3-1088 | 1416 | | | | |
| 185 | HLYCL13 | 656829 | 195 | 28-216 | 982 | Pro-16 to Arg-27, | AR089: 6, AR061: 3, | | |
| | | | | | | Gln-47 to Glu-52. | L0455: 3, L0747: 2, | | |
| | | | | | | | L0759: 2, H0486: 1, | | |
| | | | | | | | L0483: 1, L0659: 1, | | |
| | | | | | | | L0809: 1, L0663: 1, | | |
| | | | | | | | S0374: 1, H0683: 1 and | | |
| | | | | | | | H0445: 1. | | |
| 186 | HMACX62 | 908611 | 196 | 1-405 | 983 | Gly-1 to Arg-16, | AR061: 4, AR089: 2, | | |
| | | | | | | Gln-25 to Pro-32, | H0123: 3, L0769: 3, | | |
| | | | | | | Ala-43 to Glu-53, | L0747: 2, S0001: 1, | | |
| | | | | | | Cys-101 to Phe-108, | H0580: 1, S0278: 1, | | |
| | | | | | | Ser-117 to Phe-123. | H0266: 1, H0040: 1, | | |
| | | | | | | | S0144: 1, L0363: 1, | | |
| | | | | | | | L0766: 1, L0663: 1, | | |
| | | | | | | | L0740: 1, L0756: 1 and | | |
| | | | | | | | L0779: 1. | | |
| 187 | HMAGK54 | 1229903 | 197 | 2-868 | 984 | Gly-13 to Lys-23, | AR089: 12, AR061: 9 | | |
| | | | | | | Asn-45 to Lys-51, | L0745: 5, L0747: 4, | | |
| | | | | | | Thr-73 to Phe-86, | H0663: 3, S0278: 3, | | |
| | | | | | | Ile-105 to Ala-115, | L0748: 3, H0441: 2, | | |
| | | | | | | Ser-123 to Ala-131, | H0483: 1, S0356: 1, | | |
| | | | | | | Leu-201 to Gly-227, | H0637: 1, S0132: 1, | | |
| | | | | | | Arg-236 to His-241, | H0455: 1, H0587: 1, | | |
| | | | | | | Pro-250 to Tyr-255, | H0354: 1, T0006: 1, | | |
| | | | | | | Pro-258 to Gly-265, | L0055: 1, H0674: 1, | | |
| | | | | | | Lys-271 to Pro-283. | L0456: 1, H0163: 1, | | |
| | | | | | | | H0090: 1, H0494: 1, | | |
| | | | | | | | L0770: 1, L0662: 1, | | |
| | | | | | | | L0381: 1, L0659: 1, | | |
| | | | | | | | L0783: 1, L0666: 1, | | |
| | | | | | | | H0539: 1, L0743: 1, | | |
| | | | | | | | L0608: 1, L0600: 1 and | | |
| | | | | | | | H0352: 1. | | |
| | | 915304 | 630 | 3-476 | 1417 | Gly-10 to Lys-20, | | | |
| | | | | | | Asn-42 to Lys-48. | | | |
| 188 | HMCDT29 | 1189009 | 198 | 3-404 | 985 | His-1 to Ser-6, | AR089: 8, AR061: 3 | | |
| | | | | | | Thr-19 to Leu-39, | H0170: 3, L0663: 3, | | |
| | | | | | | His-46 to Phe-61, | L0751: 3, H0529: 2, | | |
| | | | | | | His-74 to Lys-87, | L0766: 2, L0805: 2, | | |
| | | | | | | Lys-97 to Ser-121, | L0740: 2, L0731: 2, | | |
| | | | | | | Lys-127 to Trp-133. | L0758: 2, H0650: 1, | | |
| | | | | | | | S6016: 1, H0431: 1, | | |
| | | | | | | | H0375: 1, H0428: 1, | | |
| | | | | | | | T0023: 1, S0142: 1, | | |
| | | | | | | | L0803: 1, L0659: 1, | | |
| | | | | | | | L0665: 1, H0547: 1, | | |
| | | | | | | | H0659: 1, L0750: 1 and | | |
| | | | | | | | H0506: 1. | | |
| | | 909042 | 631 | 3-404 | 1418 | His-1 to Ser-6, | | | |
| | | | | | | Thr-19 to Leu-39. | | | |
| 189 | HMEIY94 | 908618 | 199 | 3-473 | 986 | | AR089: 9, AR061: 6 | | |
| | | | | | | | H0619: 1, H0486: 1, | | |
| | | | | | | | H0052: 1, H0266: 1, | | |
| | | | | | | | S0426: 1, H0576: 1, | | |
| | | | | | | | S0027: 1, L0757: 1 and | | |
| | | | | | | | H0542: 1. | | |
| 190 | HMHBN01 | 1204940 | 200 | 154-1602 | 987 | Arg-141 to Asp-153, | AR061: 4, AR089: 2 | | |
| | | | | | | Thr-190 to Glu-210, | H0265: 2, L0565: 2, | | |
| | | | | | | Asp-230 to Glu-260, | L0748: 2, L0777: 2, | | |
| | | | | | | Gly-283 to Ser-293, | H0149: 1, S0116: 1, | | |
| | | | | | | Gly-295 to Ala-304, | H0483: 1, H0619: 1, | | |
| | | | | | | Pro-313 to Phe-323, | S0278: 1, H0081: 1, | | |
| | | | | | | Tyr-381 to Tyr-387, | H0266: 1, H0188: 1, | | |
| | | | | | | Gln-417 to Gln-434. | H0288: 1, H0286: 1, | | |
| | | | | | | | H0090: 1, L0769: 1, | | |
| | | | | | | | L0772: 1, L0794: 1, | | |
| | | | | | | | L0809: 1, L0663: 1, | | |
| | | | | | | | H0547: 1, S0330: 1 and | | |
| | | | | | | | H0521: 1. | | |
| | | 917252 | 632 | 136-510 | 1419 | | | | |
| 191 | HMIBG02 | 1165247 | 201 | 1-900 | 988 | Gly-26 to Asn-33, | AR061: 4, AR089: 1 | | |
| | | | | | | Cys-41 to Ser-49, | L0756: 9, L0740: 3, | | |
| | | | | | | Thr-87 to Gly-94, | S0010: 1, S0346: 1, | | |
| | | | | | | Pro-108 to Lys-113, | S0051: 1, S6028: 1, | | |
| | | | | | | Cys-130 to Glu-143, | L0770: 1, L0789: 1, | | |
| | | | | | | Thr-152 to Asp-160, | L0438: 1, H0539: 1 and | | |
| | | | | | | Glu-168 to Pro-187, | L0600: 1. | | |
| | | | | | | Ser-198 to Leu-209, | | | |
| | | | | | | Gln-227 to Gly-237, | | | |
| | | | | | | Pro-249 to Pro-261. | | | |
| | | 919595 | 633 | 1-357 | 1420 | Gly-26 to Asn-33, | | | |
| | | | | | | Cys-41 to Ser-49, | | | |
| | | | | | | Thr-87 to Thr-102. | | | |
| 192 | HMQDJ89 | 1153906 | 202 | 2-781 | 989 | Arg-14 to His-20, | AR089: 1, AR061: 0 | | |
| | | | | | | His-61 to Asn-71, | L0777: 3, H0255: 2, | | |
| | | | | | | His-79 to His-89, | H0250: 2, L0783: 2, | | |
| | | | | | | Pro-120 to Leu-129, | L0665: 2, L0740: 2, | | |
| | | | | | | Thr-162 to Pro-167, | H0265: 1, H0254: 1, | | |
| | | | | | | Thr-177 to Gly-184, | S0420: 1, S0376: 1, | | |
| | | | | | | Thr-223 to Pro-231, | S0408: 1, S0220: 1, | | |
| | | | | | | Pro-238 to Arg-244, | S0049: 1, H0039: 1, | | |
| | | | | | | Gln-250 to Pro-255. | H0181: 1, H0617: 1, | | |
| | | | | | | | H0163: 1, L0655: 1, | | |
| | | | | | | | S0428: 1, H0658: 1, | | |
| | | | | | | | S3014: 1, L0439: 1, | | |
| | | | | | | | L0758: 1 and H0423: 1. | | |
| | | 908952 | 634 | 885-67 | 1421 | Arg-6 to His-12, | | | |
| | | | | | | His-53 to Asn-63, | | | |
| | | | | | | His-71 to His-81, | | | |
| | | | | | | Leu-125 to Cys-134, | | | |
| | | | | | | Lys-146 to Leu-151, | | | |
| | | | | | | His-154 to Thr-164, | | | |
| | | | | | | Ser-174 to Gln-179, | | | |
| | | | | | | Asp-213 to Pro-222. | | | |
| 193 | HMTMC64 | 909081 | 203 | 1-1569 | 990 | Arg-6 to Ser-19, | AR089: 1, AR061: 0 | | |
| | | | | | | Thr-30 to Ser-42, | S0358: 3, H0521: 2, | | |
| | | | | | | Ser-47 to Phe-53. | H0583: 1, H0032: 1, | | |
| | | | | | | | H0591: 1, T0042: 1, | | |
| | | | | | | | L0768: 1, L0766: 1, | | |
| | | | | | | | L0543: 1, H0525: 1, | | |
| | | | | | | | L0750: 1, L0759: 1, | | |
| | | | | | | | L0596: 1 and L0366: 1. | | |
| 194 | HMUAL10 | 1228146 | 204 | 2-589 | 991 | His-1 to Gly-8, | AR089: 17, AR061: 6 | | |
| | | | | | | His-24 to Gln-34, | L0777: 14, L0740: 7, | | |
| | | | | | | Ser-42 to Arg-50, | L0758: 5, L0803: 4, | | |
| | | | | | | His-52 to Gly-64, | L0747: 4, L0731: 4, | | |
| | | | | | | Thr-81 to Leu-101, | L0599: 4, H0170: 3, | | |
| | | | | | | His-108 to Phe-123, | H0050: 3, L0770: 3, | | |
| | | | | | | His-136 to Lys-149, | L0766: 3, L0805: 3, | | |
| | | | | | | Lys-159 to Ser-183, | L0659: 3, L0647: 3, | | |
| | | | | | | Lys-189 to Trp-195. | L0663: 3, L0751: 3, | | |
| | | | | | | | L0756: 3, L0779: 3, | | |
| | | | | | | | L0759: 3, S0116: 2, | | |
| | | | | | | | S0360: 2, H0251: 2, | | |
| | | | | | | | H0545: 2, T0023: 2, | | |
| | | | | | | | H0031: 2, H0040: 2, | | |
| | | | | | | | H0529: 2, L0764: 2, | | |
| | | | | | | | L0776: 2, L0665: 2, | | |
| | | | | | | | L0744: 2, L0750: 2, | | |
| | | | | | | | H0295: 1, H0650: 1, | | |
| | | | | | | | S0418: 1, S0007: 1, | | |
| | | | | | | | S6016: 1, S0222: 1, | | |
| | | | | | | | H0431: 1, H0333: 1, | | |
| | | | | | | | H0331: 1, L0623: 1, | | |
| | | | | | | | S0280: 1, L0021: 1, | | |
| | | | | | | | H0575: 1, S0346: 1, | | |
| | | | | | | | H0318: 1, H0263: 1, | | |
| | | | | | | | H0544: 1, H0546: 1, | | |
| | | | | | | | H0012: 1, H0620: 1, | | |
| | | | | | | | H0014: 1, S0051: 1, | | |
| | | | | | | | H0375: 1, H0428: 1, | | |
| | | | | | | | H0135: 1, H0090: 1, | | |
| | | | | | | | H0059: 1, H0100: 1, | | |
| | | | | | | | S0142: 1, L0763: 1, | | |
| | | | | | | | L0637: 1, L0761: 1, | | |
| | | | | | | | L0800: 1, L0645: 1, | | |
| | | | | | | | L0662: 1, L0774: 1, | | |
| | | | | | | | L0375: 1, L0661: 1, | | |
| | | | | | | | L0783: 1, L0384: 1, | | |
| | | | | | | | L0788: 1, L0532: 1, | | |
| | | | | | | | L0664: 1, H0144: 1, | | |
| | | | | | | | H0547: 1, H0593: 1, | | |
| | | | | | | | S0126: 1, H0659: 1, | | |
| | | | | | | | H0660: 1, H0672: 1, | | |
| | | | | | | | S3014: 1, L0749: 1, | | |
| | | | | | | | S0031: 1, L0361: 1, | | |
| | | | | | | | L0603: 1, S0194: 1, | | |
| | | | | | | | H0506: 1, L0600: 1 and | | |
| | | | | | | | H0352: 1. | | |
| | | 909199 | 635 | 76-324 | 1422 | Thr-3 to Pro-8, | | | |
| | | | | | | Lys-25 to Ile-35, | | | |
| | | | | | | Phe-46 to Ser-51. | | | |
| 195 | HMUAY64 | 1227611 | 205 | 3-563 | 992 | Ala-7 to Lys-12, | AR089: 15, AR061: 3 | | |
| | | | | | | Ser-19 to Gly-29, | S0358: 2, H0529: 2, | | |
| | | | | | | Tyr-49 to Lys-54, | L0754: 2, H0624: 1, | | |
| | | | | | | Phe-75 to His-80, | L0005: 1, H0013: 1, | | |
| | | | | | | Lys-89 to Tyr-94, | H0635: 1, H0591: 1, | | |
| | | | | | | His-113 to Tyr-118, | H0038: 1, H0616: 1, | | |
| | | | | | | Ala-125 to Gly-132, | L0770: 1, L0667: 1, | | |
| | | | | | | Gln-138 to Glu-154, | L0791: 1, S0374: 1, | | |
| | | | | | | Asp-164 to Gly-179. | H0672: 1, L0777: 1, | | |
| | | | | | | | L0731: 1 and L0758: 1. | | |
| | | 909276 | 636 | 3-563 | 1423 | | | | |
| 196 | HMUBM26 | 1070974 | 206 | 3-533 | 993 | Ser-1 to Ser-9, | AR089: 20, AR061: 8 | | |
| | | | | | | His-28 to Glu-35, | H0529: 1 and S0032: 1. | | |
| | | | | | | Phe-71 to Asn-76, | | | |
| | | | | | | Val-83 to Gly-96, | | | |
| | | | | | | Phe-99 to Asn-104, | | | |
| | | | | | | Lys-109 to Ser-116, | | | |
| | | | | | | Cys-120 to Cys-129, | | | |
| | | | | | | His-140 to Cys-151, | | | |
| | | | | | | Thr-169 to His-174. | | | |
| | | 908912 | 637 | 2-565 | 1424 | Ser-1 to Ser-9, | | | |
| | | | | | | His-28 to Glu-35, | | | |
| | | | | | | Phe-71 to Asn-76, | | | |
| | | | | | | Val-83 to Gly-96, | | | |
| | | | | | | Phe-99 to Asn-104, | | | |
| | | | | | | Lys-109 to Ser-116, | | | |
| | | | | | | Cys-120 to Cys-129, | | | |
| | | | | | | His-140 to Glu-150, | | | |
| | | | | | | Pro-161 to Trp-170. | | | |
| 197 | HMVBE04 | 1228121 | 207 | 881-66 | 994 | Arg-1 to Cys-15, | AR089: 9, AR061: 4 | | |
| | | | | | | His-23 to Gly-41, | L0747: 6, L0744: 4, | | |
| | | | | | | Gly-91 to Gly-103. | S0360: 3, L0748: 3, | | |
| | | | | | | | H0616: 2, S0002: 2, | | |
| | | | | | | | L0809: 2, H0547: 2, | | |
| | | | | | | | S0330: 2, L0439: 2, | | |
| | | | | | | | L0777: 2, H0423: 2, | | |
| | | | | | | | S0212: 1, H0483: 1, | | |
| | | | | | | | H0255: 1, H0663: 1, | | |
| | | | | | | | H0662: 1, S0418: 1, | | |
| | | | | | | | S0007: 1, H0587: 1, | | |
| | | | | | | | H0194: 1, H0231: 1, | | |
| | | | | | | | H0081: 1, L0471: 1, | | |
| | | | | | | | T0010: 1, H0687: 1, | | |
| | | | | | | | H0028: 1, H0553: 1, | | |
| | | | | | | | H0628: 1, S0036: 1, | | |
| | | | | | | | H0135: 1, H0264: 1, | | |
| | | | | | | | H0059: 1, H0529: 1, | | |
| | | | | | | | L0769: 1, L0639: 1, | | |
| | | | | | | | L0774: 1, L0776: 1, | | |
| | | | | | | | L0526: 1, L0664: 1, | | |
| | | | | | | | L0665: 1, S0428: 1, | | |
| | | | | | | | S0378: 1, H0521: 1, | | |
| | | | | | | | L0743: 1, L0745: 1, | | |
| | | | | | | | L0759: 1, L0605: 1, | | |
| | | | | | | | H0542: 1 and H0352: 1. | | |
| | | 909273 | 638 | 3-404 | 1425 | Ser-27 to Ser-42. | | | |
| 198 | HMVCA78 | 1197920 | 208 | 2-1240 | 995 | Pro-1 to Asp-6, | AR089: 1, AR061: 1 | | |
| | | | | | | Glu-8 to Asp-20, | S0126: 3, H0521: 3, | | |
| | | | | | | Pro-28 to Trp-41, | H0441: 2, H0038: 2, | | |
| | | | | | | Arg-102 to Pro-107, | L0748: 2, L0439: 2, | | |
| | | | | | | Ile-134 to Ile-146, | L0750: 2, S0212: 1, | | |
| | | | | | | Thr-155 to Gly-172, | S0282: 1, S0029: 1, | | |
| | | | | | | Ser-175 to Gly-184, | H0486: 1, H0013: 1, | | |
| | | | | | | Leu-230 to Ser-255, | H0046: 1, L0471: 1, | | |
| | | | | | | Gln-262 to Arg-282, | H0373: 1, H0099: 1, | | |
| | | | | | | Thr-294 to Lys-306, | L0762: 1, L0662: 1, | | |
| | | | | | | Gln-316 to Ser-340, | L0805: 1, L0666: 1, | | |
| | | | | | | Gln-346 to Asp-369, | H0144: 1, L0438: 1, | | |
| | | | | | | His-377 to Asn-395, | L0755: 1 and L0758: 1. | | |
| | | | | | | Arg-402 to Glu-409. | | | |
| | | 908600 | 639 | 3-653 | 1426 | | | | |
| 199 | HMWEH92 | 1204941 | 209 | 3-1079 | 996 | Glu-39 to Glu-52, | AR061: 2, AR089: 2 | | |
| | | | | | | Gln-67 to Lys-79, | S0116: 1, H0341: 1, | | |
| | | | | | | His-98 to Arg-105, | L0768: 1, H0658: 1 and | | |
| | | | | | | His-126 to Lys-133, | L0758: 1. | | |
| | | | | | | Lys-139 to Asn-144, | | | |
| | | | | | | Gln-151 to Gly-166, | | | |
| | | | | | | His-182 to Ser-201, | | | |
| | | | | | | His-210 to Ser-228, | | | |
| | | | | | | His-238 to Ser-257, | | | |
| | | | | | | Gln-263 to Gly-278, | | | |
| | | | | | | Ala-280 to Thr-286, | | | |
| | | | | | | His-294 to Lys-307, | | | |
| | | | | | | Leu-321 to Gly-334, | | | |
| | | | | | | Ser-341 to Lys-348. | | | |
| | | 909151 | 640 | 1-339 | 1427 | Glu-40 to Glu-53, | | | |
| | | | | | | Gln-68 to Lys-80, | | | |
| | | | | | | His-99 to Arg-106. | | | |
| 200 | HNBVD17 | 1152343 | 210 | 2-457 | 997 | His-1 to Thr-18, | AR089: 3, AR061: 2, | | |
| | | | | | | Gly-34 to Cys-43, | L0777: 3, L0806: 2, | | |
| | | | | | | Arg-58 to Lys-64, | L0530: 2, L0748: 2, | | |
| | | | | | | Cys-71 to Cys-80, | L0751: 2, L0779: 2, | | |
| | | | | | | His-88 to Val-95, | L0758: 2, H0650: 1, | | |
| | | | | | | His-116 to Tyr-122, | H0662: 1, H0461: 1, | | |
| | | | | | | Ser-139 to His-144. | H0599: 1, L0804: 1, | | |
| | | | | | | | L0378: 1, L0749: 1 and | | |
| | | | | | | | L0780: 1. | | |
| | | 908917 | 641 | 3-773 | 1428 | Pro-31 to Phe-41. | | | |
| 201 | HNFGM76 | 1122027 | 211 | 801-1 | 998 | Tyr-70 to Gly-77, | AR089: 8, AR061: 6 | | |
| | | | | | | Ala-227 to Leu-232, | L0761: 3, H0457: 2, | | |
| | | | | | | Pro-259 to Arg-267. | L0769: 2, L0800: 2, | | |
| | | | | | | | L0794: 2, H0580: 1, | | |
| | | | | | | | H0271: 1, L0796: 1, | | |
| | | | | | | | L0803: 1, L0789: 1, | | |
| | | | | | | | L0792: 1, L0777: 1 and | | |
| | | | | | | | L0731: 1. | | |
| | | 908665 | 642 | 1-507 | 1429 | Ala-2 to Pro-8, | | | |
| | | | | | | Glu-13 to Pro-20, | | | |
| | | | | | | Gln-30 to His-51, | | | |
| | | | | | | Val-58 to His-64, | | | |
| | | | | | | Thr-71 to Arg-76, | | | |
| | | | | | | Ser-81 to Glu-94, | | | |
| | | | | | | Thr-101 to Phe-108, | | | |
| | | | | | | Arg-119 to His-126, | | | |
| | | | | | | Gln-139 to Gly-148, | | | |
| | | | | | | Ser-151 to Ser-159. | | | |
| 202 | HNFIX19 | 1155399 | 212 | 130-513 | 999 | Tyr-11 to Asn-19, | AR089: 12, AR061: 5 | | |
| | | | | | | Asn-22 to Leu-27, | L0747: 8, L0769: 5, | | |
| | | | | | | Glu-53 to Arg-60, | L0789: 4, L0755: 4, | | |
| | | | | | | Cys-68 to Phe-76, | L0758: 4, L0163: 3, | | |
| | | | | | | Ser-80 to Gln-85, | L0804: 3, L0748: 3, | | |
| | | | | | | Glu-92 to Arg-98, | L0750: 3, L0617: 2, | | |
| | | | | | | Glu-106 to Ser-112. | H0327: 2, H0086: 2, | | |
| | | | | | | | L0794: 2, L0775: 2, | | |
| | | | | | | | L0809: 2, L0740: 2, | | |
| | | | | | | | L0779: 2, L0731: 2, | | |
| | | | | | | | L0757: 2, L0759: 2, | | |
| | | | | | | | H0295: 1, H0657: 1, | | |
| | | | | | | | H0638: 1, S0418: 1, | | |
| | | | | | | | S0222: 1, H0492: 1, | | |
| | | | | | | | H0486: 1, H0575: 1, | | |
| | | | | | | | S0010: 1, H0545: 1, | | |
| | | | | | | | H0014: 1, H0416: 1, | | |
| | | | | | | | H0290: 1, H0628: 1, | | |
| | | | | | | | H0617: 1, H0135: 1, | | |
| | | | | | | | H0059: 1, T0041: 1, | | |
| | | | | | | | L0772: 1, L0764: 1, | | |
| | | | | | | | L0768: 1, L0766: 1, | | |
| | | | | | | | L0803: 1, L0774: 1, | | |
| | | | | | | | L0806: 1, L0805: 1, | | |
| | | | | | | | L0776: 1, L0382: 1, | | |
| | | | | | | | L0664: 1, L0665: 1, | | |
| | | | | | | | S0126: 1, L0752: 1, | | |
| | | | | | | | H0423: 1 and H0352: 1. | | |
| | | 968788 | 643 | 123-425 | 1430 | Tyr-11 to Asn-19, | | | |
| | | | | | | Asn-22 to Leu-27, | | | |
| | | | | | | Glu-53 to Arg-60, | | | |
| | | | | | | Cys-68 to Phe-76, | | | |
| | | | | | | Ser-80 to Gln-85. | | | |
| 203 | HNGGR74 | 1176958 | 213 | 258-121 | 1000 | Ile-8 to Arg-25. | AR089: 1, AR061: 0 | | |
| | | | | | | | S0052: 3 | | |
| | | 765698 | 644 | 8-82 | 1431 | | | | |
| 204 | HNHIR90 | 1154791 | 214 | 3-1151 | 1001 | Arg-9 to Gly-14, | AR061: 5, AR089: 2 | | |
| | | | | | | Arg-64 to His-72, | L0439: 4, H0265: 1, | | |
| | | | | | | Tyr-88 to Gly-94, | H0450: 1, H0619: 1, | | |
| | | | | | | Glu-121 to Glu-129, | T0082: 1, H0253: 1, | | |
| | | | | | | Pro-131 to Ser-137, | H0050: 1, H0024: 1, | | |
| | | | | | | Leu-171 to Lys-176, | H0290: 1, H0135: 1, | | |
| | | | | | | Arg-195 to Cys-205, | H0100: 1, L0435: 1, | | |
| | | | | | | Asp-207 to Ser-214, | T0042: 1, H0625: 1, | | |
| | | | | | | Thr-226 to Gly-237, | L0649: 1, S0053: 1 and | | |
| | | | | | | Ser-244 to His-249, | H0521: 1. | | |
| | | | | | | Pro-258 to Glu-263, | | | |
| | | | | | | His-281 to Pro-293, | | | |
| | | | | | | Gly-312 to Ser-320, | | | |
| | | | | | | Pro-374 to Glu-383. | | | |
| | | 810268 | 645 | 3-251 | 1432 | Arg-9 to Gly-14, | | | |
| | | | | | | His-34 to Ser-39. | | | |
| 205 | HNIAB94 | 1220450 | 215 | 275-3 | 1002 | Arg-13 to Arg-19. | AR089: 1, AR061: 1 | | |
| | | | | | | | S0372: 14, S0324: 8, | | |
| | | | | | | | L0766: 7, S0376: 3, | | |
| | | | | | | | S0326: 3, S0320: 2, | | |
| | | | | | | | S0382: 2, H0650: 1, | | |
| | | | | | | | L0805: 1, L0807: 1, | | |
| | | | | | | | S0328: 1, L0741: 1, | | |
| | | | | | | | L0750: 1 and L0777: 1. | | |
| | | 934851 | 646 | 1236-427 | 1433 | Pro-14 to Pro-48, | | | |
| | | | | | | Asp-55 to Gly-61, | | | |
| | | | | | | Lys-94 to Asn-99, | | | |
| | | | | | | Ala-107 to Ser-115, | | | |
| | | | | | | Ile-117 to Asn-124, | | | |
| | | | | | | Thr-133 to Cys-139, | | | |
| | | | | | | Thr-142 to Ile-147, | | | |
| | | | | | | Gly-163 to Ser-169, | | | |
| | | | | | | Gly-188 to Tyr-197, | | | |
| | | | | | | Glu-227 to Leu-234, | | | |
| | | | | | | Ala-261 to Ser-266. | | | |
| 206 | HNNAD37 | 1152348 | 216 | 577-20 | 1003 | Lys-28 to Gln-34, | AR061: 2, AR089: 1 | | |
| | | | | | | Thr-55 to Leu-61, | H0553: 2, H0556: 1, | | |
| | | | | | | Arg-67 to Thr-73, | S0040: 1, H0618: 1, | | |
| | | | | | | Leu-146 to Glu-158. | H0253: 1, H0100: 1, | | |
| | | | | | | | H0529: 1 and H0677: 1. | | |
| | | 908890 | 647 | 1-870 | 1434 | Lys-20 to Gln-26, | | | |
| | | | | | | Thr-47 to Leu-53, | | | |
| | | | | | | Arg-59 to Thr-65. | | | |
| 207 | HNNBG60 | 1152349 | 217 | 3-464 | 1004 | Ala-9 to Lys-39, | AR089: 1, AR061: 1 | | |
| | | | | | | Arg-43 to Tyr-57, | H0266: 3, H0521: 3, | | |
| | | | | | | Ala-68 to Pro-83, | L0747: 3, L0779: 3, | | |
| | | | | | | Asn-100 to Ser-110, | L0794: 2, L0766: 2, | | |
| | | | | | | Gln-121 to Ser-126, | L0604: 2, H0677: 2, | | |
| | | | | | | His-135 to Pro-148. | T0002: 1, S0418: 1, | | |
| | | | | | | | S0360: 1, H0309: 1, | | |
| | | | | | | | H0328: 1, H0628: 1, | | |
| | | | | | | | T0004: 1, H0633: 1, | | |
| | | | | | | | L0369: 1, L0372: 1, | | |
| | | | | | | | L0659: 1, L0789: 1, | | |
| | | | | | | | S0328: 1, S0044: 1, | | |
| | | | | | | | S3014: 1, L0758: 1, | | |
| | | | | | | | L0366: 1, H0665: 1 and | | |
| | | | | | | | H0293: 1. | | |
| | | 908700 | 648 | 18-956 | 1435 | Pro-9 to Arg-17, | | | |
| | | | | | | Asp-23 to Lys-54, | | | |
| | | | | | | Arg-58 to Tyr-72, | | | |
| | | | | | | Ala-83 to Pro-98, | | | |
| | | | | | | Asn-115 to Ser-125, | | | |
| | | | | | | Gln-136 to Ser-141, | | | |
| | | | | | | His-150 to Gly-162, | | | |
| | | | | | | Gly-169 to Glu-175, | | | |
| | | | | | | His-206 to Cys-214, | | | |
| | | | | | | Ser-225 to His-234, | | | |
| | | | | | | Glu-237 to Gly-242, | | | |
| | | | | | | Ser-269 to Ile-276, | | | |
| | | | | | | Cys-280 to Asn-289, | | | |
| | | | | | | Ser-295 to Ile-304. | | | |
| 208 | HNTAR16 | 1152269 | 218 | 3-1025 | 1005 | Thr-1 to Pro-18, | AR089: 1, AR061: 1 | | |
| | | | | | | Ala-24 to Gly-29, | H0521: 5, L0754: 5, | | |
| | | | | | | Glu-31 to Glu-47, | L0663: 4, L0731: 4, | | |
| | | | | | | Arg-89 to Gly-99, | H0622: 3, L0766: 3, | | |
| | | | | | | Gly-110 to Met-116, | H0436: 3, L0439: 3, | | |
| | | | | | | Leu-118 to Ile-128, | H0624: 2, H0581: 2, | | |
| | | | | | | Asp-138 to Gln-145, | H0046: 2, S0003: 2, | | |
| | | | | | | Asn-147 to Phe-155, | L0751: 2, L0756: 2, | | |
| | | | | | | Glu-196 to Phe-207, | L0755: 2, H0445: 2, | | |
| | | | | | | Thr-229 to Phe-234, | L0581: 2, L0362: 2, | | |
| | | | | | | Asp-268 to His-275, | S0242: 2, H0170: 1, | | |
| | | | | | | Pro-300 to Glu-306, | H0171: 1, H0556: 1, | | |
| | | | | | | Arg-326 to Asn-334, | S0212: 1, H0415: 1, | | |
| | | | | | | Lys-336 to Thr-341. | H0587: 1, H0427: 1, | | |
| | | | | | | | H0156: 1, H0098: 1, | | |
| | | | | | | | H0428: 1, L0142: 1, | | |
| | | | | | | | H0598: 1, S0422: 1, | | |
| | | | | | | | S0426: 1, L0761: 1, | | |
| | | | | | | | L0521: 1, L0662: 1, | | |
| | | | | | | | L0767: 1, L0768: 1, | | |
| | | | | | | | L0794: 1, L0803: 1, | | |
| | | | | | | | L0804: 1, L0806: 1, | | |
| | | | | | | | L0665: 1, S0374: 1, | | |
| | | | | | | | H0519: 1, H0648: 1, | | |
| | | | | | | | S0380: 1, S0152: 1, | | |
| | | | | | | | L0779: 1, L0759: 1, | | |
| | | | | | | | H0653: 1, H0543: 1 and | | |
| | | | | | | | H0423: 1. | | |
| | | 908812 | 649 | 1-534 | 1436 | Arg-2 to Lys-7, | | | |
| | | | | | | Glu-14 to Lys-24, | | | |
| | | | | | | Thr-32 to Pro-52, | | | |
| | | | | | | Lys-66 to Pro-74, | | | |
| | | | | | | Ala-80 to Gly-85, | | | |
| | | | | | | Glu-87 to Glu-103, | | | |
| | | | | | | Arg-145 to Gly-155, | | | |
| | | | | | | Gly-166 to Met-172. | | | |
| 209 | HNTAT79 | 1217038 | 219 | 2-796 | 1006 | Pro-52 to Ser-58, | AR089: 17, AR061: 4 | | |
| | | | | | | Pro-60 to Ala-69, | L0439: 2 and H0519: | | |
| | | | | | | Pro-132 to Ala-142, | 1. | | |
| | | | | | | Gly-148 to Ser-155. | | | |
| | | 774752 | 650 | 2-688 | 1437 | Ser-1 to Ala-11. | | | |
| 210 | HNTBH53 | 909153 | 220 | 24-626 | 1007 | Gly-11 to Lys-18, | AR089: 4, AR061: 2 | | |
| | | | | | | Trp-36 to Thr-43, | L0731: 5, L0748: 4, | | |
| | | | | | | Ser-85 to Gln-90, | L0768: 2, L0794: 2, | | |
| | | | | | | Thr-99 to Leu-105, | L0805: 2, L0766: 2, | | |
| | | | | | | Thr-128 to Lys-134, | L0382: 2, H0539: 2, | | |
| | | | | | | His-155 to Arg-172, | L0749: 2, L0759: 2, | | |
| | | | | | | Phe-184 to Asn-201. | L0596: 2, L0604: 2, | | |
| | | | | | | | S0046: 1, H0587: 1, | | |
| | | | | | | | H0013: 1, H0052: 1, | | |
| | | | | | | | H0266: 1, L0455: 1, | | |
| | | | | | | | H0038: 1, H0059: 1, | | |
| | | | | | | | S0038: 1, S0386: 1, | | |
| | | | | | | | T0041: 1, L0364: 1, | | |
| | | | | | | | L0803: 1, L0804: 1, | | |
| | | | | | | | L0775: 1, L0806: 1, | | |
| | | | | | | | L0657: 1, L0659: 1, | | |
| | | | | | | | L0791: 1, L0665: 1, | | |
| | | | | | | | H0519: 1, S0152: 1, | | |
| | | | | | | | H0696: 1, H0694: 1, | | |
| | | | | | | | L0744: 1, L0746: 1, | | |
| | | | | | | | L0747: 1, L0750: 1, | | |
| | | | | | | | L0779: 1, L0752: 1, | | |
| | | | | | | | L0753: 1, L0755: 1, | | |
| | | | | | | | L0608: 1, H0665: 1, | | |
| | | | | | | | L0697: 1 and H0352: 1. | | |
| 211 | HNTEK43 | 1194804 | 221 | 2-553 | 1008 | Arg-1 to Gly-6, | AR061: 1, AR089: 1 | | |
| | | | | | | His-43 to Gln-58, | L0439: 2, H0619: 1, | | |
| | | | | | | Ser-60 to Tyr-68, | L0717: 1, H0013: 1, | | |
| | | | | | | Gly-153 to Asp-160. | H0024: 1, L0598: 1, | | |
| | | | | | | | L0796: 1, L0794: 1, | | |
| | | | | | | | L0806: 1, L0783: 1, | | |
| | | | | | | | H0519: 1, H0658: 1 and | | |
| | | | | | | | L0780: 1. | | |
| | | 909077 | 651 | 3-533 | 1438 | Glu-5 to Val-11. | | | |
| 212 | HNTOA18 | 695123 | 222 | 3-455 | 1009 | Asp-1 to Lys-6, | AR089: 1, AR061: 1 | | |
| | | | | | | Thr-14 to Gly-26, | L0665: 3, L0747: 3, | | |
| | | | | | | Pro-33 to Gly-42. | L0756: 2, L0779: 2, | | |
| | | | | | | | L0731: 2, S0134: 1, | | |
| | | | | | | | H0125: 1, H0318: 1, | | |
| | | | | | | | H0052: 1, H0150: 1, | | |
| | | | | | | | N0006: 1, L0769: 1, | | |
| | | | | | | | L0776: 1, L0661: 1, | | |
| | | | | | | | L0659: 1, H0520: 1, | | |
| | | | | | | | H0696: 1, S3014: 1, | | |
| | | | | | | | L0741: 1, L0748: 1, | | |
| | | | | | | | L0596: 1 and S0194: 1. | | |
| 213 | HNTOA40 | 1085587 | 223 | 2-1000 | 1010 | Thr-2 to Glu-9, | AR089: 0, AR061: 0 | | |
| | | | | | | Arg-26 to Ser-33, | H0615: 1, H0529: 1, | | |
| | | | | | | Gln-82 to Asp-88, | L0648: 1 and H0520: 1. | | |
| | | | | | | Asp-94 to Leu-104, | | | |
| | | | | | | Glu-107 to Lys-112, | | | |
| | | | | | | Glu-118 to Ser-127, | | | |
| | | | | | | Glu-135 to Asn-140, | | | |
| | | | | | | Lys-157 to Asp-166, | | | |
| | | | | | | Asp-175 to Trp-181, | | | |
| | | | | | | Glu-191 to Gly-197, | | | |
| | | | | | | Arg-231 to Asn-236, | | | |
| | | | | | | Gln-242 to Lys-247, | | | |
| | | | | | | Leu-314 to His-333. | | | |
| | | 710875 | 652 | 2-682 | 1439 | | | | |
| 214 | HNTRB05 | 1178674 | 224 | 2-535 | 1011 | Ala-4 to Gln-10, | AR089: 3, AR061: 2 | | |
| | | | | | | Gln-13 to Asn-23, | H0331: 1, L0381: 1, | | |
| | | | | | | Arg-29 to Glu-43, | L0663: 1, H0547: 1, | | |
| | | | | | | Gln-56 to Gly-71, | L0747: 1 and L0592: 1. | | |
| | | | | | | His-87 to Cys-98, | | | |
| | | | | | | His-115 to Asn-135, | | | |
| | | | | | | Arg-141 to Glu-150, | | | |
| | | | | | | Gln-167 to Arg-172. | | | |
| | | 909162 | 653 | 32-520 | 1440 | Val-9 to Pro-24, | | | |
| | | | | | | Thr-47 to Phe-53, | | | |
| | | | | | | Ala-63 to Arg-72, | | | |
| | | | | | | Lys-101 to Asn-110, | | | |
| | | | | | | His-131 to Gly-143. | | | |
| 215 | HOCMA08 | 1152416 | 225 | 271-888 | 1012 | Ala-14 to Tyr-21, | AR089: 4, AR061: 2 | | |
| | | | | | | Ser-30 to Glu-35, | L0777: 5, L0740: 4, | | |
| | | | | | | Lys-57 to Glu-65, | L0756: 4, L0766: 3, | | |
| | | | | | | Gln-70 to Lys-77, | L0748: 3, L0750: 3, | | |
| | | | | | | Gly-98 to Trp-107, | L0779: 3, L0752: 3, | | |
| | | | | | | Ser-112 to Lys-119, | H0012: 2, S0003: 2, | | |
| | | | | | | Thr-123 to Arg-133, | L0483: 2, H0616: 2, | | |
| | | | | | | Asp-143 to Lys-157, | L0659: 2, L0809: 2, | | |
| | | | | | | Glu-169 to Leu-175, | L0754: 2, L0757: 2, | | |
| | | | | | | Lys-178 to Asp-185, | L0759: 2, H0624: 1, | | |
| | | | | | | Pro-190 to Lys-197. | H0685: 1, S6024: 1, | | |
| | | | | | | | S0114: 1, S0116: 1, | | |
| | | | | | | | S0212: 1, S0418: 1, | | |
| | | | | | | | S0046: 1, T0040: 1, | | |
| | | | | | | | L0022: 1, T0082: 1, | | |
| | | | | | | | H0178: 1, S0112: 1, | | |
| | | | | | | | H0561: 1, L0065: 1, | | |
| | | | | | | | S0002: 1, L0763: 1, | | |
| | | | | | | | L0637: 1, L0761: 1, | | |
| | | | | | | | L0662: 1, L0650: 1, | | |
| | | | | | | | L0775: 1, L0651: 1, | | |
| | | | | | | | L0784: 1, L0805: 1, | | |
| | | | | | | | L0776: 1, L0655: 1, | | |
| | | | | | | | L0783: 1, L0666: 1, | | |
| | | | | | | | L0664: 1, S0374: 1, | | |
| | | | | | | | H0547: 1, H0519: 1, | | |
| | | | | | | | H0660: 1, H0672: 1, | | |
| | | | | | | | S0378: 1, S0380: 1, | | |
| | | | | | | | H0525: 1, H0696: 1, | | |
| | | | | | | | L0744: 1, L0755: 1, | | |
| | | | | | | | L0758: 1, S0260: 1, | | |
| | | | | | | | H0595: 1, L0480: 1, | | |
| | | | | | | | L0599: 1, H0543: 1, | | |
| | | | | | | | H0423: 1 and H0422: 1. | | |
| | | 957702 | 654 | 735-1352 | 1441 | Ala-14 to Tyr-21, | | | |
| | | | | | | Ser-30 to Glu-35, | | | |
| | | | | | | Lys-57 to Glu-65, | | | |
| | | | | | | Gln-70 to Lys-77, | | | |
| | | | | | | Gly-98 to Trp-107, | | | |
| | | | | | | Ser-112 to Lys-119, | | | |
| | | | | | | Thr-123 to Arg-133, | | | |
| | | | | | | Asp-143 to Lys-157, | | | |
| | | | | | | Glu-169 to Leu-175, | | | |
| | | | | | | Lys-178 to Asp-185, | | | |
| | | | | | | Pro-190 to Lys-197. | | | |
| 216 | HODCT96 | 1194775 | 226 | 3-494 | 1013 | His-1 to Glu-9, | AR089: 12, AR061: 9 | | |
| | | | | | | Thr-22 to Glu-37, | H0328: 2, L0717: 1, | | |
| | | | | | | Ser-56 to Glu-65, | H0411: 1, H0040: 1, | | |
| | | | | | | Lys-81 to Leu-88, | L0375: 1, L0665: 1, | | |
| | | | | | | Glu-141 to Asn-146. | S0406: 1, L0748: 1, | | |
| | | | | | | | L0595: 1 and S0194: 1. | | |
| | | 909227 | 655 | 3-182 | 1442 | Pro-1 to Glu-6, | | | |
| | | | | | | Thr-19 to Glu-34. | | | |
| 217 | HODEE69 | 1127952 | 227 | 3-446 | 1014 | Ser-1 to Gly-8, | AR089: 29, AR061: 10 | | |
| | | | | | | Thr-29 to Lys-49, | H0590: 1 and H0615: | | |
| | | | | | | Ser-64 to Arg-71, | 1. | | |
| | | | | | | His-73 to Gly-80, | | | |
| | | | | | | Ser-89 to His-97, | | | |
| | | | | | | Gln-126 to Ile-136. | | | |
| | | 909223 | 656 | 3-707 | 1443 | Ser-1 to Gly-8, | | | |
| | | | | | | Thr-29 to Lys-49, | | | |
| | | | | | | Ser-64 to Arg-71, | | | |
| | | | | | | His-73 to Gly-80, | | | |
| | | | | | | Ser-89 to His-97, | | | |
| | | | | | | Gln-126 to Ile-136, | | | |
| | | | | | | Arg-155 to Ser-162, | | | |
| | | | | | | Cys-168 to Thr-173, | | | |
| | | | | | | Arg-183 to Ile-192. | | | |
| 218 | HODEI81 | 1193231 | 228 | 742-446 | 1015 | Thr-9 to Leu-14. | AR061: 7, AR089: 7 | | |
| | | | | | | | N0006: 1 and H0615: | | |
| | | | | | | | 1. | | |
| | | 909027 | 657 | 258-428 | 1444 | Gly-8 to Leu-13, | | | |
| | | | | | | Gly-27 to Glu-39. | | | |
| 219 | HODEK70 | 1152255 | 229 | 3-887 | 1016 | Thr-1 to Gly-7, | AR089: 18, AR061: 14 | | |
| | | | | | | Val-31 to Gln-36, | L0759: 3, H0615: 1, | | |
| | | | | | | His-40 to Asp-47, | L0646: 1, L0529: 1, | | |
| | | | | | | His-72 to Gly-79, | L0666: 1, S0380: 1, | | |
| | | | | | | Phe-87 to Gly-92, | H0696: 1, H0626: 1, | | |
| | | | | | | Thr-94 to Val-107, | L0750: 1 and L0731: 1. | | |
| | | | | | | Cys-111 to Gln-117, | | | |
| | | | | | | Gln-125 to Lys-131, | | | |
| | | | | | | Cys-139 to Gly-148, | | | |
| | | | | | | His-156 to Gly-196, | | | |
| | | | | | | Pro-227 to His-232, | | | |
| | | | | | | Asp-239 to Ser-246. | | | |
| | | 909225 | 658 | 136-882 | 1445 | Leu-27 to Gly-33, | | | |
| | | | | | | Phe-41 to Gly-46, | | | |
| | | | | | | Thr-48 to Val-61, | | | |
| | | | | | | Cys-65 to Gln-71, | | | |
| | | | | | | Gln-79 to Lys-85, | | | |
| | | | | | | Cys-93 to Gly-102, | | | |
| | | | | | | His-110 to Gly-150, | | | |
| | | | | | | Pro-181 to His-186, | | | |
| | | | | | | Asp-193 to Ser-200. | | | |
| 220 | HODER91 | 1178820 | 230 | 3-365 | 1017 | Ala-8 to Thr-19, | AR061: 4, AR089: 2 | | |
| | | | | | | Arg-43 to Lys-53, | H0651: 709, L0766: 5, | | |
| | | | | | | Gln-64 to Lys-71, | L0754: 5, L0756: 3, | | |
| | | | | | | Leu-91 to Ser-111. | L0803: 2, L0779: 2, | | |
| | | | | | | | L0777: 2, L0759: 2, | | |
| | | | | | | | S0354: 1, H0643: 1, | | |
| | | | | | | | H0013: 1, H0194: 1, | | |
| | | | | | | | H0545: 1, H0373: 1, | | |
| | | | | | | | H0252: 1, H0615: 1, | | |
| | | | | | | | H0316: 1, H0040: 1, | | |
| | | | | | | | H0641: 1, H0647: 1, | | |
| | | | | | | | S0422: 1, L0598: 1, | | |
| | | | | | | | L0369: 1, L0520: 1, | | |
| | | | | | | | L0762: 1, L0649: 1, | | |
| | | | | | | | L0804: 1, L0527: 1, | | |
| | | | | | | | L0656: 1, H0144: 1, | | |
| | | | | | | | H0702: 1, H0547: 1, | | |
| | | | | | | | H0555: 1, H0436: 1, | | |
| | | | | | | | S0028: 1, L0746: 1, | | |
| | | | | | | | L0750: 1, L0780: 1, | | |
| | | | | | | | L0752: 1 and L0686: 1. | | |
| | | 789661 | 659 | 1-351 | 1446 | Phe-28 to Thr-33, | | | |
| | | | | | | Ile-44 to Thr-54, | | | |
| | | | | | | Arg-78 to Lys-88, | | | |
| | | | | | | Gln-99 to Lys-106. | | | |
| 221 | HHFFG94 | 1157763 | 231 | 478-2 | 1018 | | AR054: 15, AR050: | | |
| | | | | | | | 10, AR089: 6, AR061: | | |
| | | | | | | | 3, AR051: 3 | | |
| | | | | | | | L0779: 3, H0050: 2, | | |
| | | | | | | | H0024: 1 and L0666: 1. | | |
| | | 963277 | 660 | 3-422 | 1447 | Glu-9 to Ala-16, | | | |
| | | | | | | Thr-21 to Lys-29, | | | |
| | | | | | | Asn-62 to Leu-70, | | | |
| | | | | | | Glu-88 to Arg-97, | | | |
| | | | | | | Leu-103 to Leu-111. | | | |
| 222 | HE9NU41 | 928849 | 232 | 1-1287 | 1019 | Ala-9 to Gly-14, | AR061: 1, AR089: 1, | | |
| | | | | | | Phe=18 to Ala-31, | L0471: 5, L0747: 4, | | |
| | | | | | | Ala-40 to Asp-49, | L0777: 3, H0031: 2, | | |
| | | | | | | Pro-67 to Gly-74, | L0756: 2, S0412: 2, | | |
| | | | | | | Pro-69 to Gly-104, | S0418: 1, S0046: 1, | | |
| | | | | | | Asn-115 to Gly-131, | S0414: 1, H0013: 1, | | |
| | | | | | | Ser-153 to Gly-158, | L0021: 1, H0575: 1, | | |
| | | | | | | Gln-166 to Gly-179, | H0457: 1, H0553: 1, | | |
| | | | | | | Gln-183 to Gln-190, | H0644: 1, H0509: 1, | | |
| | | | | | | Ala-204 to Gly-212, | :0650: 1, L0523: 1, | | |
| | | | | | | Ala-235 to Gly-251, | L0666: 1, L0663: 1, | | |
| | | | | | | Asp-253 to Ser-261, | H0144: 1, S0126: 1, | | |
| | | | | | | Gly-284 to His-291, | L0754: 1, L0750: 1, | | |
| | | | | | | Leu-293 to Gly-300, | L0755: 1, L0758: 1, | | |
| | | | | | | Pro-310 to Gly-315, | L0759: 1 and S0192: 1. | | |
| | | | | | | Pro-344 to Phe-355, | | | |
| | | | | | | Pro-358 to Ile-375, | | | |
| | | | | | | Lys-377 to Gly-385, | | | |
| | | | | | | Pro-387 to Gly-394, | | | |
| | | | | | | Arg-419 to Tyr-429. | | | |
| 223 | HFXCA19 | 965688 | 233 | 483-4 | 1020 | Leu-44 to Gln-50, | AR089: 2, AR061: 2 | | |
| | | | | | | Arg-91 to Ala-99. | S0001: 2 and S0044: 1. | | |
| | | 975380 | 661 | 1548-1856 | 1448 | Leu-44 to Gln-50, | | | |
| | | | | | | Arg-91 to Ala-99. | | | |
| 224 | HODFR44 | 1152256 | 234 | 1-477 | 1021 | Gln-39 to Thr-44, | AR089: 21, AR061: 14 | | |
| | | | | | | Ala-54 to Ser-59, | L0751: 4, L0439: 3, | | |
| | | | | | | Cys-74 to Arg-82. | L0777: 3, L0779: 2, | | |
| | | | | | | | L0758: 2, H0650: 1, | | |
| | | | | | | | H0328: 1, H0615: 1, | | |
| | | | | | | | L0435: 1, L0769: 1, | | |
| | | | | | | | L0649: 1, L0650: 1, | | |
| | | | | | | | L0774: 1, L0376: 1, | | |
| | | | | | | | L0789: 1 and H0343: 1. | | |
| | | 909255 | 662 | 2-469 | 1449 | Arg-17 to Lys-33. | | | |
| 225 | HODGP95 | 1124519 | 235 | 79-576 | 1022 | | AR089: 8, AR061: 3 | | |
| | | | | | | | H0615: 2 | | |
| | | 908650 | 663 | 23-358 | 1450 | Lys-38 to Arg-44, | | | |
| | | | | | | Thr-84 to Asp-99. | | | |
| 226 | HOEOE58 | 980307 | 236 | 104-14 457 | 1023 | Ser-7 to Cys-12, | S0126: 3, L0740: 1 and | | |
| | | | | | | Phe-62 to Gln-76, | S0620: 1. | | |
| | | | | | | Arg-81 to Thr-89. | | | |
| | | 970553 | 664 | 540-1187 | 1451 | Thr-24 to Gln-35, | | | |
| | | | | | | His-38 to Ile-60, | | | |
| | | | | | | Glu-68 to Arg-101, | | | |
| | | | | | | Gly-134 to Ser-141, | | | |
| | | | | | | Thr-149 to Thr-164, | | | |
| | | | | | | Arg-176 to Arg-185, | | | |
| | | | | | | Phe-193 to Asn-198, | | | |
| | | | | | | Arg-201 to Leu-207, | | | |
| | | | | | | Gln-210 to Ser-216. | | | |
| 227 | HOFMF82 | 1072079 | 237 | 3-476 | 1024 | Phe-8 to Ser-21, | AR089: 2, AR061: 1 | | |
| | | | | | | Ile-28 to Arg-33, | H0415: 1 | | |
| | | | | | | Ile-40 to Gly-49, | | | |
| | | | | | | Ala-56 to Gln-61, | | | |
| | | | | | | Gln-69 to Ser-76, | | | |
| | | | | | | Ala-91 to Tyr-96, | | | |
| | | | | | | Thr-119 to Cys-126, | | | |
| | | | | | | Ser-132 to Arg-144, | | | |
| | | | | | | Thr-147 to Asp-158. | | | |
| | | 693987 | 665 | 2-169 | 1452 | Thr-1 to Lys-7, | | | |
| | | | | | | Ala-17 to Arg-33, | | | |
| | | | | | | His-35 to Asn-45, | | | |
| | | | | | | Glu-47 to Arg-52. | | | |
| | | 694062 | 666 | 3-476 | 1453 | Phe-8 to Ser-21, | | | |
| | | | | | | Ile-28 to Arg-33, | | | |
| | | | | | | Ile-40 to Gly-49, | | | |
| | | | | | | Ala-56 to Gln-61, | | | |
| | | | | | | Gln-69 to Ser-76, | | | |
| | | | | | | Ala-91 to Tyr-96, | | | |
| | | | | | | Thr-119 to Cys-126, | | | |
| | | | | | | Ser-132 to Arg-144, | | | |
| | | | | | | Thr-147 to Asp-158. | | | |
| | | 909248 | 667 | 1-447 | 1454 | Arg-17 to Leu-32, | | | |
| | | | | | | His-43 to Cys-54. | | | |
| 228 | HOGAW39 | 862944 | 238 | 3-443 | 1025 | Asp-1 to Asp-12, | AR089: 14, AR061: 2 | | |
| | | | | | | Ala-75 to Cys-80, | L0745: 4, L0439: 3, | | |
| | | | | | | Gly-82 to Leu-93, | H0052: 2, H0457: 2, | | |
| | | | | | | Cys-109 to Gln-119. | L0774: 2, L0666: 2, | | |
| | | | | | | | L0742: 2, S0040: 1, | | |
| | | | | | | | L0785: 1, H0341: 1, | | |
| | | | | | | | H0664: 1, H0393: 1, | | |
| | | | | | | | S6016: 1, H0586: 1, | | |
| | | | | | | | H0587: 1, H0497: 1, | | |
| | | | | | | | H0599: 1, S0388: 1, | | |
| | | | | | | | H0163: 1, H0040: 1, | | |
| | | | | | | | H0087: 1, H0280: 1, | | |
| | | | | | | | S0150: 1, L0773: 1, | | |
| | | | | | | | L0388: 1, L0652: 1, | | |
| | | | | | | | L0653: 1, L0776: 1, | | |
| | | | | | | | L0559: 1, L0517: 1, | | |
| | | | | | | | L0809: 1, L0788: 1, | | |
| | | | | | | | L0665: 1, H0547: 1, | | |
| | | | | | | | H0593: 1, H0435: 1, | | |
| | | | | | | | H0660: 1, S0380: 1, | | |
| | | | | | | | L0743: 1, L0746: 1, | | |
| | | | | | | | L0779: 1, L0595: 1, | | |
| | | | | | | | L0601: 1 and H0543: 1. | | |
| 229 | HOGDU91 | 1204938 | 239 | 224-979 | 1026 | Lys-7 to Gly-18, | AR-89: 12, AR061: 5 | | |
| | | | | | | Glu-20 to Glu-35, | L0439: 7, H0494: 4, | | |
| | | | | | | Pro-50 to Gln-56, | L0748: 3, L0756: 3, | | |
| | | | | | | Lys-62 to Ser-73, | L0766: 2, H0519: 2, | | |
| | | | | | | Asp-103 to Arg-109. | H0521: 2, L0758: 2, | | |
| | | | | | | Pro-181 to His-188, | L0596: 2, H0556: 1, | | |
| | | | | | | Gln-241 to Gln-252. | H0341: 1, S0418: 1, | | |
| | | | | | | | H0431: 1, H0438: 1, | | |
| | | | | | | | H0497: 1, T0114: 1, | | |
| | | | | | | | S0049: 1, H0596: 1, | | |
| | | | | | | | H0046: 1, H0051: 1, | | |
| | | | | | | | T0010: 1, H0083: 1, | | |
| | | | | | | | H0687: 1, H0615: 1, | | |
| | | | | | | | H0031: 1, H0264: 1, | | |
| | | | | | | | T0042: 1, L0763: 1, | | |
| | | | | | | | L0771: 1, L0783: 1, | | |
| | | | | | | | L0663: 1, H0435: 1, | | |
| | | | | | | | H0672: 1, S0390: 1, | | |
| | | | | | | | S0037: 1, L0740: 1 and | | |
| | | | | | | | L0751: 1. | | |
| | | 927915 | 668 | 307-1038 | 1455 | Ser-1 to Arg-7, | | | |
| | | | | | | Thr-13 to Glu-27, | | | |
| | | | | | | Pro-42 to Gln-48, | | | |
| | | | | | | Lys-54 to Ser-65, | | | |
| | | | | | | Asp-95 to Arg-101, | | | |
| | | | | | | Pro-173 to His-180, | | | |
| | | | | | | Gln-233 to Gln-244. | | | |
| 230 | HOGED11 | 1150873 | 240 | 5-584 | 1027 | Thr-1 to Gly-6, | AR061: 1, AR089: 1 | | |
| | | | | | | Leu-18 to Ser-24, | L0766: 2, H0586: 1, | | |
| | | | | | | Pro-84 to Pro-94, | L0788: 1, H0435: 1 and | | |
| | | | | | | Pro-100 to Ala-107, | L0779: 1. | | |
| | | | | | | Trp-109 to Gly-116, | | | |
| | | | | | | Ser-124 to Asp-131, | | | |
| | | | | | | Asp-160 to Ser-166. | | | |
| | | 965537 | 669 | 2-583 | 1456 | Leu-15 to Ser-21, | | | |
| | | | | | | Pro-81 to Pro-91, | | | |
| | | | | | | Pro-97 to Ala-104, | | | |
| | | | | | | Trp-106 to Gly-113, | | | |
| | | | | | | Ser-121 to Asp-128, | | | |
| | | | | | | Asp-157 to Ser-163. | | | |
| 231 | HOIAC78 | 1229477 | 241 | 32-1744 | 1028 | His-1 to Gly-12, | AR061: 1, AR089: 0 | | |
| | | | | | | Ser-45 to Gly-51, | L0748: 7, L0752: 7, | | |
| | | | | | | Ala-70 to Ala-89, | L0769: 5, L0747: 5, | | |
| | | | | | | Thr-111 to Gly-123, | L0779: 5, L0758: 5, | | |
| | | | | | | Gly-145 to Ala-155, | L0770: 4, L0776: 4, | | |
| | | | | | | Arg-175 to Gly-184, | L0809: 4, L0741: 4, | | |
| | | | | | | Ser-187 to Gly-217, | L0740: 4, L0731: 4, | | |
| | | | | | | Pro-224 to Lys-233, | S0418: 3, S0007: 3, | | |
| | | | | | | Pro-248 to Ala-271, | T0040: 3, H0327: 3, | | |
| | | | | | | Pro-274 to Cys-289, | L0774: 3, L0517: 3, | | |
| | | | | | | Arg-297 to Thr-321, | L0744: 3, L0439: 3, | | |
| | | | | | | Glu-348 to Thr-353, | L0754: 3, L0777: 3, | | |
| | | | | | | Ser-361 to Gly-366, | S0196: 3, H0423: 3, | | |
| | | | | | | Arg-368 to Glu-379, | S0280: 2, H0052: 2, | | |
| | | | | | | Gly-441 to Ser-453, | H0050: 2, H0169: 2, | | |
| | | | | | | Ala-538 to Leu-547, | H0163: 2, H0038: 2, | | |
| | | | | | | Ile-551 to Glu-558, | S0142: 2, L0805: 2, | | |
| | | | | | | Glu-563 to Asp-569. | L0655: 2, L0526: 2, | | |
| | | | | | | | L0790: 2, H0658: 2, | | |
| | | | | | | | L0750: 2, L0757: 2, | | |
| | | | | | | | L0591: 2, T0049: 1, | | |
| | | | | | | | S0218: 1, H0583: 1, | | |
| | | | | | | | H0650: 1, L0778: 1, | | |
| | | | | | | | S0282: 1, H0662: 1, | | |
| | | | | | | | H0402: 1, S0420: 1, | | |
| | | | | | | | S0046: 1, H0619: 1, | | |
| | | | | | | | S0222: 1, H0392: 1, | | |
| | | | | | | | L0021: 1, H0318: 1, | | |
| | | | | | | | S0049: 1, H0263: 1, | | |
| | | | | | | | H0596: 1, L0738: 1, | | |
| | | | | | | | H0546: 1, H0545: 1, | | |
| | | | | | | | L0041: 1, H0150: 1, | | |
| | | | | | | | H0009: 1, L0471: 1, | | |
| | | | | | | | H0620: 1, H0014: 1, | | |
| | | | | | | | S6028: 1, H0266: 1, | | |
| | | | | | | | H0687: 1, S0250: 1, | | |
| | | | | | | | H0039: 1, T0006: 1, | | |
| | | | | | | | H0553: 1, H0644: 1, | | |
| | | | | | | | H0674: 1, S0036: 1, | | |
| | | | | | | | H0634: 1, H0063: 1, | | |
| | | | | | | | H0413: 1, T0042: 1, | | |
| | | | | | | | H0494: 1, S0014: 1, | | |
| | | | | | | | L0502: 1, L0637: 1, | | |
| | | | | | | | L0667: 1, L0372: 1, | | |
| | | | | | | | L0768: 1, L0794: 1, | | |
| | | | | | | | L0775: 1, L0375: 1, | | |
| | | | | | | | L0784: 1, L0378: 1, | | |
| | | | | | | | L0806: 1, L0657: 1, | | |
| | | | | | | | L0659: 1, L0384: 1, | | |
| | | | | | | | L0367: 1, L0792: 1, | | |
| | | | | | | | L0666: 1, L0663: 1, | | |
| | | | | | | | L0664: 1, L0438: 1, | | |
| | | | | | | | S0292: 1, S0126: 1, | | |
| | | | | | | | H0670: 1, H0648: 1, | | |
| | | | | | | | S0152: 1, H0478: 1, | | |
| | | | | | | | H0447: 1, S0037: 1, | | |
| | | | | | | | S0028: 1, L0756: 1, | | |
| | | | | | | | S0260: 1, S0026: 1, | | |
| | | | | | | | S0192: 1, S0242: 1, | | |
| | | | | | | | S0276: 1, H0543: 1 and | | |
| | | | | | | | L0698: 1. | | |
| | | 902720 | 670 | 2-772 | 1457 | Pro-1 to Thr-8, | | | |
| | | | | | | Asp-27 to Ala-33. | | | |
| 232 | HOPBC53 | 530056 | 242 | 1-231 | 1029 | Tyr-10 to Gln-20. | AR061: 19, AR089: 17 | | |
| | | | | | | | L0748: 9, L0777: 7, | | |
| | | | | | | | L0731: 7, H0305: 6, | | |
| | | | | | | | L0766: 6, L0659: 6, | | |
| | | | | | | | L0809: 6, L0751: 5, | | |
| | | | | | | | L0758: 4, H0545: 4, | | |
| | | | | | | | H0031: 4, H0617: 4, | | |
| | | | | | | | H0549: 3, L0769: 3, | | |
| | | | | | | | L0665: 3, H0521: 3, | | |
| | | | | | | | L0744: 3, L0756: 3, | | |
| | | | | | | | H0255: 2, S0418: 2, | | |
| | | | | | | | S0360: 2, H0457: 2, | | |
| | | | | | | | H0646: 2, L0761: 2, | | |
| | | | | | | | L0646: 2, L0803: 2, | | |
| | | | | | | | L0774: 2, L0783: 2, | | |
| | | | | | | | H0693: 2, L0438: 2, | | |
| | | | | | | | H0520: 2, H0547: 2, | | |
| | | | | | | | H0539: 2, H0696: 2, | | |
| | | | | | | | L0749: 2, L0750: 2, | | |
| | | | | | | | L0779: 2, H0170: 1, | | |
| | | | | | | | H0556: 1, H0650: 1, | | |
| | | | | | | | S0110: 1, S0001: 1, | | |
| | | | | | | | H0663: 1, H0589: 1, | | |
| | | | | | | | S0300: 1, H0592: 1, | | |
| | | | | | | | H0333: 1, H0635: 1, | | |
| | | | | | | | H0427: 1, H0599: 1, | | |
| | | | | | | | H0618: 1, H0052: 1, | | |
| | | | | | | | H0251: 1, H0597: 1, | | |
| | | | | | | | H0327: 1, H0123: 1, | | |
| | | | | | | | L0741: 1, H0012: 1, | | |
| | | | | | | | H0620: 1, H0288: 1, | | |
| | | | | | | | H0688: 1, T0023: 1, | | |
| | | | | | | | L0483: 1, T0006: 1, | | |
| | | | | | | | H0604: 1, H0553: 1, | | |
| | | | | | | | L0055: 1, H0169: 1, | | |
| | | | | | | | H0124: 1, H0068: 1, | | |
| | | | | | | | S0036: 1, H0135: 1, | | |
| | | | | | | | H0551: 1, H0413: 1, | | |
| | | | | | | | H0625: 1, H0561: 1, | | |
| | | | | | | | S0344: 1, S0002: 1, | | |
| | | | | | | | L0763: 1, L0770: 1, | | |
| | | | | | | | L0638: 1, L0796: 1, | | |
| | | | | | | | L0637: 1, L0643: 1, | | |
| | | | | | | | L0764: 1, L0768: 1, | | |
| | | | | | | | L0794: 1, L0649: 1, | | |
| | | | | | | | L0386: 1, L0775: 1, | | |
| | | | | | | | L0375: 1, L0805: 1, | | |
| | | | | | | | L0776: 1, L0607: 1, | | |
| | | | | | | | L0636: 1, L0352: 1, | | |
| | | | | | | | H0519: 1, H0593: 1, | | |
| | | | | | | | S0126: 1, H0690: 1, | | |
| | | | | | | | H0682: 1, H0658: 1, | | |
| | | | | | | | H0670: 1, S0378: 1, | | |
| | | | | | | | H0576: 1, L0742: 1, | | |
| | | | | | | | L0439: 1, L0754: 1, | | |
| | | | | | | | L0780: 1, L0757: 1, | | |
| | | | | | | | L0759: 1, S0434: 1, | | |
| | | | | | | | L0592: 1, L0485: 1 and | | |
| | | | | | | | H0422: 1. | | |
| 233 | HORBQ29 | 1151600 | 243 | 3-722 | 1030 | His-1 to Trp-7, | AR089: 6, AR061: 6, | | |
| | | | | | | Glu-13 to Val-23, | H0457: 10, H0619: 2, | | |
| | | | | | | Pro-28 to Leu-38, | H0052: 2, H0032: 2, | | |
| | | | | | | Gly-71 to Glu-87, | S0142: 2, S0132: 1, | | |
| | | | | | | Cys-115 to Trp-123, | H0370: 1, H0497: 1, | | |
| | | | | | | Cys-161 to Glu-169. | H0196: 1, T0010: 1, | | |
| | | | | | | | H0292: 1, H0494: 1, | | |
| | | | | | | | L0438: 1, H0520: 1, | | |
| | | | | | | | S0126: 1, H0539: 1, | | |
| | | | | | | | S0152: 1, S3014: 1, | | |
| | | | | | | | L0748: 1, L0740: 1, | | |
| | | | | | | | H0136: 1, H0452: 1 and | | |
| | | | | | | | H0543: 1. | | |
| | | 948636 | 671 | 3-722 | 1458 | His-1 to Trp-7, | | | |
| | | | | | | Glu-13 to Val-23, | | | |
| | | | | | | Pro-28 to Leu-38, | | | |
| | | | | | | Gly-71 to Glu-87, | | | |
| | | | | | | Cys-115 to Trp-123, | | | |
| | | | | | | Cys-161 to Glu-169. | | | |
| 234 | HOSEB90 | 1154793 | 244 | 285-1 | 1031 | Gln-42 to Phe-49, | AR061: 1, AR089: 1 | | |
| | | | | | | Gln-56 to Trp-71, | L0769: 5, L0662: 3, | | |
| | | | | | | Pro-73 to Trp-79. | L0766: 3, H0009: 2, | | |
| | | | | | | | L0794: 2, H0431: 1, | | |
| | | | | | | | H0250: 1, H0042: 1, | | |
| | | | | | | | H0575: 1, H0052: 1, | | |
| | | | | | | | H0251: 1, H0024: 1, | | |
| | | | | | | | S0214: 1, H0413: 1, | | |
| | | | | | | | S0002: 1, L0763: 1, | | |
| | | | | | | | L0804: 1, L0805: 1, | | |
| | | | | | | | L0654: 1, L0791: 1, | | |
| | | | | | | | L0792: 1, L0720: 1, | | |
| | | | | | | | H0478: 1, L0749: 1 and | | |
| | | | | | | | H0008: 1. | | |
| | | 960867 | 672 | 149-403 | 1459 | | | | |
| 235 | HOSNN16 | 1093284 | 245 | 49-387 | 1032 | Thr-20 to Glu-29, | AR089: 11, AR061: 8 | | |
| | | | | | | Phe-34 to Asn-51, | S0003: 1, L0804: 1, | | |
| | | | | | | Thr-84 to Leu-90, | H0539: 1 and L0779: 1. | | |
| | | | | | | Ser-99 to Gln-109. | | | |
| | | 909265 | 673 | 40-285 | 1460 | Thr-53 to Leu-58. | | | |
| 236 | HOUAA18 | 1153908 | 246 | 392-1432 | 1033 | Pro-1 to Gln-8, | AR061: AR089: 2 | | |
| | | | | | | Arg-20 to Phe-26, | H0052: 2, H0457: 2, | | |
| | | | | | | Gly-30 to Ala-50, | L0742: 2, S0040: 1, | | |
| | | | | | | Pro-85 to Glu-92, | H0341: 1, H0393: 1, | | |
| | | | | | | Leu-100 to Arg-106, | S6016: 1, H0586: 1, | | |
| | | | | | | Tyr-137 to Thr-145, | H0587: 1, H0497: 1, | | |
| | | | | | | Gly-148 to His-158, | H0599: 1, H0040: 1, | | |
| | | | | | | Gln-216 to Trp-223, | H0280: 1, S0150: 1, | | |
| | | | | | | Thr-229 to Leu-237, | H0547: 1, H0593: 1, | | |
| | | | | | | Ser-262to Ile-282, | H0435: 1, H0660: 1, | | |
| | | | | | | Gln-295 to Gly-311, | L0439: 1, L0595: 1, | | |
| | | | | | | Val-333 to Lys-347. | L0601: 1 and H0543: 1. | | |
| | | 862945 | 674 | 142-636 | 1461 | Pro-1 to Ser-6, | | | |
| | | | | | | Ser-9 to Leu-25, | | | |
| | | | | | | Cys-41 to Leu-57, | | | |
| | | | | | | Leu-64 to Asp-70, | | | |
| | | | | | | Glu-80 to Asp-87, | | | |
| | | | | | | Gly-93 to Ala-113, | | | |
| | | | | | | Pro-148 to Glu-155. | | | |
| 237 | HOVCM01 | 1154794 | 247 | 131-436 | 1034 | Pro-8 to Asn-25, | AR089: 2, AR061: 2 | | |
| | | | | | | Asn-44 to Lys-49. | S0126: 2, H0556: 1, | | |
| | | | | | | | H0550: 1, H0428: 1 and | | |
| | | | | | | | H0674: 1. | | |
| | | 916537 | 675 | 253-420 | 1462 | | | | |
| 238 | HOVEK70 | 1152418 | 248 | 370-89 | 1035 | | AR089: 10, AR061: 4 | | |
| | | | | | | | H0038: 4, H0616: 3, | | |
| | | | | | | | L0747: 3, L0758: 3, | | |
| | | | | | | | L0663: 2, H0369: 1, | | |
| | | | | | | | H0428: 1, L0769: 1, | | |
| | | | | | | | L0542: 1, L0809: 1, | | |
| | | | | | | | L0666: 1, L0665: 1, | | |
| | | | | | | | L0743: 1, L0777: 1, | | |
| | | | | | | | L0731: 1 and S0456: 1. | | |
| | | 909138 | 676 | 3-395 | 1463 | Met-10 to Gly-18. | | | |
| 239 | HPDOW30 | 1152421 | 249 | 2-949 | 1036 | Pro-8 to Glu-22, | AR089: 14, AR061: 8 | | |
| | | | | | | Arg-49 to His-55, | L0777: 3, H0255: 2, | | |
| | | | | | | His-96 to Asn-106, | H0250: 2, L0783: 2, | | |
| | | | | | | His-114 to His-124, | L0665: 2, L0740: 2, | | |
| | | | | | | Leu-168 to Cys-177, | H0265: 1, H0254: 1, | | |
| | | | | | | Lys-189 to Leu-194, | S0420: 1, S0376: 1, | | |
| | | | | | | His-197 to Thr-207, | S0408: 1, S0220: 1, | | |
| | | | | | | Ser-217 to Gln-222, | S0049: 1, H0039: 1, | | |
| | | | | | | Asp-256 to Pro-265. | H0181: 1, H0617: 1, | | |
| | | | | | | | H0163: 1, L0655: 1, | | |
| | | | | | | | S0428: 1, H0658: 1, | | |
| | | | | | | | S3014: 1, L0439: 1, | | |
| | | | | | | | L0758: 1 and H0423: 1. | | |
| | | 908953 | 677 | 3-365 | 1464 | | | | |
| 240 | HPIBW01 | 1217060 | 250 | 74-1285 | 1037 | Glu-1 to Gln-25, | AR089: 1, AR061: 0 | | |
| | | | | | | Gly-47 to Leu-54, | L0774: 2, H0484: 1, | | |
| | | | | | | Arg-63 to Leu-68, | H0050: 1, L0455: 1, | | |
| | | | | | | Arg-91 to Leu-96, | H0100: 1, H0022: 1, | | |
| | | | | | | Pro-98 to Ala-105, | L0065: 1, S0150: 1, | | |
| | | | | | | Arg-119 to Leu-124, | L0794: 1, L0776: 1, | | |
| | | | | | | Glu-127 to Arg-140, | S0152: 1, L0745: 1, | | |
| | | | | | | Pro-162 to Glu-169, | L0777: 1, L0755: 1 and | | |
| | | | | | | Pro-182 to Ala-189, | L0759: 1. | | |
| | | | | | | Arg-216 to Glu-225, | | | |
| | | | | | | Arg-261 to Pro-272, | | | |
| | | | | | | Cys-285 to Ala-290, | | | |
| | | | | | | Ser-337 to Gly-345, | | | |
| | | | | | | Arg-351 to Gly-363, | | | |
| | | | | | | Pro-366 to Glu-373, | | | |
| | | | | | | Pro-397 to Ala-404. | | | |
| | | 916082 | 678 | 2-673 | 1465 | Glu-11 to Gly-21, | | | |
| | | | | | | Thr-28 to Gly-34, | | | |
| | | | | | | Asp-41 to Pro-48, | | | |
| | | | | | | Ala-50 to Pro-62, | | | |
| | | | | | | Arg-68 to Ser-73, | | | |
| | | | | | | Ser-84 to Cys-94, | | | |
| | | | | | | Ala-110 to Ala-118. | | | |
| 241 | HPJDY61 | 1204715 | 251 | 3-731 | 1038 | His-1 to Arg-15, | AR061: 1, AR089: 1 | | |
| | | | | | | His-41 to Phe-51, | L0794: 3, H0014: 2, | | |
| | | | | | | His-73 to Thr-89, | H0038: 2, L0627: 2, | | |
| | | | | | | Thr-115 to Thr-126, | L0805: 2, S0152: 2, | | |
| | | | | | | Ile-128 to Thp-135, | H0521: 2, H0436: 2, | | |
| | | | | | | Ser-145 to Val-162, | L0754: 2, L0758: 2, | | |
| | | | | | | Thr-191 to Ala-198, | H0585: 1, S0040: 1, | | |
| | | | | | | Thr-226 to Met-232. | S0342: 1, S0418: 1, | | |
| | | | | | | | S0045: 1, S0222: 1, | | |
| | | | | | | | H0586: 1, H0635: 1, | | |
| | | | | | | | H0052: 1, H0123: 1, | | |
| | | | | | | | S6028: 1, H0271: 1, | | |
| | | | | | | | H0328: 1, T0006: 1, | | |
| | | | | | | | H0616: 1, S0015: 1, | | |
| | | | | | | | H0538: 1, L0648: 1, | | |
| | | | | | | | L0803: 1, L0774: 1, | | |
| | | | | | | | L0789: 1, L0790: 1, | | |
| | | | | | | | L0666: 1, L0663: 1, | | |
| | | | | | | | L0664: 1, L0438: 1, | | |
| | | | | | | | H0696: 1, L0742: 1, | | |
| | | | | | | | L0748: 1, L0439: 1, | | |
| | | | | | | | L0747: 1, L0779: 1, | | |
| | | | | | | | L0757: 1, S0436: 1, | | |
| | | | | | | | L0592: 1, L0362: 1 and | | |
| | | | | | | | L0601: 1. | | |
| | | 908638 | 679 | 2-724 | 1466 | Ser-4 to Arg-13, | | | |
| | | | | | | His-39 to Phe-49, | | | |
| | | | | | | His-71 to Thr-87, | | | |
| | | | | | | Thr-113 to Thr-124, | | | |
| | | | | | | Ile-216 to Trp-133, | | | |
| | | | | | | Ser-143 to Val-160, | | | |
| | | | | | | Thr-189 to Ala-196, | | | |
| | | | | | | Thr-224 to Met-230. | | | |
| 242 | HPMFR38 | 1155397 | 252 | 2-793 | 1039 | Arg-2 to Ser-8, | AR061: 5, AR089: 3 | | |
| | | | | | | Arg-72 to Gln-83, | H0457: 9, L0794: 3, | | |
| | | | | | | Val-109 to Asp-115, | L0758: 3, H0650: 2, | | |
| | | | | | | Glu-121 to Gln-129, | H0638: 2, H0124: 2, | | |
| | | | | | | Lys-151 to Glu-160, | H0038: 2, L0662: 2, | | |
| | | | | | | Asp-175 to Leu-191, | L0659: 2, H0556: 1, | | |
| | | | | | | Asp-193 to Glu-205. | T0002: 1, S0420: 1, | | |
| | | | | | | | S-376: 1, H0013: 1, | | |
| | | | | | | | H0581: 1, H0545: 1, | | |
| | | | | | | | H0567: 1, H0622: 1, | | |
| | | | | | | | H0031: 1, L0456: 1, | | |
| | | | | | | | H0598: 1, H0616: 1, | | |
| | | | | | | | H0494: 1, S0372: 1, | | |
| | | | | | | | S0422: 1, L0373: 1, | | |
| | | | | | | | L0363: 1, L0527: 1, | | |
| | | | | | | | L0664: 1, L0665: 1, | | |
| | | | | | | | H0519: 1, S0378: 1, | | |
| | | | | | | | H0521: 1, H0436: 1, | | |
| | | | | | | | L0756: 1, L0777: 1 and | | |
| | | | | | | | L0759: 1. | | |
| | | 951654 | 680 | 2-793 | 1467 | Arg-2 to Ser-8, | | | |
| | | | | | | Arg-72 to Gln-83, | | | |
| | | | | | | Val-109 to Asp-115, | | | |
| | | | | | | Glu-121 to Gln-129, | | | |
| | | | | | | Lys-151 to Glu-160, | | | |
| | | | | | | Asp-175 to Leu-191, | | | |
| | | | | | | Asp-193 to Glu-205. | | | |
| 243 | HPRBD71 | 1204942 | 253 | 715-1101 | 1040 | Arg-73 to Asn-83. | AR089: 26, AR061: 5 | | |
| | | | | | | | L0809: 5, L0439: 4, | | |
| | | | | | | | L0666: 3, L0747: 3, | | |
| | | | | | | | H0169: 2, L0794: 2, | | |
| | | | | | | | L0766: 2, L0651: 2, | | |
| | | | | | | | L0526: 2, L0789: 2, | | |
| | | | | | | | H0658: 2, L0740: 2, | | |
| | | | | | | | L0731: 2, L0757: 2, | | |
| | | | | | | | T0049: 1, S0212: 1, | | |
| | | | | | | | S0356: 1, H0411: 1, | | |
| | | | | | | | S0222: 1, H0486: 1, | | |
| | | | | | | | H0427: 1, S0346: 1, | | |
| | | | | | | | H0581: 1, H0251: 1, | | |
| | | | | | | | L0471: 1, H0049: 1, | | |
| | | | | | | | H0051: 1, H0687: 1, | | |
| | | | | | | | H0032: 1, H0538: 1, | | |
| | | | | | | | L0763: 1, L0770: 1, | | |
| | | | | | | | L0638: 1, L0639: 1, | | |
| | | | | | | | L0646: 1, L0767: 1, | | |
| | | | | | | | L0768: 1, L0803: 1, | | |
| | | | | | | | L0804: 1, L0774: 1, | | |
| | | | | | | | L0775: 1, L0776: 1, | | |
| | | | | | | | L0659: 1, L0518: 1, | | |
| | | | | | | | L0528: 1, L0543: 1, | | |
| | | | | | | | L0663: 1, L0664: 1, | | |
| | | | | | | | L0665: 1, L0438: 1, | | |
| | | | | | | | H0520: 1, H0547: 1, | | |
| | | | | | | | H0690: 1, S0152: 1, | | |
| | | | | | | | S0390: 1, L0779: 1, | | |
| | | | | | | | L0758: 1, L0759: 1 and | | |
| | | | | | | | H0506: 1. | | |
| | | 961943 | 681 | 3-215 | 1468 | Pro-1 to Asp-28, | | | |
| | | | | | | Lys-62 to Lys-71. | | | |
| 244 | HPSNA15 | 908997 | 254 | 100-813 | 1041 | Arg-18 to Gly-28, | AR061: 1, AR089: 0 | | |
| | | | | | | Gly-39 to Met-45, | | | |
| | | | | | | Leu-47 to Ile-57, | | | |
| | | | | | | Asp-67 to Gln-74, | | | |
| | | | | | | Asn-76 to Phe-84, | | | |
| | | | | | | Glu-125 to Phe-136, | | | |
| | | | | | | Thr-158 to Phe-163. | | | |
| 245 | HRABN32 | 1152439 | 255 | 3-302 | 1042 | Thr-1 to Arg-10, | AR089: 4, AR061: 1 | | |
| | | | | | | Thr-31 to Gln-47, | L0803: 2, L0783: 2, | | |
| | | | | | | Phe-74 to Thr-84. | H0457: 1, N0006: 1, | | |
| | | | | | | | H0518: 1, H0521: 1 and | | |
| | | | | | | | H0555: 1. | | |
| | | 909000 | 682 | 2-292 | 1469 | Thr-28 to Gln-44, | | | |
| | | | | | | Phe-71 to Thr-81. | | | |
| 246 | HRADZ91 | 1194808 | 256 | 1-1089 | 1043 | Glu-27 to Pro-50, | AR089: 4, AR061: 2 | | |
| | | | | | | Asn-90 to Lys-98, | H0251: 4, L0766: 4, | | |
| | | | | | | His-105 to Asn-111, | L0803: 4, L0439: 4, | | |
| | | | | | | His-133 to Ile-139, | L0752: 4, L0438: 3, | | |
| | | | | | | Cys-200 to Leu-210, | L0731: 3, L0759: 3, | | |
| | | | | | | Ser-226 to Gly-235, | S0132: 2, H0013: 2, | | |
| | | | | | | Asp-284 to Gly-289, | L0471: 2, H0616: 2, | | |
| | | | | | | Cys-314 to Gln-320. | H0494: 2, L0764: 2, | | |
| | | | | | | | L0776: 2, H0520: 2, | | |
| | | | | | | | L0754: 2, L0777: 2, | | |
| | | | | | | | L0362: 2, H0662: 1, | | |
| | | | | | | | S0420: 1, S0045: 2, | | |
| | | | | | | | S0222: 1, H0461: 1, | | |
| | | | | | | | H0486: 1, L0021: 1, | | |
| | | | | | | | H0599: 1, H0036: 1, | | |
| | | | | | | | T0003: 1, T0010: 1, | | |
| | | | | | | | H0355: 1, S0003: 1, | | |
| | | | | | | | H0553: 1, H0032: 1, | | |
| | | | | | | | H0598: 1, H0090: 1, | | |
| | | | | | | | H0634: 1, H0529: 1, | | |
| | | | | | | | L0646: 1, L0387: 1, | | |
| | | | | | | | L0806: 1, L0805: 1, | | |
| | | | | | | | L0606: 1, L0657: 1, | | |
| | | | | | | | L0663: 1, H0144: 1, | | |
| | | | | | | | S0374: 1, S0378: 1, | | |
| | | | | | | | H0555: 1, S0028: 1, | | |
| | | | | | | | S0206: 1, L0743: 1, | | |
| | | | | | | | L0745: 1, L0756: 1, | | |
| | | | | | | | L0753: 1, H0707: 1, | | |
| | | | | | | | L0595: 1 and H0423: 1. | | |
| | | 966120 | 683 | 3-1073 | 1470 | Glu-21 to Pro-44, | | | |
| | | | | | | Asn-84 to Lys-92, | | | |
| | | | | | | His-99 to Asn-105, | | | |
| | | | | | | His-127 to Ile-133, | | | |
| | | | | | | Cys-194 to Leu-204, | | | |
| | | | | | | Ser-220 to Gly-229. | | | |
| | | | | | | Asp-278 to Gly-283, | | | |
| | | | | | | Cys-308 to Gln-314. | | | |
| 247 | HRGBG45 | 1153912 | 257 | 3-980 | 1044 | Cys-69 to Asn-74, | AR061: 6, AR089: 3 | | |
| | | | | | | Lys-83 to Gly-89, | L0731: 9, L0665: 6, | | |
| | | | | | | Ala-117 to Ile-125, | H0024: 4, L0745: 4, | | |
| | | | | | | Leu-162 to Pro-175, | L0747: 4, L0662: 3, | | |
| | | | | | | Ala-187 to Ser-194, | L0794: 3, H0483: 2, | | |
| | | | | | | Ser-209 to Ala-218, | H0550: 2, H0081: 2, | | |
| | | | | | | Gly-237 to Thr-247, | H0012: 2, S0022: 2, | | |
| | | | | | | Pro-255 to Gly-266, | H0100: 2, L0769: 2, | | |
| | | | | | | Ser-272 to His-281, | L0764: 2, L0659: 2, | | |
| | | | | | | Cys-288 to Gly-200, | H0520: 2, H0134: 2, | | |
| | | | | | | Thr-308 to Thr-318, | L0777: 2, L0759: 2, | | |
| | | | | | | Thr-320 to Lys-325. | H0685: 1, S0040: 1, | | |
| | | | | | | | S0354: 1, H0351: 1, | | |
| | | | | | | | H0392: 1, H0586: 1, | | |
| | | | | | | | L0021: 1, H0253: 1, | | |
| | | | | | | | H0581: 1, L0157: 1, | | |
| | | | | | | | H0123: 1, H0050: 1, | | |
| | | | | | | | L0471: 1, H0328: 1, | | |
| | | | | | | | H0615: 1, H0063: 1, | | |
| | | | | | | | L0598: 1, L0770: 1, | | |
| | | | | | | | L0638: 1, L0521: 1, | | |
| | | | | | | | L0768: 1, L0776: 1, | | |
| | | | | | | | L0629: 1, L0657: 1, | | |
| | | | | | | | L0783: 1, L0809: 1, | | |
| | | | | | | | L0791: 1, L0666: 1, | | |
| | | | | | | | L0663: 1, S0148: 1, | | |
| | | | | | | | H0670: 1 and L0779: 1. | | |
| | | 966777 | 684 | 3-386 | 1471 | Cys-69 to Asn-74, | | | |
| | | | | | | Lys-83 to Glu-90, | | | |
| | | | | | | Pro-92 to Ser-97. | | | |
| 248 | HS2AC50 | 1163071 | 258 | 3-1373 | 1045 | Val-25 to Gln-30, | AR089: 14, AR061: 4 | | |
| | | | | | | His-34 to Asp-41, | L0759: 3, H0615: 1, | | |
| | | | | | | His-66 to Gly-73, | H0169: 1, L0646: 1, | | |
| | | | | | | Phe-81 to Gly-86, | L0529: 1, L0666: 1, | | |
| | | | | | | Thr-88 to Tyr-100, | S0380: 1, H0696: 1, | | |
| | | | | | | His-122 to Ser-127, | H0626: 1, L0750: 1 and | | |
| | | | | | | His-150 to Gly-157, | L0731: 1. | | |
| | | | | | | Phe-165 to Tyr-184, | | | |
| | | | | | | Lys-204 to Ile-213, | | | |
| | | | | | | His-235 to Ile-241, | | | |
| | | | | | | Arg-260 to Val-269, | | | |
| | | | | | | Cys-273 to Gln-279, | | | |
| | | | | | | Gln-287 to Lys-293, | | | |
| | | | | | | Cys-301 to Gly-310, | | | |
| | | | | | | His-318 to Gly-358, | | | |
| | | | | | | Pro-389 to His-394, | | | |
| | | | | | | Asp-401 to Ser-408. | | | |
| | | 908617 | 685 | 3-500 | 1472 | Val-33 to Gln-38, | | | |
| | | | | | | His-42 to Asp-49, | | | |
| | | | | | | His-74 to Gly-81, | | | |
| | | | | | | Phe-89 to Gly-94, | | | |
| | | | | | | Thr-96 to Tyr-108, | | | |
| | | | | | | His-130 to Ser-135. | | | |
| 249 | HSAMK64 | 1161177 | 259 | 1-576 | 1046 | Arg-1 to Val-6, | AR089: 7, AR061: 4 | | |
| | | | | | | Pro-12 to Lys-25, | H0620: 3, L0662: 2, | | |
| | | | | | | His-35 to Lys-48, | L0743: 2, L0601: 2, | | |
| | | | | | | Gly-65 to Cys-74, | S0418: 1, S0360: 1, | | |
| | | | | | | His-91 to Gly-105, | H0013: 1, H0052: 1, | | |
| | | | | | | His-119 to Glu-126, | H0263: 1, H0597: 1, | | |
| | | | | | | Phe-134 to Gln-144, | S0362: 1, L0369: 1, | | |
| | | | | | | His-147 to Glu-154, | L0372: 1, L0803: 1, | | |
| | | | | | | Lys-172 to His-186. | L0774: 1, L0806: 1, | | |
| | | | | | | | L0805: 1, L0776: 1, | | |
| | | | | | | | L0789: 1, L0750: 1, | | |
| | | | | | | | L0752: 1, L0759: 1, | | |
| | | | | | | | S0026: 1 and H0665: 1. | | |
| | | 908502 | 686 | 2-577 | 1473 | Arg-1 to Val-6, | | | |
| | | | | | | Pro-12 to Lys-25, | | | |
| | | | | | | His-35 to Lys-48, | | | |
| | | | | | | Gly-65 to Cys-71. | | | |
| 250 | HSAMQ05 | 907518 | 260 | 401-1108 | 1047 | Gly-1 to Gly-10. | AR089: 1, AR061: 0 | | |
| | | | | | | | H0596: 2, L0663: 2, | | |
| | | | | | | | L0754: 2, S0116: 1, | | |
| | | | | | | | H0318: 1, H0581: 1, | | |
| | | | | | | | H0622: 1, H0032: 1, | | |
| | | | | | | | L0455: 1, H0591: 1, | | |
| | | | | | | | L0662: 1, L0665: 1, | | |
| | | | | | | | S0148: 1, H0690: 1, | | |
| | | | | | | | H0696: 1, L0750: 1, | | |
| | | | | | | | L0593: 1, H0665: 1 and | | |
| | | | | | | | S0194: 1. | | |
| 251 | HSAXS43 | 1154795 | 261 | 1-255 | 1048 | Gly-1 to Ser-6, | AR061: 7, AR089: 4 | | |
| | | | | | | Arg-12 to Tyr-21, | L0770: 4, L0439: 4, | | |
| | | | | | | Arg-40 to Ala-63, | H0423: 3, L0659: 2, | | |
| | | | | | | Gln-79 to Ala-84. | L0665: 2, H0593: 2, | | |
| | | | | | | | H0436: 2, L0747: 2, | | |
| | | | | | | | L0756: 2, L0759: 2, | | |
| | | | | | | | H0170: 1, S0114: 1, | | |
| | | | | | | | H0645: 1, L0717: 1, | | |
| | | | | | | | H0581: 1, H0052: 1, | | |
| | | | | | | | S0388: 1, H0673: 1, | | |
| | | | | | | | H0135: 1, H0040: 1, | | |
| | | | | | | | H0646: 1, L0662: 1, | | |
| | | | | | | | L0803: 1, L0650: 1, | | |
| | | | | | | | L0806: 1, L0382: 1, | | |
| | | | | | | | S0330: 1, L0744: 1, | | |
| | | | | | | | L0749: 1, L0599: 1 and | | |
| | | | | | | | S0026: 1. | | |
| | | 908659 | 687 | 1-255 | 1474 | Gly-1 to Ser-6, | | | |
| | | | | | | Arg-12 to Tyr-21. | | | |
| 252 | HSCPD07 | 1062794 | 262 | 588-136 | 1049 | Pro-2 to Pro-11, | AR089: 28, AR061: 3 | | |
| | | | | | | Pro-13 to Glu-18, | L0771: 1, L0747: 1 and | | |
| | | | | | | Ala-41 to Pro-48, | H0668: 1. | | |
| | | | | | | Pro-50 to Asp-66, | | | |
| | | | | | | Lys-127 to Cys-150. | | | |
| | | 951877 | 688 | 1-582 | 1475 | Pro-2 to Arg-12. | | | |
| 253 | HSDEF10 | 1155394 | 263 | 1-234 | 1050 | His-17 to Gly-29, | AR061: 3, AR089: 1 | | |
| | | | | | | Gly-40 to Lys-49, | H0457: 4, T0010: 1, | | |
| | | | | | | Arg068 to Thr-77. | L0803: 1, H0547: 1, | | |
| | | | | | | | S0330: 1, L0777: 1, | | |
| | | | | | | | L0731: 1 and S0031: 1. | | |
| | | 964883 | 689 | 1-222 | 1476 | His-13 to Gly-25, | | | |
| | | | | | | Gly-36 to Lys-45, | | | |
| | | | | | | Arg-64 to Thr-73. | | | |
| 254 | HSDEV59 | 908503 | 264 | 30-677 | 1051 | Asn-72 to Gly-80. | AR089: 3, AR061: 1 | | |
| | | | | | | | S0029: 1, S0376: 1, | | |
| | | | | | | | S0045: 1, S0010: 1, | | |
| | | | | | | | L0471: 1, H0057: 1, | | |
| | | | | | | | T0010: 1, H0328: 1, | | |
| | | | | | | | H0623: 1, S0426: 1, | | |
| | | | | | | | L0655: 1, S0126: 1, | | |
| | | | | | | | L0740: 1, L0752: 1 and | | |
| | | | | | | | S0031: 1. | | |
| 255 | HSDFV12 | 1154796 | 265 | 1-450 | 1052 | Gly-1 to Gln-6, | AR061: 107, AR089: | | |
| | | | | | | Thr-13 to Leu-18, | 62 | | |
| | | | | | | Thr-49 to Arg-72, | L0771: 2, L0666: 2, | | |
| | | | | | | His-78 to Lys-85, | L0755: 2, S6024: 1, | | |
| | | | | | | His-106 to Gln-123, | H0123: 1, L0650: 1, | | |
| | | | | | | Thr-125 to Cys-137. | L0792: 1, L0750: 1, | | |
| | | | | | | | L0779: 1, L0777: 1 and | | |
| | | | | | | | S0031: 1. | | |
| | | 908628 | 690 | 1-837 | 1477 | | | | |
| 256 | HSDFY86 | 908943 | 266 | 1-510 | 1053 | Ser-1 to Asn-8, | AR089: 26, AR061: 6 | | |
| | | | | | | Leu-31 to Asn-46, | H0188: 1, S0038: 1, | | |
| | | | | | | Lys-82 to Cys-92, | S0031: 1 and L0595: 1. | | |
| | | | | | | His-112 to Gly-124. | | | |
| 257 | HSDJK49 | 722868 | 267 | 127-273 | 1054 | Gly-3 to Gly-15, | AR089: 1, AR061: 0 | | |
| | | | | | | Ile-40 to Asn-49. | H0346: 1, L0005: 1, | | |
| | | | | | | | L0717: 1, S0280: 1, | | |
| | | | | | | | L0375: 1, L0652: 1, | | |
| | | | | | | | L0655: 1, L0659: 1, | | |
| | | | | | | | L0526: 1, L0663: 1, | | |
| | | | | | | | H0520: 1, H0547: 1, | | |
| | | | | | | | L0753: 1 and S0260: 1. | | |
| 258 | HSKJK41 | 1178822 | 268 | 3-1214 | 1055 | His-4 to Phe-10, | AR089: 3, AR061: 3 | | |
| | | | | | | Arg-30 to His-42, | S0360: 3, S0358: 2, | | |
| | | | | | | Ser-49 to Arg-58, | H0644: 2, L0748: 2, | | |
| | | | | | | His-60 to Tyr-73, | H0549: 1, H0550: 1, | | |
| | | | | | | Ile-87 to Lys-95, | H0622: 1, S0036: 1, | | |
| | | | | | | Ser-100 to Lys-111, | H0135: 1, H0040: 1, | | |
| | | | | | | Ala-125 to Gln-138, | H0059: 1, L0646: 1, | | |
| | | | | | | Glu-160 to Asp-180, | H0520: 1, S0152: 1, | | |
| | | | | | | Asp-189 to Ala-195, | S0314: 1, S0027: 1, | | |
| | | | | | | Asn-253 to Arg-262, | L0754: 1, L0747: 1, | | |
| | | | | | | Pro-275 to Ser-282, | L0777: 1, L0752: 1, | | |
| | | | | | | Thr-296 to Gly-302, | H0665: 1, H0453: 1 and | | |
| | | | | | | Ser-314 to Asn-323, | H0423: 1. | | |
| | | | | | | Ser-374 to Thr-383. | | | |
| | | 908482 | 691 | 2-319 | 1478 | Ser-3 to Phe-8, | | | |
| | | | | | | Arg-28 to His-40, | | | |
| | | | | | | Ser-47 to Arg-56, | | | |
| | | | | | | His-58 to Tyr-71. | | | |
| 259 | HSKKD63 | 1121913 | 269 | 175-621 | 1056 | | AR089: 48, AR061: 11 | | |
| | | | | | | | H0656: 1, L0438: 1, | | |
| | | | | | | | S3014: 1 and L0439: 1. | | |
| | | 908622 | 692 | 31-384 | 1479 | | | | |
| 260 | HSKKR04 | 1022245 | 270 | 3-332 | 1057 | | AR061: 1, AR089: 1 | | |
| | | | | | | | H0494: 1, S3014: 1 and | | |
| | | | | | | | L0581: 1. | | |
| | | 926751 | 693 | 91-753 | 1480 | | | | |
| 261 | HSOBE61 | 1213193 | 271 | 1018-1533 | 1058 | Pro-25 to Ser-33, | AR089: 6, AR061: 2 | | |
| | | | | | | Gly-73 to Gly-79, | L0766: 2, L0755: 1 and | | |
| | | | | | | Pro-81 to Pro-91, | H0595: 1. | | |
| | | | | | | Lys-131 to Asp-141. | | | |
| | | 908598 | 694 | 223-393 | 1481 | Asn-42 to Asn-48. | | | |
| 262 | HSSET42 | 1214833 | 272 | 3-938 | 1059 | Ala-5 to Arg-12, | AR061: 1, AR089: 0 | | |
| | | | | | | His-36 to Tyr-42, | L0665: 5, H0039: 3, | | |
| | | | | | | His-60 to Cys-75, | L0717: 2, H0059: 2, | | |
| | | | | | | Arg-87 to Gly-104, | L0649: 2, H0670: 2, | | |
| | | | | | | His-122 to Ser-140, | L0591: 2, H0484: 1, | | |
| | | | | | | Ser-163 to Pro-168, | S0418: 1, H0637: 1, | | |
| | | | | | | Thr-176 to Pro-181, | S0007: 1, H0486: 1, | | |
| | | | | | | Arg-195 to Pro-201, | H0253: 1, H0024: 1, | | |
| | | | | | | Thr-228 to Thr-238, | H0688: 1, H0622: 1, | | |
| | | | | | | Glu-272 to Thr-280, | H0674: 1, H0135: 1, | | |
| | | | | | | Gly-286 TA Ala-291, | L0763: 1, L0761: 1, | | |
| | | | | | | Glu-306 to Gly-311. | L0768: 1, L0809: 1, | | |
| | | | | | | | L0647: 1, L0666: 1, | | |
| | | | | | | | S0374: 1, H0435: 1, | | |
| | | | | | | | H0666: 1, H0648: 1, | | |
| | | | | | | | H0539: 1, S0380: 1, | | |
| | | | | | | | H0134: 1, L0758: 1, | | |
| | | | | | | | H0343: 1, L0592: 1 and | | |
| | | | | | | | H0352: 1. | | |
| | | 909010 | 695 | 3-989 | 1482 | Ala-5 to Arg-12, | | | |
| | | | | | | His-36 to Tyr-42, | | | |
| | | | | | | His-60 to Cys-75, | | | |
| | | | | | | Arg-87 to Gly-104, | | | |
| | | | | | | His-122 to Ser-140, | | | |
| | | | | | | Ser-163 to Pro-168, | | | |
| | | | | | | Thr-176 to Pro-181, | | | |
| | | | | | | Arg-195 to Pro-201, | | | |
| | | | | | | Thr-228 to Thr-238, | | | |
| | | | | | | Glu-272 to Thr-280, | | | |
| | | | | | | Gly-286 to Ala-291, | | | |
| | | | | | | Lys-306 to Gly-321. | | | |
| 263 | HSSFW37 | 1154800 | 273 | 3-1100 | 1060 | Glu-30 to Leu-40, | AR061: 6, AR089: 3 | | |
| | | | | | | His-90 to Lys-98, | L0439: 10, L0754: 5, | | |
| | | | | | | Leu-129 to Ser-141, | H0486: 3, L0809: 3, | | |
| | | | | | | Lys-159 to Val-166, | L0748: 3, L0740: 3, | | |
| | | | | | | Val-171 to Gly-183, | L0758: 3, T0010: 2, | | |
| | | | | | | Trp-195 to Gly-211, | L0804: 2, L0650: 2, | | |
| | | | | | | Thr-272 to Phe-277, | L0805: 2, L0438: 2, | | |
| | | | | | | Ile-283 to Gly-310, | L0747: 2, L0757: 2, | | |
| | | | | | | Gly-323 to Glu-331, | S0001: 1, S0354: 1, | | |
| | | | | | | Lys-340 to Val-347, | S0376: 1, S0360: 1, | | |
| | | | | | | Gln-352 to Lys-366. | S0045: 1, H0013: 1, | | |
| | | | | | | | H0012: 1, S0048: 1, | | |
| | | | | | | | H0188: 1, H0428: 1, | | |
| | | | | | | | H0135: 1, H0038: 1, | | |
| | | | | | | | H0616: 1, H0380: 1, | | |
| | | | | | | | H0412: 1, L0435: 1, | | |
| | | | | | | | T0042: 1, H0494: 1, | | |
| | | | | | | | H0561: 1, H0641: 1, | | |
| | | | | | | | S0422: 1, L0369: 1, | | |
| | | | | | | | L0761: 1, L0363: 1, | | |
| | | | | | | | L0766: 1, L0803: 1, | | |
| | | | | | | | L0375: 1, L0776: 1, | | |
| | | | | | | | L0655: 1, L0788: 1, | | |
| | | | | | | | L0663: 1, L0665: 1, | | |
| | | | | | | | H0144: 1, S0374: 1, | | |
| | | | | | | | H0547: 1, H0658: 1, | | |
| | | | | | | | H0539: 1, H0627: 1, | | |
| | | | | | | | L0751: 1, L0749: 1, | | |
| | | | | | | | L0756: 1, L0779: 1, | | |
| | | | | | | | L0777: 1, L0599: 1, | | |
| | | | | | | | S0026: 1, S0192: 1 and | | |
| | | | | | | | H0423: 1. | | |
| | | 667688 | 696 | 2-328 | 1483 | Glu-30 to Leu-40, | | | |
| | | | | | | His-90 to Ala-99. | | | |
| 264 | HSSJE32 | 1175036 | 274 | 3-1541 | 1061 | Ile-5 to Ser-20, | AR089: 1, AR061: 0 | | |
| | | | | | | Cys-45 to Leu-55, | L0775: 2, L0439: 2, | | |
| | | | | | | Asp-72 to Gln-79, | L0750: 2, H0333: 1, | | |
| | | | | | | Leu-83 to Ser-89, | S0010: 1, H0024: 1, | | |
| | | | | | | Met-91 to Cys-101, | H0135: 1, H0038: 1, | | |
| | | | | | | Phe-105 to Met-125, | L0766: 1, L0782: 1, | | |
| | | | | | | Ser-137 to Ser-145, | L0809: 1, L0352: 1, | | |
| | | | | | | Met-147 to Tyr-152, | H0690: 1, L0779: 1, | | |
| | | | | | | Phe-161 to Asn-166. | L0758: 1 and H0542: 1. | | |
| | | 909261 | 697 | 2-664 | 1484 | Ile-5 to Ser-20, | | | |
| | | | | | | Cys-45 to Leu-55, | | | |
| | | | | | | Asp-72 to Gln-79, | | | |
| | | | | | | Leu-83 to Ser-89, | | | |
| | | | | | | Met-91 to Cys-101, | | | |
| | | | | | | Phe-105 to Ser-119. | | | |
| 265 | HSTAO59 | 1219009 | 275 | 1-525 | 1062 | Pro-5 to Gln-12, | AR089: 0, AR061: 0 | | |
| | | | | | | Glu-20 to Lys-26, | H0068: 1, L0759: 1 | | |
| | | | | | | Ile-72 to Lys-80, | and L0595: 1. | | |
| | | | | | | The-102 to Cys-109, | | | |
| | | | | | | His-129 to Gln-138. | | | |
| | | 908993 | 698 | 1-357 | 1485 | Ile-28 to Lys-36, | | | |
| | | | | | | Thr-58 to Cys-65, | | | |
| | | | | | | His-85 to Lys-92, | | | |
| | | | | | | Tyr-98 to Ser-104, | | | |
| | | | | | | Ser-112 to Gly-117. | | | |
| 266 | HSYDC34 | 1193094 | 276 | 104-1858 | 1063 | Ser-38 to Tyr-44, | AR089: 3, AR061: 1 | | |
| | | | | | | Glu-72 to Pro-77, | H0171: 5, S0026: 3, | | |
| | | | | | | Asp-91 to Pro-113, | S0400: 2, L0471: 2, | | |
| | | | | | | Gln-124 to Asn-134. | H0031: 2, H0553: 2, | | |
| | | | | | | | H0521: 2, L0759: 2, | | |
| | | | | | | | H0423: 2, H0170: 1, | | |
| | | | | | | | H0583: 1, H0656: 1, | | |
| | | | | | | | S0001: 1, S0358: 1, | | |
| | | | | | | | S0360: 1, H0244: 1, | | |
| | | | | | | | H0349: 1, H0590: 1, | | |
| | | | | | | | H0310: 1, H0014: 1, | | |
| | | | | | | | H0039: 1, S0366: 1, | | |
| | | | | | | | H0551: 1, L0351: 1, | | |
| | | | | | | | H0509: 1, S0150: 1, | | |
| | | | | | | | L0369: 1, L0796: 1, | | |
| | | | | | | | L0773: 1, L0662: 1, | | |
| | | | | | | | L0766: 1, L0803: 1, | | |
| | | | | | | | L0635: 1, L0540: 1, | | |
| | | | | | | | H0547: 1, H0519: 1, | | |
| | | | | | | | H0684: 1, H0660: 1, | | |
| | | | | | | | H0666: 1, S0044: 1, | | |
| | | | | | | | H0478: 1, H0479: 1, | | |
| | | | | | | | H0626: 1, L0748: 1, | | |
| | | | | | | | L0740: 1, L0777: 1, | | |
| | | | | | | | L0752: 1, L0755: 1 and | | |
| | | | | | | | H0543: 1. | | |
| | | 922881 | 699 | 1-495 | 1486 | Lys-31 to Gln-38. | | | |
| 267 | HTAEZ50 | 1217062 | 277 | 3-494 | 1064 | Thr-10 to Glu-109, | AR061: 0, AR089: 0 | | |
| | | | | | | Ser-36 to Gly-49, | S0358: 3, H0550: 2, | | |
| | | | | | | His-65 to Glu-72, | H0494: 2, H0144: 2, | | |
| | | | | | | Ser-83 to Lys-91, | H0547: 2, L0777: 2, | | |
| | | | | | | Leu-142 to Cys-157. | L0759: 2, H0170: 1, | | |
| | | | | | | | S0040: 1, S0376: 1, | | |
| | | | | | | | H0587: 1, H0069: 1, | | |
| | | | | | | | H0635: 1, H0545: 1, | | |
| | | | | | | | H0031: 1, S0344: 1, | | |
| | | | | | | | L0794: 1, L0803: 1, | | |
| | | | | | | | L0804: 1, L0809: 1, | | |
| | | | | | | | L0647: 1, L0666: 1, | | |
| | | | | | | | S0428: 1, H0522: 1, | | |
| | | | | | | | L0743: 1, L0750: 1, | | |
| | | | | | | | L0595: 1 and S0011: 1. | | |
| | | 909259 | 700 | 79-582 | 1487 | | | | |
| 268 | HTEBJ03 | 1185830 | 278 | 2-1642 | 1065 | Pro-2 to Asp-7, | AR089: 0, AR061: 0 | | |
| | | | | | | Glu-9 to Asp-21, | S0126: 3, H0521: 3, | | |
| | | | | | | Pro-29 to Trp-42, | H0038: 2, L0748: 2, | | |
| | | | | | | Arg-103 to Pro-108, | S0212: 1, H0486: 1, | | |
| | | | | | | Ile-135 to Ile-147, | H0013: 1, H0046: 1, | | |
| | | | | | | Thr-156 to Gly-173, | L0471: 1, H0373: 1 and | | |
| | | | | | | Ser-176 to Gly-185, | H0144: 1. | | |
| | | | | | | Leu-231 to Ser-256, | | | |
| | | | | | | Gln-263 to Arg-283. | | | |
| | | 908596 | 701 | 1-264 | 1488 | Thr-3 to Asp-22, | | | |
| | | | | | | His-26 to Glu-37, | | | |
| | | | | | | Huis-58 to Tyr-64. | | | |
| 269 | HTEGT13 | 979683 | 279 | 2-2335 | 1066 | | AR-61: 1, AR089: 1, | | |
| | | | | | | | L0439: 8, L0758: 7, | | |
| | | | | | | | H0038: 3, L0804: 1, | | |
| | | | | | | | L0438: 4, L0747: 4, | | |
| | | | | | | | L0777: 4, S0360: 3, | | |
| | | | | | | | H0619: 3, H0031: 3, | | |
| | | | | | | | H0616: 3, L0748: 3, | | |
| | | | | | | | L0755: 3, H0052: 2, | | |
| | | | | | | | H0628: 2, L0769: 2, | | |
| | | | | | | | L0794: 2, L0766: 2, | | |
| | | | | | | | L0803: 2, L0517: 2, | | |
| | | | | | | | L0809: 2, L0602: 2, | | |
| | | | | | | | L0759: 2, L0593: 2, | | |
| | | | | | | | L0362: 2, H0686: 1, | | |
| | | | | | | | H0685: 1, L0470: 1, | | |
| | | | | | | | S0356: 1, S0358: 1, | | |
| | | | | | | | H0393: 1, H0437: 1, | | |
| | | | | | | | H0453: 1, T0039: 1, | | |
| | | | | | | | H0156: 1, H0581: 1, | | |
| | | | | | | | T0110: 1, H0544: 1, | | |
| | | | | | | | H0046: 1, H0081: 1, | | |
| | | | | | | | S0051: 1, H0510: 1, | | |
| | | | | | | | H0266: 1, H0644: 1, | | |
| | | | | | | | L0455: 1, H0163: 1, | | |
| | | | | | | | H0551: 1, H0100: 1, | | |
| | | | | | | | L0370: 1, H0561: 1, | | |
| | | | | | | | H0647: 1, L0369: 1, | | |
| | | | | | | | L0763: 1, L0770: 1, | | |
| | | | | | | | L0772: 1, L0646: 1, | | |
| | | | | | | | L0800: 1, L0764: 1, | | |
| | | | | | | | L0768: 1, L0776: 1, | | |
| | | | | | | | L0789: 1, L0790: 1, | | |
| | | | | | | | L0666: 1, L0663: 1, | | |
| | | | | | | | H0144: 1, H0672: 1, | | |
| | | | | | | | H0436: 1, S0027: 1, | | |
| | | | | | | | L0749: 1, L0779: 1, | | |
| | | | | | | | L0752: 1, L0757: 1, | | |
| | | | | | | | H0595: 1, S0026: 1 and | | |
| | | | | | | | S0194: 1. | | |
| | | 787522 | 702 | 87-509 | 1489 | | | | |
| 270 | HTEIA48 | 979184 | 280 | 3-566 | 1067 | Thr-25 to Lys-33, | AR061: 5, AR089: 5 | | |
| | | | | | | Leu-35 to Tyr-55, | H0052: 1, H0050: 1, | | |
| | | | | | | Ser-69 to Ser-75, | S0364: 1, H0038: 1, | | |
| | | | | | | Glu-81 to Arg-88, | H0494: 1 and L0759: 1. | | |
| | | | | | | Leu-99 to Lys-105, | | | |
| | | | | | | Gln-107 to Ile-114, | | | |
| | | | | | | Asn-126 to Asp-133, | | | |
| | | | | | | Cys-150 to Thr-155, | | | |
| | | | | | | Asp-168 to Ala-174. | | | |
| | | 762002 | 703 | 7-567 | 1490 | | | | |
| 271 | HTEMR65 | 1152260 | 281 | 2-346 | 1068 | Ser-9 to Asp-15, | AR089: 17, AR061: 13 | | |
| | | | | | | Leu-51 to Asn-56, | L0794: 2, L0752: 2, | | |
| | | | | | | His-64 to Tyr-70. | H0616: 1, L0763: 1, | | |
| | | | | | | | L0766: 1, L0664: 1, | | |
| | | | | | | | H0670: 1 and L0758: 1. | | |
| | | 909280 | 704 | 2-340 | 1491 | Ser-7 to Asp-13, | | | |
| | | | | | | Leu-49 to Asn-54, | | | |
| | | | | | | His-62 to Tyr-68. | | | |
| 272 | HTGAS31 | 1161573 | 282 | 272-643 | 1069 | Glu-1 to Gly-6, | AR061: 6, AR089: 3 | | |
| | | | | | | Cys-15 to Trp-22, | L0777: 3, L0766: 2, | | |
| | | | | | | Ala-78 to Ser-84. | L0438: 2, L0750: 2, | | |
| | | | | | | | S0134: 1, H0594: 1, | | |
| | | | | | | | S0112: 1, L0769: 1, | | |
| | | | | | | | L0748: 1 and L0439: 1. | | |
| | | 909198 | 705 | 21-608 | 1492 | Arg-3 to Gln-16, | | | |
| | | | | | | Lys-19 to Glu-31, | | | |
| | | | | | | Lys-34 to Thr-41, | | | |
| | | | | | | Ser-63 to Gln-77, | | | |
| | | | | | | Pro-89 to Trp-94. | | | |
| 273 | HTLAI85 | 1216550 | 283 | 2-1690 | 1070 | Arg-28 to Glu-34, | AR089: 9, AR061: 3 | | |
| | | | | | | His-58 to Cys-65, | H0617: 7, L0438: 6, | | |
| | | | | | | Ala-143 to Ser-154, | L0439: 5, H0253: 4, | | |
| | | | | | | Gln-174 to Thr-183, | L0794: 3, L0766: 3, | | |
| | | | | | | Thr-210 to Val-217, | L0791: 3, H0618: 2, | | |
| | | | | | | Ser-226 to Ser-236, | S0344: 2, L0769: 2, | | |
| | | | | | | Pro-255 to Glu-263, | L0662: 2, L0758: 2, | | |
| | | | | | | Ala-270 to Trp-279, | H0556: 1, H0333: 1, | | |
| | | | | | | Cys-281 to Trp-287, | T0040: 1, H0013: 1, | | |
| | | | | | | Lys-299 to His-327, | H0575: 1, H0318: 1, | | |
| | | | | | | Arg-329 to Lys-337, | H0052: 1, H0178: 1, | | |
| | | | | | | Tyr-343 to Pro-352, | H0023: 1, H0083: 1, | | |
| | | | | | | Ile-367 to His-384, | T0023: 1, H0606: 1, | | |
| | | | | | | Ser-412 to Ser-418, | H0135: 1, T0004: 1, | | |
| | | | | | | Val-474 to Glu-484, | H0509: 1, S0144: 1, | | |
| | | | | | | Glu-496 to Glu-503, | L0803: 1, L0663: 1, | | |
| | | | | | | Glu-508 to Gly-513, | L0665: 1, H0672: 1, | | |
| | | | | | | Ala-535 to His-557. | H0631: 1, L0744: 1, | | |
| | | | | | | | L0747: 1, L0756: 1, | | |
| | | | | | | | L0779: 1, L0731: 1, | | |
| | | | | | | | S0194: 1 and H0542: 1. | | |
| | | 929553 | 706 | 1-705 | 1493 | | | | |
| 274 | HTLAV59 | 1153920 | 284 | 572-3 | 1071 | Ala-20 to Ser-31, | AR061: 1, AR089: 1 | | |
| | | | | | | Gly-45 to Arg-50, | L0769: 2, L0777: 2, | | |
| | | | | | | Pro-61 to Glu-67. | H0618: 1, H0253: 1, | | |
| | | | | | | | S0364: 1, H0521: 1, | | |
| | | | | | | | L0742: 1 and L0747: 1. | | |
| | | 693959 | 707 | 47-235 | 1494 | Thr-5 to Asn-11, | | | |
| | | | | | | Arg-45 to Leu-54. | | | |
| 275 | HTLDE64 | 908613 | 285 | 83-427 | 1072 | Glu-15 to Leu-20, | AR089: 25, AR061: 11 | | |
| | | | | | | Leu-24 to Ser-47. | H0523: 2 and H0618: | | |
| | | | | | | | 1. | | |
| 276 | HTLDF33 | 1153921 | 286 | 2-607 | 1073 | Pro-10 to Gly-16, | AR061: 7, AR089: 3 | | |
| | | | | | | Ser-43 to Phe-48, | L0758: 6, L0789: 2, | | |
| | | | | | | Thr-71 to Cys-78, | L0779: 2, H0253: 1, | | |
| | | | | | | Ser-176 to Lys-181. | L0809: 1, L0666: 1 and | | |
| | | | | | | | H0648: 1. | | |
| | | 909254 | 708 | 3-599 | 1495 | Pro-7 to Gly-13. | | | |
| 277 | HTLFE19 | 1178595 | 287 | 2-1213 | 1074 | Gln-15 to Thr-24, | AR061: 4, AR089: 2 | | |
| | | | | | | Thr-51 to Asp-59, | H0617: 7, L0438: 6, | | |
| | | | | | | Gln-65 to Ser-77, | L0439: 5, H0253: 4, | | |
| | | | | | | Pro-96 to Glu-104, | L0794: 3, L0766: 3, | | |
| | | | | | | Ala-111 to Trp-120, | L0791: 3, H0618: 2, | | |
| | | | | | | Cys-122 to Trp-128, | S0344: 2, L0769: 2, | | |
| | | | | | | Lys-140 to His-168, | L0662: 2, L0758: 2, | | |
| | | | | | | Arg-170 to Lys-178, | H0556: 1, H0333: 1, | | |
| | | | | | | Tyr-184 to Pro-193, | T0040: 1, H0013: 1, | | |
| | | | | | | Ile-208 to His-225, | H0575: 1, H0318: 1, | | |
| | | | | | | Ser-253 to Ser-259, | H0052: 1, H0178: 1, | | |
| | | | | | | Val-315 to Glu-325, | H0023: 1, H0083: 1, | | |
| | | | | | | Glu-337 to Glu-344, | T0023: 1, H0606: 1, | | |
| | | | | | | Glu-349 to Gly-354, | H0135: 1, T0004: 1, | | |
| | | | | | | Ala-376 to His-398. | H0509: 1, S0144: 1, | | |
| | | | | | | | L0803: 1, L0663: 1, | | |
| | | | | | | | L0665: 1, H0672: 1, | | |
| | | | | | | | H0631: 1, L0744: 1, | | |
| | | | | | | | L0747: 1, L0756: 1, | | |
| | | | | | | | L0779: 1, L0731: 1, | | |
| | | | | | | | S0194: 1 and H0542: 1. | | |
| | | 955240 | 709 | 2134-929 | 1496 | Ser-4 to Thr-10, | | | |
| | | | | | | Ala-20 to Gly-25, | | | |
| | | | | | | Thr-49 to Asp-57, | | | |
| | | | | | | Gln-63 to Ser-75, | | | |
| | | | | | | Pro-94 to Glu-102, | | | |
| | | | | | | Ala-109 to Trp-118, | | | |
| | | | | | | Cys-120 to Trp-126, | | | |
| | | | | | | Lys-138 to His-166, | | | |
| | | | | | | Arg-168 to Lys-176, | | | |
| | | | | | | Tyr-182 to Pro-191, | | | |
| | | | | | | Ile-206 to His-223, | | | |
| | | | | | | Ser-251 to Ser-257, | | | |
| | | | | | | Val-313 to Glu-323, | | | |
| | | | | | | Glu-335 to Glu-342, | | | |
| | | | | | | Glu-347 to Gly-352, | | | |
| | | | | | | Ala-374 to Ala-389. | | | |
| 278 | HTLIE30 | 1186867 | 288 | 1-732 | 1075 | Glu-65 to Glu-76, | AR089: 78, AR061: 23 | | |
| | | | | | | Gln-84 to Gly-107, | L0773: 2, L0439: 2, | | |
| | | | | | | Glu-117 to Arg-124, | L0779: 2, H0657: 1, | | |
| | | | | | | Gln-127 to Ala-135, | H0550: 1, H0108: 1, | | |
| | | | | | | Lys-166 to His-178, | H0618: 1, H0179: 1, | | |
| | | | | | | Pro-202 to Phe-207, | L0055: 1, L0774: 1, | | |
| | | | | | | Pro-213 to Arg-219, | L0775: 1, L0659: 1, | | |
| | | | | | | Gln-226 to Pro-236. | L0665: 1, H0555: 1, | | |
| | | | | | | | L0747: 1, L0780: 1, | | |
| | | | | | | | L0758: 1 and H0506: 1. | | |
| | | 947012 | 710 | 2-1003 | 1497 | | | | |
| 279 | HTNBJ90 | 1147339 | 289 | 3-845 | 1076 | Pro-17 to Lys-27. | AR061: 1, AR089: 1 | | |
| | | | | | | | S0376: 1, H0013: 1, | | |
| | | | | | | | H0051: 1, T0067: 1 and | | |
| | | | | | | | L0748: 1. | | |
| | | 909275 | 711 | 2-424 | 1498 | His-80 to Glu-87. | | | |
| 280 | HTOBG35 | 1081313 | 290 | 3-422 | 1077 | Ala-16 to Glu-24, | AR061: 7, AR089: 4 | | |
| | | | | | | Arg-39 to Glu-52, | H0024: 2, H0645: 1, | | |
| | | | | | | Ser-59 to His-66, | H0272: 1, S0126: 1 and | | |
| | | | | | | His-70 to Lys-77, | S0028: 1. | | |
| | | | | | | Phe-85 to Leu-91, | | | |
| | | | | | | His-98 to Lys-105, | | | |
| | | | | | | His-126 to Trp-137. | | | |
| | | 909250 | 712 | 1-366 | 1499 | Asp-1 to Glu-8, | | | |
| | | | | | | His-55 to Lys-62. | | | |
| 281 | HTOHL35 | 1078106 | 291 | 2-409 | 1078 | Arg-2 to Val-11, | AR061: 1, AR089: 0 | | |
| | | | | | | Asp-20 to Val-29, | H0264: 2. | | |
| | | | | | | Arg-41 to Cys-47, | | | |
| | | | | | | Ser-53 to Trp-62. | | | |
| | | 537364 | 713 | 1-201 | 1500 | Arg-8 to Val-18, | | | |
| | | | | | | Arg-30 to Cys-36. | | | |
| 282 | HTPGS02 | 1178823 | 292 | 3-1151 | 1079 | Ser-7 to Val-14, | AR089: 3, AR061: 3 | | |
| | | | | | | Arg-22 to Ile-27, | S0414: 12, L0756: 4, | | |
| | | | | | | Arg-54 to Ser-60, | H0486: 2, L0766: 2, | | |
| | | | | | | His-71 to Lys-77, | L0647: 2, H0144: 2, | | |
| | | | | | | Lys-84 to Arg-90, | L0731: 2, H0624: 1, | | |
| | | | | | | Ser-116 to The-122, | H0411: 1, H0574: 1, | | |
| | | | | | | Glu-142 to Val-155, | H0013: 1, H0318: 1, | | |
| | | | | | | Glu-166 to Cys-190, | S6028: 1, S0250: 1, | | |
| | | | | | | Asn-193 to Glu-205, | H0622: 1, H0040: 1, | | |
| | | | | | | Gln-221 to Lys-226, | L0520: 1, L0644: 1, | | |
| | | | | | | Lys-239 to Gln-245, | L0662: 1, L0805: 1, | | |
| | | | | | | Gln-269 to Lys-286, | L0776: 1, L0665: 1, | | |
| | | | | | | Leu-301 to Val-310, | L0659: 1, L0666: 1, | | |
| | | | | | | Asp-313 to Gly-318, | L0665: 1, H0521: 1, | | |
| | | | | | | Gly-342 to Thr-350, | H0187: 1, H0478: 1, | | |
| | | | | | | Ser-355 to Asp-360, | L0742: 1, L0439: 1, | | |
| | | | | | | Pro-362 to Thr-370, | L0779: 1, L0777: 1, | | |
| | | | | | | Glu-377 to Ser-383. | L0759: 1, S0242: 1 and | | |
| | | | | | | | H0352: 1. | | |
| | | 917578 | 714 | 2-409 | 1501 | Ser-1 to Val-8, | | | |
| | | | | | | Arg-16 to Ile-21, | | | |
| | | | | | | Arg-48 to Ser-54, | | | |
| | | | | | | His-65 to Lys-71, | | | |
| | | | | | | Lys-78 to Arg-84, | | | |
| | | | | | | Ser-110 to Thr-116. | | | |
| 283 | HTTDO19 | 1134543 | 293 | 2-403 | 1080 | His-6 to Lys-13, | AR089: 16, AR061: 9 | | |
| | | | | | | Glu-18 to His-30, | H0040: 2 | | |
| | | | | | | His-34 to Lys-41, | | | |
| | | | | | | Lys-47 to Ser-53. | | | |
| | | 908937 | 715 | 1-333 | 1502 | Thr-3 to Lys-9, | | | |
| | | | | | | Gly-14 to His-26, | | | |
| | | | | | | His-30 to Lys-37, | | | |
| | | | | | | Lys-43 to Ser-49. | | | |
| 284 | HTTEP88 | 1153922 | 294 | 146-934 | 1081 | Thr-1 to Gly-10, | AR061: 5, AR089: 3 | | |
| | | | | | | Gly-20 to Met-48, | L0439: 6, L0770: 4, | | |
| | | | | | | Asn-68 to Val-73, | H0423: 3, H0040: 2, | | |
| | | | | | | Pro-90 to Tyr-101, | L0659: 2, L0665: 2, | | |
| | | | | | | His-109 to Asn-129, | H0593: 2, H0436: 2, | | |
| | | | | | | Thr-136 to Ser-155, | L0747: 2, L0756: 2, | | |
| | | | | | | Arg-163 to Tyr-171, | L0759: 2, H0170: 1, | | |
| | | | | | | Lys-178 to Ser-184, | S0114: 1, S0134: 1, | | |
| | | | | | | Arg-190 to Tyr-199, | H0645: 1, L0717: 1, | | |
| | | | | | | Arg-218 to Ala-241, | H0586: 1, H0497: 1, | | |
| | | | | | | Gln-257 to Ala-262. | H0013: 1, H0581: 1, | | |
| | | | | | | | H0052: 1, S0388: 1, | | |
| | | | | | | | H0673: 1, H0135: 1, | | |
| | | | | | | | H0591: 1, H0646: 1, | | |
| | | | | | | | S0002: 1, L0662: 1, | | |
| | | | | | | | L0803: 1, L0650: 1, | | |
| | | | | | | | L0806: 1, L0382: 1, | | |
| | | | | | | | L0792: 1, S0330: 1, | | |
| | | | | | | | L0744: 1, L0748: 1, | | |
| | | | | | | | L0749: 1, L0599: 1 and | | |
| | | | | | | | S0026: 1. | | |
| | | 931983 | 716 | 2-694 | 1503 | Gly-3 to Arg-19, | | | |
| | | | | | | Lys-36 to Glu-50, | | | |
| | | | | | | Ala-57 to Gly-64, | | | |
| | | | | | | Gly-74 to Met-102, | | | |
| | | | | | | Asn-122 to Val-127. | | | |
| 285 | HTWAA57 | 1153923 | 295 | 631-428 | 1082 | Gly-32 to Pro-37. | AR089: 59, AR061: 12 | | |
| | | | | | | | L0439: 2, S0040: 1, | | |
| | | | | | | | H0329: 1, H0427: 1, | | |
| | | | | | | | H0014: 1, H0187: 1 and | | |
| | | | | | | | H0436: 1. | | |
| | | 773333 | 717 | 6-254 | 1504 | | | | |
| 286 | HTWEP40 | 1189733 | 296 | 3-215 | 1083 | Gly-37 to Phe-42. | AR089: 4, AR061: 2 | | |
| | | | | | | | S0374: 2, L0750: 2, | | |
| | | | | | | | L0362: 2, S0354: 1, | | |
| | | | | | | | L0622: 1, L0157: 1, | | |
| | | | | | | | L0766: 1, L0775: 1, | | |
| | | | | | | | L0806: 1, L0655: 1, | | |
| | | | | | | | L0659: 1, L0790: 1, | | |
| | | | | | | | H0436: 1, L0755: 1, | | |
| | | | | | | | L0731: 1 and L0757: 1. | | |
| | | 694287 | 718 | 2-457 | 1505 | Arg-14 to Gly-28, | | | |
| | | | | | | Thr-45 to Ala-52, | | | |
| | | | | | | Val-54 to Ser-64, | | | |
| | | | | | | Gln-72 to Asn-78. | | | |
| 287 | HUCPE28 | 1209532 | 297 | 71-1330 | 1084 | Lys-16 to Gly-23, | AR089: 1, AR061: 0 | | |
| | | | | | | Glu-33 to Val-43, | L0766: 11, H0622: 5, | | |
| | | | | | | Ser-55 to Ala-67, | S0420: 2, L0769: 2, | | |
| | | | | | | Arg-81 to Pro-97, | L0803: 2, L0779: 2, | | |
| | | | | | | Thr-108 to Gln-124, | H0656: 1, H0484: 1, | | |
| | | | | | | Pro-151 to Glu-157, | S0418: 1, H0580: 1, | | |
| | | | | | | Leu-184 to Cys-194, | H0619: 1, H0411: 1, | | |
| | | | | | | Ala-218 to Pro-225, | H0592: 1, H0427: 1, | | |
| | | | | | | Pro-227 to Asp-243, | H0581: 1, H0052: 1, | | |
| | | | | | | Lys-304 to Asp-321, | H0494: 1, L0774: 1, | | |
| | | | | | | Asp-336 to Gly-352, | L0775: 1, L0665: 1, | | |
| | | | | | | Pro-357 to Ser-363, | S0374: 1, H0539: 1, | | |
| | | | | | | Gly-405 to Gly-411. | S0404: 1, L0743: 1, | | |
| | | | | | | | L0745: 1, L0749: 1, | | |
| | | | | | | | L0777: 1, L0752: 1 and | | |
| | | | | | | | L0097: 1. | | |
| | | 951876 | 719 | 71-793 | 1506 | Lys-16 to Gly-23, | | | |
| | | | | | | Glu-33 to Val-43, | | | |
| | | | | | | Ser-55 to Ala-67, | | | |
| | | | | | | Gln-82 to Pro-97, | | | |
| | | | | | | Thr-108 to Gln-124, | | | |
| | | | | | | Pro-151 to Glu-157, | | | |
| | | | | | | Leu-184 to Cys-194, | | | |
| | | | | | | Ser-216 to Gly-236. | | | |
| 288 | HUFDI79 | 1207005 | 298 | 515-784 | 1085 | Ile-15 to Lys-29, | AR089: 27, AR061: 2 | | |
| | | | | | | Thr-38 to His-53, | H0036: 1, T0069: 1, | | |
| | | | | | | Asp-75 to Val-82. | L0752: 1, L0758: 1 and | | |
| | | | | | | H0506: 1. | | | |
| | | 774692 | 720 | 157-393 | 1507 | | | | |
| 289 | HUJBQ75 | 908603 | 299 | 248-1528 | 1086 | Leu-70 to Asn-75. | AR089: 4, AR061: 2 | | |
| | | | | | | | H0038: 5, L0806: 3, | | |
| | | | | | | | L0777: 3, H0599: 2, | | |
| | | | | | | | H0616: 2, L0530: 2, | | |
| | | | | | | | L0748: 2, L0751: 2, | | |
| | | | | | | | L0779: 2, L0758: 2, | | |
| | | | | | | | L0485: 2, H0650: 1, | | |
| | | | | | | | H0661: 1, H0662: 1, | | |
| | | | | | | | H0461: 1, H0024: 1, | | |
| | | | | | | | L0804: 1, L0378: 1, | | |
| | | | | | | | L0749: 1 and L0780: 1. | | |
| 290 | HUKET47 | 1164742 | 300 | 137-652 | 1087 | Tyr-11 to Asn-19, | AR061: 0, AR089: 0 | | |
| | | | | | | Asn-22 to Leu-27, | L0747: 8, L0769: 5, | | |
| | | | | | | Glu-53 to Arg-60, | L0755: 5, L0789: 4, | | |
| | | | | | | Cys-68 to Phe-76, | L0758: 4, L0163: 3, | | |
| | | | | | | Ser-80 to Gln-85, | L0804: 3, L0748: 3, | | |
| | | | | | | Glu-92 to Arg-98, | L0750: 3, H0657: 2, | | |
| | | | | | | Glu-106 to His-111, | L0617: 2, S0007: 2, | | |
| | | | | | | Trp-115 to Arg-122, | S0222: 2, H0327: 2, | | |
| | | | | | | Pro-127 to Ile-134, | H0086: 2, L0794: 2, | | |
| | | | | | | Leu-155 to Gly-162, | L0775: 2, L0805: 2, | | |
| | | | | | | Gln-166 to Trp-171. | L0809: 2, L0740: 2, | | |
| | | | | | | | L0779: 2, L0731: 2, | | |
| | | | | | | | L0757: 2, L0759: 2, | | |
| | | | | | | | H0295: 1, H0638: 1, | | |
| | | | | | | | S0418: 1, H0492: 1, | | |
| | | | | | | | H0486: 1, H0575: 1, | | |
| | | | | | | | S0010: 1, H0545: 1, | | |
| | | | | | | | H0014: 1, H0416: 1, | | |
| | | | | | | | H0290: 1, H0628: 1, | | |
| | | | | | | | H0617: 1, H0135: 1, | | |
| | | | | | | | H0059: 1, T0041: 1, | | |
| | | | | | | | T0042: 1, L0772: 1, | | |
| | | | | | | | L0764: 1, L0768: 1, | | |
| | | | | | | | L0766: 1, L0803: 1, | | |
| | | | | | | | L0774: 1, L0806: 1, | | |
| | | | | | | | L0776: 1, L0382: 1, | | |
| | | | | | | | L0664: 1, L0665: 1, | | |
| | | | | | | | S0126: 1, L0752: 1, | | |
| | | | | | | | H0423: 1 and H0352: 1. | | |
| | | 968789 | 721 | 130-645 | 1508 | Tyr-11 to Asn-19, | | | |
| | | | | | | Asn-22 to Leu-27, | | | |
| | | | | | | Glu-53 to Arg-60, | | | |
| | | | | | | Cys-68 to Phe-76, | | | |
| | | | | | | Ser-80 to Gln-85, | | | |
| | | | | | | Glu-92 to Arg-98, | | | |
| | | | | | | Glu-106 to His-111, | | | |
| | | | | | | Trp-115 to Arg-122, | | | |
| | | | | | | Pro-127 to Ile-134, | | | |
| | | | | | | Leu-155 to Gly-162, | | | |
| | | | | | | Gln-166 to Trp-171. | | | |
| 291 | HUSGE36 | 1147864 | 301 | 864-40 | 1088 | Ser-35 to Arg-40. | AR089: 2, AR061: 1 | | |
| | | | | | | | L0439: 3, L0749: 3, | | |
| | | | | | | | H0556: 2, T0002: 2, | | |
| | | | | | | | H0644: 2, L0770: 2, | | |
| | | | | | | | L0751: 2, H0395: 1, | | |
| | | | | | | | S0400: 1, H0369: 1, | | |
| | | | | | | | H0441: 1, H0081: 1, | | |
| | | | | | | | L0471: 1, H0028: 1, | | |
| | | | | | | | H0604: 1, H0038: 1, | | |
| | | | | | | | H0264: 1, H0412: 1, | | |
| | | | | | | | L0369: 1, L0641: 1, | | |
| | | | | | | | L0645: 1, L0764: 1, | | |
| | | | | | | | L0648: 1, L0804: 1, | | |
| | | | | | | | L0775: 1, L0375: 1, | | |
| | | | | | | | L0655: 1, L0792: 1, | | |
| | | | | | | | L0665: 1, H0682: 1, | | |
| | | | | | | | H0435: 1 and H0423: 1. | | |
| | | 908477 | 722 | 1-777 | 1509 | Val-15 to Lys-25, | | | |
| | | | | | | Tyr-31 to Ile-39, | | | |
| | | | | | | His-46 to His-53, | | | |
| | | | | | | Lys-75 to Leu-81, | | | |
| | | | | | | Cys-85 to Lys-90, | | | |
| | | | | | | Met-99 to Gln-109, | | | |
| | | | | | | Glu-114 to Ala-120, | | | |
| | | | | | | Gln-127 to Glu-133, | | | |
| | | | | | | Leu-156 to Lys-163, | | | |
| | | | | | | Thr-186 to Phe-193, | | | |
| | | | | | | Cys-198 to Lys-205, | | | |
| | | | | | | Arg-213 to Pro-233, | | | |
| | | | | | | Leu-242 to Pro-248, | | | |
| | | | | | | His-254 to Gly-259. | | | |
| 292 | HUTAB12 | 1152270 | 302 | 3-404 | 1089 | Val-5 to Lys-13, | AR061: 3, AR089: 1 | | |
| | | | | | | Ser-18 to Ser-26, | L0752: 3, H0032: 2, | | |
| | | | | | | Lys-33 to Arg-44, | L0769: 2, L0806: 2, | | |
| | | | | | | Arg-80 to Asp-101, | L0758: 1, S0360: 1, | | |
| | | | | | | Leu-128 to Leu-134. | H0013: 1, H0545: 1, | | |
| | | | | | | | S0440: 1, L0796: 1, | | |
| | | | | | | | L0761: 1, L0804: 1, | | |
| | | | | | | | L0775: 1, L0776: 1 and | | |
| | | | | | | | L0600: 1. | | |
| | | 961070 | 723 | 3-416 | 1510 | Val-9 to Lys-17, | | | |
| | | | | | | Ser-22 to Ser-30, | | | |
| | | | | | | Lys-37 to Arg-48, | | | |
| | | | | | | Arg-84 to Asp-105, | | | |
| | | | | | | Leu-132 to Leu-138. | | | |
| 293 | HUVBC70 | 1013239 | 303 | 2-388 | 1090 | | AR089: 2, AR061: 2 | | |
| | | | | | | | H0580: 1, H0040: 1 | | |
| | | | | | | and H0056: 1. | | | |
| | | 673917 | 724 | 2-388 | 1511 | | | | |
| 294 | HUVDG48 | 1189014 | 304 | 253-786 | 1091 | Ser-8 to Ala-23, | AR089: 20, AR061: 11 | | |
| | | | | | | Pro-39 to Ser-45, | H0056: 6, L0659: 4, | | |
| | | | | | | Glu-50 to Arg-56, | L0375: 2, L0438: 2, | | |
| | | | | | | Leu-67 to Lys-73, | H0547: 2, S0126: 2, | | |
| | | | | | | Gln-75 to Ile-82, | L0439: 2, L0740: 2, | | |
| | | | | | | Asn-94 to Asp-101, | L0591: 2, H0265: 1, | | |
| | | | | | | Cys-118 to Thr-123, | H0318: 1, H0309: 1, | | |
| | | | | | | Pro-137 to Ala-142. | H0178: 1, H0131: 1, | | |
| | | | | | | | L0662: 1, L0649: 1, | | |
| | | | | | | | L0657: 1, L0790: 1, | | |
| | | | | | | | H0684: 1, H0670: 1, | | |
| | | | | | | | H0436: 1, S0027: 1, | | |
| | | | | | | | L0749: 1, L0779: 1, | | |
| | | | | | | | L0731: 1 and L0592: 1. | | |
| | | 789250 | 725 | 253-627 | 1512 | Ser-8 to Tyr-21. | | | |
| 295 | HUVFT89 | 960524 | 305 | 32-532 | 1092 | Lys-22 to Ser-41, | AR061: 3, AR089: 1 | | |
| | | | | | | Val-78 to Met-84. | L0754: 3, L0362: 3, | | |
| | | | | | | | H0009: 2, L0794: 2, | | |
| | | | | | | | H0521: 2, H0624: 1, | | |
| | | | | | | | H0661: 1, H0638: 1, | | |
| | | | | | | | L0717: 1, H0497: 1, | | |
| | | | | | | | H0156: 1, H0575: 1, | | |
| | | | | | | | H0318: 1, S0049: 1, | | |
| | | | | | | | S0388: 1, H0267: 1, | | |
| | | | | | | | H0031: 1, H0553: 1, | | |
| | | | | | | | H0032: 1, H0623: 1, | | |
| | | | | | | | T0042: 1, L0638: 1, | | |
| | | | | | | | L0659: 1, L0783: 1, | | |
| | | | | | | | H0547: 1, H0684: 1, | | |
| | | | | | | | S0328: 1, H0436: 1, | | |
| | | | | | | | S0028: 1, L0740: 1, | | |
| | | | | | | | L0779: 1, L0755: 1, | | |
| | | | | | | | H0136: 1 and H0452: 1. | | |
| 296 | HUVGQ16 | 1163872 | 306 | 1-1089 | 1093 | Pro-2 to Pro-8, | AR061: 1, AR089: 0 | | |
| | | | | | | Pro-14 to Gly-19, | L0766: 8, L0769: 7, | | |
| | | | | | | Arg-33 to Ser-42, | L0774: 7, L0755: 7, | | |
| | | | | | | Arg-70 to Arg-77, | L0783: 6, L0747: 6, | | |
| | | | | | | Pro-121 to Asp-132, | H0624: 5, L0779: 5, | | |
| | | | | | | Ser-139 to Pro-152, | L0731: 5, H0484: 4, | | |
| | | | | | | Pro-163 to Pro-171, | H0592: 3, S3014: 3, | | |
| | | | | | | Arg-204 to Asp-216, | L0748: 3, L0751: 3, | | |
| | | | | | | Pro-266 to Ala-271, | L0750: 3, L0757: 3, | | |
| | | | | | | Pro-286 to Tyr-295, | H0550: 2, H0618: 2, | | |
| | | | | | | Ala-302 to Glu-310, | H0546: 2, H0545: 2, | | |
| | | | | | | Arg-327 to Arg-337, | H0050: 2, L0763: 2, | | |
| | | | | | | Arg-353 to Cys-358. | L0770: 2, L0761: 2, | | |
| | | | | | | | L0772: 2, L0764: 2, | | |
| | | | | | | | L0771: 2, L0773: 2, | | |
| | | | | | | | L0768: 2, L0375: 2, | | |
| | | | | | | | L0532: 2, H0690: 2, | | |
| | | | | | | | L0756: 2, H0686: 1, | | |
| | | | | | | | H0685: 1, H0483: 1, | | |
| | | | | | | | H0662: 1, S0420: 1, | | |
| | | | | | | | H0208: 1, S0046: 1, | | |
| | | | | | | | H0645: 1, H0392: 1, | | |
| | | | | | | | H0600: 1, H0586: 1, | | |
| | | | | | | | H0333: 1, H0427: 1, | | |
| | | | | | | | S0280: 1, H0253: 1, | | |
| | | | | | | | T0048: 1, H0327: 1, | | |
| | | | | | | | H0123: 1, H0024: 1, | | |
| | | | | | | | H0292: 1, H0688: 1, | | |
| | | | | | | | H0428: 1, H0674: 1, | | |
| | | | | | | | H0135: 1, H0623: 1, | | |
| | | | | | | | S0472: 1, S0210: 1, | | |
| | | | | | | | L0644: 1, L0649: 1, | | |
| | | | | | | | L0803: 1, L0775: 1, | | |
| | | | | | | | L0651: 1, L0378: 1, | | |
| | | | | | | | L0806: 1, L0807: 1, | | |
| | | | | | | | L0515: 1, L0512: 1, | | |
| | | | | | | | L0659: 1, L0663: 1, | | |
| | | | | | | | H0698: 1, H0659: 1, | | |
| | | | | | | | H0672: 1, H0521: 1, | | |
| | | | | | | | H0696: 1, S0037: 1, | | |
| | | | | | | | S0028: 1, S0206: 1, | | |
| | | | | | | | L0754: 1, L0749: 1, | | |
| | | | | | | | L0777: 1, L0758: 1 and | | |
| | | | | | | | H0707: 1. | | |
| | | 927445 | 726 | 2-1090 | 1513 | Pro-2 to Pro-9. | | | |
| 297 | HVANX08 | 1152273 | 307 | 3-767 | 1094 | Ser-17 to Gly-40, | AR051: 17, AR054: | | |
| | | | | | | Gly-53 to Gly-61, | 13, AR050: 9, AR061: | | |
| | | | | | | Ser-69 to Gly-74, | 2, AR089: 1 | | |
| | | | | | | Ser-80 to Ser-93, | L0754: 5, L0662: 3, | | |
| | | | | | | Gly-117 to Ile-128, | H0547: 3, H0659: 3, | | |
| | | | | | | Asn-175 to Trp-183, | S0242: 3, S0003: 2, | | |
| | | | | | | His-191 to Pro-196, | H0641: 2, L0653: 2, | | |
| | | | | | | Phe-222 to Ser-242, | H0658: 1, H0522: 2, | | |
| | | | | | | Gly-245 to Lys-255. | L0740: 2, H0171: 1, | | |
| | | | | | | | S6024: 1, S0418: 1, | | |
| | | | | | | | S0354: 1, L0717: 1, | | |
| | | | | | | | H0574: 1, H0596: 1, | | |
| | | | | | | | H0327: 1, H0266: 1, | | |
| | | | | | | | H0674: 1, H0591: 1, | | |
| | | | | | | | H0040: 1, H0634: 1, | | |
| | | | | | | | H0616: 1, H0063: 1, | | |
| | | | | | | | T0067: 1, H0647: 1, | | |
| | | | | | | | L0638: 1, L0641: 1, | | |
| | | | | | | | L0766: 1, L0790: 1, | | |
| | | | | | | | L0666: 1, H0520: 1, | | |
| | | | | | | | S0126: 1, S0328: 1, | | |
| | | | | | | | S0380: 1, H0696: 1, | | |
| | | | | | | | H0436: 1, L0753: 1, | | |
| | | | | | | | L0686: 1, S0434: 1, | | |
| | | | | | | | H0668: 1, S0196: 1, | | |
| | | | | | | | H0422: 1 and S0460: 1. | | |
| | | 887222 | 727 | 28-612 | 1514 | | | | |
| 298 | HWABF71 | 1226175 | 308 | 507-1475 | 1095 | Glu-8 to His-17, | AR089: 2, AR061: 1 | | |
| | | | | | | Ser-35 to Lys-43, | L0748: 2, L0785: 1, | | |
| | | | | | | Cys-51 to Asn-56, | S0222: 1, H0574: 1, | | |
| | | | | | | Arg-61 to Lys-66, | H0581: 1, L0109: 1, | | |
| | | | | | | Gly-72 to Lys-81, | H0052: 1, H0598: 1, | | |
| | | | | | | Gln-87 to Arg-97, | H0591: 1, L0763: 1, | | |
| | | | | | | Ile-126 to Gly-142, | L0766: 1, L0659: 1, | | |
| | | | | | | Pro-170 to Ala-177, | H0539: 1, H0436: 1, | | |
| | | | | | | Gln-210 to Ser-229, | L0740: 1, S0026: 1 and | | |
| | | | | | | Pro-234 to Ser-243, | H0543: 1. | | |
| | | | | | | Gly-248 to Thr-254, | | | |
| | | | | | | Cys-289 to Phe-296, | | | |
| | | | | | | Lys-304 to Asp-310, | | | |
| | | | | | | Arg-317 to His-323. | | | |
| | | 908612 | 728 | 2-883 | 1515 | Ser-6 to Lys-14, | | | |
| | | | | | | Cys-22 to Asn-27, | | | |
| | | | | | | Arg-32 to Lys-37, | | | |
| | | | | | | Gly-43 to Lys-52, | | | |
| | | | | | | Gln-58 to Arg-68. | | | |
| 299 | HWBBH02 | 1150687 | 309 | 2438-1230 | 1096 | Leu-3 to Gly-9, | AR089: 3, AR061: 1 | | |
| | | | | | | Thr-28 to Gly-33, | L0803: 4, L0779: 4, | | |
| | | | | | | Ser-36 to Asp-41, | H0486: 3, H0542: 3, | | |
| | | | | | | Ser-46 to Leu-52, | H0341: 2, L0157: 2, | | |
| | | | | | | Cys-104 to Gly-109, | L0766: 2, H0520: 2, | | |
| | | | | | | Gln-121 to Pro-133, | S0126: 2, H0436: 2, | | |
| | | | | | | Pro-160 to Lys-169, | L0754: 2, L0747: 2, | | |
| | | | | | | Phe-184 to Asn-189, | L0757: 2, H0445: 2, | | |
| | | | | | | Pro-214 to Thr-220, | S0276: 2, H0543: 2, | | |
| | | | | | | Asp-278 to Glu-284, | S6024: 1, S0218: 1, | | |
| | | | | | | Ser-291 to Ser-307, | H0664: 1, S0420: 1, | | |
| | | | | | | Ile-332 to Thr-333, | L0005: 1, S0376: 1, | | |
| | | | | | | Gln-346 to Ser-351, | S0360: 1, H0580: 1, | | |
| | | | | | | Pro-389 to Arg-403. | S0045: 1, S6026: 1, | | |
| | | | | | | | H0369: 1, H0333: 1, | | |
| | | | | | | | H0013: 1, L0471: 1, | | |
| | | | | | | | H0031: 1, S0036: 1, | | |
| | | | | | | | H0090: 1, H0551: 1, | | |
| | | | | | | | H0264: 1, T0041: 1, | | |
| | | | | | | | S0344: 1, S0422: 1, | | |
| | | | | | | | L0769: 1, L0761: 1, | | |
| | | | | | | | L0521: 1, L0662: 1, | | |
| | | | | | | | L0655: 1, L0783: 1, | | |
| | | | | | | | L0790: 1, L0532: 1, | | |
| | | | | | | | S0052: 1, H0519: 1, | | |
| | | | | | | | H0682: 1, H0672: 1, | | |
| | | | | | | | S0152: 1, H0522: 1, | | |
| | | | | | | | S3012: 1, S0028: 1, | | |
| | | | | | | | L0756: 1, L0777: 1, | | |
| | | | | | | | L0758: 1, L0591: 1, | | |
| | | | | | | | L0593: 1, S0026: 1, | | |
| | | | | | | | S0242: 1 and S0424: 1. | | |
| | | 919353 | 729 | 150-899 | 1516 | Ser-21 to Thr-28, | | | |
| | | | | | | Ser-55 to Asn-64, | | | |
| | | | | | | Ile-68 to Pro-74. | | | |
| 300 | HWHHR95 | 1154821 | 300 | 1-591 | 1097 | Pro-1 to Lys-7, | AR089: 0, AR061: 0 | | |
| | | | | | | His-21 to Tyr-29, | L0745: 2, H0619: 1, | | |
| | | | | | | Phe-85 to Thr-91, | H0586: 1, L0771: 1, | | |
| | | | | | | Lys-98 to Gln-103, | L0773: 1, L0803: 1, | | |
| | | | | | | Gln-150 to Ala-167. | L0665: 1 and L0743: 1. | | |
| | | 693970 | 730 | 1-549 | 1517 | Phe-81 to Thr-87, | | | |
| | | | | | | Lys-94 to Gln-99. | | | |
| 301 | HWLDC02 | 1152276 | 311 | 3-407 | 1098 | His-29 to Gly-41, | AR089: 2, AR061: 1 | | |
| | | | | | | His-57 to Gly-69, | H0459: 1, S0045: 1, | | |
| | | | | | | His-85 to Lys-98, | T0010: 1, L0642: 1, | | |
| | | | | | | Arg-110 to Gly-124. | S0374: 1, L0594: 1 and | | |
| | | | | | | H0136: 1. | | | |
| | | 909247 | 731 | 3-428 | 1518 | Thr-1 to Tyr-6, | | | |
| | | | | | | His-28 to Gly-40, | | | |
| | | | | | | His-56 to Gly-68, | | | |
| | | | | | | His-84 to Gln-91. | | | |
| 302 | HWLEH05 | 12072730 | 312 | 1-633 | 1099 | Glu-1 to Gly-6, | AR089: 8, AR061: 2 | | |
| | | | | | | Lys-17 to Leu-27, | S0354: 3 and S0044: 1. | | |
| | | | | | | Thr-51 to Glu-57, | | | |
| | | | | | | Thr-79 to Gly-90, | | | |
| | | | | | | His-106 to Cys-117, | | | |
| | | | | | | Phe-121 to Asn-126, | | | |
| | | | | | | His-162 to Glu-169. | | | |
| | | 908239 | 732 | 1-633 | 1519 | Glu-1 to Gly-6, | | | |
| | | | | | | Lys-17 to Leu-27, | | | |
| | | | | | | Thr-51 to Glu-57, | | | |
| | | | | | | Thr-79 to Gly-90, | | | |
| | | | | | | His-106 to Cys-117, | | | |
| | | | | | | Phe-121 to Asn-126, | | | |
| | | | | | | His-162 to Glu-169. | | | |
| 303 | HWLFG83 | 1173697 | 313 | 146-1294 | 1100 | Thr-1 to Val-9, | AR089: 1, AR061: 0 | | |
| | | | | | | Gly-17 to Tyr-24, | H0457: 6, L0766: 6, | | |
| | | | | | | Glu-40 to Asp-51, | L0777: 4, S0354: 3, | | |
| | | | | | | Gly-89 to Leu-95, | H0038: 3, L0747: 3, | | |
| | | | | | | Ala-140 to Gly-149, | L0588: 3, L0581: 3, | | |
| | | | | | | Pro-166 to Asn-172, | H0653: 3, H0265: 2, | | |
| | | | | | | Ser-185 to Glu-196, | H0013: 2, H0591: 2, | | |
| | | | | | | Arg-247 to Ser-263, | H0616: 2, S0002: 2, | | |
| | | | | | | Glu-282 to Asn-290, | L0770: 2, L0775: 2, | | |
| | | | | | | Arg-297 to Asp-317, | H0670: 2, L0748: 2, | | |
| | | | | | | Val-331 to Glu-345, | L0740: 2, L0749: 2, | | |
| | | | | | | Leu-369 to Pro-382. | H0543: 2, H0656: 1, | | |
| | | | | | | | H0341: 1, S0212: 1, | | |
| | | | | | | | H0402: 1, S0376: 1, | | |
| | | | | | | | H0619: 1, H0645: 1, | | |
| | | | | | | | H0411: 1, S0222: 1, | | |
| | | | | | | | H0370: 1, H0392: 1, | | |
| | | | | | | | H0643: 1, H0632: 1, | | |
| | | | | | | | H0156: 1, H0599: 1, | | |
| | | | | | | | H0098: 1, S0010: 1, | | |
| | | | | | | | S0665: 1, H0581: 1, | | |
| | | | | | | | T0010: 1, L0040: 1, | | |
| | | | | | | | H0545: 1, L0471: 1, | | |
| | | | | | | | H0355: 1, H0179: 1, | | |
| | | | | | | | S0316: 1, S0003: 1, | | |
| | | | | | | | S0214: 1, H0615: 1, | | |
| | | | | | | | H0031: 1, H0035: 1, | | |
| | | | | | | | H0068: 1, H0135: 1, | | |
| | | | | | | | H0634: 1, H0063: 1, | | |
| | | | | | | | H0551: 1, H0494: 1, | | |
| | | | | | | | H0509: 1, S0144: 1, | | |
| | | | | | | | H0529: 1, L0520: 1, | | |
| | | | | | | | L0769: 1, L0761: 1, | | |
| | | | | | | | L0764: 1, L0530: 1, | | |
| | | | | | | | L0666: 1, L0663: 1, | | |
| | | | | | | | L0664: 1, L0665: 1, | | |
| | | | | | | | H0144: 1, S0126: 1, | | |
| | | | | | | | H0435: 1, H0658: 1, | | |
| | | | | | | | H0648: 1, H0521: 1, | | |
| | | | | | | | H0436: 1, S3012: 1, | | |
| | | | | | | | S3014: 1, L0744: 1, | | |
| | | | | | | | L0439: 1, L0786: 1, | | |
| | | | | | | | L0780: 1, L0752: 1, | | |
| | | | | | | | L0755: 1, H0343: 1, | | |
| | | | | | | | S0436: 1, L0591: 1, | | |
| | | | | | | | L0366: 1, H0667: 1 and | | |
| | | | | | | | S0242: 1. | | |
| | | 924844 | 733 | 101-649 | 1520 | Thr-1 to Val-9, | | | |
| | | | | | | Glu-17 to Tyr-24, | | | |
| | | | | | | Gln-40 to Asp-51, | | | |
| | | | | | | Gly-89 to Leu-95, | | | |
| | | | | | | Ala-140 to Gly-149. | | | |
| 304 | HWLHJ68 | 1175380 | 314 | 78-410 | 1101 | Cys-17 to Lys-31. | AR089: 3, AR061: 2 | | |
| | | | | | | | H0651: 709, L0799: 5, | | |
| | | | | | | | L0754: 5, L0756: 3, | | |
| | | | | | | | L0803: 2, L0779: 2, | | |
| | | | | | | | L0759: 2, S0354: 1, | | |
| | | | | | | | H0643: 1, H0013: 1, | | |
| | | | | | | | H0194: 1, H0545: 1, | | |
| | | | | | | | H0373: 1, H0252: 1, | | |
| | | | | | | | H0615: 1, H0316: 1, | | |
| | | | | | | | H0040: 1, H0641: 1, | | |
| | | | | | | | H0647: 1, S0422: 1, | | |
| | | | | | | | L0598: 1, L0369: 1, | | |
| | | | | | | | L0520: 1, L0762: 1, | | |
| | | | | | | | L0649: 1, L0804: 1, | | |
| | | | | | | | L0527: 1, L0656: 1, | | |
| | | | | | | | H0144: 1, H0702: 1, | | |
| | | | | | | | H0547: 1, H0555: 1, | | |
| | | | | | | | H0436: 1, S0028: 1, | | |
| | | | | | | | L0746: 1, L0750: 1, | | |
| | | | | | | | L0777: 1, L0780: 1, | | |
| | | | | | | | L0752: 1 and L0686: 1. | | |
| | | 957834 | 734 | 78-410 | 1521 | Cys-17 to Lys-31. | | | |
| 305 | HWLUO25 | 1152281 | 315 | 3-1052 | 1102 | Lys-22 to Asn-28, | AR061: 3, AR089: 2 | | |
| | | | | | | Leu-36 to Glu-41, | L0759: 7, H0413: 4, | | |
| | | | | | | Pro-50 to Ser-55, | L0803: 3, L0748: 3, | | |
| | | | | | | Thr-93 to Lys-102, | H0662: 2, L0750: 2, | | |
| | | | | | | Glu-112 to Asp-118, | L0756: 2, L0588: 2, | | |
| | | | | | | Pro-150 to Gly-156, | L0608: 2, S0342: 1, | | |
| | | | | | | Leu-175 to Ser-181, | S0360: 1, L0717: 1, | | |
| | | | | | | Phe-186 to Leu-192, | S0336: 1, S0386: 1, | | |
| | | | | | | Pro-205 to Thr-214, | L0770: 1, L0804: 1, | | |
| | | | | | | Ser-224 to Gln-235, | L0650: 1, L0775: 1, | | |
| | | | | | | Thr-272 to Ala-277, | L0655: 1, L0790: 1, | | |
| | | | | | | His-318 to Asp-326. | H0144: 1, L0438: 1, | | |
| | | | | | | | S0328: 1, S0332: 1, | | |
| | | | | | | | L0439: 1, L0754: 1 and | | |
| | | | | | | | L0779: 1. | | |
| | | 908693 | 735 | 137-1033 | 1522 | Gly-22 to Trp-27, | | | |
| | | | | | | Lys-33 to Val-38, | | | |
| | | | | | | Ser-40 to Gln-47, | | | |
| | | | | | | Glu-61 to Asp-67, | | | |
| | | | | | | Pro-99 to Gly-105, | | | |
| | | | | | | Leu-124 to Ser-130, | | | |
| | | | | | | Phe-135 to Leu-141, | | | |
| | | | | | | Pro-154 to Thr-163, | | | |
| | | | | | | Ser-173 to Gln-184, | | | |
| | | | | | | Thr-221 to Ala-226, | | | |
| | | | | | | His-267 to Asp-275. | | | |
| 306 | HYAAO40 | 1154823 | 316 | 2-1000 | 1103 | Pro-1 to Glu-18, | AR061: 0, AR089: 0 | | |
| | | | | | | Gln-28 to Thr-33, | L0769: 7, L0743: 4, | | |
| | | | | | | Thr-40 to Leu-55, | L0762: 2, L0770: 2, | | |
| | | | | | | Ser-66 to Tyr-74, | L0766: 2, L0731: 2, | | |
| | | | | | | Met-82 to Leu-93, | H0583: 1, H0661: 1, | | |
| | | | | | | Val-107 to Pro-132, | L0639: 1, L0783: 1, | | |
| | | | | | | Gln-152 to Tyr-161, | L0666: 1, L0751: 1, | | |
| | | | | | | Pro-192 to Ala-203, | L0747: 1, L0779: 1, | | |
| | | | | | | Lys-205 to Lys-240, | L0777: 1 and L0758: 1. | | |
| | | | | | | Thr-246 to Thr-252, | | | |
| | | | | | | Pro-254 to Ser-259, | | | |
| | | | | | | Ser-289 to Ser-294, | | | |
| | | | | | | Arg-298 to Lys-310, | | | |
| | | | | | | Ser-317 to Asn-326, | | | |
| | | | | | | Cys-328 to Arg-333. | | | |
| | | 710802 | 736 | 320-715 | 1523 | Ala-2 to Gly-9, | | | |
| | | | | | | Gln-42 to Tyr-51. | | | |
| 307 | HYACI56 | 1154824 | 317 | 269-1024 | 1104 | Trp-1 to Gly-11, | AR089: 12, AR061: 6 | | |
| | | | | | | Ser-27 to Pro-36, | L0754: 7, L-0748: 4, | | |
| | | | | | | Pro-38 to Ala-45, | L0771: 3, L0740: 3, | | |
| | | | | | | Gly-48 to Lys-57, | L0750: 3, L0600: 3, | | |
| | | | | | | Phe-72 to Tyr-77, | L0717: 2, H0618: 2, | | |
| | | | | | | Asn-79 to Ser-93, | H0046: 2, S0422: 2, | | |
| | | | | | | Ser-117 to Tyr-122, | L0763: 2, L0637: 2, | | |
| | | | | | | His-144 to Leu-150, | L0794: 2, L0659: 2, | | |
| | | | | | | Cys-186 to Asp-194, | L0755: 2, T0002: 1, | | |
| | | | | | | Gln-212 to Pro-218, | H0583: 1, H0671: 1, | | |
| | | | | | | Glu-235 to Gln-244. | S0354: 1, S6016: 1, | | |
| | | | | | | | L0021: 1, H0052: 1, | | |
| | | | | | | | S0051: 1, H0083: 1, | | |
| | | | | | | | H0553: 1, H0561: 1, | | |
| | | | | | | | L0639: 1, L0646: 1, | | |
| | | | | | | | L0649: 1, L0375: 1, | | |
| | | | | | | | L0655: 1, L0545: 1, | | |
| | | | | | | | L0647: 1, L0664: 1, | | |
| | | | | | | | L0665: 1, H0670: 1, | | |
| | | | | | | | H0672: 1, S0378: 1, | | |
| | | | | | | | H0696: 1, L0439: 1, | | |
| | | | | | | | L0751: 1, L0752: 1, | | |
| | | | | | | | L0758: 1, L0759: 1, | | |
| | | | | | | | L0596: 1, L0608: 1 and | | |
| | | | | | | | H0423: 1. | | |
| | | 926867 | 737 | 999-244 | 1524 | Trp-1 to Gly-11, | | | |
| | | | | | | Ser-27 to Pro-36, | | | |
| | | | | | | Pro-38 to Ala-45, | | | |
| | | | | | | Gly-48 to Lys-57, | | | |
| | | | | | | Phe-72 to Tyr-77, | | | |
| | | | | | | Asn-79 to Ser-93, | | | |
| | | | | | | Ser-117 to Tyr-122, | | | |
| | | | | | | His-144 to Leu-150, | | | |
| | | | | | | Cys-186 to Asp-194, | | | |
| | | | | | | Gln-212 to Pro-218, | | | |
| | | | | | | Glu-235 to Gln-244. | | | |
| 308 | HE8UG13 | 1178332 | 318 | 2-421 | 1105 | Arg-8 to Glu-13, | AR061: 1, AR089: 0 | | |
| | | | | | | Glu-28 to Leu-39, | L0766: 21, L0754: 7, | | |
| | | | | | | Ser-85 to Tyr-92, | L0745: 6, L0747: 6, | | |
| | | | | | | Gly-97 to Ser-109. | L0758: 6, L0761: 4, | | |
| | | | | | | | L0771: 4, L0776: 4, | | |
| | | | | | | | L0659: 4, L0750: 4, | | |
| | | | | | | | L0362: 4, S0360: 3, | | |
| | | | | | | | H0013: 3, H0421: 3, | | |
| | | | | | | | L0805: 3, L0518: 3, | | |
| | | | | | | | H0521: 3, L0748: 3, | | |
| | | | | | | | L0751: 3, L0779: 3, | | |
| | | | | | | | L0777: 3, H0229: 2, | | |
| | | | | | | | H0641: 2, L0789: 2, | | |
| | | | | | | | L0666: 2, H0539: 2, | | |
| | | | | | | | L0752: 2, L0731: 2, | | |
| | | | | | | | L0759: 2, H0423: 2, | | |
| | | | | | | | H0171: 1, H0587: 1, | | |
| | | | | | | | H0485: 1, H0486: 1, | | |
| | | | | | | | H0251: 1, H0023: 1, | | |
| | | | | | | | H0644: 1, H0591: 1, | | |
| | | | | | | | H0038: 1, H0413: 1, | | |
| | | | | | | | H0560: 1, H0538: 1, | | |
| | | | | | | | L0598: 1, H0529: 1, | | |
| | | | | | | | L0630: 1, L0646: 1, | | |
| | | | | | | | L0764: 1, L0784: 1, | | |
| | | | | | | | L0655: 1, L0783: 1, | | |
| | | | | | | | L0367: 1, L0664: 1, | | |
| | | | | | | | H0144: 1, S0378: 1, | | |
| | | | | | | | H0696: 1, L0439: 1, | | |
| | | | | | | | L0740: 1, L0755: 1 and | | |
| | | | | | | | L0596: 1. | | |
| | | 875513 | 738 | 2-421 | 1525 | Arg-8 to Glu-13, | | | |
| | | | | | | Glu-28 to Leu-39, | | | |
| | | | | | | Ser-85 to Tyr-92, | | | |
| | | | | | | Gly-97 to Ser-109. | | | |
| 309 | HHEUC33 | 1151486 | 319 | 3-719 | 1106 | Asp-35 to Leu-40, | AR050: 17, AR054: | | |
| | | | | | | Lys-64 to Tyr-85, | 16, AR089: 15, AR051: | | |
| | | | | | | Gln-99 to Glu-111, | 13, AR061: 3 | | |
| | | | | | | Thr-131 to Gln-137, | L0747: 7, L0518: 4, | | |
| | | | | | | Phe-160 to Thr-177, | H0046: 3, L0666: 3, | | |
| | | | | | | Arg-199 to Thr-213. | L0755: 3, H0181: 2, | | |
| | | | | | | | H0673: 2, L0769: 2, | | |
| | | | | | | | L0783: 2, H0666: 2, | | |
| | | | | | | | S0330: 2, L0748: 2, | | |
| | | | | | | | L0740: 2, L0749: 2, | | |
| | | | | | | | L0779: 2, L0758: 2, | | |
| | | | | | | | H0543: 2, H0484: 1, | | |
| | | | | | | | H0015: 1, S0388: 1, | | |
| | | | | | | | H0166: 1, L0456: 1, | | |
| | | | | | | | H0551: 1, S0440: 1, | | |
| | | | | | | | L0646: 1, L0764: 1, | | |
| | | | | | | | L0771: 1, L0662: 1, | | |
| | | | | | | | L0766: 1, L0650: 1, | | |
| | | | | | | | L0375: 1, L0653: 1, | | |
| | | | | | | | L0655: 1, L0658: 1, | | |
| | | | | | | | L0540: 1, L0782: 1, | | |
| | | | | | | | L0809: 1, L0545: 1, | | |
| | | | | | | | L0663: 1, H0519: 1, | | |
| | | | | | | | H0689: 1, S0152: 1, | | |
| | | | | | | | H0694: 1, H0478: 1, | | |
| | | | | | | | H0627: 1, L0750: 1, | | |
| | | | | | | | L0752: 1, S0260: 1 and | | |
| | | | | | | | H0423: 1. | | |
| | | 892371 | 739 | 2-709 | 1526 | Asp-32 to Leu-37, | | | |
| | | | | | | Lys-61 to Tyr-82, | | | |
| | | | | | | Gln-96 to Glu-108, | | | |
| | | | | | | Thr-128 to Gln-134, | | | |
| | | | | | | Phe-157 to Thr-174, | | | |
| | | | | | | Arg-196 to Thr-210, | | | |
| | | | | | | Met-217 to Arg-226. | | | |
| | | 899640 | 740 | 379-1134 | 1527 | Arg-9 to Arg-16, | | | |
| | | | | | | Asp-48 to Leu-53, | | | |
| | | | | | | Lys-77 to Tyr-98, | | | |
| | | | | | | Gln-112 to Glu-124, | | | |
| | | | | | | Thr-144 to Gln-150, | | | |
| | | | | | | Phe-173 to His-187. | | | |
| 310 | HDQEG93 | 955676 | 320 | 133-1044 | 1107 | Pro-25 to Ser-33, | AR061: 6, AR089: 2 | | |
| | | | | | | Gln-113 to Ser-122, | S0356: 2, S0354: 1, | | |
| | | | | | | Trp-147 to Tyr-158, | H0370: 1, H0013: 1, | | |
| | | | | | | Pro-189 to Ala-199, | H0494: 1, L0659: 1, | | |
| | | | | | | His-202 to Gly-210, | H0689: 1, H0521: 1 and | | |
| | | | | | | Pro-224 to Gly-229, | L0596: 1. | | |
| | | | | | | Glu-234 to Gly-3239. | | | |
| 311 | HBCAS64 | 1152484 | 321 | 1‥516 | 1108 | Ser-23 to Arg-36, | AR061: 3, AR089: 1 | | |
| | | | | | | Pro-39 to Glu-44, | L0766: 3, L0649: 2, | | |
| | | | | | | Gly-60 to Ile-65, | L0805: 2, L0777: 2, | | |
| | | | | | | Leu-115 to Arg-124, | L0758: 2, L0588: 2, | | |
| | | | | | | Glu-148 to Asp-171. | H0638: 1, H0580: 1, | | |
| | | | | | | | H0351: 1, H0370: 1, | | |
| | | | | | | | H0635: 1, S0474: 1, | | |
| | | | | | | | H0052: 1, H0009: 1, | | |
| | | | | | | | H0564: 1, S0051: 1, | | |
| | | | | | | | L0055: 1, H0634: 1, | | |
| | | | | | | | H0100: 1, T0042: 1, | | |
| | | | | | | | S0002: 1, L0776: 1, | | |
| | | | | | | | H0547: 1, H0436: 1 and | | |
| | | | | | | L0754: 1. | | | |
| | | 522712 | 741 | 135-629 | 1528 | | | | |
| 312 | HLWAT35 | 742384 | 322 | 34-309 | 1109 | Pro-2 to Trp-18, | AR089: 2 AR061: 2, | | |
| | | | | | | Arg-36 to Cys-48. | H0521: 2, H0638: 1, | | |
| | | | | | | | H0580: 1, H0618: 1, | | |
| | | | | | | | H0553: 1, H0628: 1, | | |
| | | | | | | | H0560: 1, L0763: 1, | | |
| | | | | | | | L0766: 1, H0519: 1, | | |
| | | | | | | | S0152: 1, H0555: 1, | | |
| | | | | | | | L0595: 1 and H0665: 1. | | |
| 313 | HPLBB60 | 1224875 | 323 | 2-298 | 1110 | Pro-8 to Pro-16. | AR089: 0, AR061: 0 | | |
| | | 742385 | 742 | 2-298 | 1529 | Pro-8 to Pro-16. | | | |
| 314 | HTPHI43 | 907888 | 324 | 313-1044 | 1111 | Gly-19 to Ser-25, | AR089: 6, AR061: 3 | | |
| | | | | | | Arg-39 to Glu-47, | L0777: 8, L0731: 7, | | |
| | | | | | | Arg-66 to Thr-73. | H0411: 5, L0803: 5, | | |
| | | | | | | | L0779: 5, L0740: 4, | | |
| | | | | | | | L0754: 4, L0752: 4, | | |
| | | | | | | | S0358: 3, L0520: 3, | | |
| | | | | | | | L0766: 3, L0792: 3, | | |
| | | | | | | | L0666: 3, L0758: 3, | | |
| | | | | | | | S0360: 2, L0662: 2, | | |
| | | | | | | | L0794: 2, L0809: 2, | | |
| | | | | | | | S0126: 2, L0756: 2, | | |
| | | | | | | | S0134: 1, L0002: 1, | | |
| | | | | | | | H0663: 1, L0005: 1, | | |
| | | | | | | | S0376: 1, H0675: 1, | | |
| | | | | | | | H0586: 1, H0486: 1, | | |
| | | | | | | | H0590: 1, H0581: 1, | | |
| | | | | | | | H0421: 1, L0738: 1, | | |
| | | | | | | | L0471: 1, H0373: 1, | | |
| | | | | | | | H0266: 1, H0428: 1, | | |
| | | | | | | | H0622: 1, L0055: 1, | | |
| | | | | | | | H0032: 1, H0598: 1, | | |
| | | | | | | | H0040: 1, H0413: 1, | | |
| | | | | | | | T0042: 1, H0625: 1, | | |
| | | | | | | | S0002: 1, L0763: 1, | | |
| | | | | | | | L0770: 1, L0372: 1, | | |
| | | | | | | | L0646: 1, L0774: 1, | | |
| | | | | | | | L0806: 1, L0655: 1, | | |
| | | | | | | | L0657: 1, L0542: 1, | | |
| | | | | | | | L0367: 1, L0790: 1, | | |
| | | | | | | | L0791: 1, L0793: 1, | | |
| | | | | | | | L0663: 1, H0520: 1, | | |
| | | | | | | | H0521: 1, H0522: 1, | | |
| | | | | | | | H0436: 1, L0747: 1, | | |
| | | | | | | | L0750: 1, L0759: 1, | | |
| | | | | | | | S0031: 1, H0595: 1 and | | |
| | | | | | | | H0422: 1. | | |
| 315 | HCEGY46 | 1119278 | 325 | 47-616 | 1112 | Ala-5 to Leu-19, | AR050: 16, AR089: 2, | | |
| | | | | | | Gln-62 to His-71, | AR061: 1 | | |
| | | | | | | Pro-84 to Ser-104, | H0052: 2, L0787: 1 | | |
| | | | | | | Ser-115 to Met-121, | and L0758: 1. | | |
| | | | | | | Tyr-136 to His-150, | | | |
| | | | | | | Pro-162 to Gly-169. | | | |
| | | 889474 | 743 | 47-616 | 1530 | Ala-5 to Leu-19, | | | |
| | | | | | | Gln-62 to His-71, | | | |
| | | | | | | Pro-84 to Ser-104, | | | |
| | | | | | | Ser-115 to Met-121, | | | |
| | | | | | | Tyr-136 to His-150, | | | |
| | | | | | | Pro-162 to Gly-169. | | | |
| 316 | HE2LQ16 | 1151472 | 326 | 75-677 | 1113 | Pro-4 to Ala-15, | AR089: 8, AR061: 5 | | |
| | | | | | | Ser-36 to Ser-43, | H0624: 1, H0052: 1, | | |
| | | | | | | Lys-75 to Ser-86, | H0288: 1, L0455: 1, | | |
| | | | | | | Gly-95 top Arg-100, | L0769: 1, L0809: 1, | | |
| | | | | | | Ala-131 to Ser-137, | L0789: 1, L0438: 1, | | |
| | | | | | | Pro-161 to Glu-168. | H0682: 1, L0439: 1, | | |
| | | | | | | | L0745: 1, L0753: 1 and | | |
| | | | | | | | L0759: 1. | | |
| | | 917706 | 744 | 424-1386 | 1531 | | | | |
| 317 | HHATX12 | 1162647 | 327 | 1-783 | 1114 | Pro-128 to Lys-134, | AR089: 18, AR061: 7 | | |
| | | | | | | Lys-157 to Phe-163, | L0794: 5, L0593: 2, | | |
| | | | | | | Pro-166 to Lys-171, | S0418: 1, H0560: 1, | | |
| | | | | | | Arg-209, to Asp-217, | S0422: 1, L0768: 1, | | |
| | | | | | | Val-244 to Lys-261. | L0775: 1 and L0789: 1. | | |
| | | 969455 | 745 | 1-750 | 1532 | Pro-117 to Met-126. | | | |
| 318 | HLJEB78 | 1204705 | 328 | 269-832 | 1115 | Cys-73 to Gln-80, | AR089: 2, AR061: 2 | | |
| | | | | | | Thr-115 to Lys-123, | L0756: 4, L0596: 4, | | |
| | | | | | | Phe-141 to Arg-149, | H0542: 3, H0423: 3, | | |
| | | | | | | Ile-180 to Gln-188. | H0556: 2, S6024: 2, | | |
| | | | | | | | H0156: 2, H0644: 2, | | |
| | | | | | | | L0646: 2, L0662: 2, | | |
| | | | | | | | L0794: 2, S0126: 2, | | |
| | | | | | | | S0152: 2, H0543: 2, | | |
| | | | | | | | H0170: 1, T0049: 1, | | |
| | | | | | | | H0656: 1, S0376: 1, | | |
| | | | | | | | S0360: 1, H0411: 1, | | |
| | | | | | | | H0592: 1, H0486: 1, | | |
| | | | | | | | H0013: 1, H0318: 1, | | |
| | | | | | | | H0251: 1, H0375: 1, | | |
| | | | | | | | S6028: 1, H0266: 1, | | |
| | | | | | | | H0090: 1, H0591: 1, | | |
| | | | | | | | H0551: 1, L0564: 1, | | |
| | | | | | | | T0042: 1, H0560: 1, | | |
| | | | | | | | H0625: 1, H0130: 1, | | |
| | | | | | | | H0641: 1, H0633: 1, | | |
| | | | | | | | L0761: 1, L0800: 1, | | |
| | | | | | | | L0764: 1, L0766: 1, | | |
| | | | | | | | L0803: 1, L0804: 1, | | |
| | | | | | | | L0774: 1, L0775: 1, | | |
| | | | | | | | L0805: 1, L0789: 1, | | |
| | | | | | | | L0790: 1, L0666: 1, | | |
| | | | | | | | L0665: 1, H0520: 1, | | |
| | | | | | | | H0435: 1, S0330: 1, | | |
| | | | | | | | H0518: 1, H0521: 1, | | |
| | | | | | | | L0748: 1, L0754: 1, | | |
| | | | | | | | L0779: 1, L0758: 1, | | |
| | | | | | | | L0593: 1, S0106: 1, | | |
| | | | | | | | S0026: 1, H0136: 1, | | |
| | | | | | | | S0192: 1, S0276: 1, | | |
| | | | | | | | H0422: 1, L0697: 1 and | | |
| | | | | | | | H0506: 1. | | |
| | | 773242 | 746 | 212-466 | 1533 | | | | |
| 319 | HODAC03 | 1228356 | 329 | 30-1889 | 1116 | His-1 to Gly-12, | AR061: 12, AR089: 8 | | |
| | | | | | | Lys-98 to Ile-105, | S0045: 1, S0132: 1, | | |
| | | | | | | Pro-177 to Ser-182, | H0267: 1, S0250: 1, | | |
| | | | | | | Pro-184 to Gly-201, | H0328: 1, H0551: 1, | | |
| | | | | | | Pro-204 to Arg-211, | L0595: 1 and L0601: 1. | | |
| | | | | | | Asn-239 to Ser-246, | | | |
| | | | | | | Arg-252 to Ala-259, | | | |
| | | | | | | Lys-285 to Leu-292, | | | |
| | | | | | | Lys-313 to Glu-322, | | | |
| | | | | | | Pro-405 to Ala-411, | | | |
| | | | | | | Leu-517 to Phe-522, | | | |
| | | | | | | Asn-524 to Lys-530. | | | |
| | | 925324 | 747 | 3-143 | 1534 | | | | |
| 320 | HOHAO92 | 712543 | 330 | 3-578 | 1117 | Lys-27 to Leu-34, | AR089: 0, AR061: 0 | | |
| | | | | | | Lys-55 to Glu-64. | S0045: 1, S0132: 1, | | |
| | | | | | | | H0267: 1, S0250: 1, | | |
| | | | | | | | H0328: 1, H0551: 1, | | |
| | | | | | | | L0595: 1 and L0601: 1. | | |
| 321 | HSDJE71 | 1193049 | 331 | 69-1181 | 1118 | Asp-26 to Tyr-40, | AR061: 4, AR089: 3 | | |
| | | | | | | Glu-43 to Ser-53, | L0794: 6, L0438: 4, | | |
| | | | | | | Val-66 to Phe-73, | L0758: 4, H0656: 3, | | |
| | | | | | | Lys-90 to Ile-98, | L0766: 3, L0748: 3, | | |
| | | | | | | Gly-121 to Gly-126, | L0747: 3, L0753: 3, | | |
| | | | | | | Thr-140 to Pro-146, | L0731: 3, H0662: 2, | | |
| | | | | | | Met-241 to Gly-246, | H0013: 2, H0529: 2, | | |
| | | | | | | Lys-258 to Leu-264, | L0655: 2, H0659: 2, | | |
| | | | | | | Phe-299 to Tyr-309, | L0439: 2, L0751: 2, | | |
| | | | | | | Lys-321 to Asn-330. | L0779: 2, L0588: 2, | | |
| | | | | | | | H0422: 2, L0785: 1, | | |
| | | | | | | | S0420: 1, H0599: 1, | | |
| | | | | | | | S0010: 1, H0327: 1, | | |
| | | | | | | | H0024: 1, H0051: 1, | | |
| | | | | | | | H0083: 1, L0194: 1, | | |
| | | | | | | | L0055: 1, H0673: 1, | | |
| | | | | | | | H0038: 1, H0551: 1, | | |
| | | | | | | | H0561: 1, S0002: 1, | | |
| | | | | | | | L0770: 1, L0761: 1, | | |
| | | | | | | | L0764: 1, L0768: 1, | | |
| | | | | | | | L0774: 1, L0775: 1, | | |
| | | | | | | | L0806: 1, L0659: 1, | | |
| | | | | | | | L0519: 1, L0666: 1, | | |
| | | | | | | | S0126: 1, H0435: 1, | | |
| | | | | | | | S0330: 1, S0380: 1, | | |
| | | | | | | | S3014: 1, S0260: 1, | | |
| | | | | | | | L0592: 1, L0485: 1 and | | |
| | | | | | | | L0362: 1. | | |
| | | 960622 | 748 | 2-976 | 1535 | Asp-48 to Tyr-62, | | | |
| | | | | | | Glu-65 to Ser-75, | | | |
| | | | | | | Val-88 to Phe-95, | | | |
| | | | | | | Lys-112 to Ile-120, | | | |
| | | | | | | Gly-143 to Gly-148, | | | |
| | | | | | | Thr-162 to Pro-168, | | | |
| | | | | | | Met-263 to Gly-268, | | | |
| | | | | | | Lys-280 to Ile-287, | | | |
| | | | | | | Gln-296 to Phe-306. | | | |
| 322 | HSYAM42 | 1216570 | 332 | 3-515 | 1119 | Leu-68 to Phe-73, | AR061: 1, AR089: 0 | | |
| | | | | | | Asn-75 to Val-80, | L0439: 12, H0052: 11, | | |
| | | | | | | Arg-119 to Asn-126, | H0556: 10, H0046: 10, | | |
| | | | | | | Thr-142 to Ile-147, | L0740: 10, L0759: 8, | | |
| | | | | | | Val-154 to Gln-163. | S0222: 7, H0599: 7, | | |
| | | | | | | | H0521: 7, L0731: 7, | | |
| | | | | | | | S0278: 6, S0049: 6, | | |
| | | | | | | | H0617: 6, H0144: 6, | | |
| | | | | | | | L0741: 6, L0748: 6, | | |
| | | | | | | | H0620: 5, H0266: 5, | | |
| | | | | | | | H0494: 5, L0438: 5, | | |
| | | | | | | | L0777: 5, L0758: 5, | | |
| | | | | | | | H0341: 4, S0354: 4, | | |
| | | | | | | | S0010: 4, H0050: 4, | | |
| | | | | | | | L0163: 4, H0040: 4, | | |
| | | | | | | | H0551: 4, S0002: 4, | | |
| | | | | | | | H0529: 4, L0794: 4, | | |
| | | | | | | | S0152: 4, S0136: 4, | | |
| | | | | | | | L0742: 4, L0743: 4, | | |
| | | | | | | | L0751: 4, L0754: 4, | | |
| | | | | | | | S0418: 3, H0590: 3, | | |
| | | | | | | | H0618: 3, S0051: 3, | | |
| | | | | | | | T0010: 3, S6028: 3, | | |
| | | | | | | | S0003: 3, S0150: 3, | | |
| | | | | | | | S0144: 3, L0766: 3, | | |
| | | | | | | | L0804: 3, L0663: 3, | | |
| | | | | | | | S0374: 3, H0660: 3, | | |
| | | | | | | | S0330: 3, S0037: 3, | | |
| | | | | | | | L0752: 3, L0601: 3, | | |
| | | | | | | | H0657: 2, H0656: 2, | | |
| | | | | | | | S0212: 2, H0550: 2, | | |
| | | | | | | | H0333: 2, H0427: 2, | | |
| | | | | | | | H0042: 2, H0575: 2, | | |
| | | | | | | | H0581: 2, H0421: 2, | | |
| | | | | | | | H0457: 2, H0041: 2, | | |
| | | | | | | | H0024: 2, T0006: 2, | | |
| | | | | | | | S0364: 2, H0124: 2, | | |
| | | | | | | | S0366: 2, S0036: 2, | | |
| | | | | | | | H0135: 2, L0764: 2, | | |
| | | | | | | | L0662: 2, L0768: 2, | | |
| | | | | | | | L0775: 2, L0809: 2, | | |
| | | | | | | | L0789: 2, L0753: 2, | | |
| | | | | | | | L0757: 2, L0584: 2, | | |
| | | | | | | | L0589: 2, L0591: 2, | | |
| | | | | | | | L0485: 2, L0599: 2, | | |
| | | | | | | | L0595: 2, L0362: 2, | | |
| | | | | | | | H0265: 1, S0040: 1, | | |
| | | | | | | | T0049: 1, H0583: 1, | | |
| | | | | | | | H0650: 1, S0282: 1, | | |
| | | | | | | | H0663: 1, H0638: 1, | | |
| | | | | | | | S0420: 1, L0617: 1, | | |
| | | | | | | | S0360: 1, S0408: 1, | | |
| | | | | | | | H0637: 1, L0149: 1, | | |
| | | | | | | | S0007: 1, H0208: 1, | | |
| | | | | | | | S0046: 1, S0132: 1, | | |
| | | | | | | | H0619: 1, H0370: 1, | | |
| | | | | | | | H0438: 1, H0592: 1, | | |
| | | | | | | | S0005: 1, L0623: 1, | | |
| | | | | | | | H0486: 1, H0013: 1, | | |
| | | | | | | | H0244: 1, S0280: 1, | | |
| | | | | | | | H0156: 1, H0097: 1, | | |
| | | | | | | | H0036: 1, S0346: 1, | | |
| | | | | | | | H0318: 1, H0230: 1, | | |
| | | | | | | | H0196: 1, H0251: 1, | | |
| | | | | | | | H0596: 1, H0597: 1, | | |
| | | | | | | | H0231: 1, H0150: 1, | | |
| | | | | | | | H0009: 1, N0006: 1, | | |
| | | | | | | | H0242: 1, L0471: 1, | | |
| | | | | | | | H0012: 1, H0373: 1, | | |
| | | | | | | | H0051: 1, N0007: 1, | | |
| | | | | | | | H0083: 1, H0594: 1, | | |
| | | | | | | | H0267: 1, H0687: 1, | | |
| | | | | | | | H0292: 1, H0284: 1, | | |
| | | | | | | | H0286: 1, H0615: 1, | | |
| | | | | | | | H0604: 1, H0031: 1, | | |
| | | | | | | | H0553: 1, H0181: 1, | | |
| | | | | | | | H0163: 1, H0090: 1, | | |
| | | | | | | | T0067: 1, H0264: 1, | | |
| | | | | | | | H0623: 1, S0038: 1, | | |
| | | | | | | | S0386: 1, S0112: 1, | | |
| | | | | | | | T0042: 1, H0560: 1, | | |
| | | | | | | | H0561: 1, S0370: 1, | | |
| | | | | | | | S0142: 1, S0344: 1, | | |
| | | | | | | | S0426: 1, L0598: 1, | | |
| | | | | | | | L0770: 1, L0769: 1, | | |
| | | | | | | | L0761: 1, L0372: 1, | | |
| | | | | | | | L0374: 1, L0648: 1, | | |
| | | | | | | | L0521: 1, L0626: 1, | | |
| | | | | | | | L0533: 1, L0803: 1, | | |
| | | | | | | | L0376: 1, L0806: 1, | | |
| | | | | | | | L0805: 1, L0509: 1, | | |
| | | | | | | | L0655: 1, L0783: 1, | | |
| | | | | | | | L0545: 1, L0529: 1, | | |
| | | | | | | | L0666: 1, L0664: 1, | | |
| | | | | | | | L0665: 1, H0593: 1, | | |
| | | | | | | | H0689: 1, H0682: 1, | | |
| | | | | | | | H0435: 1, H0659: 1, | | |
| | | | | | | | H0658: 1, S0378: 1, | | |
| | | | | | | | S0380: 1, H0522: 1, | | |
| | | | | | | | H0696: 1, S0044: 1, | | |
| | | | | | | | H0436: 1, L0609: 1, | | |
| | | | | | | | S0027: 1, L0744: 1, | | |
| | | | | | | | L0745: 1, L0747: 1, | | |
| | | | | | | | L0749: 1, H0444: 1, | | |
| | | | | | | | L0605: 1, S0011: 1, | | |
| | | | | | | | H0667: 1, S0276: 1, | | |
| | | | | | | | H0422: 1, H0506: 1 and | | |
| | | | | | | | H0008: 1. | | |
| | | 669615 | 749 | 2-514 | 1536 | Pro-1 to Arg-12, | | | |
| | | | | | | His-15 to Thr-24, | | | |
| | | | | | | Gln-34 to Gly-48. | | | |
| 323 | HSLFT29 | 1105598 | 333 | 3-611 | 1120 | | AR089: 2, AR061: 2 | | |
| | | | | | | | S0028: 1 | | |
| | | 680451 | 750 | 1-462 | 1537 | Glu-1 to Phe-8, | | | |
| | | | | | | Met-55 to Leu-64, | | | |
| | | | | | | Gly-93 to His-99, | | | |
| | | | | | | Ala-135 to Cys-141. | | | |
| 324 | HCE2Y61 | 1228280 | 334 | 3-1826 | 1121 | His-1 to Ser-10, | AR061: 3, AR089: 2 | | |
| | | | | | | Tyr-26 to His-36, | L0439: 7, L0438: 5, | | |
| | | | | | | Val-71 to Gly-78, | H0539: 4, L0756: 4, | | |
| | | | | | | Val-84 to Arg-96, | S0222: 3, S0010: 2, | | |
| | | | | | | Phe-114 to Gly-119, | H0052: 2, T0010: 2, | | |
| | | | | | | Lys-169 to Ala-177, | L0776: 2, L0809: 2, | | |
| | | | | | | Gln-244 to Asp-250, | H0547: 2, L0748: 2, | | |
| | | | | | | Phe-261 to Phe-273, | L0745: 2, L0005: 1, | | |
| | | | | | | Arg-302 to Ser-319, | H0637: 1, S0346: 1, | | |
| | | | | | | Lys-345 to Leu-351, | H0194: 1, H0201: 1, | | |
| | | | | | | Lys-373 to Val-385, | S0036: 1, L0351: 1, | | |
| | | | | | | Ser-452 to Gly-457, | L0771: 1, L0805: 1, | | |
| | | | | | | Gln-515 to Ser-520, | L0527: 1, L0665: 1, | | |
| | | | | | | Leu-565 to Asn-575, | S0378: 1, H0540: 1, | | |
| | | | | | | Lys-598 to Asp-608. | L0589: 1 L0594: 1 and | | |
| | | | | | | | L0366: 1. | | |
| | | 685285 | 751 | 2-532 | 1538 | Ala-1 to Ser-10, | | | |
| | | | | | | Tyr-26 to His-36, | | | |
| | | | | | | Val-71 to Gly-78, | | | |
| | | | | | | Val-84 to Arg-96, | | | |
| | | | | | | Phe-114 to Gly-119. | | | |
| 325 | HDQGV34 | 965252 | 335 | 133-1626 | 1122 | Thr-17 to Tyr-23, | AR089: 1, AR061: 0 | | |
| | | | | | | Pro-33 to Asn-41. | L0776: 5, L0439: 4, | | |
| | | | | | | | H0090: 3, H0591: 3, | | |
| | | | | | | | L0766: 2, H0650: 1, | | |
| | | | | | | | H0125: 1, H0156: 1, | | |
| | | | | | | | S0010: 1, H0530: 1, | | |
| | | | | | | | H0428: 1, L0435: 1, | | |
| | | | | | | | L0438: 1, H0658: 1, | | |
| | | | | | | | H0518: 1, H0521: 1, | | |
| | | | | | | | L0779: 1 and L0759: 1. | | |
| 326 | HGCAA66 | 672024 | 336 | 3-260 | 1123 | His-22 to Ile-30, | AR089: 1, AR061: 1 | | |
| | | | | | | Ser-42 to Thr-51, | H0519: 4, L0641: 2, | | |
| | | | | | | Ala-61 to Cys-86. | S0300: 1, H0318: 1, | | |
| | | | | | | | H0581: 1, H0052: 1, | | |
| | | | | | | | H0266: 1, S0208: 1, | | |
| | | | | | | | L0648: 1, L0766: 1, | | |
| | | | | | | | H0435: 1, L0749: 1 and | | |
| | | | | | | | L0779: 1. | | |
| 327 | HISAH34 | 1204704 | 337 | 1-1353 | 1124 | Val-2 to Leu-11, | AR089: 14, AR061: 4 | | |
| | | | | | | Ser-25 to Asp-38, | L0740: 4, S0360: 3, | | |
| | | | | | | Asp-51 to Met-69, | L0803: 3, L0779: 3, | | |
| | | | | | | Leu-82 to Gly-94, | H0341: 2, S0386: 2, | | |
| | | | | | | Pro-108 to Asp-116, | L0598: 2, L0794: 2, | | |
| | | | | | | Asn-129 to Trp-134, | S0152: 2, H0422: 2, | | |
| | | | | | | Pro-136 to Lys-154, | H0583: 1, S0212: 1, | | |
| | | | | | | Ser-160 to Pro-178, | H0125: 1, S0376: 1, | | |
| | | | | | | Pro-222 to Pro-229, | H0580: 1, H0486: 1, | | |
| | | | | | | Ser-239 to Thr-252, | H0253: 1, H0581: 1, | | |
| | | | | | | Pro-273 to Lys-279, | T0110: 1, H0545: 1, | | |
| | | | | | | Lys-306 to Arg-312, | L0471: 1, S0312: 1, | | |
| | | | | | | Lys-314 to Ala-339, | S0314: 1, S0022: 1, | | |
| | | | | | | Glu-342 to Leu-355, | H0622: 1, H0553: 1, | | |
| | | | | | | Glu-372 to Glu-383, | S0036: 1, H0038: 1, | | |
| | | | | | | Pro-407 to Cys-414, | H0551: 1, H0264: 1, | | |
| | | | | | | Asn-429 to Lys-451. | L0564: 1, H0561: 1, | | |
| | | | | | | | S0426: 1, L0774: 1, | | |
| | | | | | | | L0375: 1, L0545: 1, | | |
| | | | | | | | H0660: 1, H0539: 1, | | |
| | | | | | | | H0518: 1, S0028: 1, | | |
| | | | | | | | L0750: 1, L0758: 1, | | |
| | | | | | | | S0031: 1, L0591: 1, | | |
| | | | | | | | L0601: 1 and H0665: 1. | | |
| | | 957675 | 752 | 1-1683 | 1539 | Val-2 to Leu-11, | | | |
| | | | | | | Ser-25 to Asp-38, | | | |
| | | | | | | Asp-51 to Met-69, | | | |
| | | | | | | Leu-82 to Gly-94, | | | |
| | | | | | | Pro-108 to Asp-116, | | | |
| | | | | | | Asn-129 to Trp-134, | | | |
| | | | | | | Pro-136 to Lys-154, | | | |
| | | | | | | Ser-160 to Pro-178, | | | |
| | | | | | | Pro-222 to Pro-229, | | | |
| | | | | | | Ser-239 to Thr-752, | | | |
| | | | | | | Pro-273 to Lys-279, | | | |
| | | | | | | Lys-306 to Arg-312, | | | |
| | | | | | | Lys-314 to Ala-339, | | | |
| | | | | | | Glu-342 to Leu-355, | | | |
| | | | | | | Glu-372 to His-390, | | | |
| | | | | | | Pro-408 to Cys-415, | | | |
| | | | | | | Asn-430 to Asp-467, | | | |
| | | | | | | Leu-488 to Lys-503, | | | |
| | | | | | | Lys-510 to Asp-539. | | | |
| 328 | HLWBQ84 | 1104854 | 338 | 3-365 | 1125 | Lys-1 to Lys-41, | AR089: 1, AR061: 0 | | |
| | | | | | | Glu-77 to Ala-93. | H0553: 2 | | |
| | | 782938 | 753 | 3-263 | 1540 | Lys-1 to Lys-41, | | | |
| | | | | | | Pro-75 to Ser-86. | | | |
| 329 | HMSQD52 | 880227 | 339 | 1-606 | 1126 | | AR054: 29, AR050: | | |
| | | | | | | | 26, AR061: 6, AR061: | | |
| | | | | | | | 3, AR089: 1 | | |
| | | | | | | | S0412: 20, L0749: 9, | | |
| | | | | | | | S0358: 8, L0752: 8, | | |
| | | | | | | | L0731: 7, H0574: 5, | | |
| | | | | | | | H0031: 5, L0775: 5, | | |
| | | | | | | | S0126: 5, H0622: 4, | | |
| | | | | | | | L0747: 4, L0750: 4, | | |
| | | | | | | | L0757: 4, H0638: 3, | | |
| | | | | | | | H0486: 3, S0280: 3, | | |
| | | | | | | | H0196: 3, H0644: 3, | | |
| | | | | | | | H0617: 3, H0038: 3, | | |
| | | | | | | | H0560: 3, S0002: 3, | | |
| | | | | | | | L0769: 3, L0774: 3, | | |
| | | | | | | | L0659: 3, H0144: 3, | | |
| | | | | | | | S0206: 3, L0754: 3, | | |
| | | | | | | | L0485: 3, H0624: 2, | | |
| | | | | | | | H0341: 2, S0420: 2, | | |
| | | | | | | | H0675: 2, S0046: 2, | | |
| | | | | | | | S0132: 2, S0222: 2, | | |
| | | | | | | | H0586: 2, T0110: 2, | | |
| | | | | | | | H0620: 2, H0266: 2, | | |
| | | | | | | | S0150: 2, L0646: 2, | | |
| | | | | | | | L0765: 2, L0662: 2, | | |
| | | | | | | | L0766: 2, L0653: 2, | | |
| | | | | | | | H0522: 2, L0748: 2, | | |
| | | | | | | | L0439: 2, L0756: 2, | | |
| | | | | | | | L0596: 2, H0171: 1, | | |
| | | | | | | | S0040: 1, S0218: 1, | | |
| | | | | | | | H0657: 1, S0116: 1, | | |
| | | | | | | | H0346: 1, H0484: 1, | | |
| | | | | | | | H0664: 1, H0125: 1, | | |
| | | | | | | | S0354: 1, S0360: 1, | | |
| | | | | | | | S0045: 1, S0278: 1, | | |
| | | | | | | | H0370: 1, H0392: 1, | | |
| | | | | | | | H0587: 1, H0497: 1, | | |
| | | | | | | | H0331: 1, H0632: 1, | | |
| | | | | | | | H0485: 1, H0590: 1, | | |
| | | | | | | | H0581: 1, H0052: 1, | | |
| | | | | | | | H0263: 1, H0327: 1, | | |
| | | | | | | | L0471: 1, H0373: 1, | | |
| | | | | | | | H0355: 1, T0006: 1, | | |
| | | | | | | | L0142: 1, H0032: 1, | | |
| | | | | | | | H0212: 1, H0163: 1, | | |
| | | | | | | | H0090: 1, H0616: 1, | | |
| | | | | | | | H0412: 1, H0623: 1, | | |
| | | | | | | | H0059: 1, H0130: 1, | | |
| | | | | | | | H0633: 1, H0647: 1, | | |
| | | | | | | | S0144: 1, S0142: 1, | | |
| | | | | | | | S0344: 1, L0763: 1, | | |
| | | | | | | | L0761: 1, L0764: 1, | | |
| | | | | | | | L0771: 1, L0776: 1, | | |
| | | | | | | | L0518: 1, L0783: 1, | | |
| | | | | | | | L0666: 1, L0664: 1, | | |
| | | | | | | | S0374: 1, H0691: 1, | | |
| | | | | | | | L0438: 1, H0520: 1, | | |
| | | | | | | | H0519: 1, S0328: 1, | | |
| | | | | | | | H0478: 1, S3014: 1, | | |
| | | | | | | | S0028: 1, L0751: 1, | | |
| | | | | | | | L0786: 1, L0753: 1, | | |
| | | | | | | | L0755: 1, L0759: 1, | | |
| | | | | | | | H0445: 1, L0605: 1, | | |
| | | | | | | | L0581: 1, L0604: 1, | | |
| | | | | | | | S0026: 1, S0196: 1, | | |
| | | | | | | | H0542: 1, H0506: 1 and | | |
| | | | | | | | L0600: 1. | | |
| | | 888870 | 754 | 3-473 | 1541 | Gln-13 to Asp-18, | | | |
| | | | | | | Glu-91 to Ser-97. | | | |
| 330 | HMSHL44 | 1109680 | 340 | 3-440 | 1127 | Ala-29 to Glu-44, | AR089: 31, AR061: 7 | | |
| | | | | | | Gln-46 to Gln-66, | N0009: 1, S0002: 1 and | | |
| | | | | | | His-73 to Gln-78, | S0027: 1. | | |
| | | | | | | Arg-102 to Phe-107. | | | |
| | | 716614 | 755 | 58-426 | 1542 | Trp-1 to Trp-6, | | | |
| | | | | | | Asn-28 to Gln-48, | | | |
| | | | | | | His-55 to Gln-60, | | | |
| | | | | | | Arg-84 to Phe-89. | | | |
| 331 | HNTCU29 | 1199939 | 341 | 3-1457 | 1128 | Asp-1 to Val-8, | AR089: 10, AR061: 4 | | |
| | | | | | | Ser-18 to Pro-25, | L0740: 6, S0360: 5, | | |
| | | | | | | Leu-31 to Thr-41, | S0250: 5, L0439: 5, | | |
| | | | | | | Pro-48 to Asp-55, | L0748: 4, L0485: 4, | | |
| | | | | | | Arg-66 to Gly-74, | S0212: 3, L0471: 3, | | |
| | | | | | | Glu-95 to Asn-102, | L0662: 3, L0803: 3, | | |
| | | | | | | Ala-109 to Ala-114, | L0659: 3, L0438: 3, | | |
| | | | | | | Ser-148 to Ala-153, | L0754: 3, L0749: 3, | | |
| | | | | | | Ser-177 to Ser-190, | L0750: 3, L0757: 3, | | |
| | | | | | | Thr-245 to Trp-255, | S0192: 3, H0341: 2, | | |
| | | | | | | Ala-278 to Lys-284, | S0354: 2, H0046: 2, | | |
| | | | | | | Asn-294 to Ser-299, | H0039: 2, L0646: 2, | | |
| | | | | | | Asp-326 to Phe-331, | L0649: 2, H0519: 2, | | |
| | | | | | | Asn-343 to Phe-350, | S0126: 2, L0775: 2, | | |
| | | | | | | Glu-352 to Gly-359, | L0759: 2, L0599: 2, | | |
| | | | | | | Asp-377 to Asp-427, | H0170: 1, S0418: 1, | | |
| | | | | | | Thr-441 to Ser-446, | H0637: 1, H0339: 1, | | |
| | | | | | | Pro-468 to Pro-473. | H0586: 1, H0574: 1, | | |
| | | | | | | | H0632: 1, H0013: 1, | | |
| | | | | | | | H0156: 1, H0599: 1, | | |
| | | | | | | | H0098: 1, H0036: 1, | | |
| | | | | | | | S0010: 1, L0040: 1, | | |
| | | | | | | | H0544: 1, H0050: 1, | | |
| | | | | | | | H0267: 1, H0252: 1, | | |
| | | | | | | | H0688: 1, H0673: 1, | | |
| | | | | | | | H0316: 1, S0386: 1, | | |
| | | | | | | | H0509: 1, L0598: 1, | | |
| | | | | | | | L0800: 1, L0642: 1, | | |
| | | | | | | | L0764: 1, L0773: 1, | | |
| | | | | | | | L0804: 1, L0775: 1, | | |
| | | | | | | | L0657: 1, L0526: 1, | | |
| | | | | | | | L0666: 1, L0665: 1, | | |
| | | | | | | | L0565: 1, H0670: 1, | | |
| | | | | | | | S0330: 1, L0602: 1, | | |
| | | | | | | | S0152: 1, L0070: 1, | | |
| | | | | | | | L0779: 1, L0758: 1, | | |
| | | | | | | | H0707: 1, S0011: 1, | | |
| | | | | | | | S0026: 1, H0665: 1, | | |
| | | | | | | | H0667: 1, S0196: 1 and | | |
| | | | | | | | H0422: 1. | | |
| | | 968019 | 756 | 560-1492 | 1543 | Tyr-1 to Lys-11. | | | |
| 332 | HSDBK60 | 1152489 | 342 | 1-480 | 1129 | Lys-16 to Glu-23, | AR061: 7, AR089: 3 | | |
| | | | | | | Ala-37 to Lys-47, | L0748: 2, L0749: 2, | | |
| | | | | | | Thr-51 to Arg-58, | L0753: 2, S0045: 1, | | |
| | | | | | | Glu-111 to Leu-123, | L0009: 1, H0441: 1, | | |
| | | | | | | Leu1-27 to Asn-139, | H0046: 1, H0030: 1, | | |
| | | | | | | Leu-141 to Leu-148, | L0455: 1, L0373: 1, | | |
| | | | | | | Glu-150 to Lys-160. | L0803: 1, L0665: 1, | | |
| | | | | | | | H0478: 1, L0740: 1, | | |
| | | | | | | | L0777: 1, L0755: 1 and | | |
| | | | | | | | S0106: 1. | | |
| | | 531094 | 757 | 2-397 | 1544 | | | | |
| 333 | HSDKF80 | 1151509 | 343 | 435-175 | 1130 | Pro-1 to Leu-16, | AR089: 0, AR061: 0 | | |
| | | | | | | Ser-34 to Ile-44, | S0050: 1 and S0260: 1. | | |
| | | | | | | Arg-51 to Glu-72, | | | |
| | | | | | | Ala-79 to Arg-87. | | | |
| | | 751976 | 758 | 2-268 | 1545 | | | | |
| 334 | HSSJH10 | 1162666 | 344 | 1-1647 | 1131 | Ala-2 to Glu-10, | AR061: 5, AR089: 3, | | |
| | | | | | | Ala-17 to Glu-24, | L0769: 2, L0766: 2, | | |
| | | | | | | Asn-27 to Trp-35, | L0439: 2, L0779: 2, | | |
| | | | | | | Arg-47 to Lys-53, | S0001: 1, H0441: 1, | | |
| | | | | | | Cys-66 to Lys-74, | H0587: 1, H0596: 1, | | |
| | | | | | | Gln-79 to Arg-92, | S0388: 1, S0318: 1, | | |
| | | | | | | Asp-96 to Ala-109, | H0135: 1, L0764: 1, | | |
| | | | | | | Arg-116 to Leu-125, | L0658: 1, H0670: 1, | | |
| | | | | | | Glu-128 to Gln-133, | S3012: 1 and S0194: 1. | | |
| | | | | | | Leu-177 to Gln-183, | | | |
| | | | | | | Gln-199 to Glu-218, | | | |
| | | | | | | Asn-240 to Leu-250, | | | |
| | | | | | | Glu-269 to Ser-281, | | | |
| | | | | | | Leu-298 to Cys-304, | | | |
| | | | | | | Gln-337 to Lys-342, | | | |
| | | | | | | Pro-378 to Pro-389, | | | |
| | | | | | | Gln-396 to Asp-415, | | | |
| | | | | | | Pro-438 to Gln-446, | | | |
| | | | | | | Glu-484 to Ser-489, | | | |
| | | | | | | Glu-492 to Pro-500, | | | |
| | | | | | | Glu-510 to His-515, | | | |
| | | | | | | Ser-259 to Gly-536. | | | |
| | | 964536 | 759 | 2-265 | 1546 | Ala-10 to Glu-17, | | | |
| | | | | | | Asn-20 to Trp-28. | | | |
| 335 | HTENI58 | 1117717 | 345 | 97-681 | 1132 | Ile-1 to Glu-6, | AR089: 30, AR061: 13 | | |
| | | | | | | Tyr-32 to Asn-42, | L0794: 25, L0758: 4, | | |
| | | | | | | Glu-49 to Lys-68, | H0038: 3, H0616: 2, | | |
| | | | | | | Asn-76 to Gln-81, | L0779: 2, L0768: 1 and | | |
| | | | | | | Gly-89 to Ser-107, | L0790: 1. | | |
| | | | | | | Lys-121 to Asn-126, | | | |
| | | | | | | Arg-170 to Ser-195. | | | |
| | | 917213 | 760 | 41-589 | 1547 | Asn-17 to Asn-30, | | | |
| | | | | | | Glu-37 to Lys-56, | | | |
| | | | | | | Asp-64 to Gln-69, | | | |
| | | | | | | Gly-77 to Ser-95, | | | |
| | | | | | | Lys-109 to Asn-114, | | | |
| | | | | | | Arg-158 to Ser-183. | | | |
| 336 | HTEOI36 | 1185485 | 346 | 3-410 | 1133 | Pro-17 to Ala-25, | AR089: 36, AR061: 21 | | |
| | | | | | | Lys-33 to Arg-40, | H0038: 7, H0618: 1, | | |
| | | | | | | Arg-62 to Lys-68, | H0253: 1 and H0616: 1. | | |
| | | | | | | Ala-79 to Val-93, | | | |
| | | | | | | Lys-106 to Ser-115. | | | |
| | | 870575 | 761 | 3-410 | 1548 | Pro-17 to Ala-25, | | | |
| | | | | | | Lys-33 to Arg-40, | | | |
| | | | | | | Arg-62 to Lys-68, | | | |
| | | | | | | Ala-79 to Val-93, | | | |
| | | | | | | Lys-106 to Asp-113. | | | |
| 337 | HTGAW31 | 1103686 | 347 | 2-424 | 1134 | Ser-1 to Leu-8, | AR089: 9, AR061: 4 | | |
| | | | | | | Lys-20 to Ser-30, | S0134: 1 and S0386: 1. | | |
| | | | | | | Ser-76 to Glu-104. | | | |
| | | 698190 | 762 | 81-260 | 1549 | Ser-1 to Arg-6. | | | |
| 338 | HTGCV57 | 1128279 | 348 | 254-952 | 1135 | Glu-41 to Leu-50, | AR061: 2, AR089: 0 | | |
| | | | | | | Ser-68 to Glu-74, | S0212: 2, S0134: 1, | | |
| | | | | | | Ala-93 to Gly-110, | S0348: 1, L0471: 1, | | |
| | | | | | | Ser-112 to Lys-128, | H0687: 1, H0644: 1, | | |
| | | | | | | Glu-140 to Glu-151, | S0426: 1, H0520: 1, | | |
| | | | | | | Glu-164 to Arg-186, | H0593: 1, H0660: 1, | | |
| | | | | | | Glu-190 to Glu-198, | L0591: 1, L0594: 1 and | | |
| | | | | | | Ser-204 to Arg-222. | L0595: 1. | | |
| | | 746395 | 763 | 60-578 | 1550 | Glu-27 to Leu-36, | | | |
| | | | | | | Ser-54 to Glu-60, | | | |
| | | | | | | Ala-79 to Gly-96, | | | |
| | | | | | | Ser-98 to Lys-114, | | | |
| | | | | | | Glu-126 to Glu-137, | | | |
| | | | | | | Glu-150 to Arg-161. | | | |
| 339 | HTXGJ96 | 1193058 | 349 | 1-1407 | 1136 | Gly-1 to Ala-8, | AR061: 7, AR089: 3 | | |
| | | | | | | Lys-22 to Glu-34, | L0764: 3, S0420: 2, | | |
| | | | | | | Thr-120 to Leu-128, | L0803: 2, H0543: 2, | | |
| | | | | | | Pro-159 to Ser-165, | H0265: 1, S0360: 1, | | |
| | | | | | | Glu-188 to Lys-195, | H0455: 1, H0253: 1, | | |
| | | | | | | Gln-207 to Val-221, | H0318: 1, H0052: 1, | | |
| | | | | | | Gln-235 to Pro-246, | H0544: 1, H0014: 1, | | |
| | | | | | | Leu-265 to Thr-271, | H0083: 1, H0063: 1, | | |
| | | | | | | Ser-283 to Glu-298, | H0264: 1, H0412: 1, | | |
| | | | | | | Asp-305 TO Val-342, | S0386: 1, H0494: 1, | | |
| | | | | | | Asp-406 to Lys-412, | L0644: 1, L0804: 1, | | |
| | | | | | | Glu-445 to Glu-463. | L0650: 1, L0790: 1, | | |
| | | | | | | | H0542: 1 and H0422: 1. | | |
| | | 935942 | 764 | 66-1334 | 1551 | Pro-1 to Arg-7, | | | |
| | | | | | | Thr-74 to Leu-82, | | | |
| | | | | | | Pro-113 to Ser-119, | | | |
| | | | | | | Gln-142 to Lys-149, | | | |
| | | | | | | Gln-161 to Val-175, | | | |
| | | | | | | Gln-189 to Pro-200, | | | |
| | | | | | | Leu-219 to Thr-225, | | | |
| | | | | | | Ser-237 to Glu-252, | | | |
| | | | | | | Asp-259 to Val-296, | | | |
| | | | | | | Asp-360 to Lys-366, | | | |
| | | | | | | Glu-399 to Glu-417. | | | |
| 340 | HSLDI32 | 1103425 | 350 | 634-47 | 1137 | | AR089: 1, AR061: 0 | | |
| | | | | | | | H0052: 25, T0006: 15, | | |
| | | | | | | | L0596: 12, S0222: 11, | | |
| | | | | | | | H0009: 10, L0753: 10, | | |
| | | | | | | | H0441: 9, L0439: 9, | | |
| | | | | | | | L0752: 9, S0358: 8, | | |
| | | | | | | | H0253: 8, L0618: 7, | | |
| | | | | | | | H0231: 7, L0769: 7, | | |
| | | | | | | | H0144: 7, S0374: 7, | | |
| | | | | | | | H0550: 6, L0775: 6, | | |
| | | | | | | | L0745: 6, L0747: 6, | | |
| | | | | | | | S6024: 5, H0597: 5, | | |
| | | | | | | | H0178: 5, S0388: 5, | | |
| | | | | | | | S0051: 5, H0399: 5, | | |
| | | | | | | | L0750: 5, L0731: 5, | | |
| | | | | | | | S0007: 4, H0351: 4, | | |
| | | | | | | | S0049: 4, H0204: 4, | | |
| | | | | | | | H0100: 4, L0509: 4, | | |
| | | | | | | | L0542: 4, L0783: 4, | | |
| | | | | | | | L0742: 4, L0746: 4, | | |
| | | | | | | | L0777: 4, L0366: 4, | | |
| | | | | | | | S0300: 3, H0261: 3, | | |
| | | | | | | | H0549: 3, H0497: 3, | | |
| | | | | | | | H0156: 3, S0010: 3, | | |
| | | | | | | | H0085: 3, N0006: 3, | | |
| | | | | | | | S0003: 3, S0036: 3, | | |
| | | | | | | | H0641: 3, L0770: 3, | | |
| | | | | | | | L0499: 3, L0776: 3, | | |
| | | | | | | | L0659: 3, L0665: 3, | | |
| | | | | | | | H0519: 3, H0684: 3, | | |
| | | | | | | | L0756: 3, L0758: 3, | | |
| | | | | | | | L0608: 3, S0424: 3, | | |
| | | | | | | | H0506: 3, H0624: 3, | | |
| | | | | | | | H0170: 2, S6026: 2, | | |
| | | | | | | | H0592: 2, S0346: 2, | | |
| | | | | | | | H0196: 2, H0235: 2, | | |
| | | | | | | | H0596: 2, H0150: 2, | | |
| | | | | | | | H0103: 2, S0050: 2, | | |
| | | | | | | | H0201: 2, T0010: 2, | | |
| | | | | | | | H0213: 2, H0674: 2, | | |
| | | | | | | | L0455: 2, H0038: 2, | | |
| | | | | | | | L0764: 2, L0766: 2, | | |
| | | | | | | | L0375: 2, L0782: 2, | | |
| | | | | | | | L0528: 2, L0666: 2, | | |
| | | | | | | | L0438: 2, H0520: 2, | | |
| | | | | | | | H0672: 2, S0044: 2, | | |
| | | | | | | | S0028: 2, L0744: 2, | | |
| | | | | | | | S0260: 2, H0685: 1, | | |
| | | | | | | | S0110: 1, H0176: 1, | | |
| | | | | | | | S0442: 1, S0354: 1, | | |
| | | | | | | | S0360: 1, S0410: 1, | | |
| | | | | | | | H0411: 1, H0369: 1, | | |
| | | | | | | | H0431: 1, H0438: 1, | | |
| | | | | | | | H0333: 1, L0623: 1, | | |
| | | | | | | | H0013: 1, H0069: 1, | | |
| | | | | | | | H0427: 1, H0599: 1, | | |
| | | | | | | | H0434: 1, H0251: 1, | | |
| | | | | | | | H0183: 1, H0263: 1, | | |
| | | | | | | | H0205: 1, H0232: 1, | | |
| | | | | | | | H0545: 1, H0065: 1, | | |
| | | | | | | | H0569: 1, H0172: 1, | | |
| | | | | | | | H0081: 1, H0012: 1, | | |
| | | | | | | | H0620: 1, H0014: 1, | | |
| | | | | | | | S0362: 1, L0163: 1, | | |
| | | | | | | | H0051: 1, H0408: 1, | | |
| | | | | | | | S6028: 1, H0266: 1, | | |
| | | | | | | | H0688: 1, H0428: 1, | | |
| | | | | | | | H0424: 1, H0617: 1, | | |
| | | | | | | | H0673: 1, H0169: 1, | | |
| | | | | | | | L0456: 1, H0135: 1, | | |
| | | | | | | | H0059: 1, H0102: 1, | | |
| | | | | | | | S0038: 1, S0112: 1, | | |
| | | | | | | | H0494: 1, H0130: 1, | | |
| | | | | | | | H0529: 1, L0369: 1, | | |
| | | | | | | | L0520: 1, L0762: 1, | | |
| | | | | | | | L0500: 1, L0638: 1, | | |
| | | | | | | | L0627: 1, L0372: 1, | | |
| | | | | | | | L0646: 1, L0363: 1, | | |
| | | | | | | | L0768: 1, L0364: 1, | | |
| | | | | | | | L0803: 1, L0774: 1, | | |
| | | | | | | | L0784: 1, L0805: 1, | | |
| | | | | | | | L0653: 1, L0657: 1, | | |
| | | | | | | | L0526: 1, L0384: 1, | | |
| | | | | | | | L0809: 1, L0530: 1, | | |
| | | | | | | | L0368: 1, L0664: 1, | | |
| | | | | | | | H0547: 1, H0689: 1, | | |
| | | | | | | | H0682: 1, H0659: 1, | | |
| | | | | | | | H0660: 1, L0355: 1, | | |
| | | | | | | | S0378: 1, S3012: 1, | | |
| | | | | | | | S3014: 1, L0741: 1, | | |
| | | | | | | | L0748: 1, L0751: 1, | | |
| | | | | | | | L0786: 1, L0757: 1, | | |
| | | | | | | | S0031: 1, H0445: 1, | | |
| | | | | | | | L0593: 1, L0595: 1, | | |
| | | | | | | | S0106: 1, S0011: 1, | | |
| | | | | | | | S0460: 1 and H0008: 1. | | |
| | | 757316 | 765 | 470-919 | 1552 | Pro-1 to Pro-12. | | | |
| 341 | HSLJB67 | 1105531 | 351 | 2-502 | 1138 | | AR089: 2, AR061: 1 | | |
| | | | | | | | H0624: 1, S0046: 1, | | |
| | | | | | | | S0390: 1 and L0591: 1. | | |
| | | 751184 | 766 | 3-206 | 1553 | Asp-17 to Arg-25. | | | |
| 342 | HAIBZ93 | 1222241 | 352 | 198-1970 | 1139 | Met-2 to Pro-9, | AR050: 1193, | | |
| | | | | | | Leu-17 to Gln-22, | AR054: 1062, AR051: | | |
| | | | | | | Pro-34 to Thr-39, | 937, AR061: 62, | | |
| | | | | | | Phe-51 to Met-78, | AR089: 50 | | |
| | | | | | | Val-123 to Ser-130, | H0485: 2, H0222: 1, | | |
| | | | | | | Pro-256 to Arg-264, | H0638: 1, S0046: 1, | | |
| | | | | | | Glu-286 to Asn-297. | S0132: 1, H0069: 1, | | |
| | | | | | | | H0641: 1, L0800: 1, | | |
| | | | | | | | L0773: 1, L0794: 1, | | |
| | | | | | | | L0666: 1, H0435: 1, | | |
| | | | | | | | H0659: 1, S0152: 1, | | |
| | | | | | | | S0406: 1 and L0779: 1. | | |
| | | 888120 | 767 | 2-367 | 1554 | Leu-25 to Gln-30, | | | |
| | | | | | | Pro-42 to Thr-47, | | | |
| | | | | | | Phe-59 to Ser-66. | | | |
| 343 | HAQCI39 | 1124595 | 353 | 796-236 | 1140 | Pro-6 to Ser-11. | AR061: 3, AR089: 1 | | |
| | | | | | | | H0295: 1, H0294: 2, | | |
| | | | | | | | H0196: 1 and H0597: 1. | | |
| | | 920983 | 768 | 2-169 | 1555 | Phe-2 to Ser-19. | | | |
| 344 | HCHAQ03 | 1151464 | 354 | 3-497 | 1141 | Lys-1 to Tyr-9, | AR089: 1, AR061: 1 | | |
| | | | | | | Glu-17 to Ile-24, | L0766: 2, L0745: 2, | | |
| | | | | | | Asn-79 to Leu-84, | L0752: 2, H0483: 1, | | |
| | | | | | | Arg-112 to Arg-122. | H0327: 1, L0770: 1, | | |
| | | | | | | | L0775: 1, L0806: 1, | | |
| | | | | | | | L0783: 1, L0789: 1, | | |
| | | | | | | | L0791: 1 and L0780: 1. | | |
| | | 923857 | 769 | 3-452 | 1556 | Lys-1 to Leu-11. | | | |
| 345 | HFXHJ52 | 1193039 | 355 | 1483-1959 | 1142 | Leu-47 to His-55, | AR089: 1, AR061: 0 | | |
| | | | | | | Gly-91 to His-107, | S0001: 2 | | |
| | | | | | | Pro-109 to His-117, | | | |
| | | | | | | Gln-130 to Leu-139. | | | |
| | | 727152 | 770 | 157-372 | 1557 | Lys-22 to Gln-28, | | | |
| | | | | | | Trp-35 to Tyr-54. | | | |
| 346 | HHSDC06 | 1150831 | 356 | 1-1044 | 1143 | Glu-34 to Ala-44, | AR061: 9, AR089: 3 | | |
| | | | | | | Arg-47 to Glu-57, | S0360: 2, H0553: 2, | | |
| | | | | | | Ala-173 to Arg-191, | L0776: 2, L0744: 2, | | |
| | | | | | | Thr-254 to His-266, | L0747: 2, L0750: 2, | | |
| | | | | | | His-268 to Pro-285, | H0542: 2, S0110: 1, | | |
| | | | | | | Pro-287 to Ser-309, | S0400: 1, H0441: 1, | | |
| | | | | | | Gly-332 to Ser-327, | H0392: 1, H0156: 1, | | |
| | | | | | | Gly-336 to Lys-348. | S0051: 1, H0687: 1, | | |
| | | | | | | | H0135: 1, H0087: 1, | | |
| | | | | | | | H0647: 1, L0631: 1, | | |
| | | | | | | | L0638: 1, L0774: 1, | | |
| | | | | | | | L0775: 1, L0659: 1, | | |
| | | | | | | | H0547: 1, S0380: 1, | | |
| | | | | | | | S0332: 1, L0743: 1, | | |
| | | | | | | | L0749: 1 and L0777: 1. | | |
| | | 935731 | 771 | 2-283 | 1558 | Glu-29 to Ala-39, | | | |
| | | | | | | Arg-42 to Glu-52. | | | |
| 347 | HMVCT65 | 1162654 | 357 | 767-1309 | 1144 | Pro-50 to Arg-59, | AR051: 13, AR054: | | |
| | | | | | | Pro-118 to Lys-132. | 11, AR089: 2, AR061: | | |
| | | | | | | | 2, AR050: 1 | | |
| | | | | | | | S3012: 2, L0750: 2, | | |
| | | | | | | | L0777: 2, S0212: 1, | | |
| | | | | | | | H0550: 1, S0280: 1, | | |
| | | | | | | | H0575: 1, H0706: 1, | | |
| | | | | | | | H0544: 1, H0264: 1, | | |
| | | | | | | | L0770: 1, L0796: 1, | | |
| | | | | | | | L0789: 1, H0689: 1, | | |
| | | | | | | | S0390: 1, L0779: 1 and | | |
| | | | | | | | L0731: 1. | | |
| | | 894861 | 772 | 748-1290 | 1559 | Pro-50 to Arg-59, | | | |
| | | | | | | Pro-118 to Lys-132. | | | |
| | | 899699 | 773 | 1-321 | 1560 | Ala-1 to Gly-8, | | | |
| | | | | | | Ala-30 to Arg-35, | | | |
| | | | | | | Ser-54 to Leu-59. | | | |
| 348 | HPJEQ51 | 1145717 | 358 | 1264-989 | 1145 | Pro-13 to Tyr-18. | AR050: 24, AR051: | | |
| | | | | | | | 22, AR054: 17, AR061: | | |
| | | | | | | | 3, AR089: 2 | | |
| | | | | | | | S0132: 2, H0660: 2, | | |
| | | | | | | | H0222: 1, H0485: 1, | | |
| | | | | | | | H0596: 1, H0290: 1, | | |
| | | | | | | | H0264: 1, H0641: 1, | | |
| | | | | | | | S0142: 1, L0646: 1, | | |
| | | | | | | | L0787: 1, L0791: 1, | | |
| | | | | | | | S0152: 1, S0332: 1, | | |
| | | | | | | | H0521: 1, L0748: 1, | | |
| | | | | | | | L0777: 1 and L0731: 1. | | |
| | | 893329 | 774 | 198-800 | 1561 | Met-2 to Pro-9, | | | |
| | | | | | | Leu-17 to Gln-22, | | | |
| | | | | | | Pro-34 to Thr-39, | | | |
| | | | | | | Phe-51 to Met-78, | | | |
| | | | | | | Val-124 to Ser-130. | | | |
| 349 | HUVHA10 | 1226996 | 359 | 1-1017 | 1146 | Gly-1 to Gly-13, | AR061: 4, AR089: 2 | | |
| | | | | | | Leu-27 to Ser-35, | L0770: 7, L0742: 5, | | |
| | | | | | | Arg-38 to Leu-50, | L0439: 4, L0776: 3, | | |
| | | | | | | Glu-55 to Asn-66, | S0358: 2, H0619: 2, | | |
| | | | | | | Arg-85 to Gly-90, | S0222: 2, L0769: 2, | | |
| | | | | | | Glu-93 to Ile-100, | L0638: 2, L0796: 2, | | |
| | | | | | | Asn-194 to Ala-202, | L0805: 2, H0593: 2, | | |
| | | | | | | | Gln-233 to Ala-239, | L0753: 2, L0485: 2, | |
| | | | | | | Ser-244 to Arg-253, | L0608: 2, H0329: 1, | | |
| | | | | | | Gly-236 to Trp-332. | H0351: 1, H0441: 1, | | |
| | | | | | | | H0611: 1, H0370: 1, | | |
| | | | | | | | H0013: 1, H0196: 1, | | |
| | | | | | | | H0052: 1, H0251: 1, | | |
| | | | | | | | H0041: 1, H0024: 1, | | |
| | | | | | | | H0622: 1, S0366: 1, | | |
| | | | | | | | H0623: 1, L0648: 1, | | |
| | | | | | | | L0523: 1. L0806: 1, | | |
| | | | | | | | L0788: 1, L0666: 1, | | |
| | | | | | | | L0663: 1, H0648: 1, | | |
| | | | | | | | H0539: 1, S0152: 1, | | |
| | | | | | | | L0612: 1, L0777: 1, | | |
| | | | | | | | L0599: 1 and S0242: 1. | | |
| | | 963114 | 775 | 3-500 | 1562 | Ser-6 to Gly-12, | | | |
| | | | | | | Leu-26 to Ser-34, | | | |
| | | | | | | Arg-37 to Leu-49, | | | |
| | | | | | | Glu-54 to Asn-65, | | | |
| | | | | | | Arg-84 to Gly-89, | | | |
| | | | | | | Glu-92 to Ile-99. | | | |
| 350 | HWBEX27 | 1151533 | 360 | 2-439 | 1147 | Arg-1 to Pro-14, | AR089: 1, AR061: 0 | | |
| | | | | | | Ser-26 to Ala-33, | H0580: 2, L0663: 2, | | |
| | | | | | | Arg-40 to Met-54, | L0662: 1, L0657: 1, | | |
| | | | | | | Asn-101 to Arg-107, | L0659: 1, L0666: 1, | | |
| | | | | | | Ala-141 to Lys-146. | L0438: 1, L0748: 1 and | | |
| | | | | | | | L0777: 1. | | |
| | | 682583 | 776 | 1-489 | 1563 | Leu-5 to His-12. | | | |
| 351 | HBJJT12 | 1154057 | 361 | 1-948 | 1148 | Gly-1 to Ser-9, | AR061: 2, AR089: 1 | | |
| | | | | | | Asn-11 to Ser-31, | L0749: 2 and H0318: | | |
| | | | | | | Ser-43 to Thr-49, | 1. | | |
| | | | | | | Ala-74 to Phe-81, | | | |
| | | | | | | Gly-94 to Thr-99, | | | |
| | | | | | | Gln-136 to Tyr-143, | | | |
| | | | | | | Gln-156 to Lys-163, | | | |
| | | | | | | Gly-214 to Leu-222, | | | |
| | | | | | | Pro-256 to Ser-268, | | | |
| | | | | | | Ser-272 to Lys-316. | | | |
| | | 894345 | 777 | 3-596 | 1564 | Phe-12 to Gln-21, | | | |
| | | | | | | Asp-27 to Thr-38, | | | |
| | | | | | | Pro-44 to Ser-52, | | | |
| | | | | | | Asn-54 to Ser-74, | | | |
| | | | | | | Ser-86 to Thr-92, | | | |
| | | | | | | Ala-117 to Phe-124, | | | |
| | | | | | | Gly-137 to Thr-142, | | | |
| | | | | | | Gly-182 to Ser-187. | | | |
| 352 | HE9QF27 | 1128104 | 362 | 2-424 | 1149 | Arg-1 to Thr-11. | AR061: 8, AR089: 3 | | |
| | | | | | | | H0144: 2, T0082: 1 | | |
| | | | | | | | and L0456: 1. | | |
| | | 894667 | 778 | 2-304 | 1565 | Arg-1 to Thr-7. | | | |
| 353 | HEAHE27 | 1105191 | 363 | 644-168 | 1150 | | AR054: 76, AR050: | | |
| | | | | | | | 69, AR051: 67, AR089: | | |
| | | | | | | | 3, AR061: 1 | | |
| | | | | | | | S0468: 1 and L0659: 1. | | |
| | | 898346 | 779 | 936-499 | 1566 | Pro-1 to Leu-10, | | | |
| | | | | | | Gly-12 to Gly-20, | | | |
| | | | | | | Pro-28 to Thr-38, | | | |
| | | | | | | Ala-59 to Gly-65, | | | |
| | | | | | | Gln-82 to Glu-93, | | | |
| | | | | | | Gly-130 to Ser-138. | | | |
| 354 | HFKLB30 | 890713 | 364 | 2-355 | 1151 | | AR061: 3, AR089: 1 | | |
| | | | | | | | L0747: 4, L0157: 3, | | |
| | | | | | | | L0438: 3, L0439: 3, | | |
| | | | | | | | S0346: 2, H0620: 2, | | |
| | | | | | | | L0740: 2, L0777: 2, | | |
| | | | | | | | L0605: 2, S0222: 1, | | |
| | | | | | | | H0178: 1, H0012: 1, | | |
| | | | | | | | S6028: 1, H0428: 1, | | |
| | | | | | | | H0628: 1, L0796: 1, | | |
| | | | | | | | L0794: 1, L0791: 1, | | |
| | | | | | | | L0792: 1, L0665: 1, | | |
| | | | | | | | H0547: 1, H0519: 1, | | |
| | | | | | | | H0658: 1, L0748: 1, | | |
| | | | | | | | L0749: 1, L0756: 1, | | |
| | | | | | | | L0779: 1 and L0361: 1. | | |
| 355 | HPMKM81 | 894416 | 365 | 64-567 | 1152 | Arg-15 to Gln-21, | AR061: 2, AR089: 1 | 7q22 | 126650, |
| | | | | | | Gln-47 to Ile-53, | L0666: 3, L0777: 2, | | 126650, |
| | | | | | | Lys-58 to Asp-72. | L0608: 2, H0046: 1, | | 154276, |
| | | | | | | | H0031: 1, H0644: 1, | | 173360, |
| | | | | | | | L0803: 1, L0783: 1, | | 173360, |
| | | | | | | | H0672: 1, L0740: 1, | | 602136, |
| | | | | | | | L0750: 1 and L0755: 1. | | 602136, |
| | | | | | | | | | 602136, |
| | | | | | | | | | 602447 |
| 356 | HPVAE51 | 895915 | 366 | 1-498 | 1153 | Ala-38 to Gln-44, | AR054: 195, AR050: | 8q | |
| | | | | | | Gly-75 to Trp-80, | 179, AR051: 115, | | |
| | | | | | | Ser-82 to Asn-94, | AR089: 5, AR061: 3 | | |
| | | | | | | Ser-111 to Ser-118, | L0756: 5, L0777: 4, | | |
| | | | | | | Ala-124 to Ala-146. | L0803: 3, L0731: 3, | | |
| | | | | | | | L0157: 2, S0450: 2, | | |
| | | | | | | | L0744: 2, L0439: 2, | | |
| | | | | | | | L0589: 2, H0255: 1, | | |
| | | | | | | | H0662: 1, S0007: 1, | | |
| | | | | | | | H0261: 1, H0441: 1, | | |
| | | | | | | | H0438: 1, H0031: 1, | | |
| | | | | | | | H0529: 1, L0763: 1, | | |
| | | | | | | | L0630: 1, L0774: 1, | | |
| | | | | | | | L0518: 1, L0791: 1, | | |
| | | | | | | | S0013: 1, H0696: 1, | | |
| | | | | | | | L0740: 1, L0747: 1, | | |
| | | | | | | | L0779: 1, L0752: 1 and | | |
| | | | | | | | L0759: 1. | | |
| 357 | HSRBC02 | 1163833 | 367 | 2-640 | 1154 | Arg-2 to Arg-26, | AR061: 7, AR089: 4 | | |
| | | | | | | Ala-29 to Tyr-37, | L0748: 12, L0777: 4, | | |
| | | | | | | Ala-41 to Val-48, | L0521: 3, H0341: 2, | | |
| | | | | | | Gln-99 to Trp-114, | L0766: 2, H0740: 2, | | |
| | | | | | | Glu-136 to Ser-147, | S0114: 1, S0360: 1, | | |
| | | | | | | Arg-178 to Leu-190, | H0580: 1, H0409: 1, | | |
| | | | | | | Arg-199 to Ile-207. | H0156: 1, H0024: 1, | | |
| | | | | | | | S0003: 1, L0637: 1, | | |
| | | | | | | | L0761: 1, L0803: 1, | | |
| | | | | | | | L0792: 1, T0068: 1, | | |
| | | | | | | | S0330: 1, L0746: 1, | | |
| | | | | | | | L0758: 1, H0444: 1, | | |
| | | | | | | | L0596: 1, S0011: 1 and | | |
| | | | | | | | H0422: 1. | | |
| | | 869291 | 780 | 1-819 | 1567 | Asn-1 to Arg-28, | | | |
| | | | | | | Ala-31 to Tyr-39, | | | |
| | | | | | | Ala-43 to Val-50. | | | |
| 358 | HTTCC30 | 1225345 | 368 | 1-582 | 1155 | Asn-65 to Gly-75, | AR050: 44, AR054: | | |
| | | | | | | Gly-80 to Ala-99, | 34, AR051: 29, AR089: | | |
| | | | | | | Gly-105 to Lys-119, | 5, AR061: 4 | | |
| | | | | | | His-134 to Glu-145, | L0794: 3, H0090: 1, | | |
| | | | | | | Lys-162 to Arg-173. | H0040: 1, L0790: 1 and | | |
| | | | | | | | H0445: 1. | | |
| | | 890717 | 781 | 1-582 | 1568 | | | | |
| 359 | HMWDT23 | 1151369 | 106-567 | 1156 | 1156 | Met-70 to Glu-77, | AR089: 5, AR061: 2 | | |
| | | | | | | Asp-83 to Trp-90, | L0747: 13, L0752: 9, | | |
| | | | | | | Asp-121 to Ala-135, | L0775: 8, L0731: 7, | | |
| | | | | | | Asp-148 to Glu-154. | H0032: 6, L0766: 6, | | |
| | | | | | | | L0774: 6, H0657: 5, | | |
| | | | | | | | L0770: 5, L0750: 5, | | |
| | | | | | | | H0341: 4, L0776: 4, | | |
| | | | | | | | S0262: 4, L0748: 4, | | |
| | | | | | | | L0758: 4, S0026: 4, | | |
| | | | | | | | S0360: 3, S0132: 3, | | |
| | | | | | | | H0659: 3, L0740: 3, | | |
| | | | | | | | L0779: 3, H0170: 2, | | |
| | | | | | | | S0010: 2, H0052: 2, | | |
| | | | | | | | H0266: 2, S0210: 2, | | |
| | | | | | | | L0769: 2, L0521: 2, | | |
| | | | | | | | L0809: 2, H0144: 2, | | |
| | | | | | | | H0658: 2, S0380: 2, | | |
| | | | | | | | S3014: 2, L0754: 2, | | |
| | | | | | | | L0755: 2, L0757: 2, | | |
| | | | | | | | S0031: 2, L0588: 2, | | |
| | | | | | | | H0171: 1, T0002: 1, | | |
| | | | | | | | H0223: 1, H0650: 1, | | |
| | | | | | | | S0212: 1, H0346: 1, | | |
| | | | | | | | S0358: 1, H0278: 1, | | |
| | | | | | | | H0441: 1, H0331: 1, | | |
| | | | | | | | H0574: 1, L0021: 1, | | |
| | | | | | | | S0665: 1, S0049: 1, | | |
| | | | | | | | H0597: 1, H0123: 1, | | |
| | | | | | | | S0050: 1, H0014: 1, | | |
| | | | | | | | L0163: 1, H0083: 1, | | |
| | | | | | | | S0003: 1, H0606: 1, | | |
| | | | | | | | H0316: 1, S0036: 1, | | |
| | | | | | | | H0063: 1, H0647: 1, | | |
| | | | | | | | S0142: 1, S0422: 1, | | |
| | | | | | | | L0772: 1, L0372: 1, | | |
| | | | | | | | L0764: 1, L0771: 1, | | |
| | | | | | | | L0381: 1, L0784: 1, | | |
| | | | | | | | L0806: 1, L0655: 1, | | |
| | | | | | | | L0807: 1, L0659: 1, | | |
| | | | | | | | L0783: 1, L0647: 1, | | |
| | | | | | | | L0787: 1, L0666: 1, | | |
| | | | | | | | L0663: 1, H0520: 1, | | |
| | | | | | | | H0670: 1, H0522: 1, | | |
| | | | | | | | S0044: 1, H0555: 1, | | |
| | | | | | | | S0027: 1, L0749: 1, | | |
| | | | | | | | H0343: 1, S0011: 1, | | |
| | | | | | | | S0242: 1 and H0423: 1. | | |
| | | 971726 | 782 | 97-558 | 1569 | Met-70 to Glu-77, | | | |
| | | | | | | Asp-83 to Trp-90, | | | |
| | | | | | | Asp-121 to Ala-135, | | | |
| | | | | | | Asp-148 to Glu-154. | | | |
| 360 | HAMFW83 | 1186171 | 370 | 3-764 | 1157 | Ile-5 to Val-17, | AR089: 7, AR061: 1 | | |
| | | | | | | His-29 to Gly-38, | H0560: 2 and L0367: | | |
| | | | | | | Ser-77 to Ala-86, | 1. | | |
| | | | | | | Gly-90 to Trp-117, | | | |
| | | | | | | Glu-132 to Gln-139, | | | |
| | | | | | | Gly-169 to Pro-174, | | | |
| | | | | | | Ser-188 to Arg-198. | | | |
| | | 780996 | 783 | 3-245 | 1570 | Ile-5 to Val-17, | | | |
| | | | | | | His-29 to Gly-38, | | | |
| | | | | | | Lys-69 to Phe-76. | | | |
| 361 | HHPRT46 | 1227626 | 371 | 85-567 | 1158 | | AR051: 23, AR054: | | |
| | | | | | | | 15, AR050: 9, AR089: | | |
| | | | | | | | 4, AR061: 1 | | |
| | | | | | | | S0414: 9, L0770: 6, | | |
| | | | | | | | H0051: 4, L0748: 4, | | |
| | | | | | | | L0754: 4, H0581: 3, | | |
| | | | | | | | L0775: 3, H0171: 2, | | |
| | | | | | | | S0222: 2, H0196: 2, | | |
| | | | | | | | L0662: 2, L0803: 2, | | |
| | | | | | | | L0659: 2, L0792: 2, | | |
| | | | | | | | L0745: 2, L0750: 2, | | |
| | | | | | | | L0752: 2, H0542: 2, | | |
| | | | | | | | S0412: 2, H0170: 1, | | |
| | | | | | | | H0657: 1, S0418: 1, | | |
| | | | | | | | D0420: 1, H0486: 1, | | |
| | | | | | | | H0427: 1, L0021: 1, | | |
| | | | | | | | H0097: 1, L0105: 1, | | |
| | | | | | | | S0049: 1, H0251: 1, | | |
| | | | | | | | H0457: 1, H0510: 1, | | |
| | | | | | | | H0188: 1, H0252: 1, | | |
| | | | | | | | S0364: 1, H0598: 1, | | |
| | | | | | | | H0412: 1, L0369: 1, | | |
| | | | | | | | L0638: 1, L0766: 1, | | |
| | | | | | | | L0649: 1, L0783: 1, | | |
| | | | | | | | L0528: 1, L0787: 1, | | |
| | | | | | | | S0374: 1, H0682: 1, | | |
| | | | | | | | H0659: 1, H0658: 1, | | |
| | | | | | | | S0378: 1, S0380: 1, | | |
| | | | | | | | H0521: 1, S0176: 1, | | |
| | | | | | | | H0478: 1, S0390: 1, | | |
| | | | | | | | H0478: 1, S0390: 1, | | |
| | | | | | | | L0756: 1, L0777: 1, | | |
| | | | | | | | L0731: 1, S0260: 1, | | |
| | | | | | | | L0589: 1 and H0543: 1. | | |
| | | 921075 | 784 | 132-515 | 1571 | | | | |
| 362 | HJBCL50 | 1080471 | 372 | 3-707 | 1159 | Ser-1 to Gln-12, | AR089: 27, AR061: 13 | | |
| | | | | | | Ile-60 to Trp-70, | S0280: 1, H0123: 1, | | |
| | | | | | | Cus-75 to Asn-80, | S0388: 1, T0042: 1, | | |
| | | | | | | Ile-88 to Asp-94. | L0748: 1 and L0593: 1. | | |
| | | 559089 | 785 | 3-422 | 1572 | Ser-1 to Gln-12, | | | |
| | | | | | | Ile-60 to Trp-70, | | | |
| | | | | | | Cys-75 to Asn-80, | | | |
| | | | | | | Ile-88 to Asp-94, | | | |
| | | | | | | Ser-133 to Ala-140. | | | |
| 363 | HLTAA06 | 1204706 | 373 | 354-2093 | 1160 | Ile-52 to Gly-59, | AR089: 18, AR061: 8 | | |
| | | | | | | Tyr-77 to Ser-82, | L0766: 14, L0779: 4, | | |
| | | | | | | Leu-95 to Glu-101, | L0777: 4, L0755: 3, | | |
| | | | | | | Lys-117 to Gly-123, | L0794: 2, L0745: 2, | | |
| | | | | | | Ser-125 to Tyr-131, | S0420: 1, H0598: 1, | | |
| | | | | | | Pro-134 to Asn-140, | H0090: 1, L0761: 1, | | |
| | | | | | | Asn-148 to Arg-155, | L0773: 1, L0803: 1, | | |
| | | | | | | Pro-165 to Asp-172, | L0805: 1, L0789: 1, | | |
| | | | | | | Ala-212 to Glu-219, | L0439: 1 and L0747: 1. | | |
| | | | | | | Thr-236 to His-247, | | | |
| | | | | | | Gln-270 to Ser-278, | | | |
| | | | | | | Pro-289 to Pro-296, | | | |
| | | | | | | Asn-305 to Arg-313, | | | |
| | | | | | | Arg-327 to Glu-337, | | | |
| | | | | | | Asp-378 to Ser-412, | | | |
| | | | | | | His-421 to Met-434, | | | |
| | | | | | | Ser-464 to Leu-470, | | | |
| | | | | | | Glu-493 to Asn-501, | | | |
| | | | | | | Glu-526 to Glu-531, | | | |
| | | | | | | Ser-538 to Pro-553. | | | |
| | | 840188 | 786 | 1-996 | 1573 | Arg-58 to Lys-65, | | | |
| | | | | | | Asn-80 to Gly-88, | | | |
| | | | | | | Gly-134 to Ala-158, | | | |
| | | | | | | Tyr-173 to Glu-179, | | | |
| | | | | | | Glu-189 to Glu-194, | | | |
| | | | | | | Asn-206 to Leu-211, | | | |
| | | | | | | Asp-213 to Gly-223, | | | |
| | | | | | | Pro-234 to Asp-241, | | | |
| | | | | | | Gln-254 to Glu-265, | | | |
| | | | | | | Lys-305 to Asp-319, | | | |
| 364 | HMIBK68 | 1186172 | 374 | 7-1671 | 1161 | Ser-15 to Ala-24, | AR089: 9, AR061: 6 | | |
| | | | | | | Gly-28 to Trp-55, | L0803: 5, H0445: 4, | | |
| | | | | | | Glu-70 to Gln-77, | L0766: 3, S0222: 2, | | |
| | | | | | | Gly-107 to Pro-112, | H0615: 2, L0598: 2, | | |
| | | | | | | Ser-126 to Arg-136, | L0638: 2, L0657: 2, | | |
| | | | | | | Lys-167 to Ser-183, | L0809: 2, L0789: 2, | | |
| | | | | | | Ser-190 to Leu-199, | L0663: 2, L0565: 2, | | |
| | | | | | | Gln-202 to Ser-208, | L0779: 2, L0605: 2, | | |
| | | | | | | Thr-214 to Arg-222, | L0592: 2, L0608: 2, | | |
| | | | | | | Asn-229 to Ser-234, | S0026: 1, H0171: 1, | | |
| | | | | | | Ser-294 to Phe-300, | S0218: 1, H0650: 1, | | |
| | | | | | | His-302 to Lys-324, | H0657: 1, L0638: 1, | | |
| | | | | | | Gly-360 to Pro-365, | S0360: 1, H0580: 1, | | |
| | | | | | | Gl7-372 to Val-379, | H0393: 1, H0438: 1, | | |
| | | | | | | Lys-391 to Lys-399, | H0013: 1, H0427: 1, | | |
| | | | | | | Lys-404 to Asn-412, | H0123: 1, S6028: 1, | | |
| | | | | | | Glu-431 to Lys-436, | H0328: 1, H0412: 1, | | |
| | | | | | | Leu-439 to Leu-459, | T0041: 1, H0625: 1, | | |
| | | | | | | Arg-473 to Ile-480, | H0538: 1, H0529: 1, | | |
| | | | | | | Pro-483 to Glu-491, | L0625: 1, L0763: 1, | | |
| | | | | | | Leu-493 to Thr-509, | L0800: 1, L0764: 1, | | |
| | | | | | | Glu-514 to Arg-522, | L0804: 1, L0650: 1, | | |
| | | | | | | Ser-536 to Lys-549. | L0651: 1, L0661: 1, | | |
| | | | | | | | L0527: 1, L0519: 1, | | |
| | | | | | | | L0665: 1, H0520: 1, | | |
| | | | | | | | H0660: 1, H0696: 1, | | |
| | | | | | | | L0777: 1, L0752: 1, | | |
| | | | | | | | H0444: 1, L0591: 1 and | | |
| | | | | | | | H0543: 1. | | |
| | | 915819 | 787 | 7-1671 | 1574 | Ser-15 to Ala-24, | | | |
| | | | | | | Gly-28 to Trp-55, | | | |
| | | | | | | Glu-70 to Gln-77, | | | |
| | | | | | | Glu-107 to Pro-112, | | | |
| | | | | | | Ser-126 to Arg-136, | | | |
| | | | | | | Lys-167 to Ser-183, | | | |
| | | | | | | Ser-190 to Leu-199, | | | |
| | | | | | | Gln-202 to Ser-208, | | | |
| | | | | | | Thr-214 to Arg-222, | | | |
| | | | | | | Asn-229 to Ser-234, | | | |
| | | | | | | Ser-294 to Phe-300, | | | |
| | | | | | | His-302 to Lys-324, | | | |
| | | | | | | Gly-360 to Pro-365, | | | |
| | | | | | | Gly-372 to Val-379, | | | |
| | | | | | | Lys-391 to Lys-399, | | | |
| | | | | | | Lys-404 to Asn-412, | | | |
| | | | | | | Glu-431 to Lys-436, | | | |
| | | | | | | Leu-439 to Leu-459, | | | |
| | | | | | | Arg-473 to Ile-480, | | | |
| | | | | | | Pro-483 to Glu-491, | | | |
| | | | | | | Leu-493 to Thr-509, | | | |
| | | | | | | Glu-514 to Arg-522, | | | |
| | | | | | | Ser-536 to Lys-549. | | | |
| 365 | HMSJH92 | 1124516 | 375 | 3-959 | 1162 | | AR089: 6, AR061: 2 | | |
| | | | | | | | H0599: 2, H0046: 2, | | |
| | | | | | | | H0341: 1, H0393: 1, | | |
| | | | | | | | H0488: 1, S0002: 1, | | |
| | | | | | | | L0803: 1, S0126: 1, | | |
| | | | | | | | H0521: 1, L0748: 1 and | | |
| | | | | | | | L0595: 1. | | |
| | | 771339 | 788 | 283-957 | 1575 | Glu-15 to Ala-21, | | | |
| | | | | | | Glu-34 to Lys-40, | | | |
| | | | | | | Asn-63 to Lys-68. | | | |
| 366 | HROBJ60 | 1151506 | 376 | 2-1348 | 1163 | Ala-9 to Tyr-18, | AR061: 8, AR089: 5 | | |
| | | | | | | Ile-31 to Asp-42, | L0766: 14, L0779: 4, | | |
| | | | | | | Asn-56 to Tyr-68, | L0777: 4, L0755: 3, | | |
| | | | | | | Gly-89 to Gln-104, | L0794: 2, L0745: 2, | | |
| | | | | | | Arg-170 to Lys-177, | S0420: 1, H0598: 1, | | |
| | | | | | | Asn-192 to Gly-200, | H0090: 1, L0761: 1, | | |
| | | | | | | Gly-246 to Ala-270, | L0773: 1, L0803: 1, | | |
| | | | | | | Tyr-285 to Glu-291, | L0805: 1, L0789: 1, | | |
| | | | | | | Glu-301 to Glu-306, | L0439: 1 and L0747: 1. | | |
| | | | | | | Asn-318 to Leu-323, | | | |
| | | | | | | Asp-325 to Gly-335, | | | |
| | | | | | | Pro-346 to Asp-353, | | | |
| | | | | | | Gln-366 to Glu-377, | | | |
| | | | | | | Lys-417 to Asp-431, | | | |
| | | | | | | Thr-438 to Lys-449. | | | |
| | | 739935 | 789 | 3-554 | 1576 | | | | |
| 367 | HSCKG52 | 1179732 | 377 | 2-1375 | 1164 | Arg-16 to Pro-22. | AR089: 2, AR061: 1 | | |
| | | | | | | | L0766: 5, L0748: 5, | | |
| | | | | | | | L0759: 4, L0664: 3, | | |
| | | | | | | | L0749: 3, L0750: 3, | | |
| | | | | | | | H0591: 2, L0761: 2, | | |
| | | | | | | | L0662: 2, L0794: 2, | | |
| | | | | | | | L0803: 2, S0328: 2, | | |
| | | | | | | | L0756: 2, L0758: 2, | | |
| | | | | | | | H0543: 1, H0686: 1, | | |
| | | | | | | | H0657: 1, H0671: 1, | | |
| | | | | | | | S0356: 1, S0360: 1, | | |
| | | | | | | | S0222: 1, H0642: 1, | | |
| | | | | | | | H0318: 1, H0581: 1, | | |
| | | | | | | | L0471: 1, H0057: 1, | | |
| | | | | | | | H0083: 1, H0266: 1, | | |
| | | | | | | | S0022: 1, H0428: 1, | | |
| | | | | | | | H0598: 1, L0475: 1, | | |
| | | | | | | | H0560: 1, S0450: 1, | | |
| | | | | | | | H0529: 1, L0646: 1, | | |
| | | | | | | | L0768: 1, L0774: 1, | | |
| | | | | | | | H0144: 1, L0438: 1, | | |
| | | | | | | | H0547: 1, H0690: 1, | | |
| | | | | | | | H0435: 1, H0659: 1, | | |
| | | | | | | | H0648: 1, H0522: 1, | | |
| | | | | | | | H0436: 1, L0779: 1, | | |
| | | | | | | | L0777: 1, L0608: 1, | | |
| | | | | | | | S0011: 1, H0667: 1, | | |
| | | | | | | | S0242: 1 and S0196: 1. | | |
| | | 964438 | 790 | 3-272 | 1577 | Lys-2 to Phe-12. | | | |
| 368 | HSLHL43 | 1134403 | 378 | 410-889 | 1165 | | AR061: 6, AR089: 4 | | |
| | | | | | | | L0745: 2, H0624: 1, | | |
| | | | | | | | S0402: 1, H0632: 1, | | |
| | | | | | | | H0309: 1, H0046: 1, | | |
| | | | | | | | H0457: 1, H0615: 1, | | |
| | | | | | | | L0646: 1, L0544: 1, | | |
| | | | | | | | L0666: 1, S0028: 1 and | | |
| | | | | | | | L0746: 1. | | |
| | | 714843 | 791 | 2-403 | 1578 | Lys-1 to Thr-16, | | | |
| | | | | | | Val-29 to Lys-38, | | | |
| | | | | | | Met-50 to Asp-55, | | | |
| | | | | | | Ile-84 to Ser-89. | | | |
| 369 | HTEBE47 | 1173015 | 379 | 99-695 | 1166 | Phe-33 to Gly-80, | AR061: 11, AR089: 10 | | |
| | | | | | | Phe-121 to Lys-128, | L0769: 4, L0666: 4, | | |
| | | | | | | Asn-136 to Tyr-143, | L0664: 4, L0747: 4, | | |
| | | | | | | Pro-145 to Thr-150, | L0758: 4, L0766: 3, | | |
| | | | | | | Ser-155 to Asp-160, | L0776: 3, L0740: 3, | | |
| | | | | | | Tyr-166 to Asp-175, | S0360: 2, H0038: 2, | | |
| | | | | | | Leu-189 to Lys-199. | L0764: 2, L0771: 2, | | |
| | | | | | | | L0775: 2, L0743: 2, | | |
| | | | | | | | L0749: 2, L0750: 2, | | |
| | | | | | | | L0777: 2, L0731: 2, | | |
| | | | | | | | H0265: 1, S0418: 1, | | |
| | | | | | | | S0050: 1, H0625: 1, | | |
| | | | | | | | S0352: 1, L0065: 1, | | |
| | | | | | | | L0667: 1, L0373: 1, | | |
| | | | | | | | L0767: 1, L0794: 1, | | |
| | | | | | | | L0653: 1, L0655: 1, | | |
| | | | | | | | L0512: 1, L0517: 1, | | |
| | | | | | | | L0809: 1, L0647: 1, | | |
| | | | | | | | H0682: 1, H0521: 1, | | |
| | | | | | | | S0013: 1, L0741: 1, | | |
| | | | | | | | L0748: 1, L0751: 1, | | |
| | | | | | | | L0754: 1, L0779: 1, | | |
| | | | | | | | L0753: 1, L0757: 1, | | |
| | | | | | | | L0591: 1, L0599: 1, | | |
| | | | | | | | L0608: 1, S0026: 1 and | | |
| | | | | | | | S0276: 1. | | |
| | | 950427 | 792 | 1-2154 | 1579 | | | | |
| 370 | HTELQ83 | 1151521 | 380 | 1-582 | 1167 | Phe-5 to Gly-12, | AR-61: 7, AR089: 2 | | |
| | | | | | | Glu-18 to Glu-27, | L0758: 3, H0038: 2, | | |
| | | | | | | Thr-53 to Val-61, | H0616: 1, L0151: 1, | | |
| | | | | | | Val-91 to Tyr-99, | H0412: 1 and L0748: 1. | | |
| | | | | | | Ser-111 to Arg-120, | | | |
| | | | | | | Asp-171 to Ser-177, | | | |
| | | | | | | Glu-182 to Gly-190. | | | |
| | | 780607 | 793 | 3-560 | 1580 | Met-11 to Glu-19, | | | |
| | | | | | | Thr-45 to Val-53, | | | |
| | | | | | | Val-83 to Tyr-91, | | | |
| | | | | | | Ser-103 to Arg-112. | | | |
| 371 | HUCNW18 | 1151523 | 381 | 2-721 | 1168 | Gly-1 to Gly-16, | AR061: 1, AR089: 1 | | |
| | | | | | | Ser-18 to Tyr-24, | L0766: 14, L0779: 4, | | |
| | | | | | | Pro-27 to Asn-33, | L0777: 4, L0755: 3, | | |
| | | | | | | Asn-41 to Arg-48, | L0794: 2, L0745: 2, | | |
| | | | | | | Pro-58 to Asp-65, | S0420: 1, H0598: 1, | | |
| | | | | | | Ala-105 to Glu-112, | H0090: 1, L0761: 1, | | |
| | | | | | | Thr-129 to His-140, | L0773: 1, L0803: 1, | | |
| | | | | | | Gln-163 to Ser-171, | L0805: 1, L0789: 1, | | |
| | | | | | | Pro-182 to Pro-189, | L0439: 1 and L0747: 1. | | |
| | | | | | | Asn-198 to Arg-206. | | | |
| | | 954948 | 794 | 2-412 | 1581 | Lys-4 to Gly-10, | | | |
| | | | | | | Ser-12 to Tyr-18, | | | |
| | | | | | | Pro-21 to Asn-27, | | | |
| | | | | | | Asn-35 to Arg-42, | | | |
| | | | | | | Pro-52 to Asp-59. | | | |
| 372 | HHEUX85 | 783803 | 382 | 1-792 | 1169 | Asn-54 to Ser-60, | AR089: 0, AR061: 0 | | |
| | | | | | | Tyr-69 to Leu-103. | H0617: 5, L0751: 3, | | |
| | | | | | | | L0779: 3, H0618: 2, | | |
| | | | | | | | L0637: 2, L0764: 2, | | |
| | | | | | | | H0543: 2, H0265: 1, | | |
| | | | | | | | H0556: 1, H0585: 1, | | |
| | | | | | | | H0255: 1, H0664: 1, | | |
| | | | | | | | H0637: 1, S0045: 1, | | |
| | | | | | | | H0485: 1, H0486: 1, | | |
| | | | | | | | H0374: 1, H0052: 1, | | |
| | | | | | | | H0674: 1, H0135: 1, | | |
| | | | | | | | L0770: 1, L0769: 1, | | |
| | | | | | | | L0662: 1, L0794: 1, | | |
| | | | | | | | L0766: 1, L0803: 1, | | |
| | | | | | | | L0805: 1, L0653: 1, | | |
| | | | | | | | L0636: 1, L0783: 1, | | |
| | | | | | | | L0787: 1, L0663: 1, | | |
| | | | | | | | H0520: 1, H0593: 1, | | |
| | | | | | | | H0521: 1, H0555: 1, | | |
| | | | | | | | H0436: 1, S0028: 1, | | |
| | | | | | | | L0741: 1, L0758: 1, | | |
| | | | | | | | L0592: 1 and S0276: 1. | | |
| 373 | HTLAK30 | 810462 | 383 | 1-231 | 1170 | | AR061: 6, AR089: 4 | | |
| | | | | | | | H0695: 113, H0580: 7, | | |
| | | | | | | | L0354: 1 and H0253: 1. | | |
| 374 | HOHAI78 | 811359 | 384 | 2-448 | 1171 | Ser-40 to Phe-47. | AR089: 1, AR061: 0 | | |
| | | | | | | | L0766: 14, H0046: 5, | | |
| | | | | | | | L0752: 5, L0169: 4, | | |
| | | | | | | | L0775: 4, L0665: 4, | | |
| | | | | | | | L0750: 4, L0759: 4, | | |
| | | | | | | | H0090: 3, L0770: 3, | | |
| | | | | | | | L0769: 3, L0662: 3, | | |
| | | | | | | | L0768: 3, L0666: 3, | | |
| | | | | | | | L0748: 3, L0747: 3, | | |
| | | | | | | | L0757: 3, H0486: 2, | | |
| | | | | | | | H0581: 2, H0040: 2, | | |
| | | | | | | | H0561: 2, L0764: 2, | | |
| | | | | | | | L0803: 2, L0659: 2, | | |
| | | | | | | | L0663: 2, H0144: 2, | | |
| | | | | | | | H0660: 2, L0779: 2, | | |
| | | | | | | | L0758: 2, L0362: 2, | | |
| | | | | | | | S0242: 2, H0423: 2, | | |
| | | | | | | | H0624: 1, H0583: 1, | | |
| | | | | | | | H0656: 1, L0808: 1, | | |
| | | | | | | | S0116: 1, H0255: 1, | | |
| | | | | | | | H0661: 1, H0664: 1, | | |
| | | | | | | | S0420: 1, S0360: 1, | | |
| | | | | | | | S6026: 1, H0632: 1, | | |
| | | | | | | | H0153: 1, H0309: 1, | | |
| | | | | | | | H0546: 1, H0011: 1, | | |
| | | | | | | | H0014: 1, H0266: 1, | | |
| | | | | | | | S0250: 1, L0055: 1, | | |
| | | | | | | | H0032: 1, H0591: 1, | | |
| | | | | | | | H0494: 1, H0132: 1, | | |
| | | | | | | | S0422: 1, L0638: 1, | | |
| | | | | | | | L0800: 1, L0794: 1, | | |
| | | | | | | | L0649: 1, L0774: 1, | | |
| | | | | | | | L0375: 1, L0806: 1, | | |
| | | | | | | | L0509: 1, L0653: 1, | | |
| | | | | | | | L0776: 1, L0655: 1, | | |
| | | | | | | | L0493: 1, L0788: 1, | | |
| | | | | | | | H0703: 1, H0547: 1, | | |
| | | | | | | | H0519: 1, H0659: 1, | | |
| | | | | | | | H0539: 1, H0522: 1, | | |
| | | | | | | | H0555: 1, L0439: 1, | | |
| | | | | | | | L0740: 1, L0745: 1, | | |
| | | | | | | | L0749: 1, L0756: 1, | | |
| | | | | | | | L0777: 1, L0731: 1, | | |
| | | | | | | | S0260: 1, L0589: 1, | | |
| | | | | | | | L0593: 1, S0424: 1, | | |
| | | | | | | | S0460: 1 and H0352: 1. | | |
| 375 | HDQVV70 | 861365 | 385 | 804-1 | 1172 | | AR061: 1, AR089: 0 | | |
| 376 | HCRMR24 | 875069 | 386 | 2-1513 | 1173 | Ser-2 to His-10, | AR089: 15, AR061: 4 | | |
| | | | | | | Pro-22 to Ser-32, | S0356: 1, H0616: 1 and | | |
| | | | | | | Thr-38 to Thr-61, | L0749: 1. | | |
| | | | | | | Tyr-63 to Asp-68. | | | |
| 377 | HOFNX66 | 883011 | 387 | 121-966 | 1174 | His-18 to Ala-23, | AR089: 1, AR061: 0 | | |
| | | | | | | Ser-30 to Ala-40. | L0754: 6, L0758: 6, | | |
| | | | | | | | L0598: 3, L0766: 3, | | |
| | | | | | | | L0756: 3, S0358: 2, | | |
| | | | | | | | S0360: 2, S0007: 2, | | |
| | | | | | | | H0318: 2, H0052: 2, | | |
| | | | | | | | L0471: 2, H0615: 2, | | |
| | | | | | | | H0616: 2, L0663: 2, | | |
| | | | | | | | H0658: 2, S0152: 2, | | |
| | | | | | | | L0750: 2, L0731: 2, | | |
| | | | | | | | S0134: 1, H0664: 1, | | |
| | | | | | | | H0638: 1, H0229: 1, | | |
| | | | | | | | H0411: 1, H0415: 1, | | |
| | | | | | | | H0497: 1, H0574: 1, | | |
| | | | | | | | H0599: 1, H0108: 1, | | |
| | | | | | | | S0010: 1, H0581: 1, | | |
| | | | | | | | H0050: 1, H0179: 1, | | |
| | | | | | | | S0214: 1, H0030: 1, | | |
| | | | | | | | H0644: 1, H0032: 1, | | |
| | | | | | | | H0113: 1, T0067: 1, | | |
| | | | | | | | H0488: 1, H0059: 1, | | |
| | | | | | | | H0358: 1, L0794: 1, | | |
| | | | | | | | L0803: 1, L0805: 1, | | |
| | | | | | | | L0776: 1, L0655: 1, | | |
| | | | | | | | L0657: 1, L0659: 1, | | |
| | | | | | | | L0809: 1, L0788: 1, | | |
| | | | | | | | L0791: 1, L0792: 1, | | |
| | | | | | | | L0666: 1, T0068: 1, | | |
| | | | | | | | H0520: 1, H0519: 1, | | |
| | | | | | | | H0684: 1, H0435: 1, | | |
| | | | | | | | H0670: 1, H0521: 1, | | |
| | | | | | | | L0748: 1, L0747: 1, | | |
| | | | | | | | L0749: 1, L0752: 1, | | |
| | | | | | | | L0759: 1, L0596: 1, | | |
| | | | | | | | L0592: 1, L0362: 1 and | | |
| | | | | | | | H0423: 1. | | |
| 378 | HHEPG56 | 890938 | 388 | 87-599 | 1175 | Pro-45 to Asp-51, | AR089: 3, AR061: 1 | 6q22.1-q22.3 | 120110, |
| | | | | | | Lys-60 to Ser-68, | H0046: 30, H0040: 2, | | 121014, |
| | | | | | | Leu-114 to Ile-119, | H0625: 2, L0766: 2, | | 142470, |
| | | | | | | Thr-135 to Ala-140. | L0755: 2, H0543: 2, | | 156225, |
| | | | | | | | H0657: 1, S0358: 1, | | 164200, |
| | | | | | | | H0619: 1, H0393: 1, | | 164200, |
| | | | | | | | S0222: 1, H0415: 1, | | 601316, |
| | | | | | | | H0485: 1, H0013: 1, | | 601410, |
| | | | | | | | H0069: 1, H0375: 1, | | 601757 |
| | | | | | | | H0553: 1, H0090: 1, | | |
| | | | | | | | H0038: 1, H0616: 1, | | |
| | | | | | | | H0100: 1, T0041: 1, | | |
| | | | | | | | H0560: 1, S0422: 1, | | |
| | | | | | | | L0644: 1, L0649: 1, | | |
| | | | | | | | H0698: 1, S0148: 1, | | |
| | | | | | | | L0438: 1, S0126: 1, | | |
| | | | | | | | H0134: 1, L0748: 1, | | |
| | | | | | | | L0750: 1, L0758: 1 and | | |
| | | | | | | | H0542: 1. | | |
| 379 | HCROS74 | 900155 | 389 | 514-2 | 1176 | | AR054: 19, AR050: | | |
| | | | | | | | 19, AR051: 17, AR089: | | |
| | | | | | | | 1, AR061: 1 | | |
| | | | | | | | S0356: 1 and H0050: 1. | | |
| 380 | HKGAG83 | 966445 | 390 | 1-387 | 1177 | Phe-13 to Trp-20, | AR061: 3, AR089: 3 | | |
| | | | | | | Asp-48 to Gly-62. | H0693: 9, H0483: 1, | | |
| | | | | | | | H0318: 1, H0551: 1, | | |
| | | | | | | | H0623: 1, H0646: 1, | | |
| | | | | | | | H0538: 1, S0210: 1, | | |
| | | | | | | | H0547: 1 and H0423: 1. | | |
| 381 | HHFCF42 | 968314 | 391 | 289-1293 | 1178 | Ala-13 to Ala-28, | AR089: 1, AR061: 0 | 6p21.3 | 106300, |
| | | | | | | Arg-33 to Ser-39, | L0766: 6, L0519: 3, | | 108800, |
| | | | | | | Leu-61 to Tyr-101, | L0761: 2, L0662: 2, | | 120290 |
| | | | | | | Gln-112 to Val-122, | L0809: 2, L0438: 2, | | 120290, |
| | | | | | | Gln-200 to Gly-209, | L0749: 2, L0777: 2, | | 120810, |
| | | | | | | Asn-216 to His-221, | L0589: 2, L0599: 2, | | 120820, |
| | | | | | | Thr-271 to Pro-284, | S6024: 1, S0114: 1, | | 142857, |
| | | | | | | Lys-294 to Ala-303, | H0402: 1, H0393: 1, | | 142858, |
| | | | | | | Asn-314 to Glu-335. | H0392: 1, H0642: 1, | | 150270, |
| | | | | | | | H0050: 1, H0673: 1, | | 167250, |
| | | | | | | | H0616: 1, L0764: 1, | | 170261, |
| | | | | | | | L0794: 1, L0804: 1, | | 177900, |
| | | | | | | | L0375: 1, L0606: 1, | | 179450, |
| | | | | | | | H0521: 1, S0044: 1, | | 201910, |
| | | | | | | | H0187: 1, S0118: 1, | | 217000, |
| | | | | | | | S3012: 1, S0027: 1, | | 222100, |
| | | | | | | | L0731: 1, L0759: 1 and | | 233100, |
| | | | | | | | L0591: 1. | | 235200, |
| | | | | | | | | | 248611, |
| | | | | | | | | | 256550, |
| | | | | | | | | | 256500, |
| | | | | | | | | | 600202, |
| | | | | | | | | | 600261, |
| | | | | | | | | | 601868, |
| | | | | | | | | | 602280, |
| | | | | | | | | | 602475 |
| 382 | HHFHH58 | 723683 | 392 | 455-228 | 1179 | Ala-2 to Lys-14, | AR061: 2, AR051: 1, | | |
| | | | | | | Ser-19 to Glu-26, | AR089: 1, AR050: 1, | | |
| | | | | | | Gln-42 to Leu-49, | AR054: 0 | | |
| | | | | | | Ala-51 to Arg-56, | L0438: 9, L0439: 5, | | |
| | | | | | | Pro-58 to Thr-65. | L0756: 5, L0771: 4, | | |
| | | | | | | | L0775: 4, L0758: 4, | | |
| | | | | | | | H0052: 3, L0776: 3, | | |
| | | | | | | | L0748: 3, L0740: 3, | | |
| | | | | | | | L0747: 3, L0779: 3, | | |
| | | | | | | | L0777: 3, L0731: 3, | | |
| | | | | | | | L0759: 2, H0050: 2, | | |
| | | | | | | | H0674: 2, H0560: 2, | | |
| | | | | | | | L0662: 2, L0517: 2, | | |
| | | | | | | | L0791: 2, L0666: 2, | | |
| | | | | | | | H0521: 2, L0596: 2, | | |
| | | | | | | | S0011: 2, H0170: 1, | | |
| | | | | | | | H0686: 1, S6024: 1, | | |
| | | | | | | | S0001: 1, S0356: 1, | | |
| | | | | | | | S0358: 1, S0360: 1, | | |
| | | | | | | | H0619: 1, H0438: 1, | | |
| | | | | | | | H0497: 1, H0490: 1, | | |
| | | | | | | | H0486: 1, H0156: 1, | | |
| | | | | | | | S0049: 1, H0457: 1, | | |
| | | | | | | | H0123: 1, L0163: 1, | | |
| | | | | | | | H0051: 1, H0355: 1, | | |
| | | | | | | | S0003: 1, H0031: 1, | | |
| | | | | | | | H0553: 1, S0364: 1, | | |
| | | | | | | | L0455: 1, H0163: 1, | | |
| | | | | | | | H0616: 1, H0100: 1, | | |
| | | | | | | | H0641: 1, S0344: 1, | | |
| | | | | | | | L0769: 1, L0637: 1, | | |
| | | | | | | | L0667: 1, L0794: 1, | | |
| | | | | | | | L0803: 1, L0804: 1, | | |
| | | | | | | | L0375: 1, L0378: 1, | | |
| | | | | | | | L0805: 1, L0658: 1, | | |
| | | | | | | | L0659: 1, L0518: 1, | | |
| | | | | | | | L0809: 1, L0787: 1, | | |
| | | | | | | | L0352: 1, H0547: 1, | | |
| | | | | | | | H0660: 1, H0436: 1, | | |
| | | | | | | | L0749: 1, L0750: 1, | | |
| | | | | | | | L0780: 1, S0260: 1 and | | |
| | | | | | | | S0242: 1. | | |
| | | 735567 | 795 | 896-264 | 1582 | Pro-7 to Gly-15, | | | |
| | | | | | | Ser-31 to Gly-53. | | | |
| | | 735572 | 796 | 3-701 | 1583 | | | | |
| | | 971868 | 797 | 3-575 | 1584 | Pro-6 to Ala-12, | | | |
| | | | | | | Pro-47 to Gly-52, | | | |
| | | | | | | Ile-111 to Asp-117, | | | |
| | | | | | | Glu-143 to Gly-148, | | | |
| | | | | | | Asn-174 to Asp-179. | | | |
| 383 | HE8NB30 | 899757 | 393 | 1-486 | 1180 | Thr-48 to Arg-54, | AR051: 11, AR089: 4, | | |
| | | | | | | Glu-103 to Gln-109, | AR061: 3, AR054: 3, | | |
| | | | | | | Phe-122 to Gln-127, | AR050: 0 | | |
| | | | | | | Ser-140 to Thr-145, | H0013: 2, H0341: 1, | | |
| | | | | | | Phe-154 to Ser-162. | H0580: 1, H0486: 1, | | |
| | | | | | | | H0354: 1, S0003: 1, | | |
| | | | | | | | T0041: 1, H0561: 1, | | |
| | | | | | | | L0766: 1, H0144: 1, | | |
| | | | | | | | S0152: 1, H0144: 1, | | |
| | | | | | | | S0152: 1, L0740: 1, | | |
| | | | | | | | L0758: 1 L0595: 1 and | | |
| | | | | | | | H0423: 1. | | |
| 384 | HKGBO06 | 927953 | 394 | 3-494 | 1181 | | AR054: 27, AR050: | | |
| | | | | | | | 26, AR051: 22, AR089: | | |
| | | | | | | | 1, AR061: 0 | | |
| | | | | | | | L0439: 4, L0758: 4, | | |
| | | | | | | | L0794: 3, L0789: 3, | | |
| | | | | | | | L0749: 3, H0556: 2, | | |
| | | | | | | | H0620: 2, L0766: 2, | | |
| | | | | | | | L0805: 2, H0547: 2, | | |
| | | | | | | | L0754: 2, L0755: 2, | | |
| | | | | | | | L0759: 2, L0595: 2, | | |
| | | | | | | | H0423: 2, H0341: 1, | | |
| | | | | | | | H0661: 1, S0418: 1, | | |
| | | | | | | | S0358: 1, S0046: 1, | | |
| | | | | | | | H0369: 1, H0550: 1, | | |
| | | | | | | | L0021: 1, H0052: 1, | | |
| | | | | | | | H0050: 1, H0271: 1, | | |
| | | | | | | | H0188: 1, H0181: 1, | | |
| | | | | | | | H0124: 1, H0634: 1, | | |
| | | | | | | | H0633: 1, H0646: 1, | | |
| | | | | | | | H0358: 1, S0210: 1, | | |
| | | | | | | | L0772: 1, L0800: 1, | | |
| | | | | | | | L0643: 1, L0764: 1, | | |
| | | | | | | | L0806: 1, L0776: 1, | | |
| | | | | | | | L0519: 1, H0144: 1, | | |
| | | | | | | | H0703: 1, L0438: 1, | | |
| | | | | | | | H0689: 1, H0435: 1, | | |
| | | | | | | | H0670: 1, S0330: 1, | | |
| | | | | | | | H0539: 1, L0740: 1, | | |
| | | | | | | | L0750: 1, L0780: 1, | | |
| | | | | | | | L0757: 1, H0668: 1 and | | |
| | | | | | | | H0422: 1. | | |
| 385 | HMUBG24 | 525646 | 395 | 104-454 | 1182 | | AR089: 5, AR061: 2 | | |
| | | | | | | | H0013: 1, H0244: 1 | | |
| | | | | | | | and H0529: 1. | | |
| 386 | HTEGI48 | 530595 | 396 | 32-523 | 1183 | Val-3 to Tyr-15, | AR089: 4, AR061: 1 | Xq21 | 305450, |
| | | | | | | Leu-17 to Thr-27, | H0038: 2, H0556: 1, | | 309600, |
| | | | | | | Ser-34 to Ser-61, | H0341: 1 and L0596: 1. | | 309605, |
| | | | | | | Leu-82 to Leu-89, | | | 311360, |
| | | | | | | His-91 to Phe-98, | | | 314580 |
| | | | | | | Glu-100 to Met-106, | | | |
| | | | | | | Gly-121 to Phe-127. | | | |
| 387 | HGFAB38 | 576913 | 397 | 424-1719 | 1184 | | AR089: 14, AR061: 2 | | |
| | | | | | | | L0362: 9, L0766: 3, | | |
| | | | | | | | L0748: 3, L0794: 2, | | |
| | | | | | | | L0805: 2, S0380: 2, | | |
| | | | | | | | L0731: 2, L0591: 2, | | |
| | | | | | | | H0341: 1, H0661: 1, | | |
| | | | | | | | H0305: 1, H0440: 1, | | |
| | | | | | | | H0609: 1, H0486: 1, | | |
| | | | | | | | H0318: 1, H0014: 1, | | |
| | | | | | | | L0553: 1, L0803: 1, | | |
| | | | | | | | L0774: 1, L0607: 1, | | |
| | | | | | | | L0657: 1, L0659: 1, | | |
| | | | | | | | L0809: 1, H0672: 1, | | |
| | | | | | | | L0747: 1, L0593: 1, | | |
| | | | | | | | S0194: 1 and H0423: 1. | | |
| 388 | HMADG29 | 597431 | 398 | 3-500 | 1185 | Thr-5 to His-11, | AR061: 149, AR089: | | |
| | | | | | | Gln-82 to Arg-88, | 103, AR051: 9, | | |
| | | | | | | Asp-103 to Gln-108, | AR050: 9, AR054: 8 | | |
| | | | | | | Tyr-129 to Phe-134, | H0048: 2 and S0144: 2. | | |
| | | | | | | Glu-144 to Glu-156. | | | |
| 389 | HMWIN49 | 615238 | 399 | 25-315 | 1186 | Val-1 to Arg-11, | AR089: 6, AR061: 4 | | |
| | | | | | | Glu-27 to Asn-32, | S0007: 3, H0125: 2, | | |
| | | | | | | Glu-74 to Gln-82, | H0486: 2, H0040: 2, | | |
| | | | | | | Ser-86 to Trp-92. | L0774: 2, S0126: 2, | | |
| | | | | | | | H0341: 1, S0410: 1, | | |
| | | | | | | | S0045: 1, S0300: 1, | | |
| | | | | | | | H0431: 1, T0039: 1, | | |
| | | | | | | | T0060: 1, H0318: 1, | | |
| | | | | | | | H0596: 1, H0530: 1, | | |
| | | | | | | | H0081: 1, H0266: 1, | | |
| | | | | | | | H0068: 1, H0163: 1, | | |
| | | | | | | | H0063: 1, H0087: 1, | | |
| | | | | | | | S0372: 1, S0344: 1, | | |
| | | | | | | | L0763: 1, L0500: 1, | | |
| | | | | | | | L0775: 1, L0783: 1, | | |
| | | | | | | | H0593: 1, S0292: 1, | | |
| | | | | | | | H0648: 1, H0215: 1, | | |
| | | | | | | | H0631: 1, L0681: 1, | | |
| | | | | | | | S0026: 1, H0136: 1, | | |
| | | | | | | | H0216: 1 and H0542: 1. | | |
| 390 | HELGL09 | 625720 | 400 | 133-312 | 1187 | Pro-45 to Thr-50, | AR061: 2, AR089: 1 | | |
| | | | | | | Glu-53 to Asp-60. | S0045: 1 and S0260: 1. | | |
| 391 | HHEPQ28 | 694010 | 401 | 201-755 | 1188 | Ser-1 to Trp-10, | AR061: 2, AR089: 1 | | |
| | | | | | | Glu-19 to Asn-26, | L0766: 7, H0486: 4, | | |
| | | | | | | Cys-34 to Leu-41, | L0794: 4, H0520: 4, | | |
| | | | | | | Ser-54 to Cys-60, | L0754: 4, L0777: 4, | | |
| | | | | | | Thr-68 to Gly-73, | L0755: 4, L0599: 4, | | |
| | | | | | | Gly-103 to Gln-109, | L0803: 3, L0779: 3, | | |
| | | | | | | Gly-117 to Tyr-122, | H0542: 3, H0624: 2, | | |
| | | | | | | Lys-130 to His-136, | S0418: 2, S0360: 2, | | |
| | | | | | | Gly-164 to Lys-169. | H0551: 2, L0770: 2, | | |
| | | | | | | | L0662: 2, L0558: 2, | | |
| | | | | | | | L0665: 2, H0144: 2, | | |
| | | | | | | | H0547: 2, H0519: 2, | | |
| | | | | | | | H0522: 2, L0756: 2, | | |
| | | | | | | | L0758: 2, L0588: 2, | | |
| | | | | | | | H0170: 1, H0657: 1, | | |
| | | | | | | | H0580: 1, L0717: 1, | | |
| | | | | | | | S0222: 1, H0574: 1, | | |
| | | | | | | | S0474: 1, H0544: 1, | | |
| | | | | | | | H0266: 1, H0252: 1, | | |
| | | | | | | | T0023: 1, H0553: 1, | | |
| | | | | | | | T0042: 1, S0422: 1, | | |
| | | | | | | | L0369: 1, L0763: 1, | | |
| | | | | | | | L0761: 1, L0772: 1, | | |
| | | | | | | | L0521: 1, L0387: 1, | | |
| | | | | | | | L0650: 1, L0806: 1, | | |
| | | | | | | | L0653: 1, L0655: 1, | | |
| | | | | | | | L0789: 1, L0790: 1, | | |
| | | | | | | | L0663: 1, S0053: 1, | | |
| | | | | | | | S0374: 1, H0435: 1, | | |
| | | | | | | | H0670: 1, H0651: 1, | | |
| | | | | | | | H0521: 1, H0436: 1, | | |
| | | | | | | | H0345: 1, L0439: 1, | | |
| | | | | | | | L0745: 1, L0749: 1, | | |
| | | | | | | | L0750: 1, L0759: 1, | | |
| | | | | | | | L0485: 1, L0593: 1, | | |
| | | | | | | | S0026: 1, H0665: 1, | | |
| | | | | | | | H0543: 1, H0423: 1, | | |
| | | | | | | | H0422: 1 and S0458: 1. | | |
| 392 | HNTAI75 | 703283 | 402 | 457-41 | 1189 | | AR089: 10, AR061: 2 | | |
| | | | | | | | H0046: 1, H0494: 1 | | |
| | | | | | | | and H0519: 1. | | |
| 393 | HBMBR84 | 711121 | 403 | 2-586 | 1190 | His-44 to Thr-49, | AR061: 5, AR089: 2 | | |
| | | | | | | Trp-65 to Thr-71, | L0766: 7, H0421: 1, | | |
| | | | | | | Glu-105 to Val-112. | L0761: 1, L0789: 1, | | |
| | | | | | | | S0126: 1, L0749: 1, | | |
| | | | | | | | L0595: 1 and S0011: 1. | | |
| 394 | HOUFE88 | 718762 | 404 | 418-822 | 1191 | His-4 to Gly-14, | AR089: 10, AR061: 5 | | |
| | | | | | | Ser-17 to Lys-25, | S0358: 2, S0040: 1 and | | |
| | | | | | | Ala-30 to Leu-42, | S0316: 1. | | |
| | | | | | | Gly-45 to Gly-54, | | | |
| | | | | | | Ser-74 to Glu-87, | | | |
| | | | | | | Thr-113 to Lys-119. | | | |
| 395 | HMTAZ58 | 735760 | 405 | 89-388 | 1192 | Leu-23 to Ala-33. | AR089: 17, AR061: 7 | | |
| | | | | | | | H0598: 1 and H0518: | | |
| | | | | | | | 1. | | |
| 396 | HAJBM73 | 764228 | 406 | 1-477 | 1193 | Asp-51 to Phe-57, | AR089: 9, AR061: 2 | | |
| | | | | | | Asp-70 to Met-77, | H0561: 1 and L0748: | | |
| | | | | | | Tyr-99 to Ala-105. | 1. | | |
| 397 | HDPAV32 | 847613 | 407 | 401-3 | 1194 | | AR089: 21, AR061: 8 | | |
| | | | | | | | L0777: 4, L0769: 3, | | |
| | | | | | | | H0657: 2, H0486: 2, | | |
| | | | | | | | H0438: 2, L0779: 2, | | |
| | | | | | | | L0608: 2, H0556: 1, | | |
| | | | | | | | T0002: 1, S0116: 1, | | |
| | | | | | | | H0341: 1, S0212: 1, | | |
| | | | | | | | H0663: 1, H0638: 1, | | |
| | | | | | | | H0125: 1, S0360: 1, | | |
| | | | | | | | S0045: 1, L0021: 1, | | |
| | | | | | | | H0014: 1, H0015: 1, | | |
| | | | | | | | H0687: 1, H0634: 1, | | |
| | | | | | | | H0063: 1, H0494: 1, | | |
| | | | | | | | L0475: 1, H0625: 1, | | |
| | | | | | | | L0761: 1, L0764: 1, | | |
| | | | | | | | L0794: 1, L0766: 1, | | |
| | | | | | | | L0375: 1, L0776: 1, | | |
| | | | | | | | L0384: 1, L0789: 1, | | |
| | | | | | | | L0666: 1, S0126: 1, | | |
| | | | | | | | S0152: 1, H0521: 1, | | |
| | | | | | | | S0037: 1, L0751: 1, | | |
| | | | | | | | L0749: 1, L0750: 1, | | |
| | | | | | | | S0394: 1, L0596: 1, | | |
| | | | | | | | S0276: 1 and S0424: 1. | | |
| 398 | HMWIZ58 | 865033 | 408 | 1-1140 | 1195 | Gly-16 to Ser-24, | AR089: 2, AR061: 2 | | |
| | | | | | | Ala-34 to Ala-40, | H0341: 3, L0770: 3, | | |
| | | | | | | Ser-42 to Ser-50, | H0171: 2, L0789: 2, | | |
| | | | | | | Ile-61 to Ser-79, | L0438: 2, H0555: 2, | | |
| | | | | | | Thr-83 to Glu-107, | L0779: 2, L0731: 2, | | |
| | | | | | | Pro-136 to Val-145, | L0759: 2, H0624: 1, | | |
| | | | | | | Gly-181 to Glu-186, | H0170: 1, S0418: 1, | | |
| | | | | | | Thr-215 to Lys-220, | S0360: 1, H0329: 1, | | |
| | | | | | | Arg-242 to Met-247, | H0614: 1, H0485: 1, | | |
| | | | | | | Pro-273 to Asn-279, | H0013: 1, H0581: 1, | | |
| | | | | | | Lys-330 to Lys-337, | H0373: 1, H0615: 1, | | |
| | | | | | | Ser-354 to Pro-360. | H0488: 1, L0370: 1, | | |
| | | | | | | | H0561: 1, L0364: 1, | | |
| | | | | | | | L0794: 1, L0766: 1, | | |
| | | | | | | | L0803: 1, L0804: 1, | | |
| | | | | | | | L0784: 1, L0809: 1, | | |
| | | | | | | | H0144: 1, H0670: 1, | | |
| | | | | | | | H0436: 1, L0748: 1, | | |
| | | | | | | | L0439: 1, L0777: 1, | | |
| | | | | | | | L0591: 1, S0276: 1 and | | |
| | | | | | | | H0543: 1. | | |
| 399 | HFKFL92 | 880139 | 409 | 59-388 | 1196 | | AR089: 68, AR061: 37 | | |
| | | | | | | | L0742: 10, L0731: 4, | | |
| | | | | | | | L0748: 3, L0747: 3, | | |
| | | | | | | | L0758: 2, L0763: 2, | | |
| | | | | | | | L0764: 2, L0766: 2, | | |
| | | | | | | | L0439: 2, H0556: 1, | | |
| | | | | | | | S0376: 1, S0222: 1, | | |
| | | | | | | | H0156: 1, S0010: 1, | | |
| | | | | | | | S0474: 1, H0123: 1, | | |
| | | | | | | | H0012: 1, H0083: 1, | | |
| | | | | | | | H0328: 1, H0688: 1, | | |
| | | | | | | | H0412: 1, S0210: 1, | | |
| | | | | | | | L0644: 1, L0662: 1, | | |
| | | | | | | | L0806: 1, L0776: 1, | | |
| | | | | | | | L0655: 1, L0665: 1, | | |
| | | | | | | | L0438: 1, H0659: 1, | | |
| | | | | | | | S0380: 1, S0320: 1 and | | |
| | | | | | | | H0543: 1. | | |
| 400 | HWLGU06 | 882838 | 410 | 721-122 | 1197 | Lys-5 to Ser-16, | AR089: 5, AR061: 2 | | |
| | | | | | | Ser-38 to His-60, | L0766: 5, L0776: 4, | | |
| | | | | | | Pro-66 to Pro-72. | L0748: 3, H0253: 2, | | |
| | | | | | | | H0494: 2, L0662: 2, | | |
| | | | | | | | L0659: 2, L0783: 2, | | |
| | | | | | | | L0790: 2, H0547: 2, | | |
| | | | | | | | L0743: 2, L0754: 2, | | |
| | | | | | | | L0752: 2, H0294: 1, | | |
| | | | | | | | H0657: 1, H0484: 1, | | |
| | | | | | | | H0663: 1, H0450: 1, | | |
| | | | | | | | S0418: 1, S0354: 1, | | |
| | | | | | | | S0360: 1, H0580: 1, | | |
| | | | | | | | H0587: 1, H0497: 1, | | |
| | | | | | | | L0021: 1, H0575: 1, | | |
| | | | | | | | H0618: 1, S0049: 1, | | |
| | | | | | | | H0327: 1, H0172: 1, | | |
| | | | | | | | H0049: 1, H0620: 1, | | |
| | | | | | | | H0428: 1, H0604: 1, | | |
| | | | | | | | H0646: 1, L0638: 1, | | |
| | | | | | | | L0646: 1, L0800: 1, | | |
| | | | | | | | L0773: 1, L0378: 1, | | |
| | | | | | | | L0655: 1, L0657: 1, | | |
| | | | | | | | L0658: 1, L0789: 1, | | |
| | | | | | | | L0666: 1, H0435: 1, | | |
| | | | | | | | H0658: 1, H0518: 1, | | |
| | | | | | | | H0540: 1, L0747: 1, | | |
| | | | | | | | L0750: 1, L0779: 1, | | |
| | | | | | | | L0759: 1, L0366: 1, | | |
| | | | | | | | H0423: 1 and S0456: 1. | | |
| 401 | HOGBN73 | 892750 | 411 | 1-303 | 1198 | | AR061: 3, AR089: 2 | 6p21.3 | 106300, |
| | | | | | | | H0599: 1, H0135: 1 | | 108800, |
| | | | | | | | and H0435: 1. | | 120290, |
| | | | | | | | | | 120290, |
| | | | | | | | | | 120810, |
| | | | | | | | | | 120820, |
| | | | | | | | | | 142857, |
| | | | | | | | | | 142858, |
| | | | | | | | | | 150270, |
| | | | | | | | | | 167250, |
| | | | | | | | | | 170261, |
| | | | | | | | | | 177900, |
| | | | | | | | | | 179450, |
| | | | | | | | | | 201910, |
| | | | | | | | | | 217000, |
| | | | | | | | | | 222100, |
| | | | | | | | | | 233100, |
| | | | | | | | | | 235200, |
| | | | | | | | | | 248611, |
| | | | | | | | | | 256550, |
| | | | | | | | | | 256550, |
| | | | | | | | | | 600202, |
| | | | | | | | | | 600261, |
| | | | | | | | | | 601868, |
| | | | | | | | | | 602280, |
| | | | | | | | | | 602475 |
| 402 | HODCU15 | 899680 | 412 | 911-1675 | 1199 | Thr-57 to Glu-63, | AR054: 10, AR051: 2, | | |
| | | | | | | Ala-66 to Val-75, | AR050: 2, AR089: 1, | | |
| | | | | | | Glu-77 to Phe-86, | AR061: 1 | | |
| | | | | | | Asp-199 to Gly-211. | S0418: 1, H0328: 1 and | | |
| | | | | | | | L0758: 1. | | |
| 403 | HE9PF14 | 908512 | 413 | 2-727 | 1200 | Thr-2 to Asn-11, | AR089: 2, AR061: 2 | | |
| | | | | | | Gln-35 to Thr-40. | L0749: 4, H0620: 2, | | |
| | | | | | | | L0769: 2, L0766: 2, | | |
| | | | | | | | H0547: 2, L0748: 2, | | |
| | | | | | | | H0265: 1, H0656: 1, | | |
| | | | | | | | H0329: 1, L0717: 1, | | |
| | | | | | | | H0050: 1, H0024: 1, | | |
| | | | | | | | H0090: 1, H0038: 1, | | |
| | | | | | | | H0616: 1, H0494: 1, | | |
| | | | | | | | H0529: 1, L0764: 1, | | |
| | | | | | | | L0521: 1, L0794: 1, | | |
| | | | | | | | L0774: 1, L0775: 1, | | |
| | | | | | | | L0526: 1, L0783: 1, | | |
| | | | | | | | L0665: 1, H0144: 1, | | |
| | | | | | | | S0380: 1, H0436: 1, | | |
| | | | | | | | L0747: 1, L0750: 1, | | |
| | | | | | | | L0759: 1 and H0445: 1. | | |
| 404 | HHFKC40 | 908519 | 414 | 397-2 | 1201 | Cys-20 to Asp-25. | AR089: 15, AR061: 5 | | |
| | | | | | | | H0619: 2, H0255: 1, | | |
| | | | | | | | L0805: 1, L0509: 1 and | | |
| | | | | | | | L0789: 1. | | |
| 405 | HWLEO07 | 908520 | 415 | 300-587 | 1202 | | AR061: 1, AR089: 1 | | |
| | | | | | | | S0354: 1, S0222: 1 and | | |
| | | | | | | | H0551: 1. | | |
| 406 | HPRBL56 | 908522 | 416 | 330-623 | 1203 | Gln-55 to Leu-63, | H0032: 1 and S0242: 1. | | |
| | | | | | | Thr-93 to Asn-98. | | | |
| 407 | HSANL93 | 908533 | 417 | 180-557 | 1204 | Gly-25 to Trp-30. | AR089: 4, AR061: 2 | | |
| | | | | | | | H0065: 2 and H0083: | | |
| | | | | | | | 1. | | |
| 408 | HWWFL94 | 908534 | 418 | 2-547 | 1205 | | AR089: 16, AR061: 6 | | |
| | | | | | | | H0657: 1, L0562: 1, | | |
| | | | | | | | H0156: 1, H0178: 1 and | | |
| | | | | | | | L0804: 1. | | |
| 409 | HSXFM49 | 908570 | 419 | 72-347 | 1206 | Pro-36 to Tyr-42. | AR089: 32, AR061: 11 | | |
| | | | | | | | L0759: 2, H0032: 1, | | |
| | | | | | | | S0036: 1, L0775: 1 and | | |
| | | | | | | | L0749: 1. | | |
| 410 | HAGII04 | 908571 | 420 | 141-440 | 1207 | Gln-39 to Leu-48. | AR061: 4, AR089: 3 | | |
| | | | | | | | L0755: 2, L0717: 1, | | |
| | | | | | | | H0453: 1, S0346: 1, | | |
| | | | | | | | H0272: 1, L0520: 1, | | |
| | | | | | | | S0152: 1 and L0751: 1. | | |
| 411 | HDPJE32 | 908575 | 421 | 1-468 | 1208 | | AR089: 1, AR061: 0 | | |
| | | | | | | | H0619: 3, H0040: 3, | | |
| | | | | | | | L0768: 2, L0794: 2, | | |
| | | | | | | | L0766: 2, L0663: 2, | | |
| | | | | | | | L0748: 2, S0134: 1, | | |
| | | | | | | | H0486: 1, H0318: 1, | | |
| | | | | | | | H0046: 1, H0188: 1, | | |
| | | | | | | | H0090: 1, S0002: 1, | | |
| | | | | | | | H0529: 1, L0658: 1, | | |
| | | | | | | | L0519: 1, L0647: 1, | | |
| | | | | | | | L0787: 1, H0521: 1 and | | |
| | | | | | | | L0588: 1. | | |
| 412 | HHFBT95 | 908578 | 422 | 72-623 | 1209 | Glu-1 to Lys-15. | AR089: 0, AR061: 0 | | |
| | | | | | | | H0457: 1, H0050: 1, | | |
| | | | | | | | and H0040: 1. | | |
| 413 | HUVDO59 | 908593 | 423 | 175-432 | 1210 | Leu-4 to Glu-17, | AR089: 31, AR061: 10 | | |
| | | | | | | Asp-66 to Asn-76. | S0040: 1, H0570: 1, | | |
| | | | | | | | H0056: 1, H0623: 1, | | |
| | | | | | | | L0638: 1, H0519: 1 and | | |
| | | | | | | | L0745: 1. | | |
| 414 | HCGAC50 | 908683 | 424 | 3-362 | 1211 | Ser-1 to Gly-19, | AR089: 1, AR061: 0 | | |
| | | | | | | Pro-21 to Gln-28, | H0449: 1, H0587: 1, | | |
| | | | | | | Leu-60 to Gly-66. | H0100: 1, H0529: 1, | | |
| | | | | | | | H0521: 1 and H0555: 1. | | |
| 415 | HODEV94 | 908947 | 425 | 195-728 | 1212 | Thr-5 to Glu-19, | AR089: 4, AR061: 4 | | |
| | | | | | | Pro-79 to Phe-90, | L0595: 2, S0114: 1, | | |
| | | | | | | Arg-97 to Glu-104, | H0615: 1, H0264: 1, | | |
| | | | | | | Lys-124 to Glu-131. | H0623: 1, H0520: 1, | | |
| | | | | | | | H0547: 1 and H0521: 1. | | |
| 416 | HTENS61 | 909007 | 426 | 3-389 | 1213 | Gly-1 to Arg-8, | AR089: 2, AR061: 1 | | |
| | | | | | | Arg-18 to Gly-29. | H0616: 6, L0759: 4, | | |
| | | | | | | | L0794: 3, H0393: 2, | | |
| | | | | | | | H0150: 2, L0758: 2, | | |
| | | | | | | | H0657: 1, S0001: 1, | | |
| | | | | | | | G0669: 1, S0300: 1, | | |
| | | | | | | | H0351: 1, H0251: 1, | | |
| | | | | | | | H0553: 1, H0644: 1, | | |
| | | | | | | | H0038: 1, H0040: 1, | | |
| | | | | | | | L0662: 1, L0659: 1, | | |
| | | | | | | | L0791: 1, H0520: 1, | | |
| | | | | | | | H0521: 1, H0522: 1, | | |
| | | | | | | | L0747: 1 and L0777: 1. | | |
| 417 | HHFJL16 | 909009 | 427 | 1-315 | 1214 | Asp-71 to Thr-90. | AR089: 13, AR061: 8 | | |
| | | | | | | | H0556: 1, H0619: 1 | | |
| | | | | | | | and H0050: 1. | | |
| 418 | HPJEN26 | 909014 | 428 | 86-913 | 1215 | Ser-20 to Gly-29. | AR089: 13, AR061: 8 | | |
| | | | | | | | H0521: 3, H0040: 2, | | |
| | | | | | | | H0599: 1, H0052: 1, | | |
| | | | | | | | H0123: 1, S0051: 1, | | |
| | | | | | | | H0083: 1, S0152: 1 and | | |
| | | | | | | | H0543: 1. | | |
| 419 | HSCMA28 | 909018 | 429 | 126-551 | 1216 | Ser-1 to Asp-7, | AR089: 2, AR061: 1 | | |
| | | | | | | Gln-42 to Arg-47, | H0024: 1, L0455: 1, | | |
| | | | | | | Lys-95 to Ser-100, | L0803: 1, H0658: 1, | | |
| | | | | | | Ser-105 to Asp-123. | L0747: 1 and H0653: 1. | | |
| 420 | HE8NH04 | 909024 | 430 | 36-818 | 1217 | Ala-30 to Tyr-35, | AR089: 81, AR061: 14 | | |
| | | | | | | Ala-53 to Ala-58, | H0013: 1 and S0314: 1. | | |
| | | | | | | Thr-68 to Glu-74, | | | |
| | | | | | | Gln-106 to Ser-113, | | | |
| | | | | | | Lys-115 to Met-122. | | | |
| 421 | HE8TK33 | 909025 | 431 | 42-608 | 1218 | Ser-20 to Gly-27, | AR061: 3, AR089: 2 | | |
| | | | | | | Leu-41 to Arg-49. | H0013: 1, L0471: 1, | | |
| | | | | | | | S0426: 1 and H0144: 1. | | |
| 422 | HE8QP45 | 909026 | 432 | 118-690 | 1219 | Tyr-56 to Pro-61, | AR061: 8, AR089: 5 | | |
| | | | | | | Val-80 to Thr-88, | L0518: 2, S0420: 1, | | |
| | | | | | | Gln-100 to Leu-106, | H0013: 1, L0598: 1, | | |
| | | | | | | Tyr-128 to Ser-143, | L0665: 1, H0672: 1, | | |
| | | | | | | Ser-151 to Phe-161. | L0755: 1, L0596: 1, | | |
| | | | | | | | L0605: 1, L0594: 1 and | | |
| | | | | | | | S0276: 1. | | |
| 423 | HTEJR88 | 909033 | 433 | 105-527 | 1220 | Pro-6 to Gly-12, | AR061: 8, AR089: 4 | | |
| | | | | | | Gln-81 to Pro-91, | L0758: 8, H0038: 3, | | |
| | | | | | | Phe-129 to Ala-141. | L0747: 2, L0759: 2, | | |
| | | | | | | | T0040: 1, H0052: 1, | | |
| | | | | | | | H0135: 1, L0521: 1, | | |
| | | | | | | | L0794: 1, L0774: 1, | | |
| | | | | | | | L0806: 1, L0517: 1, | | |
| | | | | | | | L0754: 1, L0731: 1 and | | |
| | | | | | | | S0026: 1. | | |
| 424 | HFKHA05 | 909088 | 434 | 35-520 | 1221 | Thr-1 to Gly-10, | AR061: 2, AR089: 1 | | |
| | | | | | | Gly-35 to Lys-52, | H0620: 3, H0144: 3, | | |
| | | | | | | Leu-67 to Leu-72. | H0264: 2, H0556: 1, | | |
| | | | | | | | S6024: 1, H0255: 1, | | |
| | | | | | | | H0549: 1, H0486: 1, | | |
| | | | | | | | H0013: 1, H0290: 1, | | |
| | | | | | | | T0041: 1, L0649: 1, | | |
| | | | | | | | L0804: 1, T0068: 1, | | |
| | | | | | | | L0748: 1, L0780: 1, | | |
| | | | | | | | L0755: 1 and L0759: 1. | | |
| 425 | HTELI13 | 909092 | 435 | 46-966 | 1222 | Lys-217 to Gln-224, | AR089: 18, AR061: 11 | | |
| | | | | | | Ile-254 to Glu-259, | H0616: 2, H0196: 1, | | |
| | | | | | | Pro-275 to Glu-280. | H0090: 1, L0794: 1, | | |
| | | | | | | | S0028: 1, L0439: 1 and | | |
| | | | | | | | L0750: 1. | | |
| 426 | HDABU92 | 909093 | 436 | 261-764 | 1223 | Glu-9 to Lys-19, | AR089: 2, AR061: 2 | | |
| | | | | | | Glu-153 to Ser-158. | L0758: 4, H0013: 2, | | |
| | | | | | | | L0779: 2, H0497: 1, | | |
| | | | | | | | S0346: 1, H0123: 1, | | |
| | | | | | | | S0003: 1, H0090: 1, | | |
| | | | | | | | T0042: 1, H0560: 1, | | |
| | | | | | | | S0210: 1, L0763: 1, | | |
| | | | | | | | L0770: 1 and L0794: 1. | | |
| 427 | HUJBC25 | 909098 | 437 | 2-541 | 1224 | | AR089: 3, AR061: 0 | | |
| | | | | | | | H0650: 1, S0278: 1, | | |
| | | | | | | | H0069: 1, H0635: 1, | | |
| | | | | | | | H0581: 1, H0268: 1, | | |
| | | | | | | | H0529: 1 and H0521: 1. | | |
| 428 | HTXOA73 | 909107 | 438 | 2-514 | 1225 | Thr-27 to Pro-34. | AR061: 1, AR089: 1 | | |
| | | | | | | | H0556: 2, H0591: 1, | | |
| | | | | | | | H0494: 1 and L0777: 1. | | |
| 429 | HDPFU72 | 909108 | 439 | 79-393 | 1226 | Leu-33 to Ile-38, | AR061: 19, AR089: 10 | | |
| | | | | | | Ser-75 to Asp-81. | H0040: 1, H0494: 1, | | |
| | | | | | | | H0529: 1, S0152: 1, | | |
| | | | | | | | H0521: 1 and H0668: 1. | | |
| 430 | HE2JI76 | 909110 | 440 | 34-507 | 1227 | Arg-34 to Glu-40. | AR089: 1, AR061: 1 | | |
| | | | | | | | L0777: 2, H0624: 1, | | |
| | | | | | | | S0212: 1, H0081: 1, | | |
| | | | | | | | H0373: 1, H0267: 1, | | |
| | | | | | | | H0212: 1, H0494: 1, | | |
| | | | | | | | L0803: 1, T0068: 1, | | |
| | | | | | | | H0519: 1, H0579: 1, | | |
| | | | | | | | L0779: 1 and L0595: 1. | | |
| 431 | HNTDJ81 | 909111 | 441 | 137-733 | 1228 | Ser-1 to Lys-6, | AR089: 3, AR061: 1 | | |
| | | | | | | Arg-25 to Glu-31, | | | |
| | | | | | | Arg-160 to Val-170. | | | |
| 432 | HADDS16 | 909116 | 442 | 130-492 | 1229 | Ala-7 to Gly-15, | AR089: 0, AR061: 0 | | |
| | | | | | | Glu-33 to Gly-39, | H0369: 1, L0623: 1, | | |
| | | | | | | Ser-107 to Pro-115. | H0427: 1, L0646: 1, | | |
| | | | | | | | L0803: 1, L0659: 1, | | |
| | | | | | | | L0666: 1, S0136: 1 and | | |
| | | | | | | | H0423: 1. | | |
| 433 | HDQHG17 | 909120 | 443 | 3-494 | 1230 | | AR089: 3, AR061: 2 | | |
| | | | | | | | H0292: 1, H0124: 1 | | |
| | | | | | | | and H0521: 1. | | |
| 434 | HTAIR71 | 909129 | 444 | 114‥566 | 1231 | Asn-34 to Asp-40. | AR061: 4, AR089: 2 | 21q22.1 | 147450, |
| | | | | | | | H0622: 3, H0305: 2, | | 176261, |
| | | | | | | | H0589: 2, H0580: 1, | | 253270, |
| | | | | | | | H0635: 1, H0616: 1, | | 601399 |
| | | | | | | | S0002: 1, L0748: 1, | | |
| | | | | | | | L0749: 1 and L0758: 1. | | |
| 435 | HWADM93 | 909140 | 445 | 107-565 | 1232 | | AR089: 1, AR061: 0 | | |
| | | | | | | | H0581: 1, H0521: 1, | | |
| | | | | | | | S0037: 1 and S3014: 1. | | |
| 436 | HMWIU35 | 909167 | 446 | 75-533 | 1233 | Arg-1 to Arg-15. | AR089: 18, AR061: 4 | | |
| | | | | | | | L0749: 4, H0556: 3, | | |
| | | | | | | | H0124: 3, L0748: 3, | | |
| | | | | | | | L0743: 2, L0746: 2, | | |
| | | | | | | | L0777: 2, T0002: 1, | | |
| | | | | | | | S0470: 1, H0341: 1, | | |
| | | | | | | | S0418: 1, S0358: 1, | | |
| | | | | | | | H0261: 1, H0550: 1, | | |
| | | | | | | | H0431: 1, H0013: 1, | | |
| | | | | | | | H0635: 1, S0010: 1, | | |
| | | | | | | | H0024: 1, H0615: 1, | | |
| | | | | | | | H0673: 1, S0364: 1, | | |
| | | | | | | | L0455: 1, H0633: 1, | | |
| | | | | | | | S0002: 1, L0640: 1, | | |
| | | | | | | | L0639: 1, L0521: 1, | | |
| | | | | | | | L0794: 1, L0803: 1, | | |
| | | | | | | | L0650: 1, L0775: 1, | | |
| | | | | | | | L0606: 1, S0152: 1, | | |
| | | | | | | | H0457: 1, S0152: 1, | | |
| | | | | | | | L0439: 1, L0747: 1, | | |
| | | | | | | | L0780: 1, L0758: 1 and | | |
| | | | | | | | L0759: 1. | | |
| 437 | HDPTQ41 | 913933 | 447 | 2-409 | 1234 | Pro-1 to Arg-6, | AR089: 5, AR061: 4 | | |
| | | | | | | Gly-23 to Gly-29, | L0803: 7, L0770: 2, | | |
| | | | | | | Glu-99 to Gln-108. | L0794: 2, L0804: 2, | | |
| | | | | | | | L0777: 2, L0731: 2, | | |
| | | | | | | | H0423: 2, T0049: 1, | | |
| | | | | | | | H0657: 1, S0360: 1, | | |
| | | | | | | | S0007: 1, S0046: 1, | | |
| | | | | | | | S0222: 1, H0266: 1, | | |
| | | | | | | | L0520: 1, L0761: 1, | | |
| | | | | | | | L0768: 1, L0775: 1, | | |
| | | | | | | | L0783: 1, L0787: 1, | | |
| | | | | | | | S0126: 1, H0659: 1, | | |
| | | | | | | | H0539: 1, H0521: 1, | | |
| | | | | | | | L0753: 1 and S0026: 1. | | |
| 438 | HHELR05 | 916009 | 448 | 463-1944 | 1235 | Gln-7 to Trp-13. | AR089: 1, AR061: 0 | | |
| | | | | | | | H0305: 4, S0040: 1, | | |
| | | | | | | | H0549: 1, S6016: 1, | | |
| | | | | | | | H0069: 1, H0561: 1, | | |
| | | | | | | | H0144: 1, H0702: 1, | | |
| | | | | | | | H0518: 1, H0522: 1, | | |
| | | | | | | | S0044: 1, L0748: 1, | | |
| | | | | | | | H0542: 1, H0543: 1 and | | |
| | | | | | | | H0423: 1. | | |
| 439 | HLHFN70 | 917541 | 449 | 85-309 | 1236 | | AR061: 6, AR089: 4 | | |
| | | | | | | | S0346: 2, L0747: 2, | | |
| | | | | | | | L0749: 2, L0777: 2, | | |
| | | | | | | | H0170: 1, H0024: 1, | | |
| | | | | | | | L0455: 1, L0769: 1, | | |
| | | | | | | | L0800: 1, L0662: 1, | | |
| | | | | | | | L0803: 1, H0658: 1, | | |
| | | | | | | | H0539: 1, S0380: 1, | | |
| | | | | | | | L0439: 1, L0751: 1, | | |
| | | | | | | | L0758: 1 and H0653: 1. | | |
| 440 | HTOFU03 | 921894 | 450 | 192-506 | 1237 | Glu-8 to Lys-14. | AR061: 3, AR089: 1 | | |
| | | | | | | | L0439: 8, L0596: 4, | | |
| | | | | | | | L0747: 3, L0777: 3, | | |
| | | | | | | | S0376: 2, H0052: 2, | | |
| | | | | | | | H0264: 2, L0770: 2, | | |
| | | | | | | | L0803: 2, L0367: 2, | | |
| | | | | | | | L0790: 2, H0144: 2, | | |
| | | | | | | | S0152: 2, L0774: 2, | | |
| | | | | | | | H0624: 1, T0049: 1, | | |
| | | | | | | | H0341: 1, H0340: 1, | | |
| | | | | | | | H0261: 1, H0492: 1, | | |
| | | | | | | | H0013: 1, L0163: 1, | | |
| | | | | | | | H0266: 1, H0606: 1, | | |
| | | | | | | | L0055: 1, L0455: 1, | | |
| | | | | | | | H0598: 1, H0591: 1, | | |
| | | | | | | | H0038: 1, H0040: 1, | | |
| | | | | | | | H0413: 1, T0041: 1, | | |
| | | | | | | | H0561: 1, H0529: 1, | | |
| | | | | | | | L0761: 1, L0645: 1, | | |
| | | | | | | | L0794: 1, L0666: 1, | | |
| | | | | | | | L0663: 1, S0428: 1, | | |
| | | | | | | | L0438: 1, H0555: 1, | | |
| | | | | | | | S0027: 1, L0748: 1, | | |
| | | | | | | | L0754: 1, L0779: 1, | | |
| | | | | | | | L0731: 1, L0758: 1, | | |
| | | | | | | | H0445: 1 and S0434: 1. | | |
| 441 | HTLDF63 | 924552 | 451 | 1-462 | 1238 | Lys-15 to Asp-21. | AR089: 31, AR061: 21 | | |
| | | | | | | | H0523: 1 and H0052: | | |
| | | | | | | | 1. | | |
| 442 | HTTBX05 | 928079 | 452 | 3-317 | 1239 | Pro-16 to Tyr-21, | AR089: 7, AR061: 7 | | |
| | | | | | | Lys-30 to Thr-35. | L0602: 6, H0486: 4, | | |
| | | | | | | | H0090: 4, H0040: 4, | | |
| | | | | | | | L0748: 4, L0747: 4, | | |
| | | | | | | | H0624: 3, H0488: 3, | | |
| | | | | | | | H0656: 2, H0617: 2, | | |
| | | | | | | | H0634: 2, L0373: 2, | | |
| | | | | | | | L0649: 2, L0655: 2, | | |
| | | | | | | | L0517: 2, L0809: 2, | | |
| | | | | | | | L0438: 2, H0547: 2, | | |
| | | | | | | | L0754: 2, L0749: 2, | | |
| | | | | | | | H0445: 2, L0362: 2, | | |
| | | | | | | | H0543: 2, H0423: 2, | | |
| | | | | | | | S0116: 1, H0341: 1, | | |
| | | | | | | | S0212: 1, S0376: 1, | | |
| | | | | | | | T0008: 1, L0394: 1, | | |
| | | | | | | | H0497: 1, H0013: 1, | | |
| | | | | | | | H0427: 1, S0280: 1, | | |
| | | | | | | | H0156: 1, H0581: 1, | | |
| | | | | | | | H0052: 1, H0239: 1, | | |
| | | | | | | | S6028: 1, H0032: 1, | | |
| | | | | | | | H0124: 1, H0038: 1, | | |
| | | | | | | | T0067: 1, H0413: 1, | | |
| | | | | | | | L0369: 1, L0637: 1, | | |
| | | | | | | | L0764: 1, L0771: 1, | | |
| | | | | | | | L0662: 1, L0805: 1, | | |
| | | | | | | | L0653: 1, L0657: 1, | | |
| | | | | | | | L0659: 1, L0664: 1, | | |
| | | | | | | | H0435: 1, H0518: 1, | | |
| | | | | | | | H0704: 1, H0576: 1, | | |
| | | | | | | | L0756: 1, L0779: 1, | | |
| | | | | | | | L0777: 1, L0780: 1, | | |
| | | | | | | | L0758: 1, H0707: 1, | | |
| | | | | | | | L0592: 1, L0593: 1, | | |
| | | | | | | | S0026: 1 and H0506: 1. | | |
| 443 | HDPSX40 | 935352 | 453 | 2-1135 | 1240 | Gly-29 to Gly-34. | AR061: 3, AR089: 2 | | |
| | | | | | | | H0590: 2, H0521: 2, | | |
| | | | | | | | S0356: 1, S0046: 1, | | |
| | | | | | | | H0619: 1, H0393: 1, | | |
| | | | | | | | H0550: 1, H0327: 1, | | |
| | | | | | | | H0046: 1, T0023: 1, | | |
| | | | | | | | H0598: 1, H0090: 1, | | |
| | | | | | | | H0494: 1, S0344: 1, | | |
| | | | | | | | L0794: 1, L0790: 1, | | |
| | | | | | | | L0664: 1, H0144: 1, | | |
| | | | | | | | S0028: 1, L0751: 1, | | |
| | | | | | | | L0757: 1, L0759: 1 and | | |
| | | | | | | | L0591: 1. | | |
| 444 | HNFJB24 | 935689 | 454 | 3-425 | 1241 | Gly-34 to Ser-40. | AR089: 1, AR061: 0 | | |
| | | | | | | | H0013: 1 and H0271: | | |
| | | | | | | | 1. | | |
| 445 | HLWBE75 | 935690 | 455 | 310-669 | 1242 | Glu-5 to Cys-11, | AR089: 2, AR061: 2 | | |
| | | | | | | Ser-64 to Glu-69, | L0803: 4, S0036: 2, | | |
| | | | | | | Ser-77 to Leu-82, | L0805: 2, L0748: 2, | | |
| | | | | | | Pro-86 to Gln-98, | L0740: 2, L0754: 2, | | |
| | | | | | | Pro-105 to Val-117. | L0731: 2, L0759: 2, | | |
| | | | | | | | H0556: 1, H0638: 1, | | |
| | | | | | | | S0132: 1, H0024: 1, | | |
| | | | | | | | S0003: 1, H0553: 1, | | |
| | | | | | | | L0055: 1, L0771: 1, | | |
| | | | | | | | L0794: 1, L0766: 1, | | |
| | | | | | | | L0775: 1, L0776: 1, | | |
| | | | | | | | L0559: 1, S0374: 1, | | |
| | | | | | | | H0547: 1, S0350: 1, | | |
| | | | | | | | S0188: 1, S0392: 1, | | |
| | | | | | | | L0779: 1, L0755: 1 and | | |
| | | | | | | | L0758: 1. | | |
| 446 | HDPCW53 | 946458 | 456 | 551-1222 | 1243 | | AR089: 12, AR061: 5 | | |
| | | | | | | | H0494: 2, T0110: 1, | | |
| | | | | | | | H0046: 1, H0553: 1, | | |
| | | | | | | | H0366: 1, H0520: 1, | | |
| | | | | | | | H0521: 1 and H0423: 1. | | |
| 447 | HHASV05 | 948749 | 457 | 1817-606 | 1244 | | AR089: 3, AR061: 2 | | |
| | | | | | | | L0794: 7, H0556: 6, | | |
| | | | | | | | L0750: 6, L0757: 5, | | |
| | | | | | | | H0494: 4, L0803: 4, | | |
| | | | | | | | L0754: 4, L0749: 4, | | |
| | | | | | | | S0250: 3, L0766: 3, | | |
| | | | | | | | L0740: 3, H0052: 2, | | |
| | | | | | | | H0545: 2, H0083: 2, | | |
| | | | | | | | H0087: 2, H0551: 2, | | |
| | | | | | | | L0764: 2, L0662: 2, | | |
| | | | | | | | L0804: 2, L0805: 2, | | |
| | | | | | | | L0776: 2, L0809: 2, | | |
| | | | | | | | L0789: 2, H0593: 2, | | |
| | | | | | | | H0521: 2, S0027: 2, | | |
| | | | | | | | L0751: 2, L0779: 2, | | |
| | | | | | | | S0026: 2, H0265: 1, | | |
| | | | | | | | T0002: 1, S0134: 1, | | |
| | | | | | | | S0218: 1, H0650: 1, | | |
| | | | | | | | H0657: 1, S0212: 1, | | |
| | | | | | | | H0661: 1, H0458: 1, | | |
| | | | | | | | S0418: 1, H0580: 1, | | |
| | | | | | | | S0132: 1, H0370: 1, | | |
| | | | | | | | H0250: 1, H0156: 1, | | |
| | | | | | | | H0575: 1, H0618: 1, | | |
| | | | | | | | H0318: 1, S0474: 1, | | |
| | | | | | | | H0581: 1, H0046: 1, | | |
| | | | | | | | H0041: 1, L0163: 1, | | |
| | | | | | | | H0051: 1, L0179: 1, | | |
| | | | | | | | H0039: 1, L0055: 1, | | |
| | | | | | | | H0068: 1, H0135: 1, | | |
| | | | | | | | H0040: 1, H0272: 1, | | |
| | | | | | | | H0412: 1, H0561: 1, | | |
| | | | | | | | H0509: 1, S0210: 1, | | |
| | | | | | | | H0529: 1, L0369: 1, | | |
| | | | | | | | L0648: 1, L0768: 1, | | |
| | | | | | | | L0650: 1, L0656: 1, | | |
| | | | | | | | L0558: 1, L0666: 1, | | |
| | | | | | | | L0665: 1, H0144: 1, | | |
| | | | | | | | H0547: 1, H0519: 1, | | |
| | | | | | | | H0689: 1, H0682: 1, | | |
| | | | | | | | H0539: 1, H0555: 1, | | |
| | | | | | | | S0392: 1, S0037: 1, | | |
| | | | | | | | S3014: 1, L0748: 1, | | |
| | | | | | | | L0780: 1, S0436: 1, | | |
| | | | | | | | L0589: 1, L0592: 1, | | |
| | | | | | | | H0542: 1 and L0600: 1. | | |
| 448 | HHEDS40 | 950456 | 458 | 2614-923 | 1245 | Glu-20 to Lys-31, | AR051: 7, AR054: | | |
| | | | | | | Ser-131 to Lys-137, | 19, AR050: 11, AR089: | | |
| | | | | | | Asp-157 to Cys-165, | 3, AR061: 1 | | |
| | | | | | | Asn-167 to Lys-173, | L0766: 8, L0769: 4, | | |
| | | | | | | Glu-234 to Ser-244, | L0794: 4, L0803: 4, | | |
| | | | | | | Leu-312 to Glu-323, | L0748: 3, L0749: 3, | | |
| | | | | | | Asp-332 to Thr-353, | H0266: 2, L0764: 2, | | |
| | | | | | | Thr-364 to Ala-377, | H0144: 2, L0777: 2, | | |
| | | | | | | Pro-386 to Pro-391, | L0731: 2, H0445: 2, | | |
| | | | | | | Ala-446 to Asp-452, | L0596: 2, H0543: 2, | | |
| | | | | | | Pro-517 to Glu-527, | H0556: 1, S0116: 1, | | |
| | | | | | | Glu-536 to Glu-541. | H0638: 1, H0580: 1, | | |
| | | | | | | | S0045: 1, T0039: 1, | | |
| | | | | | | | S6028: 1, H0267: 1, | | |
| | | | | | | | H0622: 1, L0483: 1, | | |
| | | | | | | | S0036: 1, H0135: 1, | | |
| | | | | | | | H0561: 1, L0761: 1, | | |
| | | | | | | | L0806: 1, L0805: 1, | | |
| | | | | | | | L0657: 1, L0666: 1, | | |
| | | | | | | | S0053: 1, S0330: 1, | | |
| | | | | | | | H0539: 1, S3014: 1, | | |
| | | | | | | | L0779: 1, L0757: 1, | | |
| | | | | | | | L0593: 1, H0542: 1 and | | |
| | | | | | | | S0424: 1. | | |
| 449 | HNTAQ63 | 951706 | 459 | 143-589 | 1246 | | AR089: 6, AR061: 2 | | |
| | | | | | | | L0748: 5, L0362: 5, | | |
| | | | | | | | H0040: 4, S0472: 3, | | |
| | | | | | | | H0598: 2, L0662: 2, | | |
| | | | | | | | L0766: 2, H0659: 2, | | |
| | | | | | | | H0539: 2, L0747: 2, | | |
| | | | | | | | L0750: 2, L0758: 2, | | |
| | | | | | | | L0596: 2, H0543: 2, | | |
| | | | | | | | H0656: 1, S0116: 1, | | |
| | | | | | | | H0004: 1, S0010: 1, | | |
| | | | | | | | H0009: 1, L0185: 1, | | |
| | | | | | | | H0266: 1, H0687: 1, | | |
| | | | | | | | S0003: 1, H0252: 1, | | |
| | | | | | | | H0328: 1, H0634: 1, | | |
| | | | | | | | S0386: 1, L0475: 1, | | |
| | | | | | | | H0641: 1, H0646: 1, | | |
| | | | | | | | H0529: 1, L0648: 1, | | |
| | | | | | | | L0626: 1, L0768: 1, | | |
| | | | | | | | L0803: 1, L0774: 1, | | |
| | | | | | | | L0666: 1, L0665: 1, | | |
| | | | | | | | H0520: 1, H0547: 1, | | |
| | | | | | | | H0519: 1, H0689: 1, | | |
| | | | | | | | S0328: 1, S0152: 1, | | |
| | | | | | | | H0522: 1, L0439: 1, | | |
| | | | | | | | L0756: 1, L0779: 1, | | |
| | | | | | | | S0031: 1, H0445: 1 and | | |
| | | | | | | | L0465: 1. | | |
| 450 | HNGEN60 | 951952 | 460 | 175-495 | 1247 | | AR061: 5, AR089: 2 | | |
| | | | | | | | L0766: 2, L0806: 2, | | |
| | | | | | | | H0624: 1, H0341: 1, | | |
| | | | | | | | H0632: 1, H0486: 1, | | |
| | | | | | | | H0013: 1, H0421: 1, | | |
| | | | | | | | H0615: 1, H0553: 1, | | |
| | | | | | | | H0591: 1, H0038: 1, | | |
| | | | | | | | H0616: 1, H0509: 1, | | |
| | | | | | | | H0529: 1, L0761: 1, | | |
| | | | | | | | L0768: 1, S0052: 1, | | |
| | | | | | | | H0547: 1, H0435: 1, | | |
| | | | | | | | H0696: 1, L0439: 1, | | |
| | | | | | | | L0777: 1, L0759: 1, | | |
| | | | | | | | L0588: 1 and H0665: 1. | | |
| 451 | HWBDS07 | 952796 | 461 | 61-396 | 1248 | Ser-15 to Thr-22. | AR089: 5, AR061: 1 | | |
| | | | | | | | H0580: 1 and H0519: | | |
| | | | | | | | 1. | | |
| 452 | HNTDI77 | 958279 | 462 | 55-507 | 1249 | Ser-15 to Ser-21. | AR089: 1, AR061: 1 | | |
| | | | | | | | H0052: 1, S0022: 1, | | |
| | | | | | | | H0519: 1 and H0521: 1. | | |
| 453 | HDPDN03 | 960952 | 463 | 1-1614 | 1250 | Pro-9 to Gly-20, | AR089: 9, AR061: 3 | | |
| | | | | | | Ala-26 to Ala-35, | L0777: 13, L0740: 7, | | |
| | | | | | | Pro-40 to Arg-47, | L0759: 5, L0608: 5, | | |
| | | | | | | Leu-57 to Thr-62, | H0031: 4, H0042: 3, | | |
| | | | | | | Asn-95 to Asn-101, | L0771: 3, L0665: 3, | | |
| | | | | | | Leu-137 to Pro-143. | L0439: 3, L0754: 3, | | |
| | | | | | | | H0024: 2, L0769: 2, | | |
| | | | | | | | L0794: 2, L0766: 2, | | |
| | | | | | | | L0806: 2, L0790: 2, | | |
| | | | | | | | H0521: 2, L0748: 2, | | |
| | | | | | | | L0750: 2, L0756: 2, | | |
| | | | | | | | L0758: 2, L0592: 2, | | |
| | | | | | | | H0556: 1, H0159: 1, | | |
| | | | | | | | T0049: 1, H0657: 1, | | |
| | | | | | | | S0007: 1, S0046: 1, | | |
| | | | | | | | H0619: 1, S0222: 1, | | |
| | | | | | | | H0574: 1, H0486: 1, | | |
| | | | | | | | H0318: 1, H0581: 1, | | |
| | | | | | | | H0052: 1, H0327: 1, | | |
| | | | | | | | H0051: 1, T0010: 1, | | |
| | | | | | | | H0039: 1, L0483: 1, | | |
| | | | | | | | L0143: 1, H0032: 1, | | |
| | | | | | | | H0673: 1, H0090: 1, | | |
| | | | | | | | H0038: 1, T0067: 1, | | |
| | | | | | | | S0038: 1, H0529: 1, | | |
| | | | | | | | L0640: 1, L0763: 1, | | |
| | | | | | | | L0639: 1, L0667: 1, | | |
| | | | | | | | L0764: 1, L0662: 1, | | |
| | | | | | | | L0768: 1, L0523: 1, | | |
| | | | | | | | L0657: 1, L0659: 1, | | |
| | | | | | | | H0144: 1, H0659: 1, | | |
| | | | | | | | H0658: 1, S0328: 1, | | |
| | | | | | | | H0539: 1, S0378: 1, | | |
| | | | | | | | S0028: 1, L0747: 1, | | |
| | | | | | | | L0752: 1, L0753: 1, | | |
| | | | | | | | L0755: 1, L0731: 1, | | |
| | | | | | | | L0596: 1, H0543: 1 and | | |
| | | | | | | | S0412: 1. | | |
| 454 | HT4EC82 | 961090 | 464 | 3-758 | 1251 | Arg-1 to Leu-9, | AR061: 6, AR089: 2 | | |
| | | | | | | Leu-20 to Trp-26, | L0766: 5, H0659: 4, | | |
| | | | | | | Pro-28 to Arg-37, | H0090: 3, H0585: 2, | | |
| | | | | | | Pro-53 to Gly-60, | L0800: 2, L0805: 2, | | |
| | | | | | | Gly-217 to Ser-224, | H0224: 1, H0341: 1, | | |
| | | | | | | Ser-226 to Gly-233. | H0441: 1, H0318: 1, | | |
| | | | | | | | H0083: 1, H0087: 1, | | |
| | | | | | | | L0772: 1, L0764: 1, | | |
| | | | | | | | L0648: 1, L0794: 1, | | |
| | | | | | | | L0809: 1, L0731: 1, | | |
| | | | | | | | H0542: 1 and H0543: 1. | | |
| 455 | HHFLH10 | 963163 | 465 | 412-981 | 1252 | Gln-6 to Arg-28. | AR089: 8, AR061: 8 | | |
| | | | | | | | H0619: 1, H0046: 1, | | |
| | | | | | | | H0553: 1, H0529: 1 and | | |
| | | | | | | | H0522: 1. | | |
| 456 | HPMGO02 | 963393 | 466 | 97-888 | 1253 | Arg-1 to Ser-9. | AR061: 3, AR089: 2 | | |
| | | | | | | | H0457: 10, H0031: 1, | | |
| | | | | | | | H0529: 1, L0794: 1 and | | |
| | | | | | | | S0190: 1. | | |
| 457 | HDPBB38 | 965903 | 467 | 2-1648 | 1254 | Asn-10 to Gln-16. | AR089: 7, AR061: 2 | | |
| | | | | | | | H0521: 2, L0439: 2, | | |
| | | | | | | | H0580: 1, H0151: 1, | | |
| | | | | | | | H0393: 1, H0581: 1, | | |
| | | | | | | | H0040: 1, H0477: 1, | | |
| | | | | | | | H0538: 1, L0591: 1 and | | |
| | | | | | | | S0276: 1. | | |
| 458 | HMAFY88 | 966935 | 468 | 843-277 | 1255 | Leu-28 to Cys-34. | AR061: 7, AR089: 4 | | |
| | | | | | | | L0766: 5, H0635: 2, | | |
| | | | | | | | S0010: 2, H0545: 2, | | |
| | | | | | | | S0051: 2, L0770: 2, | | |
| | | | | | | | L0794: 2, L0803: 2, | | |
| | | | | | | | L0774: 2, L0783: 2, | | |
| | | | | | | | L0749: 2, S0114: 1, | | |
| | | | | | | | S0358: 1, H0549: 1, | | |
| | | | | | | | H0574: 1, H0581: 1, | | |
| | | | | | | | H0596: 1, H0046: 1, | | |
| | | | | | | | H0016: 1, H0247: 1, | | |
| | | | | | | | H0271: 1, H0290: 1, | | |
| | | | | | | | T0023: 1, H0644: 1, | | |
| | | | | | | | H0032: 1, H0316: 1, | | |
| | | | | | | | H0059: 1, L0564: 1, | | |
| | | | | | | | S0144: 1, L0796: 1, | | |
| | | | | | | | L0761: 1, L0646: 1, | | |
| | | | | | | | L0804: 1, L0775: 1, | | |
| | | | | | | | L0776: 1, L0655: 1, | | |
| | | | | | | | L0809: 1, H0522: 1, | | |
| | | | | | | | H0134: 1, L0751: 1, | | |
| | | | | | | | L0777: 1, L0752: 1, | | |
| | | | | | | | L0755: 1 and S0276: 1. | | |
| 459 | HTXFB61 | 967821 | 469 | 727-482 | 1256 | | AR061: 7, AR089: 3 | | |
| 460 | HAGEL01 | 971510 | 470 | 1-564 | 1257 | Ala-4 to Ser-11, | AR089: 14, AR061: 8 | | |
| | | | | | | Asp-38 to Thr-52, | L0748: 8, L0766: 6, | | |
| | | | | | | Glu-57 to Lys-65, | H0341: 4, L0761: 4, | | |
| | | | | | | Glu-75 to Thr-80, | L0731: 4, S0360: 3, | | |
| | | | | | | Thr-126 to Ile-135, | H0046: 3, L0375: 3, | | |
| | | | | | | Ile-173 to Phe-188. | L0747: 3, L0608: 3, | | |
| | | | | | | | H0656: 2, H0358: 2, | | |
| | | | | | | | S0007: 2, L0471: 2, | | |
| | | | | | | | H0355: 2, H0135: 2, | | |
| | | | | | | | L0662: 2, L0768: 2, | | |
| | | | | | | | L0774: 2, L0806: 2, | | |
| | | | | | | | L0776: 2, L0663: 2, | | |
| | | | | | | | H0144: 2, L0754: 2, | | |
| | | | | | | | L0779: 2, L0759: 2, | | |
| | | | | | | | H0556: 1, H0218: 1, | | |
| | | | | | | | S0134: 1, H0657: 1, | | |
| | | | | | | | S0356: 1, S0354: 1, | | |
| | | | | | | | S0278: 1, H0587: 1, | | |
| | | | | | | | H0497: 1, H0632: 1, | | |
| | | | | | | | H0013: 1, S0010: 1, | | |
| | | | | | | | H0327: 1, H0545: 1, | | |
| | | | | | | | H0078: 1, H0266: 1, | | |
| | | | | | | | H0188: 1, S0003: 1, | | |
| | | | | | | | S0214: 1, H0428: 1, | | |
| | | | | | | | H0617: 1, L0055: 1, | | |
| | | | | | | | H0212: 1, H0316: 1, | | |
| | | | | | | | H0090: 1, H0412: 1, | | |
| | | | | | | | T0042: 1, H0494: 1, | | |
| | | | | | | | S0440: 1, H0641: 1, | | |
| | | | | | | | L0770: 1, L0637: 1, | | |
| | | | | | | | L0646: 1, L0771: 1, | | |
| | | | | | | | L0775: 1, L0653: 1, | | |
| | | | | | | | L0636: 1, L0517: 1, | | |
| | | | | | | | L0809: 1, L0788: 1, | | |
| | | | | | | | S0374: 1, S0328: 1, | | |
| | | | | | | | S0330: 1, H0134: 1, | | |
| | | | | | | | S0406: 1, L0755: 1, | | |
| | | | | | | | L0758: 1 and L0588: 1. | | |
| 461 | HCEOB15 | 973102 | 471 | 112-915 | 1258 | Gly-38 to Asn-63, | AR061: 10, AR089: 7 | | |
| | | | | | | Asp-83 to His-90, | H0556: 5, H0617: 5, | | |
| | | | | | | Tyr-108 to Lys-118, | L0766: 5, L0439: 5, | | |
| | | | | | | His-125 to Ala-161. | L0761: 4, H0265: 2, | | |
| | | | | | | | H0650: 2, H0052: 2, | | |
| | | | | | | | L0118: 2, H0622: 2, | | |
| | | | | | | | H0087: 2, L0662: 2, | | |
| | | | | | | | L0438: 2, H0593: 2, | | |
| | | | | | | | L0749: 2, L0752: 2, | | |
| | | | | | | | L0731: 2, L0758: 2, | | |
| | | | | | | | L0605: 2, L0361: 2, | | |
| | | | | | | | H0543: 2, H0423: 2, | | |
| | | | | | | | H0222: 1, S0114: 1, | | |
| | | | | | | | H0657: 1, H0671: 1, | | |
| | | | | | | | S0418: 1, S0360: 1, | | |
| | | | | | | | H0340: 1, S0222: 1, | | |
| | | | | | | | H0600: 1, H0333: 1, | | |
| | | | | | | | H0486: 1, T0060: 1, | | |
| | | | | | | | H0069: 1, H0036: 1, | | |
| | | | | | | | H0590: 1, H0618: 1, | | |
| | | | | | | | S0346: 1, L0024: 1, | | |
| | | | | | | | L0738: 1, H0046: 1, | | |
| | | | | | | | H0009: 1, H0373: 1, | | |
| | | | | | | | H0039: 1, H0135: 1, | | |
| | | | | | | | H0090: 1, H0040: 1, | | |
| | | | | | | | H0634: 1, H0063: 1, | | |
| | | | | | | | H0413: 1, H0560: 1, | | |
| | | | | | | | H0646: 1, H0529: 1, | | |
| | | | | | | | L0770: 1, L0769: 1, | | |
| | | | | | | | L0772: 1, L0644: 1, | | |
| | | | | | | | L0771: 1, L0650: 1, | | |
| | | | | | | | L0655: 1, L0809: 1, | | |
| | | | | | | | L0647: 1, L0368: 1, | | |
| | | | | | | | L0787: 1, L0789: 1, | | |
| | | | | | | | L0790: 1, L0532: 1, | | |
| | | | | | | | L0665: 1, H0144: 1, | | |
| | | | | | | | S0310: 1, H0689: 1, | | |
| | | | | | | | H0539: 1, S0152: 1, | | |
| | | | | | | | H0521: 1, H0696: 1, | | |
| | | | | | | | H0555: 1, L0754: 1, | | |
| | | | | | | | L0747: 1, L0750: 1, | | |
| | | | | | | | L0777: 1, L0759: 1, | | |
| | | | | | | | L0608: 1, L0595: 1, | | |
| | | | | | | | L0366: 1, H0667: 1, | | |
| | | | | | | | H0136: 1, H0542: 1 and | | |
| | | | | | | | H0506: 1. | | |

[0040] The first column in Table 1A provides the gene number in the application corresponding to the clone identifier. The second column in Table 1A provides a unique “Clone ID NO:Z” for a cDNA clone related to each contig sequence disclosed in Table 1A. This clone ID references the cDNA clone which contains at least the 5′ most sequence of the assembled contig and at least a portion of SEQ ID NO:X was determined by directly sequencing the referenced clone. The reference clone may have more sequence than described in the sequence listing or the clone may have less. In the vast majority of cases, however, the clone is believed to encode a full-length polypeptide. In the case where a clone is not full-length, a full-length cDNA can be obtained by methods described elsewhere herein.

[0041] The third column in Table 1A provides a unique “Contig ID” identification for each contig sequence. The fourth column provides the “SEQ ID NO:” identifier for each of the contig polynucleotide sequences disclosed in Table 1A. The fifth column, “ORF (From-To)”, provides the location (i.e., nucleotide position numbers) within the polynucleotide sequence “SEQ ID NO:X” that delineate the preferred open reading frame (ORF) shown in the sequence listing and referenced in Table 1A, column 6, as SEQ ID NO:Y. Where the nucleotide position number “To” is lower than the nucleotide position number “From”, the preferred ORF is the reverse complement of the referenced polynucleotide sequence.

[0042] The sixth column in Table 1A provides the corresponding SEQ ID NO:Y for the polypeptide sequence encoded by the preferred ORF delineated in column 5. In one embodiment, the invention provides an amino acid sequence comprising, or alternatively consisting of, a polypeptide encoded by the portion of SEQ ID NO:X delineated by “ORF (From-To)”. Also provided are polynucleotides encoding such amino acid sequences and the complementary strand thereto.

[0043] Column 7 in Table 1A lists residues comprising epitopes contained in the polypeptides encoded by the preferred ORF (SEQ ID NO:Y), as predicted using the algorithm of Jameson and Wolf, (1988) Comp. Appl. Biosci. 4:181-186. The Jameson-Wolf antigenic analysis was performed using the computer program PROTEAN (Version 3.11 for the Power MacIntosh, DNASTAR, Inc., 1228 South Park Street Madison, Wis.). In specific embodiments, polypeptides of the invention comprise, or alternatively consist of, at least one, two, three, four, five or more of the predicted epitopes as described in Table 1A. It will be appreciated that depending on the analytical criteria used to predict antigenic determinants, the exact address of the determinant may vary slightly.

[0044] Column 8 in Table 1A provides an expression profile and library code: count for each of the contig sequences (SEQ ID NO:X) disclosed in Table 1A, which can routinely be combined with the information provided in Table 4 and used to determine the tissues, cells, and/or cell line libraries which predominantly express the polynucleotides of the invention. The first number in column 8 (preceding the colon), represents the tissue/cell source identifier code corresponding to the code and description provided in Table 4. For those identifier codes in which the first two letters are not “AR”, the second number in column 8 (following the colon) represents the number of times a sequence corresponding to the reference polynucleotide sequence was identified in the tissue/cell source. Those tissue/cell source identifier codes in which the first two letters are “AR” designate information generated using DNA array technology. Utilizing this technology, cDNAs were amplified by PCR and then transferred, in duplicate, onto the array. Gene expression was assayed through hybridization of first strand cDNA probes to the DNA array. cDNA probes were generated from total RNA extracted from a variety of different tissues and cell lines. Probe synthesis was performed in the presence of ³³P dCTP, using oligo(dT) to prime reverse transcription. After hybridization, high stringency washing conditions were employed to remove non-specific hybrids from the array. The remaining signal, emanating from each gene target, was measured using a Phosphorimager. Gene expression was reported as Phosphor Stimulating Luminescence (PSL) which reflects the level of phosphor signal generated from the probe hybridized to each of the gene targets represented on the array. A local background signal subtraction was performed before the total signal generated from each array was used to normalize gene expression between the different hybridizations. The value presented after “[array code]:” represents the mean of the duplicate values, following background subtraction and probe normalization. One of skill in the art could routinely use this information to identify normal and/or diseased tissue(s) which show a predominant expression pattern of the corresponding polynucleotide of the invention or to identify polynucleotides which show predominant and/or specific tissue and/or cell expression.

[0045] Column 9 in Table 1A provides a chromosomal map location for certain polynucleotides of the invention. Chromosomal location was determined by finding exact matches to EST and cDNA sequences contained in the NCBI (National Center for Biotechnology Information) UniGene database. Each sequence in the UniGene database is assigned to a “cluster”; all of the ESTs, cDNAs, and STSs in a cluster are believed to be derived from a single gene. Chromosomal mapping data is often available for one or more sequence(s) in a UniGene cluster; this data (if consistent) is then applied to the cluster as a whole. Thus, it is possible to infer the chromosomal location of a new polynucleotide sequence by determining its identity with a mapped UniGene cluster.

[0046] A modified version of the computer program BLASTN (Altshul et al., J. Mol. Biol. 215:403-410 (1990); and Gish and States, Nat. Genet. 3:266-272 (1993)) was used to search the UniGene database for EST or cDNA sequences that contain exact or near-exact matches to a polynucleotide sequence of the invention (the ‘Query’). A sequence from the UniGene database (the ‘Subject’) was said to be an exact match if it contained a segment of 50 nucleotides in length such that 48 of those nucleotides were in the same order as found in the Query sequence. If all of the matches that met this criteria were in the same UniGene cluster, and mapping data was available for this cluster, it is indicated in Table 1A under the heading “Cytologic Band”. Where a cluster had been further localized to a distinct cytologic band, that band is disclosed; where no banding information was available, but the gene had been localized to a single chromosome, the chromosome is disclosed.

[0047] Once a presumptive chromosomal location was determined for a polynucleotide of the invention, an associated disease locus was identified by comparison with a database of diseases which have been experimentally associated with genetic loci. The database used was the Morbid Map, derived from OMIM™ (supra). If the putative chromosomal location of a polynucleotide of the invention (Query sequence) was associated with a disease in the Morbid Map database, an OMIM reference identification number was noted in column 10, Table 1A, labelled “OMIM Disease Reference(s)”. Table 5 is a key to the OMIM reference identification numbers (column 1), and provides a description of the associated disease in Column 2.

TABLE 1B

| Clone ID | SEQ ID | CONTIG | BAC | SEQ ID | EXON |
|---|---|---|---|---|---|
| NO:Z | NO:X | ID: | ID: A | NO:B | From-To |
| HEPBV26 | 28 | 965419 | AL358253 | 1593 | 1-283 |
| | | | | | 4330-5470 |
| HOEOE25 | 46 | 907806 | AC018850 | 1594 | 1-599 |
| HOEOE25 | 46 | 907806 | AC012342 | 1595 | 1-599 |
| HOEOE25 | 46 | 907806 | AC018850 | 1596 | 1-197 |
| HOEOE25 | 46 | 907806 | AC012342 | 1597 | 1-198 |
| HWLFR20 | 64 | 907968 | AC027716 | 1598 | 1-117 |
| | | | | | 1670-2089 |
| HADDT27 | 81 | 908924 | AC010422 | 1599 | 1-453 |
| | | | | | 592-1117 |
| HDLAE04 | 111 | 908931 | AC011460 | 1600 | 1-722 |
| | | | | | 724-1577 |
| | | | | | 2764-3075 |
| | | | | | 4228-4420 |
| | | | | | 5217-5383 |
| | | | | | 5400-5530 |
| | | | | | 5860-5956 |
| | | | | | 7134-7364 |
| | | | | | 8318-10195 |
| HDLAE04 | 111 | 908931 | AC011460 | 1601 | 1-359 |
| HDLAE04 | 111 | 908931 | AC011460 | 1602 | 1-443 |
| | | | | | 449-963 |
| | | | | | 4332-4649 |
| | | | | | 4797-4977 |
| HDPRJ04 | 119 | 909040 | AL390037 | 1603 | 1-809 |
| | | | | | 2063-2155 |
| | | | | | 3820-3967 |
| | | | | | 4640-4801 |
| | | | | | 5151-8123 |
| | | | | | 8956-12546 |
| | | | | | 12668-13190 |
| | | | | | 13201-13367 |
| | | | | | 13518-13661 |
| | | | | | 13876-14295 |
| | | | | | 14507-14557 |
| | | | | | 14929-14997 |
| | | | | | 16275-16379 |
| | | | | | 16424-17009 |
| | | | | | 17962-18065 |
| | | | | | 18070-18234 |
| | | | | | 19639-20232 |
| | | | | | 20738-21091 |
| | | | | | 21628-21724 |
| HDPRJ04 | 119 | 909040 | AL096677 | 1604 | 1-809 |
| | | | | | 2063-2155 |
| | | | | | 3820-3967 |
| | | | | | 4640-4801 |
| | | | | | 5151-8123 |
| | | | | | 8956-12546 |
| | | | | | 12668-13190 |
| | | | | | 13201-13367 |
| | | | | | 13518-13661 |
| | | | | | 13876-14295 |
| | | | | | 14505-14555 |
| | | | | | 14927-14995 |
| | | | | | 16273-16377 |
| | | | | | 16422-17007 |
| | | | | | 17905-18239 |
| | | | | | 19642-20235 |
| | | | | | 20741-21094 |
| | | | | | 21631-21727 |
| HDPRJ04 | 119 | 909040 | AL390037 | 1605 | 1-268 |
| HDPRJ04 | 119 | 909040 | AL096677 | 1606 | 1-714 |
| HDPRJ04 | 119 | 909040 | AL390037 | 1607 | 1-714 |
| HDPRJ04 | 119 | 909040 | AL096677 | 1608 | 1-268 |
| HDTFT81 | 128 | 909054 | AC021217 | 1609 | 1-2717 |
| HDTFT81 | 128 | 909054 | AC021217 | 1610 | 1-149 |
| HDTFT81 | 128 | 909054 | AC021217 | 1611 | 1-1727 |
| HE8MA36 | 135 | 706858 | AP001620 | 1612 | 1-46 |
| | | | | | 133-1280 |
| HE8MA36 | 135 | 706858 | AP001619 | 1613 | 1-46 |
| | | | | | 133-1961 |
| HE8MA36 | 135 | 706858 | AP001620 | 1614 | 1-441 |
| HE8MA36 | 135 | 706858 | AP001619 | 1615 | 1-1989 |
| | | | | | 2081-3380 |
| HE8MA36 | 135 | 706858 | AP001619 | 1616 | 1-441 |
| HE9CJ74 | 143 | 908903 | AF166490 | 1617 | 1-618 |
| | | | | | 757-1396 |
| HE9CJ74 | 143 | 908903 | AC004908 | 1618 | 1-618 |
| | | | | | 757-1396 |
| HE9CJ74 | 143 | 908903 | AF166490 | 1619 | 1-576 |
| HE9CJ74 | 143 | 908903 | AC004908 | 1620 | 1-576 |
| HFVKA93 | 162 | 908885 | AC004017 | 1621 | 1-236 |
| | | | | | 3250-3375 |
| | | | | | 4471-8036 |
| HFVKA93 | 162 | 908885 | AC004017 | 1622 | 1-175 |
| HMACX62 | 196 | 908611 | AC027529 | 1623 | 1-523 |
| HMACX62 | 196 | 908611 | AC025162 | 1624 | 1-523 |
| HMACX62 | 196 | 908611 | AC034102 | 1625 | 1-523 |
| HMACX62 | 196 | 908611 | AC027529 | 1626 | 1-511 |
| HMACX62 | 196 | 908611 | AC025162 | 1627 | 1-511 |
| HMACX62 | 196 | 908611 | AC034102 | 1628 | 1-511 |
| HMACX62 | 196 | 908611 | AC025162 | 1629 | 1-243 |
| HMEIY94 | 199 | 908618 | AC021848 | 1630 | 1-399 |
| | | | | | 476-1200 |
| | | | | | 1248-2126 |
| HMEIY94 | 199 | 908618 | AC021112 | 1631 | 1-192 |
| HMEIY94 | 199 | 908618 | AC024120 | 1632 | 1-234 |
| | | | | | 362-1070 |
| | | | | | 1118-1996 |
| HMEIY94 | 199 | 908618 | AC022150 | 1633 | 1-399 |
| | | | | | 476-1200 |
| | | | | | 1248-2126 |
| HMEIY94 | 199 | 908618 | AC021848 | 1634 | 1-483 |
| HMEIY94 | 199 | 908618 | AC022150 | 1635 | 1-483 |
| HMTMC64 | 203 | 909081 | AL136109 | 1636 | 1-3030 |
| | | | | | 3212-3814 |
| | | | | | 9089-9408 |
| | | | | | 11724-12242 |
| | | | | | 12308-12959 |
| | | | | | 23153-23254 |
| | | | | | 24314-26013 |
| HMTMC64 | 203 | 909081 | AC023147 | 1637 | 1-3041 |
| | | | | | 3223-3825 |
| | | | | | 9096-9415 |
| | | | | | 11730-12248 |
| | | | | | 12314-12965 |
| | | | | | 23152-23259 |
| | | | | | 24319-26018 |
| HMTMC64 | 203 | 909081 | AC022219 | 1638 | 1-3030 |
| | | | | | 3212-3814 |
| | | | | | 9084-9403 |
| | | | | | 11717-12235 |
| | | | | | 12301-12952 |
| | | | | | 23145-23246 |
| | | | | | 24307-26006 |
| HMTMC64 | 203 | 909081 | AL136109 | 1639 | 1-344 |
| HMTMC64 | 203 | 909081 | AL136109 | 1640 | 1-174 |
| HMTMC64 | 203 | 909081 | AC023147 | 1641 | 1-122 |
| HMTMC64 | 203 | 909081 | AC022219 | 1642 | 1-191 |
| HMTMC64 | 203 | 909081 | AC022219 | 1643 | 1-344 |
| HNTBH53 | 220 | 909153 | AC005020 | 1644 | 1-138 |
| | | | | | 1088-1349 |
| | | | | | 4968-5384 |
| | | | | | 5647-6258 |
| | | | | | 7530-7665 |
| | | | | | 9877-10169 |
| | | | | | 10943-14176 |
| HNTBH53 | 220 | 909153 | AC005020 | 1645 | 1-357 |
| HNTBH53 | 220 | 909153 | AC005020 | 1646 | 1-124 |
| HNTOA18 | 222 | 695123 | AC007228 | 1647 | 1-2901 |
| | | | | | 2937-3197 |
| HOPBC53 | 242 | 530056 | AL391069 | 1648 | 1-63 |
| | | | | | 170-331 |
| | | | | | 467-727 |
| HOPBC53 | 242 | 530056 | AL391069 | 1649 | 1-39 |
| | | | | | 154-265 |
| | | | | | 463-604 |
| | | | | | 746-1670 |
| HSAMQ05 | 260 | 907518 | AC008443 | 1650 | 1-1313 |
| | | | | | 1351-1800 |
| | | | | | 1818-2443 |
| | | | | | 2468-3085 |
| | | | | | 3244-6421 |
| HSAMQ05 | 260 | 907518 | AL161615 | 1651 | 1-1310 |
| HSAMQ05 | 260 | 907518 | AC008443 | 1652 | 1-131 |
| HSAMQ05 | 260 | 907518 | AL161615 | 1653 | 1-449 |
| HSDEV59 | 264 | 908503 | AC009092 | 1654 | 1-2619 |
| HSDEV59 | 264 | 908503 | AL139227 | 1655 | 1-3460 |
| HSDEV59 | 264 | 908503 | AC009062 | 1656 | 1-694 |
| HSDEV59 | 264 | 908503 | AC074049 | 1657 | 1-1263 |
| | | | | | 4785-5039 |
| | | | | | 5046-8891 |
| HSDFY86 | 266 | 908943 | AJ009611 | 1658 | 1-637 |
| | | | | | 705-2086 |
| | | | | | 2251-2769 |
| | | | | | 3276-3524 |
| HSDFY86 | 266 | 908943 | AC006130 | 1659 | 1-662 |
| | | | | | 2557-3193 |
| | | | | | 3261-4641 |
| | | | | | 4806-5321 |
| | | | | | 5831-6082 |
| HSDFY86 | 266 | 908943 | AJ009611 | 1660 | 1-427 |
| HSDFY86 | 266 | 908943 | AJ009611 | 1661 | 1-941 |
| | | | | | 2808-2909 |
| | | | | | 3256-3440 |
| | | | | | 3452-3477 |
| | | | | | 4725-5386 |
| HSDFY86 | 266 | 908943 | AC006130 | 1662 | 1-162 |
| | | | | | 174-245 |
| HSDFY86 | 266 | 908943 | AC006130 | 1663 | 1-427 |
| HSDJK49 | 267 | 722868 | AC011538 | 1664 | 1-2558 |
| HSDJK49 | 267 | 722868 | AC021090 | 1665 | 1-2558 |
| HSDJK49 | 267 | 722868 | AC011538 | 1666 | 1-706 |
| HSDJK49 | 267 | 722868 | AC021090 | 1667 | 1-706 |
| HTLDE64 | 285 | 908613 | AC005087 | 1668 | 1-207 |
| | | | | | 524-773 |
| | | | | | 945-1056 |
| | | | | | 3251-3659 |
| HTLDE64 | 285 | 908613 | AC005087 | 1669 | 1-232 |
| HTLDE64 | 285 | 908613 | AC005087 | 1670 | 1-232 |
| HUJBQ75 | 299 | 908603 | AC021154 | 1671 | 1-129 |
| | | | | | 2571-2659 |
| | | | | | 4299-4870 |
| | | | | | 5508-8353 |
| HUJBQ75 | 299 | 908603 | AC010624 | 1672 | 1-129 |
| | | | | | 2572-2660 |
| | | | | | 4302-4873 |
| | | | | | 5511-9618 |
| HUVFT89 | 305 | 960524 | AL132795 | 1673 | 1-253 |
| | | | | | 1142-1455 |
| | | | | | 1576-2150 |
| | | | | | 2529-2966 |
| | | | | | 4374-4471 |
| | | | | | 4991-5361 |
| | | | | | 6514-7738 |
| | | | | | 7936-8053 |
| | | | | | 9858-9979 |
| | | | | | 11930-12101 |
| | | | | | 12401-12525 |
| | | | | | 12531-12712 |
| | | | | | 16593-16786 |
| | | | | | 17053-17214 |
| | | | | | 18919-19396 |
| | | | | | 21174-21327 |
| | | | | | 21724-22296 |
| | | | | | 22515-23071 |
| HUVFT89 | 305 | 960524 | AL132795 | 1674 | 1-6181 |
| HUVFT89 | 305 | 960524 | AL132795 | 1675 | 1-287 |
| | | | | | 622-861 |
| HPMKM81 | 365 | 894416 | AC004774 | 1676 | 1-741 |
| | | | | | 2632-2831 |
| | | | | | 3934-4654 |
| HPMKM81 | 365 | 894416 | AC004774 | 1677 | 1-239 |
| HOHAI78 | 384 | 811359 | AC005076 | 1678 | 1-100 |
| | | | | | 2546-2663 |
| | | | | | 3601-3683 |
| | | | | | 4328-4480 |
| | | | | | 5266-5576 |
| | | | | | 7794-8199 |
| | | | | | 8326-9394 |
| | | | | | 9438-9843 |
| | | | | | 10322-10354 |
| | | | | | 11069-11175 |
| | | | | | 11241-11351 |
| | | | | | 11673-12022 |
| | | | | | 13407-13967 |
| | | | | | 14840-15502 |
| | | | | | 15894-16201 |
| | | | | | 16474-17531 |
| | | | | | 19958-20040 |
| | | | | | 20635-20861 |
| | | | | | 21043-21853 |
| | | | | | 21976-25872 |
| | | | | | 26721-27057 |
| | | | | | 27114-27557 |
| | | | | | 27844-28562 |
| | | | | | 28593-29584 |
| | | | | | 29854-30169 |
| | | | | | 31976-32056 |
| | | | | | 33155-33442 |
| | | | | | 34366-34885 |
| | | | | | 35685-36129 |
| | | | | | 36317-36632 |
| | | | | | 39388-39551 |
| | | | | | 43184-43602 |
| | | | | | 43832-44148 |
| | | | | | 45018-45120 |
| | | | | | 45145-45314 |
| | | | | | 47170-47638 |
| | | | | | 48441-48736 |
| | | | | | 49150-49561 |
| HOHAI78 | 384 | 811359 | AC005076 | 1679 | 1-215 |
| HDQDV70 | 385 | 861365 | AC006146 | 1680 | 1-289 |
| | | | | | 1161-1614 |
| | | | | | 1656-3107 |
| | | | | | 3192-3326 |
| | | | | | 3496-3683 |
| | | | | | 3820-4530 |
| | | | | | 4570-6785 |
| | | | | | 7081-7231 |
| | | | | | 8305-8631 |
| | | | | | 9173-9673 |
| | | | | | 10427-10563 |
| HDQDV70 | 385 | 861365 | AC006146 | 1681 | 1-402 |
| | | | | | 956-3270 |
| HE8NB30 | 393 | 899757 | AL031387 | 1682 | 1-197 |
| | | | | | 1065-1242 |
| | | | | | 1416-1489 |
| | | | | | 2264-2352 |
| | | | | | 3156-3771 |
| | | | | | 4574-4693 |
| | | | | | 5694-5839 |
| | | | | | 6726-8918 |
| HE8NB30 | 393 | 899757 | AL118496 | 1683 | 1-197 |
| | | | | | 1065-1242 |
| | | | | | 1416-1489 |
| | | | | | 2264-2352 |
| | | | | | 3156-3771 |
| | | | | | 4574-4693 |
| | | | | | 5694-5839 |
| | | | | | 6726-8919 |
| HE8NB30 | 393 | 899757 | AL031387 | 1684 | 1-282 |
| | | | | | 305-384 |
| HE8NB30 | 393 | 899757 | AL118496 | 1685 | 1-281 |
| | | | | | 305-384 |
| HGFAB38 | 397 | 576913 | AP000627 | 1686 | 1-200 |
| HMADG29 | 398 | 597431 | AC074217 | 1687 | 1-618 |
| HHEPQ28 | 401 | 694010 | AC013663 | 1688 | 1-253 |
| HNTAI75 | 402 | 703283 | AL136360 | 1689 | 1-110 |
| | | | | | 753-1083 |
| | | | | | 1380-1651 |
| | | | | | 2626-3467 |
| | | | | | 3524-3785 |
| | | | | | 4886-5089 |
| | | | | | 5218-5376 |
| | | | | | 5706-5885 |
| | | | | | 6771-6874 |
| | | | | | 7496-7841 |
| | | | | | 7904-8262 |
| | | | | | 8779-8906 |
| HNTAI75 | 402 | 703283 | AL132868 | 1690 | 1-4038 |
| | | | | | 4380-4800 |
| | | | | | 5529-5856 |
| | | | | | 6809-6924 |
| | | | | | 7208-7347 |
| | | | | | 7951-8680 |
| | | | | | 13270-13572 |
| | | | | | 14725-15526 |
| | | | | | 15537-16186 |
| | | | | | 16811-17117 |
| | | | | | 17361-17935 |
| | | | | | 18044-18361 |
| | | | | | 19142-19668 |
| | | | | | 20190-20569 |
| | | | | | 21069-21178 |
| | | | | | 21825-22169 |
| | | | | | 22470-22742 |
| | | | | | 23723-25146 |
| | | | | | 26023-26230 |
| | | | | | 26364-26517 |
| | | | | | 26870-27050 |
| | | | | | 27957-28060 |
| | | | | | 28684-29033 |
| | | | | | 29089-29458 |
| | | | | | 29979-30106 |
| | | | | | 30290-30543 |
| | | | | | 31008-31132 |
| HNTAI75 | 402 | 703283 | AL136360 | 1691 | 1-523 |
| HNTAI75 | 402 | 703283 | AL132868 | 1692 | 1-60 |
| | | | | | 217-623 |
| | | | | | 1637-1898 |
| | | | | | 3598-3687 |
| | | | | | 4498-4755 |
| | | | | | 5208-5338 |
| | | | | | 5425-5502 |
| | | | | | 5745-5834 |
| | | | | | 6688-6802 |
| | | | | | 7494-7762 |
| | | | | | 7914-8014 |
| | | | | | 8104-8894 |
| HNTAI75 | 402 | 703283 | AL132868 | 1693 | 1-513 |
| HOUFE88 | 404 | 718762 | AC026964 | 1694 | 1-624 |
| | | | | | 901-1265 |
| | | | | | 1410-2185 |
| | | | | | 4304-5344 |
| | | | | | 6642-6855 |
| HOUFE88 | 404 | 718762 | AC005324 | 1695 | 1-624 |
| | | | | | 901-1265 |
| | | | | | 1409-2185 |
| | | | | | 4305-5345 |
| | | | | | 6643-6856 |
| | | | | | 7419-7671 |
| | | | | | 8413-8691 |
| | | | | | 8919-9445 |
| | | | | | 9616-10115 |
| | | | | | 10962-11132 |
| | | | | | 11192-11345 |
| | | | | | 11599-11695 |
| | | | | | 12121-12279 |
| | | | | | 12289-12529 |
| | | | | | 14123-14522 |
| | | | | | 15496-15863 |
| | | | | | 16406-17026 |
| | | | | | 17758-21045 |
| HOUFE88 | 404 | 718762 | AC026964 | 1696 | 1-254 |
| HOUFE88 | 404 | 718762 | AC005324 | 1697 | 1-149 |
| HMTAZ58 | 405 | 735760 | AL139321 | 1698 | 1-159 |
| | | | | | 402-699 |
| | | | | | 1386-1893 |
| | | | | | 4404-4566 |
| | | | | | 7792-7898 |
| | | | | | 8590-8754 |
| | | | | | 8982-9108 |
| | | | | | 9613-9668 |
| | | | | | 10179-10699 |
| | | | | | 10932-11031 |
| | | | | | 12907-13466 |
| | | | | | 13804-15046 |
| | | | | | 15094-15344 |
| | | | | | 18250-18400 |
| | | | | | 19070-19472 |
| HDPAV32 | 407 | 847613 | AC010552 | 1699 | 1-641 |
| | | | | | 1600-1908 |
| | | | | | 3044-3481 |
| | | | | | 4217-4718 |
| | | | | | 4810-5109 |
| | | | | | 5233-5529 |
| | | | | | 5671-5869 |
| | | | | | 6528-6682 |
| HDPAV32 | 407 | 847613 | AC010552 | 1700 | 1-356 |
| | | | | | 800-1121 |
| | | | | | 1182-1580 |
| | | | | | 1601-1693 |
| | | | | | 1921-2028 |
| | | | | | 2239-2760 |
| | | | | | 3231-3814 |
| HFKFL92 | 409 | 880139 | AC018785 | 1701 | 1-1207 |
| HFKFL92 | 409 | 880139 | AC037465 | 1702 | 1-1207 |
| HFKFL92 | 409 | 880139 | AC018785 | 1703 | 1-345 |
| | | | | | 1997-2108 |
| | | | | | 2665-2753 |
| | | | | | 3846-3901 |
| HFKFL92 | 409 | 880139 | AC037465 | 1704 | 1-22 |
| | | | | | 878-992 |
| | | | | | 1340-3221 |
| | | | | | 3901-4062 |
| | | | | | 4672-4883 |
| | | | | | 5687-5857 |
| | | | | | 6054-6233 |
| | | | | | 7219-7300 |
| | | | | | 7481-7593 |
| | | | | | 7814-7912 |
| | | | | | 8592-8726 |
| | | | | | 8847-8998 |
| | | | | | 9821-10002 |
| | | | | | 11240-11449 |
| | | | | | 11708-12211 |
| | | | | | 15763-15857 |
| HFKFL92 | 409 | 880139 | AC037465 | 1705 | 1-345 |
| | | | | | 1996-2107 |
| | | | | | 2664-2752 |
| | | | | | 3845-3900 |
| HWLGU06 | 410 | 882838 | AC027440 | 1706 | 1-1366 |
| HWLGU06 | 410 | 882838 | AC021890 | 1707 | 1-2440 |
| HWLGU06 | 410 | 882838 | AL390204 | 1708 | 1-902 |
| HWLGU06 | 410 | 882838 | AC034149 | 1709 | 1-2495 |
| | | | | | 2532-2827 |
| | | | | | 2961-3266 |
| | | | | | 3958-3985 |
| HWLGU06 | 410 | 882838 | AC021890 | 1710 | 1-536 |
| | | | | | 551-675 |
| | | | | | 2425-2636 |
| | | | | | 4829-4901 |
| HWLGU06 | 410 | 882838 | AL390204 | 1711 | 1-848 |
| HWLGU06 | 410 | 882838 | AC021890 | 1712 | 1-293 |
| HWLGU06 | 410 | 882838 | AL390204 | 1713 | 1-160 |
| HWLGU06 | 410 | 882838 | AC034149 | 1714 | 1-198 |
| | | | | | 855-1067 |
| | | | | | 3892-4957 |
| | | | | | 5398-6643 |
| | | | | | 6992-7056 |
| | | | | | 7254-7389 |
| | | | | | 7483-7554 |
| | | | | | 7613-7871 |
| | | | | | 7939-8204 |
| | | | | | 9023-9747 |
| | | | | | 11068-11618 |
| | | | | | 11633-11760 |
| | | | | | 13507-13718 |
| | | | | | 15907-15980 |
| HWLGU06 | 410 | 882838 | AC034149 | 1715 | 1-2360 |
| | | | | | 3199-3340 |
| | | | | | 3606-3850 |
| | | | | | 4011-4148 |
| | | | | | 4227-4297 |
| | | | | | 4384-4583 |
| | | | | | 5718-5862 |
| | | | | | 6043-6095 |
| | | | | | 6266-6323 |
| | | | | | 6555-6679 |
| | | | | | 6834-6904 |
| | | | | | 7440-7511 |
| | | | | | 7859-8821 |
| | | | | | 11383-11592 |
| | | | | | 11648-11964 |
| | | | | | 12310-12493 |
| HOGBN73 | 411 | 892750 | AC040962 | 1716 | 1-810 |
| HODCU15 | 412 | 899680 | AC010935 | 1717 | 1-4359 |
| HE9PF14 | 413 | 908512 | AC020915 | 1718 | 1-217 |
| | | | | | 366-451 |
| | | | | | 2435-2692 |
| | | | | | 2850-3139 |
| | | | | | 3210-3322 |
| | | | | | 3964-4111 |
| | | | | | 4124-4248 |
| | | | | | 4809-4938 |
| | | | | | 5411-6393 |
| HE9PF14 | 413 | 908512 | AC023149 | 1719 | 1-217 |
| | | | | | 366-451 |
| | | | | | 2434-2691 |
| | | | | | 2849-3139 |
| | | | | | 3210-3322 |
| | | | | | 3964-4111 |
| | | | | | 4124-4235 |
| | | | | | 4365-4937 |
| | | | | | 5410-6815 |
| HE9PF14 | 413 | 908512 | AC023149 | 1720 | 1-466 |
| HE9PF14 | 413 | 908512 | AC023149 | 1721 | 1-249 |
| HTENS61 | 426 | 909007 | AC003005 | 1722 | 1-201 |
| | | | | | 1106-1776 |
| | | | | | 2365-2402 |
| | | | | | 3679-3814 |
| | | | | | 4328-4427 |
| | | | | | 4777-6896 |
| | | | | | 7688-7792 |
| | | | | | 7870-7986 |
| HPJEN26 | 428 | 909014 | AC003006 | 1723 | 1-408 |
| | | | | | 2041-2446 |
| | | | | | 2803-3055 |
| | | | | | 4147-4413 |
| | | | | | 4444-5150 |
| | | | | | 5186-5311 |
| | | | | | 5340-5528 |
| | | | | | 5927-7879 |
| HPJEN26 | 428 | 909014 | AC003006 | 1724 | 1-335 |
| HPJEN26 | 428 | 909014 | AC003006 | 1725 | 1-501 |
| HE8TK33 | 431 | 909025 | AC026786 | 1726 | 1-175 |
| | | | | | 435-518 |
| | | | | | 1887-2001 |
| | | | | | 6360-6560 |
| | | | | | 9836-10112 |
| | | | | | 10394-10492 |
| | | | | | 11917-11977 |
| HE8TK33 | 431 | 909025 | AC026786 | 1727 | 1-302 |
| HTEJR88 | 433 | 909033 | AC010192 | 1728 | 1-90 |
| | | | | | 2483-2562 |
| | | | | | 4827-4986 |
| | | | | | 5590-5706 |
| | | | | | 6169-6426 |
| HTEJR88 | 433 | 909033 | AC026352 | 1729 | 1-90 |
| | | | | | 2484-2563 |
| | | | | | 4828-4987 |
| | | | | | 5591-5707 |
| | | | | | 6170-6427 |
| HTEJR88 | 433 | 909033 | AC010192 | 1730 | 1-447 |
| HE2JI76 | 440 | 909110 | AC078802 | 1731 | 1-60 |
| | | | | | 629-694 |
| | | | | | 862-1160 |
| | | | | | 3307-3465 |
| | | | | | 5364-6165 |
| HE2JI76 | 440 | 909110 | AC078802 | 1732 | 1-803 |
| HE2JI76 | 440 | 909110 | AC078802 | 1733 | 1-261 |
| HNTDJ81 | 441 | 909111 | AC078802 | 1734 | 1-60 |
| | | | | | 629-694 |
| | | | | | 862-1160 |
| | | | | | 3307-3465 |
| | | | | | 5364-6165 |
| HNTDJ81 | 441 | 909111 | AC078802 | 1735 | 1-803 |
| HNTDJ81 | 441 | 909111 | AC078802 | 1736 | 1-261 |
| HDQHG17 | 443 | 909120 | AP001483 | 1737 | 1-481 |
| HDQHG17 | 443 | 909120 | AP001857 | 1738 | 1-481 |
| HDQHG17 | 443 | 909120 | AP001160 | 1739 | 1-645 |
| HDQHG17 | 443 | 909120 | AP001458 | 1740 | 1-304 |
| | | | | | 3236-3881 |
| | | | | | 3988-4366 |
| | | | | | 4483-5169 |
| | | | | | 5788-6096 |
| HDQHG17 | 443 | 909120 | AC015703 | 1741 | 1-646 |
| HDQHG17 | 443 | 909120 | AP001160 | 1742 | 1-46 |
| | | | | | 1024-1284 |
| HDQHG17 | 443 | 909120 | AP001458 | 1743 | 1-172 |
| HDQHGI7 | 443 | 909120 | AP001483 | 1744 | 1-556 |
| HDQHG17 | 443 | 909120 | AC015703 | 1745 | 1-379 |
| HDQHG17 | 443 | 909120 | AP001160 | 1746 | 1-379 |
| HMWIU35 | 446 | 909167 | AL161906 | 1747 | 1-789 |
| | | | | | 1040-3563 |
| HMWIU35 | 446 | 909167 | AL161903 | 1748 | 1-789 |
| | | | | | 1037-3560 |
| HMWIU35 | 446 | 909167 | AL161906 | 1749 | 1-115 |
| HMWIU35 | 446 | 909167 | AL161906 | 1750 | 1-1092 |
| HMWIU35 | 446 | 909167 | AL161903 | 1751 | 1-1092 |
| HMWIU35 | 446 | 909167 | AL161903 | 1752 | 1-117 |
| HTTBX05 | 452 | 928079 | AC008567 | 1753 | 1-277 |
| | | | | | 368-452 |
| | | | | | 701-763 |
| | | | | | 1326-1487 |
| | | | | | 1775-1869 |
| | | | | | 5926-6670 |
| | | | | | 7934-8053 |
| | | | | | 9641-9836 |
| | | | | | 10450-10864 |
| | | | | | 11547-11644 |
| | | | | | 11861-12161 |
| | | | | | 12937-13711 |
| | | | | | 15401-15494 |
| | | | | | 16263-17057 |
| | | | | | 17650-17730 |
| | | | | | 19815-19911 |
| | | | | | 20806-23041 |
| HTTBX05 | 452 | 928079 | AC011451 | 1754 | 1-277 |
| | | | | | 368-452 |
| | | | | | 701-763 |
| | | | | | 1326-1487 |
| | | | | | 1775-1869 |
| | | | | | 5927-6671 |
| | | | | | 9642-9837 |
| | | | | | 10451-10865 |
| | | | | | 11049-11554 |
| | | | | | 11862-12162 |
| | | | | | 12938-13711 |
| | | | | | 15402-15495 |
| | | | | | 16264-17058 |
| | | | | | 17651-17731 |
| | | | | | 19817-19913 |
| | | | | | 20808-23135 |
| HTTBX05 | 452 | 928079 | AC008567 | 1755 | 1-56 |
| | | | | | 4207-4476 |
| | | | | | 5136-5184 |
| HTTBX05 | 452 | 928079 | AC011451 | 1756 | 1-270 |
| HDPSX40 | 453 | 935352 | AC010815 | 1757 | 1-3938 |
| | | | | | 3960-4751 |
| HDPSX40 | 453 | 935352 | AC010815 | 1758 | 1-200 |
| HDPCW53 | 456 | 946458 | AL161790 | 1759 | 1-418 |
| HDPCW53 | 456 | 946458 | AL162420 | 1760 | 1-1707 |
| HDPCW53 | 456 | 946458 | AL162420 | 1761 | 1-741 |
| HDPCW53 | 456 | 946458 | AL161790 | 1762 | 1-371 |
| HHASV05 | 457 | 948749 | AC026954 | 1763 | 1-30 |
| | | | | | 182-276 |
| | | | | | 678-1737 |
| | | | | | 1820-2635 |
| HHASV05 | 457 | 948749 | AC003688 | 1764 | 1-125 |
| | | | | | 203-480 |
| | | | | | 1463-1647 |
| | | | | | 2048-2077 |
| | | | | | 2229-2323 |
| | | | | | 2725-3784 |
| | | | | | 3867-4682 |
| HHASV05 | 457 | 948749 | AC026954 | 1765 | 1-564 |
| HHASV05 | 457 | 948749 | AC003688 | 1766 | 1-718 |
| | | | | | 1054-1158 |
| | | | | | 1660-1980 |
| | | | | | 4003-4073 |
| | | | | | 4364-4516 |
| | | | | | 4646-4749 |
| | | | | | 4852-4995 |
| | | | | | 5121-5213 |
| | | | | | 5354-5424 |
| | | | | | 5526-5669 |
| | | | | | 5759-5832 |
| | | | | | 5850-6176 |
| | | | | | 6756-6829 |
| | | | | | 7023-7175 |
| | | | | | 7259-7398 |
| | | | | | 7531-7711 |
| | | | | | 8134-8381 |
| | | | | | 8463-13585 |
| | | | | | 13691-14323 |
| | | | | | 14437-14918 |
| HHASV05 | 457 | 948749 | AC003688 | 1767 | 1-931 |
| | | | | | 983-1131 |
| | | | | | 1504-2295 |
| HWBDS07 | 461 | 952796 | AC016582 | 1768 | 1-38 |
| | | | | | 1536-1812 |
| | | | | | 3968-4394 |
| | | | | | 5807-5918 |
| | | | | | 6477-6925 |
| | | | | | 7509-8029 |
| | | | | | 8979-9149 |
| | | | | | 9479-9566 |
| HWBDS07 | 461 | 952796 | AC007676 | 1769 | 1-38 |
| | | | | | 1534-1744 |
| | | | | | 3974-4400 |
| | | | | | 5302-5403 |
| | | | | | 5813-5924 |
| | | | | | 6483-6932 |
| | | | | | 7515-8035 |
| | | | | | 8957-9127 |
| | | | | | 9457-9544 |
| | | | | | 10602-10844 |
| | | | | | 12165-12320 |
| | | | | | 14170-14513 |
| | | | | | 14771-14943 |
| | | | | | 15727-15963 |
| | | | | | 19812-20009 |
| | | | | | 21301-21954 |
| | | | | | 24254-24543 |
| | | | | | 25372-25657 |
| | | | | | 30663-30778 |
| | | | | | 31145-31617 |
| | | | | | 31632-31805 |
| | | | | | 34572-34953 |
| | | | | | 38596-38886 |
| | | | | | 39180-39558 |
| | | | | | 39601-41424 |
| | | | | | 43326-43518 |
| HWBDS07 | 461 | 952796 | AC016582 | 1770 | 1-271 |
| HWBDS07 | 461 | 952796 | AC007676 | 1771 | 1-685 |
| HWBDS07 | 461 | 952796 | AC007676 | 1772 | 1-271 |
| HNTDI77 | 462 | 958279 | AC008759 | 1773 | 1-318 |
| | | | | | 1650-1802 |
| | | | | | 2491-2861 |
| | | | | | 3053-3838 |
| | | | | | 3864-4301 |
| | | | | | 6739-6852 |
| | | | | | 7130-7218 |
| | | | | | 7795-8270 |
| | | | | | 9882-11221 |
| HNTDI77 | 462 | 958279 | AC008759 | 1774 | 1-434 |
| | | | | | 1470-1663 |
| | | | | | 5744-6023 |
| | | | | | 6387-6512 |
| | | | | | 7019-7279 |
| | | | | | 9076-9160 |
| | | | | | 10713-10835 |
| | | | | | 11710-11983 |
| | | | | | 12416-12542 |
| HDPDN03 | 463 | 960952 | AL359452 | 1775 | 1-1504 |
| HDPDN03 | 463 | 960952 | AC005500 | 1776 | 1-3341 |
| HDPDN03 | 463 | 960952 | AC007731 | 1777 | 1-3341 |
| HDPDN03 | 463 | 960952 | AC005500 | 1778 | 1-923 |
| | | | | | 4251-5635 |
| | | | | | 6031-6618 |
| | | | | | 6898-8078 |
| HDPDN03 | 463 | 960952 | AC005500 | 1779 | 1-411 |
| HDPDN03 | 463 | 960952 | AC007731 | 1780 | 1-923 |
| | | | | | 4251-5635 |
| | | | | | 6031-6618 |
| | | | | | 6898-8078 |
| HDPDN03 | 463 | 960952 | AC007731 | 1781 | 1-411 |
| HTXFB61 | 469 | 967821 | AC022143 | 1782 | 1-797 |
| HTXFB61 | 469 | 967821 | AC020910 | 1783 | 1-3797 |
| | | | | | 3965-4324 |
| | | | | | 6436-6571 |
| | | | | | 7218-7791 |
| | | | | | 7960-8711 |
| HTXFB61 | 469 | 967821 | AC022143 | 1784 | 1-1100 |
| | | | | | 1112-1738 |
| HAGEL01 | 470 | 971510 | AL136439 | 1785 | 1-224 |
| HAGEL01 | 470 | 971510 | AL138699 | 1786 | 1-895 |
| | | | | | 1014-1671 |
| HAGEL01 | 470 | 971510 | AL136439 | 1787 | 1-381 |
| HAGEL01 | 470 | 971510 | AL138699 | 1788 | 1-390 |
| HAGEL01 | 470 | 971510 | AL138699 | 1789 | 1-451 |
| | | | | | 617-855 |
| HCEOB15 | 471 | 973102 | AC015962 | 1790 | 1-233 |
| | | | | | 310-395 |
| | | | | | 960-1280 |
| | | | | | 1557-2072 |
| | | | | | 2206-2494 |
| | | | | | 2569-2818 |
| | | | | | 2979-3097 |
| | | | | | 3255-3441 |
| | | | | | 3612-4965 |
| | | | | | 5079-5476 |
| HCEOB15 | 471 | 973102 | AP002393 | 1791 | 1-234 |
| | | | | | 311-396 |
| | | | | | 961-1281 |
| | | | | | 1558-2073 |
| | | | | | 2207-2495 |
| | | | | | 2570-2819 |
| | | | | | 2980-3098 |
| | | | | | 3256-3442 |
| | | | | | 3613-4965 |
| | | | | | 5079-5476 |
| HCEOB15 | 471 | 973102 | AP002393 | 1792 | 1-128 |

[0048] Table 1B summarizes additional polynucleotides encompassed by the invention (including cDNA clones related to the sequences (Clone ID NO:Z), contig sequences (contig identifier (Contig ID:) contig nucleotide sequence identifiers (SEQ ID NO:X)), and genomic sequences (SEQ ID NO:B). The first column provides a unique clone identifier, “Clone ID NO:Z”, for a cDNA clone related to each contig sequence. The second column provides the sequence identifier, “SEQ ID NO:X”, for each contig sequence. The third column provides a unique contig identifier, “Contig ID):” for each contig sequence. The fourth column, provides a BAC identifier “BAC ID NO:A” for the BAC clone referenced in the corresponding row of the table. The fifth column provides the nucleotide sequence identifier, “SEQ ID NO:B” for a fragment of the BAC clone identified in column four of the corresponding row of the table. The sixth column, “Exon From-To”, provides the location (i.e., nucleotide position numbers) within the polynucleotide sequence of SEQ ID) NO:B which delineate certain polynucleotides of the invention that are also exemplary members of polynucleotide sequences that encode polypeptides of the invention (e.g., polypeptides containing amino acid sequences encoded by the polynucleotide sequences delineated in column six, and fragments and variants thereof).

TABLE 2

| | | | | | | | | |
|---|---|---|---|---|---|---|---|---|
| | | SEQ | | | | Score/ | | |
| Clone ID | Contig | ID | Analysis | | PFam/NR accession | Percent | NT | NT |
| NO:Z | ID: | NO:X | Method | PFam/NR Description | Number | Identity | From | To |

| | | | | | | | | | | |
|---|---|---|---|---|---|---|---|---|---|---|
| H2CBN05 | 907901 | 472 | HMMER | PFAM: Zinc finger, | PF00097 | 46.61 | 230 | 346 | | |
| | | | 1.8 | C3HC4 type (RING | | | | | | |
| | | | | finger) | | | | | | |
| | | | blastx.2 | ring finger protein - fruit | pir\|JC4296\|JC4296 | 47% | 188 | 517 | | |
| | | | | fly (Drosophila | | | | | | |
| | | | | melanogaster) | | | | | | |
| HA5BC03 | 1152324 | 12 | blastx.14 | (AC006978) supported by | gi\|5788103\|gb\|AAD5 | 80% | 415 | 672 | | |
| | | | | human and rodent 1 1 | 1450.1\|AC006978_1 | 29% | 301 | 402 | | |
| HA5BC03 | 907743 | 473 | HMMER | PFAM: Zinc finger, | PF00097 | 17.53 | 684 | 806 | | |
| | | | 1.8 | C3HC4 type (RING | | | | | | |
| | | | | finger) | | | | | | |
| | | | blastx.2 | (AC006978) supported by | gb\|AAD51450.1\|AC0 | 63% | 444 | 815 | | |
| | | | | human and rodent ESTs; | 06978_1 | | | | | |
| | | | | match 1 AA023712 | | | | | | |
| | | | | (NID:g1487627) [Homo | | | | | | |
| | | | | sapiens] | | | | | | |
| HADCD02 | 919843 | 474 | HMMER | PFAM: Zinc finger, | PF00097 | 42.11 | 807 | 923 | | |
| | | | 1.8 | C3HC4 type (RING | | | | | | |
| | | | | finger) | | | | | | |
| HAHCK43 | 1227734 | 14 | blastx.14 | CG1134 PROTEIN. | sp\|Q9VZJ9\|Q9VZJ9 | 26% | 537 | 941 | | |
| | | | | | | 31% | 147 | 425 | | |
| | | | | | | 25% | 804 | 1100 | | |
| | | | | | | 26% | 450 | 572 | | |
| | | | | | | 62% | 1128 | 1151 | | |
| HAHCK43 | 974679 | 475 | HMMER | PFAM: Zinc finger, | PF00097 | 31.64 | 370 | 483 | | |
| | | | 1.8 | C3HC4 type (RING | | | | | | |
| | | | | finger) | | | | | | |
| | | | blastx.2 | (AB028228) ZCF61 | dbj\|BAA87953.\| | 30% | 7 | 516 | | |
| | | | | [Arabidopsis thaliana] | | | | | | |
| HAIBU93 | 1214849 | 15 | blastx.14 | DJ1174N9.1 (novel | sp\|CAB92088\|CAB9 | 91% | 10 | 1401 | | |
| | | | | protein with IBR domain). | 2088 | 87% | 1449 | 1787 | | |
| | | | | | | 40% | 139 | 204 | | |
| HAIBU93 | 907830 | 476 | HMMER | PFAM: IBR domain | PF01485 | 82.3 | 214 | 411 | | |
| | | | 2.1.1 | | | | | | | |
| | | | blastx.2 | (AF120206)XY body | gb\|AAF18302.1\|AF1 | 68% | 10 | 1485 | | |
| | | | | protein [Mus musculus] | 20206_1 | | | | | |
| HAJAT23 | 907954 | 477 | HMMER | PFAM: Zinc finger, | PF00097 | 19.9 | 17 | 106 | | |
| | | | 2.1.1 | C3HC4 type (RING | | | | | | |
| | | | | finger) | | | | | | |
| | | | blastx.2 | (AF195046) TRC8 | gb\|AAF28720.1\|AF1 | 64% | 2 | 109 | | |
| | | | | [Rattus norvegicus] | 95046_1 | | | | | |
| HAMFW25 | 1217025 | 17 | blastx.14 | CG9941 PROTEIN. | sp\|Q9VY98\|Q9VY98 | 73% | 113 | 304 | | |
| | | | | | | 82% | 17 | 85 | | |
| | | | | | | 63% | 377 | 442 | | |
| | | | | | | 21% | 818 | 1024 | | |
| | | | | | | 37% | 791 | 871 | | |
| | | | | | | 27% | 698 | 796 | | |
| | | | | | | 24% | 788 | 973 | | |
| | | | | | | 36% | 288 | 353 | | |
| HAMFW25 | 888176 | 478 | HMMER | PFAM: Zinc finger, | PF00097 | 27.75 | 131 | 247 | | |
| | | | 1.8 | C3HC4 type (RING | | | | | | |
| | | | | finger) | | | | | | |
| | | | blastx.2 | predicted using | emb\|CAA94116.1\| | 67% | 116 | 292 | | |
| | | | | Genefinder; similar to | | 63% | 3 | 89 | | |
| | | | | Zinc finger, C3HC4 type | | 65% | 392 | 451 | | |
| | | | | 1 [Caenorhabditis elegans] | | | | | | |
| HBGOG26 | 907663 | 479 | HMMER | PFAM: Zinc finger, | PF00097 | 18.62 | 319 | 459 | | |
| | | | 1.8 | C3HC4 type (RING | | | | | | |
| | | | | finger) | | | | | | |
| HBGOK19 | 1152235 | 19 | blastx.14 | calcium channel BIII | gi\|217716\|dbj\|BAA03 | 50% | 243 | 320 | | |
| | | | | [Oryctolagus cuniculus] | 202.1\| | 53% | 491 | 529 | | |
| | | | | | | 80% | 73 | 102 | | |
| | | | | | | 58% | 307 | 342 | | |
| | | | | | | 38% | 524 | 586 | | |
| | | | | | | 45% | 450 | 482 | | |
| | | | | | | 24% | 22 | 156 | | |
| HBGOK19 | 813012 | 480 | HMMER | PFAM: Zinc finger, | PF00097 | 14.2 | 374 | 493 | | |
| | | | 1.8 | C3HC4 type (RING | | | | | | |
| | | | | finger) | | | | | | |
| HBJNG74 | 966489 | 481 | HMMER | PFAM: Zinc finger, | PF00097 | 11.28 | 1337 | 1462 | | |
| | | | 1.8 | C3HC4 type (RING | | | | | | |
| | | | | finger) | | | | | | |
| | | | blastx.2 | (AL035709) putative | emb\|CAB38936.1\| | 37% | 539 | 1471 | | |
| | | | | protein [Arabidopsis | | | | | | |
| | | | | thaliana] | | | | | | |
| HBODN93 | 907780 | 482 | HMMER | PFAM: Zinc finger, | PF00097 | 36.72 | 186 | 353 | | |
| | | | 1.8 | C3HC4 type (RING | | | | | | |
| | | | | finger) | | | | | | |
| | | | blastx.2 | putative transcription | emb\|CAA74018.1\| | 40% | 159 | 395 | | |
| | | | | factor XPRF [Homo | | | | | | |
| | | | | sapiens] | | | | | | |
| HDPYD63 | 908036 | 483 | HMMER | PFAM: Zinc finger, | PF00097 | 22.7 | 15 | 86 | | |
| | | | 2.1.1 | C3HC4 type (RING | | | | | | |
| | | | | finger) | | | | | | |
| | | | blastx.2 | (AK001658) unnamed | dbj\|BAA91817.1\| | 63% | 15 | 572 | | |
| | | | | protein product [Homo | | 50% | 377 | 529 | | |
| | | | | sapiens] | | 73% | 583 | 648 | | |
| HDQHZ11 | 1199932 | 23 | blastx.14 | DJ351K20.1.1 (novel | sp\|CAB76254\|CAB7 | 77% | 341 | 1417 | | |
| | | | | C3HC4 type Zinc finger | 6254 | | | | | |
| | | | | (RING finger) protein | | | | | | |
| | | | | (isoform 1)). | | | | | | |
| HDQHZ11 | 966087 | 484 | HMMER | PFAM: Zinc finger, | PF00097 | 34.19 | 434 | 547 | | |
| | | | 1.8 | C3HC4 type (RING | | | | | | |
| | | | | finger) | | | | | | |
| | | | blastx.2 | (AL109939) | emb\|CAB76254.1\| | 75% | 326 | 1402 | | |
| | | | | dJ351K20.1.1 (novel | | | | | | |
| | | | | C3HC4 type Zinc finger | | | | | | |
| | | | | (RING finger) protein | | | | | | |
| | | | | (iso form 1)) [Homo | | | | | | |
| | | | | sapiens] | | | | | | |
| HE8MO05 | 851468 | 485 | HMMER | PFAM: Zinc finger, | PF00097 | 40.81 | 254 | 376 | | |
| | | | 1.8 | C3HC4 type (RING | | | | | | |
| | | | | finger) | | | | | | |
| | | | blastx.2 | (AF171875) g1-related | gb\|AAF05310.1\|AF1 | 64% | 5 | 397 | | |
| | | | | zinc finger protein [Mus | 71875_1 | 31% | 369 | 605 | | |
| | | | | musculus] | | | | | | |
| HE8TO43 | 1151645 | 25 | blastx.14 | (AC005314) unknown | gi\|3608154\|gb\|AAC3 | 33% | 175 | 333 | | |
| | | | | protein [Arabidopsis | 6187.1\| | | | | | |
| | | | | thaliana] | | | | | | |
| HE8TO43 | 930895 | 486 | HMMER | PFAM: Zinc finger, | PF00097 | 21.1 | 129 | 248 | | |
| | | | 1.8 | C3HC4 type (RING | | | | | | |
| | | | | finger) | | | | | | |
| HEEAA93 | 936268 | 26 | HMMER | PEAM: Zinc finger, | PF00097 | 40.41 | 433 | 561 | | |
| | | | 1.8 | C3HC4 type (RING | | | | | | |
| | | | | finger) | | | | | | |
| | | | blastx.2 | (AL032639) similar to | emb\|CAA21635.1\| | 40% | 364 | 717 | | |
| | | | | Zinc finger, C3HC4 type | | | | | | |
| | | | | (RING finger); 11 cDNA | | | | | | |
| | | | | EST yk548h6.3 comes | | | | | | |
| | | | | from this gene; cDNA | | | | | | |
| | | | | EST yk618f4.3 co | | | | | | |
| HEMFK40 | 1155404 | 27 | blastx.14 | (AF151048) HSPC214 | gi\|7106818\|gb\|AAF36 | 85% | 171 | 566 | | |
| | | | | [Homo sapiens] | 134.1\|AF151048_1 | | | | | |
| HEMFK40 | 869076 | 487 | HMMER | PFAM: Zinc finger, | PF00097 | 14.39 | 320 | 397 | | |
| | | | 1.8 | C3HC4 type (RING | | | | | | |
| | | | | finger) | | | | | | |
| | | | | blastx.2 | (AF151048) HSPC214 | gb\|AAF36134.1\|AF1 | | 73% | 170 | 466 |
| | | | | [Homo sapiens] | 51048_1 | | | | | |
| HEPBV26 | 965419 | 28 | HMMER | PFAM: Zinc finger, | PF00097 | 29.8 | 210 | 347 | | |
| | | | 1.8 | C3HC4 type (RING | | | | | | |
| | | | | finger) | | | | | | |
| | | | blastx.2 | (AK000232) unnamed | dbj\|BAA91024.1\| | 89% | 93 | 527 | | |
| | | | | protein product [Homo | | | | | | |
| | | | | sapiens] | | | | | | |
| HETAD36 | 916429 | 488 | HMMER | PFAM: Zinc finger, | PF00097 | 35.71 | 462 | 575 | | |
| | | | 1.8 | C3HC4 type (RING | | | | | | |
| | | | | finger) | | | | | | |
| | | | blastx.2 | (AL109939) | emb\|CAB76254.1\| | 97% | 357 | 644 | | |
| | | | | dJ351K20.1.1 (novel | | 64% | 653 | 703 | | |
| | | | | C3HC4 type Zinc finger | | | | | | |
| | | | | (RING finger) protein | | | | | | |
| | | | | (isoform 1)) [Homo | | | | | | |
| | | | | sapiens] | | | | | | |
| HFIXH90 | 771388 | 489 | HMMER | PFAM: Zinc finger, | PF00097 | 20.96 | 159 | 278 | | |
| | | | 1.8 | C3HC4 type (RING | | | | | | |
| | | | | finger) | | | | | | |
| HHATO16 | 1222423 | 31 | blastx.14 | CG7388 PROTEIN. | sp\|Q9VSB1\|Q9VSB1 | 49% | 1138 | 1326 | | |
| | | | | | | 34% | 1777 | 2055 | | |
| | | | | | | 61% | 1456 | 1581 | | |
| | | | | | | 42% | 1597 | 1779 | | |
| | | | | | | 61% | 155 | 208 | | |
| | | | | | | 28% | 1291 | 1365 | | |
| | | | | | | 35% | 1348 | 1407 | | |
| HHATO16 | 888975 | 490 | HMMER | PFAM:Zinc finger, | PF00097 | 45.15 | 1187 | 1300 | | |
| | | | 1.8 | C3HC4 type (RING | | | | | | |
| | | | | finger) | | | | | | |
| | | | blastx.2 | (AJ250998) carotenoid | emb\|CAB61339.1\| | 41% | 1184 | 1774 | | |
| | | | | regulatory protein [Mucor | | 26% | 1942 | 2031 | | |
| | | | | circinelloides] | | 27% | 2008 | 2106 | | |
| HHATO35 | 972554 | 491 | HMMER | PFAM: Zinc finger, | PF00097 | 28.36 | 774 | 935 | | |
| | | | 1.8 | C3HC4 type (RING | | | | | | |
| | | | | finger) | | | | | | |
| | | | blastx.2 | (AF161555) HSPC070 | gb\|AAE29042.1\|AF1 | 93% | 321 | 1118 | | |
| | | | | [Homo sapiens] | 61555_1 | 100% | 63 | 188 | | |
| | | | | | | 66% | 103 | 288 | | |
| | | | | | | 45% | 171 | 236 | | |
| | | | | | | 75% | 272 | 319 | | |
| | | | | | | 36% | 171 | 227 | | |
| HHBEE90 | 1197912 | 33 | blastx.14 | ARIADNE-2 PROTEIN | sp\|Q9Z1K6\|Q9Z1K6 | 56% | 439 | 582 | | |
| | | | | (ARI2). | | 24% | 25 | 318 | | |
| HHBEE90 | 666834 | 492 | HMMER | PFAM: Zinc finger, | PF00097 | 12.3 | 103 | 249 | | |
| | | | 1.8 | C3HC4 type (RING | | | | | | |
| | | | | finger) | | | | | | |
| | | | blastx.2 | (AC006533) putative | gb\|AAD32295.1\|AC0 | 33% | 103 | 261 | | |
| | | | | ARI-like RING zinc | 06533_19 | 34% | 458 | 655 | | |
| | | | | finger protein | | 43% | 303 | 392 | | |
| | | | | [Arabidopsis thaliana] | | | | | | |
| HHBHK10 | 1204926 | 34 | blastx.14 | Hypothetical 25.5 kDa | sp\|BAB12125\|BAB1 | 99% | 272 | 817 | | |
| | | | | protein. | 2125 | 95% | 157 | 279 | | |
| HHBHK10 | 966448 | 493 | HMMER | PFAM: Zinc finger, | PF00097 | 37.7 | 211 | 378 | | |
| | | | 1.8 | C3HC4 type (RING | | | | | | |
| | | | | finger) | | | | | | |
| HHEWX25 | 907813 | 494 | HMMER | PFAM: Zinc finger, | PF00097 | 15.42 | 270 | 362 | | |
| | | | 1.8 | C3HC4 type (RING | | | | | | |
| | | | | finger) | | | | | | |
| | | | blastx.2 | There is a C3HC4 zinc- | dbj\|BAA11478.1\| | 77% | 213 | 506 | | |
| | | | | finger in the C-terminal | | | | | | |
| | | | | region. [Homo sapiens] | | | | | | |
| HISDU47 | 1204962 | 36 | blastx.14 | CG10144 PROTEIN. | sp\|Q9VRX2\|Q9VRX | 40% | 608 | 997 | | |
| | | | | | 2 | 35% | 1157 | 1318 | | |
| | | | | | | 30% | 2081 | 2260 | | |
| | | | | | | 28% | 1598 | 1849 | | |
| | | | | | | 36% | 1841 | 1963 | | |
| | | | | | | 29% | 485 | 586 | | |
| | | | | | | 27% | 2249 | 2359 | | |
| | | | | | | 40% | 1637 | 1702 | | |
| | | | | | | 34% | 217 | 294 | | |
| | | | | | | 27% | 370 | 477 | | |
| | | | | | | 22% | 1157 | 1249 | | |
| | | | | | | 29% | 1067 | 1138 | | |
| HISDU47 | 940720 | 495 | HMMER | PFAM: Zinc finger, | PF00097 | 26.33 | 1290 | 1445 | | |
| | | | 1.8 | C3HC4 type (RING | | | | | | |
| | | | | finger) | | | | | | |
| | | | blastx.2 | (AF15565) VacA | gb\|AAB69389.1\| | 30% | 828 | 1400 | | |
| | | | | [Dictyostelium | | 26% | 201 | 542 | | |
| | | | | discoideum] | | 33% | 558 | 818 | | |
| | | | | | | 23% | 432 | 758 | | |
| HJTAC77 | 1197913 | 37 | blastx.14 | numb-binding protein | pir\|T09457\|T09457 | 53% | 4 | 384 | | |
| | | | | LNXp80 - mouse | | 60% | 598 | 903 | | |
| | | | | | | 56% | 933 | 1223 | | |
| | | | | | | 66% | 1660 | 1857 | | |
| | | | | | | 60% | 1348 | 1521 | | |
| | | | | | | 37% | 1318 | 1518 | | |
| | | | | | | 36% | 1381 | 1518 | | |
| | | | | | | 37% | 700 | 867 | | |
| | | | | | | 28% | 1011 | 1190 | | |
| | | | | | | 34% | 1014 | 1178 | | |
| | | | | | | 26% | 1011 | 1169 | | |
| | | | | | | 28% | 700 | 879 | | |
| | | | | | | 47% | 502 | 564 | | |
| | | | | | | 31% | 742 | 864 | | |
| | | | | | | 37% | 1405 | 1500 | | |
| | | | | | | 27% | 1747 | 1857 | | |
| | | | | | | 30% | 601 | 690 | | |
| | | | | | | 41% | 1414 | 1485 | | |
| | | | | | | 46% | 1308 | 1346 | | |
| | | | | | | 32% | 856 | 930 | | |
| | | | | | | 52% | 628 | 684 | | |
| HJTAC77 | 890680 | 496 | HMMER | PFAM: Zinc finger, | PF00097 | 42.19 | 19 | 132 | | |
| | | | 1.8 | C3HC4 type (RING | | | | | | |
| | | | | finger) | | | | | | |
| | | | blastx.2 | (AF034745) LNXp80 | gb\|AAC40075.1\| | 59% | 1 | 246 | | |
| | | | | [Mus musculus] | | | | | | |
| HKAKW19 | 1154644 | 38 | blastx.14 | (AF151048) HSPC214 | gi\|7106818\|gb\|AAF36 | 85% | 120 | 515 | | |
| | | | | [Homo sapiens] | 134.1\|AF151048_1 | | | | | |
| HKAKW19 | 932475 | 497 | HMMER | PFAM: Zinc finger, | PF00097 | 14.15 | 273 | 350 | | |
| | | | 1.8 | C3HC4 type (RING | | | | | | |
| | | | | finger) | | | | | | |
| | | | blastx.2 | (AF151048) HSPC214 | gb\|AAF36134.1\|AF1 | 85% | 123 | 518 | | |
| | | | | [Homo sapiens] | 51048_1 | | | | | |
| HKB1E70 | 1152341 | 39 | blastx.14 | (AF142060) RING finger | gi\|4809218\|gb\|AAD3 | 89% | 16 | 354 | | |
| | | | | protein [Homo sapiens] | 0147.1\|AF142060_1 | | | | | |
| HKB1E70 | 965383 | 498 | HMMER | PFAM: Zinc finger, | PF00097 | 16.2 | 303 | 374 | | |
| | | | 1.8 | C3HC4 type (RING | | | | | | |
| | | | | finger) | | | | | | |
| | | | blastx.2 | (AF142060) RING finger | gb\|AAD30147.1\|AF1 | 89% | 69 | 407 | | |
| | | | | protein [Homo sapiens] | 42060_1 | | | | | |
| HLMIY60 | 908026 | 499 | HMMER | PFAM: Zinc finger, | PF00097 | 42.86 | 139 | 219 | | |
| | | | 1.8 | C3HC4 type (RING | | | | | | |
| | | | finger) | | | | | | | |
| | | | blastx.2 | (AF156272) RING finger | gb\|AAD40287.1\| | 59% | 112 | 243 | | |
| | | | | protein terf [Rattus | | 100% | 243 | 260 | | |
| | | | | norvegicus] | | | | | | |
| HLWEE08 | 870452 | 41 | HMMER | PFAM: Zinc finger, | PF00097 | 10.43 | 215 | 310 | | |
| | | | 1.8 | C3HC4 type (RING | | | | | | |
| | | | | finger) | | | | | | |
| | | | blastx.2 | (AL031709)c316G12.4 | emb\|CAB56185.1\| | 44% | 17 | 313 | | |
| | | | | (novel protein similar to | | | | | | |
| | | | | API1 and API2 1 sapiens] | | | | | | |
| HLWFP10 | 963412 | 42 | HMMER | PFAM: Zinc finger, | PF00097 | 18.66 | 482 | 601 | | |
| | | | 1.8 | C3HC4 type (RING | | | | | | |
| | | | | finger) | | | | | | |
| HMAFD64 | 1197916 | 43 | blastx.14 | DJ351K20.1.1 (novel | sp\|CAB76254\|CAB7 | 77% | 473 | 1546 | | |
| | | | | C3HC4 type Zinc finger | 6254 | | | | | |
| | | | | (RING finger) protein | | | | | | |
| | | | | (isoform 1)). | | | | | | |
| HMAFD64 | 966086 | 500 | HMMER | PFAM: Zinc finger, | PF00097 | 35.66 | 558 | 671 | | |
| | | | 1.8 | C3HC4 type (RING | | | | | | |
| | | | | finger) | | | | | | |
| | | | blastx.2 | (AL109939) | emb\|CAB76254.1\| | 99% | 453 | 803 | | |
| | | | | dJ351K20.1.1 (novel | | 92% | 808 | 933 | | |
| | | | | C3HC4 type Zinc finger | | | | | | |
| | | | | (RING finger) protein | | | | | | |
| | | | | (iso form 1)) [Homo | | | | | | |
| | | | | sapiens] | | | | | | |
| HMEKQ25 | 907891 | 44 | HMMER | PFAM: Band 4.1 family | PF00373 | 49.15 | 242 | 538 | | |
| | | | 1.8 | | | | | | | |
| | | | blastx.2 | (AF187016) myosin | gb\|AAFl8974.1\|AF1 | 88% | 242 | 1267 | | |
| | | | | regulatory light chain | 87016_1 | 100% | 160 | 246 | | |
| | | | | interacting protein MIR | | 53% | 1122 | 1160 | | |
| | | | | [Homo sapiens] | | | | | | |
| HMIAL66 | 1197918 | 45 | blastx.14 | PRAJA1. | sp\|O55176\|O55176 | 78% | 1327 | 1893 | | |
| | | | | | | 64% | 904 | 1200 | | |
| | | | | | | 68% | 835 | 921 | | |
| | | | | | | 68% | 94 | 168 | | |
| | | | | | | 68% | 214 | 270 | | |
| | | | | | | 71% | 1297 | 1338 | | |
| | | | | | | 69% | 1941 | 1979 | | |
| | | | | | | 26% | 907 | 996 | | |
| | | | | | | 26% | 277 | 423 | | |
| HMIAL66 | 959764 | 501 | HMMER | PFAM: Zinc finger, | PF00097 | 32.7 | 1769 | 1891 | | |
| | | | 2.1.1 | C3HC4 type (RING | | | | | | |
| | | | | finger) | | | | | | |
| | | | blastx.2 | PRAJA1 [Mus musculus] | gb\|AAC00205.1\| | 78% | 1304 | 1900 | | |
| | | | | | | 72% | 842 | 1207 | | |
| | | | | | | 37% | 100 | 414 | | |
| | | | | | | 55% | 1909 | 1986 | | |
| | | | | | | 28% | 283 | 552 | | |
| | | | | | | 26% | 914 | 1003 | | |
| HOEOE25 | 907806 | 46 | HMMER | PFAM: Zinc finger, | PF00097 | 41.99 | 59 | 208 | | |
| | | | 1.8 | C3HC4 type (RING | | | | | | |
| | | | | finger) | | | | | | |
| | | | blastx.2 | (AJ224819) tumor | emb\|CAA12136.1\| | 41% | 32 | 625 | | |
| | | | | suppressor [Homo | | | | | | |
| | | | | sapiens] | | | | | | |
| HOGEB51 | 908025 | 502 | HMMER | PFAM: Zinc finger, | PF00097 | 21.4 | 35 | 100 | | |
| | | | 2.1.1 | C3HC4 type(RING | | | | | | |
| | | | | finger) | | | | | | |
| HPJDO64 | 1217040 | 48 | blastx.14 | Postreplication repair | sp\|BAA99284\|BAA9 | 89% | 79 | 1563 | | |
| | | | | protein hRAD18p. | 9284 | | | | | |
| HPJDO64 | 839585 | 503 | HMMER | PFAM: Zinc finger, | PF00097 | 33.72 | 143 | 259 | | |
| | | | 1.8 | C3HC4 type (RING | | | | | | |
| | | | | finger) | | | | | | |
| | | | blastx.2 | (AF205278) post- | gb\|AAF19193.1\|AF2 | 71% | 104 | 514 | | |
| | | | | replication repair protein | 05278_1 | 66% | 72 | 107 | | |
| | | | | Hr18 [Mus musculus] | | | | | | |
| HPMGN27 | 1155395 | 49 | blastx.14 | (AF155109) putative ring | gi\|5360113\|gb\|AAD4 | 65% | 6 | 605 | | |
| | | | | zinc finger protein NY- | 2875.1\|AF155109_1 | | | | | |
| | | | | REN-43 antigen [Homo | | | | | | |
| | | | | sapiens] | | | | | | |
| HPMGN27 | 946275 | 504 | HMMER | PFAM: Zinc finger, | PF00097 | 27.73 | 981 | 859 | | |
| | | | 1.8 | C3HC4 type (RING | | | | | | |
| | | | | finger) | | | | | | |
| | | | blastx.2 | (AF155109) putative ring | gb\|AAD42875.1\|AF1 | 64% | 1413 | 817 | | |
| | | | | zinc finger protein NY- | 55109_1 | | | | | |
| | | | | REN-43 antigen [Homo | | | | | | |
| | | | | sapiens] | | | | | | |
| HSSGC06 | 974921 | 505 | HMMER | PFAM: Zinc finger, | PF00097 | 37.83 | 95 | 211 | | |
| | | | 1.8 | C3HC4 type (RING | | | | | | |
| | | | | finger) | | | | | | |
| | | | blastx.2 | (AL031685) dJ963K23.2 | emb\|CAB46028.1\| | 94% | 11 | 694 | | |
| | | | | (novel protein) [Homo | | | | | | |
| | | | | sapiens] | | | | | | |
| HTAJO65 | 907753 | 506 | HMMER | PFAM: Zinc finger, | PF00097 | 31.34 | 772 | 894 | | |
| | | | 1.8 | C3HC4 type (RING | | | | | | |
| | | | | finger) | | | | | | |
| | | | blastx.2 | (AK000559) unnamed | dbj\|BAA91254.1\| | 89% | 100 | 933 | | |
| | | | | protein product [Homo | | 47% | 885 | 1010 | | |
| | | | | sapiens] | | | | | | |
| HTECC09 | 1064313 | 52 | blastx.14 | (AF151048) HSPC214 | gi\|7106818\|gb\|AAF36 | 98% | 111 | 302 | | |
| | | | | [Homo sapiens] | 134.1\|AF151048_1 | 81% | 311 | 343 | | |
| HTECC09 | 678659 | 507 | HMMER | PFAM: Zinc finger, | PF00097 | 14.18 | 261 | 338 | | |
| | | | 1.8 | C3HC4 type (RING | | | | | | |
| | | | | finger) | | | | | | |
| | | | blastx.2 | (AF151048) HSPC214 | gb\|AAF36134.1\|AF1 | 85% | 111 | 332 | | |
| | | | | [Homo sapiens] | 51048_1 | | | | | |
| HTEJS34 | 1153919 | 53 | blastx.14 | (AF151072) HSPC238 | gi\|7106866\|gb\|AAF36 | 96% | 55 | 513 | | |
| | | | | [Homo sapiens] | 158.1\|AF151072_1 | | | | | |
| HTEJS34 | 961546 | 508 | HMMER | PFAM: Zinc finger, | PF00097 | 42.07 | 280 | 402 | | |
| | | | 1.8 | C3HC4 type (RING | | | | | | |
| | | | | finger) | | | | | | |
| | | | blastx.2 | (AF151072) HSPC238 | gb\|AAF36158.1\|AF1 | 96% | 55 | 513 | | |
| | | | | [Homo sapiens] | 51072_1 | | | | | |
| HTEMK07 | 964546 | 509 | HMMER | PFAM: Zinc finger, | PF00097 | 30.82 | 369 | 488 | | |
| | | | 1.8 | C3HC4 type (RING | | | | | | |
| | | | | finger) | | | | | | |
| | | | blastx.2 | (AF162680) STRIN | gb\|AAD46623.2\|AF1 | 97% | 318 | 1052 | | |
| | | | | protein [Homo sapiens] | 62680_1 | | | | | |
| HTENY81 | 935236 | 510 | HMMER | PFAM: Zinc finger, | PF00097 | 20.16 | 2002 | 1883 | | |
| | | | 1.8 | C3HC4 type (RING | | | | | | |
| | | | | finger) | | | | | | |
| | | | blastx.2 | MEX-3 [Caenorhabditis | gb\|AAC47313.1\| | 61% | 3073 | 2603 | | |
| | | | | elegans] | | | | | | |
| HTLHB07 | 1152265 | 56 | blastx.14 | (AC006014) similar to | gi\|4699967\|gb\|AAD2 | 99% | 194 | 940 | | |
| | | | | RFP transforming 1 | 8067.1\|AC006014_8 | | | | | |
| HTLHB07 | 952180 | 511 | HMMER | PFAM: Zinc finger, | PF00097 | 35.5 | 217 | 306 | | |
| | | | 2.1.1 | C3HC4 type (RING | | | | | | |
| | | | | finger) | | | | | | |
| | | | blastx.2 | (AC006014) similar to | gb\|AAD28067.1\|AC0 | 65% | 172 | 456 | | |
| | | | | RFP transforming protein; | 06014_8 | | | | | |
| | | | | similar to P14373 | | | | | | |
| | | | | (PID:g132517) [Homo | | | | | | |
| | | | | sapiens] | | | | | | |
| HTPAG88 | 968786 | 512 | HMMER | PFAM: Zinc finger, | PF00097 | 37.78 | 397 | 498 | | |
| | | | 1.8 | C3HC4 type (RING | | | | | | |
| | | | | finger) | | | | | | |
| HUSGT72 | 1154801 | 58 | blastx.14 | hypothetical protein | gi\|2145348\|emb\|CAA | 40% | 125 | 244 | | |
| | | | | [avian adenovirus EDS] | 70794.1\| | 53% | 302 | 340 | | |
| HUSGT72 | 908031 | 513 | HMMER | PFAM: Zinc finger, | PF00097 | 43.27 | 166 | 282 | | |
| | | | 1.8 | C3HC4 type (RING | | | | | | |
| | | | | finger) | | | | | | |
| HUVHL02 | 907665 | 514 | HMMER | PFAM: Zinc finger, | PF00097 | 28.5 | 191 | 307 | | |
| | | | 1.8 | C3HC4 type (RING | | | | | | |
| | | | | finger) | | | | | | |
| | | | blastx.2 | (AF129507) transcription | gb\|AAF28469.1\|AF1 | 99% | 20 | 400 | | |
| | | | | factor ICBP90 [Homo | 29507_1 | | | | | |
| | | | | sapiens] | | | | | | |
| HWABK01 | 916033 | 515 | HMMER | PFAM: Zinc finger, | PF00097 | 14.54 | 710 | 766 | | |
| | | | 1.8 | C3HC4 type (RING | | | | | | |
| | | | | finger) | | | | | | |
| HWAFH10 | 908034 | 516 | HMMER | PFAM: Zinc finger, | PF00097 | 29.53 | 586 | 702 | | |
| | | | 1.8 | C3HC4 type (RING | | | | | | |
| | | | | finger) | | | | | | |
| | | | blastx.2 | (AF129507) transcription | gb\|AAF28469.1\|AF1 | 53% | 403 | 795 | | |
| | | | | factor ICBP90 [Homo | 29507_1 | | | | | |
| | | | | sapiens] | | | | | | |
| HWLEP14 | 907661 | 517 | HMMER | PFAM: Zinc finger, | PF00097 | 32.51 | 482 | 366 | | |
| | | | 1.8 | C3HC4 type (RING | | | | | | |
| | | | | finger) | | | | | | |
| | | | blastx.2 | (AB028645) Cbl-c [Homo | dbj\|BAA86298.1\| | 86% | 584 | 111 | | |
| | | | | sapiens] | | | | | | |
| HWLEP14 | 907999 | 518 | HMMER | PFAM: Zinc finger, | PF00097 | 31.76 | 449 | 565 | | |
| | | | 1.8 | C3HC4 type (RING | | | | | | |
| | | | | finger) | | | | | | |
| | | | blastx.14 | (AF117646) long CBL-3 | gi\|4959421\|gb\|AAD3 | 96% | 5 | 685 | | |
| | | | | protein [Homo sapiens] | 4341.1\|AF117646_1 | 78% | 875 | 931 | | |
| HWLEP57 | 1178824 | 63 | blastx.14 | (AF171875) gl-related | gi\|6175860\|gb\|AAF05 | 61% | 401 | 709 | | |
| | | | | zinc finger protein [Mus | 310.1\|AF171875_1 | 38% | 154 | 330 | | |
| | | | | musculus] | | 45% | 97 | 168 | | |
| | | | | | | 75% | 73 | 96 | | |
| | | | | | | 60% | 13 | 42 | | |
| HWLEP57 | 939458 | 519 | HMMER | PFAM: Zinc finger, | PF00097 | 40.72 | 564 | 686 | | |
| | | | 1.8 | C3HC4 type (RING | | | | | | |
| | | | | finger) | | | | | | |
| | | | blastx.2 | (AF171875) g1-related | gb\|AAF05310.1\|AF1 | 43% | 306 | 716 | | |
| | | | | zinc finger protein [Mus | 71875_1 | 40% | 19 | 336 | | |
| | | | | musculus] | | 45% | 407 | 550 | | |
| HWLFR20 | 907968 | 64 | HMMER | PFAM: Zinc finger, | PF00097 | 41.36 | 211 | 333 | | |
| | | | 1.8 | C3HC4 type (RING | | | | | | |
| | | | | finger) | | | | | | |
| | | | blastx.2 | (AF030131) Plenty of | gb\|AAC40070.1\| | 95% | 178 | 375 | | |
| | | | | SH3s; POSH [Mus | | 62% | 378 | 497 | | |
| | | | | musculus] | | 50% | 431 | 496 | | |
| HDQGP59 | 1137749 | 65 | blastx.14 | (AC011560) hypothetical | gi\|6119546\|gb\|AAF04 | 57% | 172 | 576 | | |
| | | | | protein [Arabidopsis | 190.1\|AC011560_31 | 57% | 808 | 849 | | |
| | | | | thaliana] | | 50% | 98 | 145 | | |
| HDQGP59 | 908260 | 520 | HMMER | PFAM: RNA recognition | PF00076 | 86.5 | 222 | 437 | | |
| | | | 2.1.1 | motif. (a.k.a. RRM, RBD, | | | | | | |
| | | | | or RNP domain) | | | | | | |
| | | | blastx.2 | (AC011560) hypothetical | gb\|AAF04190.1\|AC0 | 57% | 162 | 566 | | |
| | | | | protein [Arabidopsis | 11560_31 | 57% | 798 | 839 | | |
| | | | | thaliana] | | | | | | |
| HE9OO78 | 1189361 | 66 | blastx.14 | contains similarity to | gi\|1707154\|gb\|AAB3 | 70% | 40 | 90 | | |
| | | | | C2H2-type zinc fingers | 7904.1\| | 63% | 433 | 489 | | |
| | | | | [Caenorhabditis clegans] | | 48% | 103 | 177 | | |
| | | | | | | 56% | 448 | 495 | | |
| HE9OO78 | 916517 | 521 | HMMER | PFAIVI: Zinc finger, | PF00098 | 42.2 | 202 | 255 | | |
| | | | 2.1.1 | CCHC class | | | | | | |
| | | | blastx.2 | contains similarity to | gb\|AAB37904.1\| | 50% | 31 | 249 | | |
| | | | | C2H2-type zinc fingers | | 45% | 31 | 255 | | |
| | | | | [Caenorhabditis elegans] | | | | | | |
| HFIYY25 | 575060 | 522 | HMMER | PFAM: Zinc finger, PF00098 | | 12.24 | 127 | 180 | | |
| | | | 1.8 | CCHC class | | | | | | |
| | | | blastx.2 | (AK000101) unnamed | dbj\|BAA90946.1\| | 60% | 106 | 312 | | |
| | | | | protein product [Homo | | 100% | 1 | 42 | | |
| | | | | sapiens] | | | | | | |
| HHFBZ57 | 961502 | 68 | HMMER | PFAM: Zinc finger, | PF00098 | 8.07 | 188 | 208 | | |
| | | | 1.8 | CCHC class | | | | | | |
| | | | blastx.2 | ORF-1 [Escherichia coli] | gb\|AAA18299.1\| | 41% | 287 | 496 | | |
| | | | | | | 30% | 495 | 734 | | |
| HLTFA51 | 908283 | 69 | HMMER | PFAM: Zinc finger, | PF00098 | 37.4 | 1446 | 1499 | | |
| | | | 2.1.1 | CCHC class | | | | | | |
| | | | blastx.2 | K10D2.3 gene product | gb\|AAA62541.1\| | 34% | 174 | 1562 | | |
| | | | | [Caenorhabditis elegans] | | 23% | 1760 | 1912 | | |
| HMWEUl5 | 779437 | 523 | HMMIER | PFAM: Zinc finger, | PF00098 | 16.88 | 356 | 409 | | |
| | | | 1.8 | CCHC class | | | | | | |
| HSKNJ36 | 958227 | 524 | HMMER | PFAM: Zinc finger, | PF00098 | 8.32 | 120 | 143 | | |
| | | | 1.8 | CCHC class | | | | | | |
| HTEDF22 | 1153917 | 72 | blastx.14 | cellular nucleic acid | gi\|854675\|gb\|AAB60 | 81% | 266 | 502 | | |
| | | | | binding protein [Mus | 490.1\| | 40% | 254 | 478 | | |
| | | | | musculus] | | 34% | 275 | 499 | | |
| | | | | | | 58% | 498 | 569 | | |
| | | | | | | 36% | 401 | 508 | | |
| | | | | | | 64% | 266 | 307 | | |
| | | | | | | 62% | 260 | 307 | | |
| | | | | | | 68% | 68 | 115 | | |
| | | | | | | 35% | 266 | 358 | | |
| | | | | | | 56% | 185 | 253 | | |
| | | | | | | 71% | 455 | 496 | | |
| | | | | | | 64% | 519 | 560 | | |
| | | | | | | 64% | 338 | 379 | | |
| | | | | | | 57% | 519 | 560 | | |
| | | | | | | 52% | 510 | 560 | | |
| | | | | | | 52% | 455 | 505 | | |
| | | | | | | 44% | 455 | 508 | | |
| | | | | | | 64% | 206 | 247 | | |
| | | | | | | 50% | 519 | 560 | | |
| | | | | | | 40% | 398 | 442 | | |
| | | | | | | 57% | 206 | 247 | | |
| | | | | | | 57% | 206 | 247 | | |
| | | | | | | 50% | 206 | 247 | | |
| | | | | | | 47% | 197 | 247 | | |
| | | | | | | 60% | 86 | 115 | | |
| HTEDF22 | 908406 | 525 | HMMER | PFAM: Zinc finger, | PF00098 | 20.37 | 250 | 297 | | |
| | | | 1.8 | CCHC class | | | | | | |
| | | | blastx.2 | nucleic acid binding | gb\|AAA89198.1\| | 46% | 52 | 303 | | |
| | | | | protein [Mus sp.] | | | | | | |
| HUSIJ74 | 1154803 | 73 | blastx.14 | (AF151077) HSPC243 | gi\|7106876\|gb\|AAF36 | 82% | 153 | 821 | | |
| | | | | [Homo sapiens] | 163.1\|AF151077_1 | | | | | |
| HUSJJ74 | 963637 | 526 | HMMER | PFAM: S1 RNA binding | PF00575 | 36.8 | 186 | 410 | | |
| | | | 2.1.1 | domain | | | | | | |
| | | | blastx.2 | (AF151077) HSPC243 | gb\|AAF36163.1\|AF1 | 80% | 153 | 821 | | |
| | | | | [Homo sapiens] | 51077_1 | | | | | |
| HWHGP91 | 958083 | 527 | HMMER | PFAM: Zinc finger, | PF00098 | 22.7 | 49 | 102 | | |
| | | | 2.1.1 | CCHC class | | | | | | |
| | | | blastx.2 | (AL157433) hypothetical | emb\|CAB75657.1\| | 90% | 85 | 735 | | |
| | | | | protein [Homo sapiens] | | 95% | 862 | 1491 | | |
| HWLDO07 | 968923 | 528 | HMMER | PFAM: Zinc finger, | PF00098 | 17.38 | 469 | 522 | | |
| | | | 1.8 | CCHC class | | | | | | |
| HWMGS22 | 967700 | 529 | HMMER | PFAM: Zinc finger, | PF00098 | 24.2 | 956 | 1009 | | |
| | | | 2.1.1 | CCHC class | | | | | | |
| | | | blastx.2 | (AL117532) hypothetical | emb\|CAB55981.1\| | 84% | 644 | 1105 | | |
| | | | | protein [Homo sapiens] | | 97% | 14 | 409 | | |
| | | | | | | 27% | 40 | 180 | | |
| HDAAQ07 | 953219 | 530 | HMMER | PFAM: Armadillo | PF00514 | 17.06 | 328 | 453 | | |
| | | | 1.8 | segment protein, repeats | | | | | | |
| | | | blastx.2 | (AK001373) unnamed | dbj\|BAA91656.1\| | 95% | 214 | 507 | | |
| | | | | protein product [Homo | | | | | | |
| | | | | sapiens] | | | | | | |
| HTEBC74 | 1222351 | 78 | blastx.14 | CG5155 PROTEIN. | sp\|Q9VM21\|Q9VM2 | 23% | 168 | 464 | | |
| | | | | | 1 | 27% | 939 | 1211 | | |
| | | | | | | 20% | 930 | 1289 | | |
| | | | | | | 30% | 597 | 743 | | |
| | | | | | | 18% | 939 | 1316 | | |
| | | | | | | 26% | 1053 | 1292 | | |
| | | | | | | 22% | 165 | 476 | | |
| | | | | | | 22% | 585 | 773 | | |
| | | | | | | 23% | 465 | 617 | | |
| | | | | | | 23% | 459 | 596 | | |
| | | | | | | 30% | 1185 | 1301 | | |
| | | | | | | 26% | 609 | 803 | | |
| | | | | | | 19% | 513 | 803 | | |
| | | | | | | 27% | 600 | 719 | | |
| | | | | | | 25% | 501 | 593 | | |
| | | | | | | 16% | 930 | 1112 | | |
| | | | | | | 37% | 804 | 851 | | |
| HTEBC74 | 887782 | 531 | HMMER | PFAM: Armadillo | PF00514 | 20.2 | 58 | 183 | | |
| | | | 1.8 | segment protein, repeats | | | | | | |
| H2LAC34 | 908478 | 532 | HMMER | PFAM: Zinc finger, C2H2 | PF00096 | 59.7 | 188 | 256 | | |
| | | | 2.1.1 | type | | | | | | |
| | | | blastx.2 | (AL031581) | emb\|CAA20891.1\| | 43% | 65 | 460 | | |
| | | | | /prediction=(method:““ge | | | | | | |
| | | | | nscan””, version:““1.0””, 1 | | | | | | |
| | | | | 1 1 method:““ppsearch””); | | | | | | |
| | | | | / | | | | | | |
| H2MBH48 | 1197893 | 80 | blastx.14 | ZINC FINGER PROTEIN | sp\|P51523\|ZN84_HU | 53% | 841 | 1134 | | |
| | | | | 84 (ZINC FINGER | MAN | 53% | 841 | 1134 | | |
| | | | | PROTEIN HPF2). | | 50% | 511 | 840 | | |
| | | | | | | 52% | 162 | 479 | | |
| | | | | | | 45% | 841 | 1173 | | |
| | | | | | | 50% | 162 | 494 | | |
| | | | | | | 53% | 841 | 1134 | | |
| | | | | | | 52% | 841 | 1134 | | |
| | | | | | | 52% | 511 | 840 | | |
| | | | | | | 46% | 162 | 497 | | |
| | | | | | | 58% | 1179 | 1475 | | |
| | | | | | | 48% | 162 | 494 | | |
| | | | | | | 46% | 841 | 1164 | | |
| | | | | | | 49% | 520 | 840 | | |
| | | | | | | 47% | 162 | 494 | | |
| | | | | | | 48% | 841 | 1134 | | |
| | | | | | | 42% | 841 | 1176 | | |
| | | | | | | 49% | 162 | 494 | | |
| | | | | | | 50% | 511 | 840 | | |
| | | | | | | 47% | 186 | 497 | | |
| | | | | | | 47% | 162 | 479 | | |
| | | | | | | 50% | 511 | 840 | | |
| | | | | | | 55% | 1179 | 1475 | | |
| | | | | | | 48% | 511 | 840 | | |
| | | | | | | 45% | 162 | 497 | | |
| | | | | | | 48% | 841 | 1134 | | |
| | | | | | | 55% | 1179 | 1475 | | |
| | | | | | | 49% | 511 | 840 | | |
| | | | | | | 46% | 841 | 1164 | | |
| | | | | | | 47% | 841 | 1134 | | |
| | | | | | | 49% | 511 | 840 | | |
| | | | | | | 42% | 841 | 1176 | | |
| | | | | | | 55% | 1179 | 1475 | | |
| | | | | | | 52% | 1179 | 1475 | | |
| | | | | | | 53% | 1179 | 1475 | | |
| | | | | | | 48% | 511 | 840 | | |
| | | | | | | 48% | 511 | 840 | | |
| | | | | | | 53% | 865 | 1113 | | |
| | | | | | | 46% | 162 | 497 | | |
| | | | | | | 52% | 1179 | 1475 | | |
| | | | | | | 55% | 1179 | 1475 | | |
| | | | | | | 53% | 1179 | 1475 | | |
| | | | | | | 53% | 1179 | 1475 | | |
| | | | | | | 52% | 1179 | 1475 | | |
| | | | | | | 44% | 153 | 497 | | |
| | | | | | | 48% | 511 | 840 | | |
| | | | | | | 45% | 162 | 479 | | |
| | | | | | | 51% | 1179 | 1475 | | |
| | | | | | | 44% | 511 | 840 | | |
| | | | | | | 51% | 1170 | 1475 | | |
| | | | | | | 51% | 841 | 1098 | | |
| | | | | | | 44% | 162 | 479 | | |
| | | | | | | 50% | 1179 | 1475 | | |
| | | | | | | 41% | 162 | 497 | | |
| | | | | | | 45% | 162 | 494 | | |
| | | | | | | 45% | 511 | 840 | | |
| | | | | | | 43% | 511 | 840 | | |
| | | | | | | 43% | 841 | 1134 | | |
| | | | | | | 44% | 514 | 840 | | |
| | | | | | | 49% | 1179 | 1475 | | |
| | | | | | | 56% | 1179 | 1445 | | |
| | | | | | | 50% | 162 | 419 | | |
| | | | | | | 40% | 853 | 1164 | | |
| | | | | | | 44% | 511 | 840 | | |
| | | | | | | 47% | 475 | 768 | | |
| | | | | | | 44% | 174 | 479 | | |
| | | | | | | 47% | 1191 | 1475 | | |
| | | | | | | 37% | 216 | 494 | | |
| | | | | | | 51% | 841 | 1026 | | |
| | | | | | | 43% | 1233 | 1475 | | |
| | | | | | | 36% | 895 | 1134 | | |
| | | | | | | 30% | 556 | 840 | | |
| | | | | | | 42% | 162 | 344 | | |
| | | | | | | 46% | 21 | 170 | | |
| | | | | | | 34% | 622 | 840 | | |
| | | | | | | 41% | 3 | 170 | | |
| | | | | | | 44% | 3 | 170 | | |
| | | | | | | 41% | 3 | 170 | | |
| | | | | | | 45% | 27 | 170 | | |
| | | | | | | 44% | 30 | 170 | | |
| | | | | | | 46% | 30 | 170 | | |
| | | | | | | 46% | 30 | 170 | | |
| | | | | | | 39% | 3 | 170 | | |
| | | | | | | 39% | 3 | 170 | | |
| | | | | | | 35% | 979 | 1149 | | |
| | | | | | | 42% | 30 | 170 | | |
| | | | | | | 35% | 3 | 170 | | |
| | | | | | | 39% | 3 | 170 | | |
| | | | | | | 45% | 30 | 161 | | |
| | | | | | | 40% | 30 | 170 | | |
| | | | | | | 30% | 51 | 170 | | |
| | | | | | | 28% | 3 | 170 | | |
| | | | | | | 29% | 688 | 840 | | |
| | | | | | | 75% | 1637 | 1672 | | |
| | | | | | | 50% | 1637 | 1702 | | |
| | | | | | | 75% | 1637 | 1672 | | |
| | | | | | | 57% | 1469 | 1510 | | |
| | | | | | | 40% | 1116 | 1175 | | |
| | | | | | | 57% | 1469 | 1510 | | |
| | | | | | | 57% | 1469 | 1510 | | |
| | | | | | | 45% | 1116 | 1175 | | |
| | | | | | | 66% | 1637 | 1672 | | |
| | | | | | | 50% | 1469 | 1510 | | |
| | | | | | | 88% | 1646 | 1672 | | |
| | | | | | | 38% | 847 | 909 | | |
| | | | | | | 66% | 1637 | 1672 | | |
| | | | | | | 50% | 1469 | 1510 | | |
| | | | | | | 66% | 1637 | 1672 | | |
| | | | | | | 45% | 1116 | 1175 | | |
| | | | | | | 77% | 1646 | 1672 | | |
| | | | | | | 36% | 1116 | 1172 | | |
| | | | | | | 50% | 1469 | 1510 | | |
| | | | | | | 58% | 1637 | 1672 | | |
| | | | | | | 20% | 66 | 152 | | |
| | | | | | | 52% | 1646 | 1696 | | |
| | | | | | | 77% | 1646 | 1672 | | |
| | | | | | | 40% | 1116 | 1175 | | |
| | | | | | | 42% | 1469 | 1510 | | |
| | | | | | | 66% | 1646 | 1672 | | |
| | | | | | | 42% | 1469 | 1510 | | |
| | | | | | | 38% | 1116 | 1169 | | |
| | | | | | | 50% | 1469 | 1510 | | |
| | | | | | | 53% | 1469 | 1507 | | |
| | | | | | | 40% | 1116 | 1175 | | |
| | | | | | | 66% | 1646 | 1672 | | |
| | | | | | | 42% | 1469 | 1510 | | |
| | | | | | | 40% | 1116 | 1175 | | |
| | | | | | | 27% | 348 | 479 | | |
| | | | | | | 42% | 1469 | 1510 | | |
| | | | | | | 40% | 1524 | 1604 | | |
| | | | | | | 40% | 1637 | 1696 | | |
| | | | | | | 36% | 1530 | 1604 | | |
| | | | | | | 50% | 1637 | 1672 | | |
| H2MBH48 | 908926 | 533 | HMMER | PFAM: Zinc finger, C2H2 | PF00096 | 59.4 | 268 | 336 | | |
| | | | 2.1.1 | type | | | | | | |
| | | | blastx.2 | (AF192913) zinc finger | gb\|AAF07950.1\|AF1 | 47% | 55 | 498 | | |
| | | | | proteinZNFl8 [Homo | 92913_1 | 50% | 55 | 453 | | |
| | | | | sapiens] | | 44% | 34 | 498 | | |
| | | | | | | 44% | 58 | 498 | | |
| | | | | | | 47% | 55 | 462 | | |
| | | | | | | 47% | 58 | 453 | | |
| | | | | | | 43% | 58 | 501 | | |
| | | | | | | 50% | 103 | 453 | | |
| | | | | | | 47% | 58 | 444 | | |
| | | | | | | 41% | 133 | 498 | | |
| | | | | | | 45% | 58 | 363 | | |
| | | | | | | 30% | 43 | 498 | | |
| HADDT27 | 908924 | 81 | HMMER | PFAM: Zinc finger, C2H2 | PF00096 | 76.6 | 112 | 180 | | |
| | | | 2.1.1 | type | | | | | | |
| | | | blastx.2 | (AB021644) gonadotropin | dbj\|BAA86990.1\| | 62% | 1 | 363 | | |
| | | | | inducible transcription | | 63% | 1 | 363 | | |
| | | | | repressor-4 [Homo | | 58% | 1 | 408 | | |
| | | | | sapiens] | | 60% | 1 | 363 | | |
| | | | | | | 60% | 1 | 360 | | |
| | | | | | | 57% | 1 | 363 | | |
| | | | | | | 60% | 1 | 363 | | |
| | | | | | | 57% | 1 | 363 | | |
| | | | | | | 59% | 1 | 363 | | |
| | | | | | | 58% | 1 | 363 | | |
| | | | | | | 59% | 7 | 363 | | |
| | | | | | | 56% | 1 | 363 | | |
| | | | | | | 56% | 1 | 363 | | |
| | | | | | | 54% | 1 | 363 | | |
| | | | | | | 53% | 4 | 363 | | |
| | | | | | | 42% | 4 | 363 | | |
| | | | | | | 51% | 374 | 484 | | |
| | | | | | | 45% | 374 | 499 | | |
| | | | | | | 48% | 365 | 475 | | |
| | | | | | | 39% | 374 | 526 | | |
| | | | | | | 43% | 356 | 493 | | |
| | | | | | | 42% | 374 | 493 | | |
| | | | | | | 44% | 374 | 475 | | |
| | | | | | | 39% | 374 | 517 | | |
| | | | | | | 44% | 374 | 481 | | |
| | | | | | | 44% | 374 | 475 | | |
| | | | | | | 41% | 374 | 475 | | |
| | | | | | | 42% | 377 | 475 | | |
| | | | | | | 38% | 374 | 499 | | |
| | | | | | | 33% | 374 | 490 | | |
| | | | | | | 43% | 374 | 442 | | |
| HADEU45 | 909260 | 534 | HMMER | PFAM: Zinc finger, C2H2 | PF00096 | 67.7 | 70 | 138 | | |
| | | | 2.1.1 | type | | | | | | |
| | | | blastx.2 | zinc finger protein [Homo | emb\|CAA55533.1\| | 64% | 4 | 264 | | |
| | | | | sapiens] | | 63% | 4 | 261 | | |
| | | | | | | 60% | 4 | 264 | | |
| | | | | | | 59% | 4 | 264 | | |
| | | | | | | 62% | 4 | 264 | | |
| | | | | | | 61% | 7 | 264 | | |
| | | | | | | 59% | 4 | 264 | | |
| | | | | | | 62% | 4 | 264 | | |
| | | | | | | 62% | 4 | 264 | | |
| | | | | | | 60% | 4 | 264 | | |
| | | | | | | 57% | 4 | 264 | | |
| | | | | | | 57% | 4 | 264 | | |
| | | | | | | 64% | 40 | 264 | | |
| | | | | | | 53% | 4 | 234 | | |
| | | | | | | 54% | 258 | 461 | | |
| | | | | | | 52% | 258 | 461 | | |
| | | | | | | 54% | 258 | 461 | | |
| | | | | | | 56% | 264 | 461 | | |
| | | | | | | 52% | 258 | 461 | | |
| | | | | | | 61% | 291 | 461 | | |
| | | | | | | 51% | 258 | 461 | | |
| | | | | | | 53% | 264 | 461 | | |
| | | | | | | 50% | 258 | 461 | | |
| | | | | | | 50% | 258 | 461 | | |
| | | | | | | 50% | 264 | 461 | | |
| | | | | | | 48% | 258 | 461 | | |
| | | | | | | 48% | 258 | 461 | | |
| | | | | | | 50% | 276 | 461 | | |
| | | | | | | 42% | 118 | 345 | | |
| | | | | | | 39% | 258 | 410 | | |
| HAGGF27 | 682710 | 535 | HMMER | PFAM: Zinc finger, C2H2 | PF00096 | 7.72 | 375 | 419 | | |
| | | | 1.8 | type | | | | | | |
| HAMGP61 | 1175397 | 84 | blastx.14 | PRDII-BF1 protein (AA | gi\|38018\|emb\|CAA35 | 44% | 899 | 952 | | |
| | | | | 1-2717) [Homo sapiens] | 798.1\| | | | | | |
| HAMGP61 | 925843 | 536 | HMMER | PFAM: Zinc finger, C2H2 | PF00096 | 20.53 | 794 | 859 | | |
| | | | 1.8 | type | | | | | | |
| HAMHT22 | 968753 | 85 | HMMER | PFAM: Zinc finger, C2H2 | PF00096 | 7.8 | 591 | 659 | | |
| | | | 1.8 | type | | | | | | |
| | | | blastx.2 | (AF083340) double- | gb\|AAD52018.1\|AF0 | 89% | 34 | 444 | | |
| | | | | stranded RNA-binding | 83340_1 | 83% | 369 | 743 | | |
| | | | | zinc finger protein JAZ | | | | | | |
| | | | | [Homo sapiens] | | | | | | |
| HATEE95 | 908958 | 537 | HMMER | PFAM: Zinc finger, C2H2 | PF00096 | 70.2 | 237 | 305 | | |
| | | | 2.1.1 | type | | | | | | |
| | | | blastx.2 | zinc finger protein [Homo | gb\|AAC99849.1\| | 98% | 3 | 257 | | |
| | | | | sapiens] | | | | | | |
| HBGMT12 | 908935 | 538 | HMMER | PFAM: Zinc finger, C2H2 | PF00096 | 32.5 | 415 | 483 | | |
| | | | 2.1.1 | type | | | | | | |
| | | | blastx.2 | (AL079276) hypothetical | emb\|CAB45151.1\| | 100% | 283 | 498 | | |
| | | | | protein, similar to | | 32% | 313 | 495 | | |
| | | | | (AF134804) 1 sapiens] | | 73% | 231 | 290 | | |
| | | | | | | 100% | 498 | 530 | | |
| HBGPJ37 | 1133633 | 88 | blastx.14 | ZNF165 [Homo sapiens] | gi\|683471\|emb\|CAA5 | 46% | 58 | 219 | | |
| | | | | | 9268.1\| | 44% | 55 | 237 | | |
| | | | | | | 46% | 58 | 219 | | |
| | | | | | | 44% | 58 | 219 | | |
| | | | | | | 28% | 331 | 501 | | |
| | | | | | | 34% | 391 | 495 | | |
| | | | | | | 41% | 103 | 219 | | |
| | | | | | | 33% | 391 | 489 | | |
| | | | | | | 63% | 331 | 387 | | |
| | | | | | | 55% | 328 | 387 | | |
| | | | | | | 52% | 328 | 384 | | |
| | | | | | | 50% | 328 | 387 | | |
| | | | | | | 40% | 328 | 387 | | |
| | | | | | | 38% | 142 | 219 | | |
| | | | | | | 50% | 7 | 36 | | |
| | | | | | | 50% | 9 | 50 | | |
| HBGPJ37 | 908692 | 539 | HMMER | PFAM: Zinc finger, C2H2 | PF00096 | 74.5 | 151 | 219 | | |
| | | | 2.1.1 | type | | | | | | |
| | | | blastx.2 | (AL022393) p373c6.l | emb\|CAA18532.1\| | 38% | 1 | 504 | | |
| | | | | [Homo sapiens] | | 33% | 67 | 489 | | |
| | | | | | | 29% | 58 | 510 | | |
| | | | | | | 36% | 58 | 393 | | |
| HBIOS05 | 930776 | 540 | HMMER | PFAM: Zinc finger, C2H2 | PF00096 | 10.54 | 168 | 230 | | |
| | | | 1.8 | type | | | | | | |
| HBJCD80 | 766265 | 541 | HMMER | PFAM: Zinc finger, C2H2 | PF00096 | 15.77 | 383 | 445 | | |
| | | | 1.8 | type | | | | | | |
| HBJLR31 | 900883 | 91 | HMMER | PFAM: Zinc finger, C2H2 | PF00096 | 90 | 798 | 866 | | |
| | | | 2.1.1 | type | | | | | | |
| | | | blastx.2 | (AF185576) POZ/zinc | gb\|AAF03152.1\|AF1 | 68% | 606 | 953 | | |
| | | | | finger transcription factor | 85576_1 | 33% | 618 | 893 | | |
| | | | | ODA-8 [Mus musculus] | | 36% | 66 | 185 | | |
| HBMTY04 | 1161434 | 92 | blastx.14 | (AK00050) unnamed | gi\|701992\|dbj\|BAA9 | 79% | 188 | 664 | | |
| | | | | protein product [Homo | 0908.1\| | 88% | 6 | 218 | | |
| | | | | sapiens] | | 45% | 473 | 664 | | |
| HBMTY04 | 908630 | 542 | HMMER | PFAM: Zinc finger, C2H2 | PF00096 | 23.67 | 474 | 539 | | |
| | | | 1.8 | type | | | | | | |
| | | | blastx.2 | (AK000050) unnamed | dbj\|BAA90908.1\| | 76% | 6 | 602 | | |
| | | | | protein product [Homo | | 43% | 471 | 593 | | |
| | | | | sapiens] | | 100% | 596 | 643 | | |
| | | | | | | 62% | 596 | 643 | | |
| HBMXV17 | 799661 | 543 | HMMER | PFAM: Zinc finger, C2H2 | PF00096 | 7.17 | 213 | 281 | | |
| | | | 1.8 | type | | | | | | |
| HBNMF62 | 909051 | 544 | HMMER | PFAM: Zinc finger, C2H2 | PF00096 | 9.31 | 1094 | 1132 | | |
| | | | 1.8 | type | | | | | | |
| | | | blastx.2 | (AK000538) unnamed | dbj\|BAA91239.1\| | 86% | 338 | 628 | | |
| | | | | protein product [Homo | | 74% | 785 | 1135 | | |
| | | | | sapiens] | | 98% | 1135 | 1293 | | |
| | | | | | | 29% | 1123 | 1284 | | |
| | | | | | | 30% | 1144 | 1281 | | |
| | | | | | | 30% | 1144 | 1272 | | |
| HBWAG76 | 767711 | 95 | HMMER | PFAM: Zinc finger, C2H2 | PF00096 | 39.2 | 291 | 220 | | |
| | | | 2.1.1 | type | | | | | | |
| HBWBG94 | 908988 | 546 | HMMER | PFAM: Zinc finger, C2H2 | PF00096 | 74.3 | 28 | 96 | | |
| | | | 2.1.1 | type | | | | | | |
| | | | blastx.2 | zinc finger protein 95 | gb\|AAD00103.1\| | 79% | 1 | 363 | | |
| | | | | [Mus musculus] | | 46% | 19 | 354 | | |
| | | | | | | 41% | 19 | 354 | | |
| | | | | | | 43% | 1 | 348 | | |
| | | | | | | 36% | 4 | 363 | | |
| | | | | | | 38% | 1 | 294 | | |
| | | | | | | 38% | 82 | 363 | | |
| | | | | | | 31% | 1 | 363 | | |
| | | | | | | 39% | 103 | 363 | | |
| | | | | | | 31% | 40 | 363 | | |
| | | | | | | 31% | 190 | 549 | | |
| | | | | | | 26% | 4 | 363 | | |
| HCABL26 | 921130 | 547 | HMMER | PFAM: Zinc finger, C2H2 | PF00096 | 34.5 | 624 | 701 | | |
| | | | 2.1.1 | type | | | | | | |
| | | | blastx.2 | Sfp1p [Saccharomyces | gb\|AAB82343.1\| | 59% | 600 | 710 | | |
| | | | | cerevisiae] | | 32% | 96 | 257 | | |
| | | | | | | 52% | 723 | 782 | | |
| HCBAB76 | 1153876 | 98 | blastx.14 | finger protein (clone | pir\|S06551\|S06551 | 47% | 584 | 652 | | |
| | | | | X1cOF15) - African | | 42% | 476 | 574 | | |
| | | | | clawed frog (fragment) | | 39% | 476 | 559 | | |
| | | | | | | 32% | 557 | 658 | | |
| | | | | | | 43% | 584 | 652 | | |
| | | | | | | 43% | 368 | 436 | | |
| | | | | | | 34% | 488 | 574 | | |
| | | | | | | 34% | 368 | 436 | | |
| | | | | | | 34% | 368 | 436 | | |
| | | | | | | 31% | 263 | 319 | | |
| HCBAB76 | 926750 | 548 | HMMER | PFAM: Zinc finger, C2H2 | PF00096 | 11.79 | 267 | 332 | | |
| | | | 1.8 | type | | | | | | |
| HCE1Q39 | 694820 | 549 | HMMER | PFAM: Zinc finger, C2H2 | PF00096 | 23.93 | 89 | 151 | | |
| | | | 1.8 | type | | | | | | |
| | | | blastx.2 | (AB015427) zinc finger | dbj\|BAA90526.1\| | 46% | 2 | 322 | | |
| | | | | protein 219 [Homo | | 94% | 16 | 66 | | |
| | | | | sapiens] | | 41% | 89 | 160 | | |
| | | | | | | 41% | 278 | 328 | | |
| HCE3V11 | 1151015 | 100 | blastx.14 | (AB021644) gonadotropin | gi\|6467206\|dbj\|BAA8 | 54% | 2008 | 1256 | | |
| | | | | inducible transcription | 6990.1\| | 52% | 2008 | 1256 | | |
| | | | | repressor-4 [Homo | | 51% | 2008 | 1256 | | |
| | | | | sapiens] | | 51% | 2008 | 1256 | | |
| | | | | | | 53% | 1996 | 1265 | | |
| | | | | | | 52% | 2008 | 1256 | | |
| | | | | | | 54% | 1948 | 1256 | | |
| | | | | | | 50% | 2008 | 1256 | | |
| | | | | | | 55% | 2008 | 1349 | | |
| | | | | | | 54% | 1867 | 1256 | | |
| | | | | | | 55% | 1792 | 1256 | | |
| | | | | | | 50% | 1858 | 1616 | | |
| | | | | | | 54% | 1465 | 1256 | | |
| | | | | | | 51% | 1768 | 1541 | | |
| | | | | | | 46% | 1690 | 1457 | | |
| | | | | | | 36% | 1522 | 1238 | | |
| | | | | | | 46% | 1927 | 1700 | | |
| | | | | | | 36% | 1603 | 1364 | | |
| | | | | | | 41% | 1999 | 1784 | | |
| | | | | | | 39% | 1840 | 1658 | | |
| | | | | | | 36% | 1753 | 1574 | | |
| | | | | | | 39% | 1924 | 1742 | | |
| | | | | | | 38% | 1501 | 1322 | | |
| | | | | | | 36% | 1669 | 1490 | | |
| | | | | | | 40% | 1417 | 1262 | | |
| | | | | | | 37% | 2005 | 1844 | | |
| | | | | | | 29% | 1585 | 1415 | | |
| | | | | | | 48% | 801 | 703 | | |
| | | | | | | 39% | 801 | 679 | | |
| | | | | | | 41% | 801 | 679 | | |
| | | | | | | 45% | 801 | 703 | | |
| | | | | | | 36% | 801 | 679 | | |
| | | | | | | 45% | 801 | 697 | | |
| | | | | | | 45% | 801 | 703 | | |
| | | | | | | 36% | 801 | 679 | | |
| | | | | | | 53% | 1061 | 978 | | |
| | | | | | | 36% | 801 | 679 | | |
| | | | | | | 39% | 801 | 679 | | |
| | | | | | | 53% | 1055 | 978 | | |
| | | | | | | 31% | 2008 | 1877 | | |
| | | | | | | 36% | 801 | 703 | | |
| | | | | | | 46% | 1055 | 978 | | |
| | | | | | | 37% | 1112 | 978 | | |
| | | | | | | 46% | 1055 | 978 | | |
| | | | | | | 50% | 1055 | 978 | | |
| | | | | | | 37% | 1055 | 951 | | |
| | | | | | | 39% | 801 | 703 | | |
| | | | | | | 31% | 801 | 679 | | |
| | | | | | | 50% | 1055 | 978 | | |
| | | | | | | 37% | 801 | 691 | | |
| | | | | | | 46% | 1055 | 978 | | |
| | | | | | | 46% | 1055 | 978 | | |
| | | | | | | 40% | 1052 | 978 | | |
| | | | | | | 33% | 801 | 703 | | |
| | | | | | | 42% | 1055 | 978 | | |
| | | | | | | 40% | 1052 | 978 | | |
| | | | | | | 42% | 1055 | 978 | | |
| | | | | | | 47% | 765 | 703 | | |
| | | | | | | 28% | 834 | 688 | | |
| | | | | | | 72% | 1055 | 1023 | | |
| | | | | | | 72% | 1055 | 1023 | | |
| | | | | | | 80% | 1052 | 1023 | | |
| | | | | | | 69% | 1258 | 1220 | | |
| | | | | | | 66% | 1258 | 1214 | | |
| | | | | | | 53% | 543 | 499 | | |
| | | | | | | 32% | 801 | 727 | | |
| | | | | | | 40% | 543 | 499 | | |
| | | | | | | 60% | 1258 | 1214 | | |
| | | | | | | 72% | 1186 | 1154 | | |
| | | | | | | 50% | 1186 | 1139 | | |
| | | | | | | 40% | 543 | 499 | | |
| | | | | | | 37% | 546 | 499 | | |
| | | | | | | 46% | 537 | 499 | | |
| | | | | | | 54% | 1258 | 1226 | | |
| | | | | | | 58% | 1157 | 1122 | | |
| | | | | | | 46% | 537 | 499 | | |
| | | | | | | 54% | 1258 | 1226 | | |
| | | | | | | 70% | 1186 | 1157 | | |
| | | | | | | 54% | 1258 | 1226 | | |
| | | | | | | 75% | 1258 | 1235 | | |
| | | | | | | 42% | 1166 | 1125 | | |
| HCE3V01 | 908905 | 550 | HMMER | PFAM: Zinc finger, C2H2 | PF00096 | 155.7 | 238 | 306 | | |
| | | | 2.1.1 | type | | | | | | |
| | | | blastx.2 | zinc finger protein | gb\|AAC50254.1\| | 56% | 205 | 834 | | |
| | | | | ZNE135 [Homo sapiens] | | 54% | 205 | 864 | | |
| | | | | | | 55% | 205 | 852 | | |
| | | | | | | 54% | 205 | 852 | | |
| | | | | | | 52% | 205 | 864 | | |
| | | | | | | 52% | 205 | 855 | | |
| | | | | | | 55% | 205 | 789 | | |
| | | | | | | 51% | 205 | 873 | | |
| | | | | | | 49% | 205 | 864 | | |
| | | | | | | 51% | 229 | 855 | | |
| | | | | | | 54% | 205 | 729 | | |
| | | | | | | 54% | 205 | 648 | | |
| | | | | | | 52% | 9 | 179 | | |
| | | | | | | 47% | 9 | 185 | | |
| | | | | | | 52% | 9 | 179 | | |
| | | | | | | 50% | 9 | 179 | | |
| | | | | | | 49% | 9 | 179 | | |
| | | | | | | 57% | 33 | 179 | | |
| | | | | | | 47% | 9 | 179 | | |
| | | | | | | 47% | 9 | 179 | | |
| | | | | | | 47% | 9 | 179 | | |
| | | | | | | 53% | 33 | 179 | | |
| | | | | | | 45% | 9 | 179 | | |
| | | | | | | 45% | 9 | 179 | | |
| | | | | | | 60% | 66 | 164 | | |
| | | | | | | 42% | 849 | 1025 | | |
| | | | | | | 40% | 849 | 1025 | | |
| | | | | | | 36% | 846 | 1025 | | |
| | | | | | | 36% | 846 | 1025 | | |
| | | | | | | 36% | 846 | 1025 | | |
| | | | | | | 33% | 1172 | 1519 | | |
| | | | | | | 34% | 849 | 1025 | | |
| | | | | | | 39% | 849 | 1025 | | |
| | | | | | | 37% | 849 | 1025 | | |
| | | | | | | 35% | 846 | 1025 | | |
| | | | | | | 30% | 846 | 1037 | | |
| | | | | | | 32% | 1181 | 1549 | | |
| | | | | | | 27% | 1202 | 1549 | | |
| | | | | | | 29% | 1202 | 1519 | | |
| | | | | | | 41% | 1199 | 1327 | | |
| | | | | | | 32% | 1202 | 1351 | | |
| | | | | | | 32% | 1202 | 1519 | | |
| | | | | | | 31% | 1202 | 1501 | | |
| | | | | | | 28% | 1202 | 1486 | | |
| | | | | | | 45% | 113 | 205 | | |
| | | | | | | 48% | 92 | 217 | | |
| | | | | | | 69% | 167 | 205 | | |
| | | | | | | 63% | 147 | 179 | | |
| | | | | | | 47% | 164 | 217 | | |
| HCEDM42 | 1153877 | 101 | blastx.14 | (AF151023) HSPC189 | gi\|7106768\|gb\|AAF36 | 80% | 176 | 628 | | |
| | | | | [Homo sapiens] | 109.1\|AF151023_1 | 100% | 636 | 839 | | |
| HCEDM42 | 908467 | 551 | HMMER | PFAM: Zinc finger, C2H2 | PF00096 | 85.9 | 518 | 586 | | |
| | | | 2.1.1 | type | | | | | | |
| | | | blastx.2 | (AF151023) HSPC189 | gb\|AAF36109.1\|AF1 | 80% | 176 | 628 | | |
| | | | | [Homo sapiens] | 51023_1 | 100% | 636 | 839 | | |
| HCEJG43 | 908879 | 102 | HMMER | PFAM: Zinc finger, C2H2 | PF00096 | 41.6 | 111 | 179 | | |
| | | | 2.1.1 | type | | | | | | |
| | | | blastx.2 | similar to Human zinc | dbj\|BAA13242.1\| | 92% | 3 | 455 | | |
| | | | | finger protein(ZNF142) | | 33% | 30 | 452 | | |
| | | | | [Homo sapiens] | | 30% | 24 | 449 | | |
| | | | | | | 30% | 18 | 434 | | |
| | | | | | | 34% | 105 | 458 | | |
| | | | | | | 27% | 27 | 425 | | |
| | | | | | | 30% | 24 | 440 | | |
| | | | | | | 30% | 30 | 425 | | |
| | | | | | | 25% | 27 | 353 | | |
| | | | | | | 23% | 15 | 431 | | |
| | | | | | | 24% | 30 | 386 | | |
| | | | | | | 26% | 99 | 425 | | |
| | | | | | | 36% | 369 | 443 | | |
| | | | | | | 42% | 24 | 80 | | |
| HCELA90 | 1124675 | 103 | blastx.14 | p120E4F transcription | gi\|4185580\|gb\|AAD0 | 85% | 1348 | 2298 | | |
| | | | | factor [Homo sapiens] | 9139.1\| | 74% | 59 | 931 | | |
| | | | | | | 78% | 1139 | 1345 | | |
| | | | | | | 92% | 931 | 1092 | | |
| | | | | | | 37% | 1348 | 1743 | | |
| | | | | | | 47% | 524 | 769 | | |
| | | | | | | 47% | 1501 | 1746 | | |
| | | | | | | 37% | 1306 | 1659 | | |
| | | | | | | 34% | 512 | 763 | | |
| | | | | | | 34% | 1405 | 1656 | | |
| | | | | | | 27% | 1393 | 1734 | | |
| | | | | | | 34% | 524 | 757 | | |
| | | | | | | 34% | 1348 | 1566 | | |
| | | | | | | 30% | 530 | 748 | | |
| | | | | | | 42% | 602 | 721 | | |
| | | | | | | 38% | 1244 | 1345 | | |
| | | | | | | 42% | 1244 | 1342 | | |
| | | | | | | 33% | 1244 | 1342 | | |
| | | | | | | 38% | 1241 | 1342 | | |
| | | | | | | 33% | 1244 | 1342 | | |
| | | | | | | 27% | 1342 | 1473 | | |
| | | | | | | 34% | 1256 | 1342 | | |
| | | | | | | 60% | 2136 | 2165 | | |
| HCELA90 | 951515 | 552 | HMMER | PFAM: Zinc finger, C2H2 | PF00096 | 71.2 | 1004 | 936 | | |
| | | | 2.1.1 | type | | | | | | |
| | | | blastx.2 | p120E4F transcription | gb\|AAD09139.1\| | 85% | 1157 | 207 | | |
| | | | | factor [Homo sapiens] | | 72% | 2212 | 1574 | | |
| | | | | | | 92% | 1574 | 1413 | | |
| | | | | | | 37% | 1157 | 762 | | |
| | | | | | | 93% | 2445 | 2299 | | |
| | | | | | | 47% | 1999 | 1736 | | |
| | | | | | | 47% | 1025 | 759 | | |
| | | | | | | 37% | 1199 | 846 | | |
| | | | | | | 34% | 1993 | 1742 | | |
| | | | | | | 34% | 1100 | 849 | | |
| | | | | | | 27% | 1112 | 771 | | |
| | | | | | | 34% | 1981 | 1748 | | |
| | | | | | | 34% | 1157 | 939 | | |
| | | | | | | 31% | 1975 | 1757 | | |
| | | | | | | 42% | 1903 | 1784 | | |
| | | | | | | 38% | 1261 | 1160 | | |
| | | | | | | 42% | 1261 | 1163 | | |
| | | | | | | 33% | 1261 | 1163 | | |
| | | | | | | 38% | 1264 | 1163 | | |
| | | | | | | 33% | 1261 | 1163 | | |
| | | | | | | 29% | 1163 | 1032 | | |
| | | | | | | 34% | 1249 | 1163 | | |
| HCHBK37 | 1223379 | 104 | blastx.14 | CG16899 PROTEIN. | sp\|Q9VH87\|Q9VH87 | 73% | 581 | 817 | | |
| | | | | | | 69% | 59 | 274 | | |
| HCHBK37 | 706302 | 553 | HMMER | PEAM: Zinc finger, C2H2 | PF00096 | 16.25 | 83 | 154 | | |
| | | | 1.8 | type | | | | | | |
| | | | blastx.2 | (AJ005891) JM2 [Homo | emb\|CAA06748.1\| | 44% | 2 | 268 | | |
| | | | | sapiens] | | | | | | |
| HCNBB29 | 908655 | 554 | HMMER | PFAM: Zinc finger, C2H2 | PF00096 | 40.7 | 437 | 505 | | |
| | | | 2.1.1 | type | | | | | | |
| | | | blastx.2 | (AK000424) unnamed | dbj\|BAA91155.1\| | 40% | 823 | 1050 | | |
| | | | | protein product [Homo | | 39% | 823 | 1065 | | |
| | | | | sapiens] | | 42% | 823 | 1056 | | |
| | | | | | | 46% | 823 | 969 | | |
| | | | | | | 37% | 823 | 1056 | | |
| | | | | | | 50% | 359 | 523 | | |
| | | | | | | 34% | 359 | 619 | | |
| | | | | | | 40% | 359 | 505 | | |
| | | | | | | 29% | 365 | 505 | | |
| | | | | | | 27% | 4 | 222 | | |
| | | | | | | 42% | 127 | 189 | | |
| | | | | | | 31% | 127 | 222 | | |
| HCRBE37 | 909197 | 555 | HMMER | PFAM: Zinc finger, C2H2 | PF00096 | 42.3 | 59 | 127 | | |
| | | | 2.1.1 | type | | | | | | |
| | | | blastx.2 | (AL031393) dJ733D15.1 | emb\|CAA20564.1\| | 69% | 2 | 157 | | |
| | | | | (Zinc-finger protein) | | 68% | 2 | 154 | | |
| | | | | [Homo sapiens] | | 63% | 2 | 157 | | |
| | | | | | | 68% | 2 | 151 | | |
| | | | | | | 65% | 2 | 157 | | |
| | | | | | | 71% | 2 | 139 | | |
| | | | | | | 63% | 2 | 157 | | |
| | | | | | | 59% | 2 | 157 | | |
| | | | | | | 66% | 35 | 151 | | |
| | | | | | | 57% | 8 | 154 | | |
| | | | | | | 54% | 2 | 145 | | |
| HCWEK76 | 964496 | 107 | HMMER | PFAM: Zinc finger, C2H2 | PF00096 | 40.4 | 865 | 933 | | |
| | | | 2.1.1 | type | | | | | | |
| | | | blastx.2 | zinc finger protein mfg1 | gb\|AAA39531.1\| | 35% | 625 | 972 | | |
| | | | | mRNA (put.); putative | | | | | | |
| | | | | [Mus musculus] | | | | | | |
| HDAAO88 | 1165232 | 108 | blastx.14 | hypothetical protein | gi\|2440187\|emb\|CAB | 72% | 971 | 1024 | | |
| | | | [Schizosaccharomyces | 11605.1\| | 60% | 1175 | 1243 | | | |
| | | | pombe] | | 40% | 1076 | 1165 | | | |
| | | | | | | 66% | 1355 | 1399 | | |
| HDAAO88 | 529461 | 556 | HMMER | PFAM: Zinc finger, C2H2 | PF00096 | 12.85 | 373 | 438 | | |
| | | | 1.8 | type | | | | | | |
| HDAAS58 | 908616 | 557 | HMMER | PFAM: Zinc finger, C2H2 | PF00096 | 84 | 1499 | 1570 | | |
| | | | 2.1.1 | type | | | | | | |
| | | | blastx.2 | (AF119256) PATZ | gb\|AAF32518.1\|AF1 | 89% | 569 | 1861 | | |
| | | | | [Homo sapiens] | 19256_1 | 100% | 264 | 431 | | |
| | | | | | | 72% | 436 | 510 | | |
| HDAAT58 | 1096244 | 110 | blastx.14 | transcription regulator | gi\|529400\|gb\|AAA61 | 46% | 203 | 364 | | |
| | | | | [Mus musculus] | 956.1\| | 40% | 203 | 352 | | |
| | | | | | | 44% | 209 | 364 | | |
| | | | | | | 30% | 86 | 223 | | |
| | | | | | | 34% | 74 | 178 | | |
| HDAAT58 | 908999 | 558 | HMMER | PFAM: Zinc finger, C2H2 | PF00096 | 53.5 | 296 | 364 | | |
| | | | 2.1.1 | type | | | | | | |
| | | | blastx.2 | transcription regulator | gb\|AAA61956.1\| | 46% | 203 | 364 | | |
| | | | | [Mus musculus] | | 40% | 203 | 352 | | |
| | | | | | | 44% | 209 | 364 | | |
| | | | | | | 43% | 86 | 223 | | |
| HDLAE04 | 908931 | 111 | HMMER | PFAM:KRAB box | PF01352 | 130.7 | 258 | 446 | | |
| | | | 2.1.1 | | | | | | | |
| | | | blastx.2 | DNA binding protein | gb\|AAA79359.1\| | 41% | 237 | 1211 | | |
| | | | | [Homo sapiens] | | 53% | 741 | 1211 | | |
| | | | | | | 54% | 738 | 1253 | | |
| | | | | | | 38% | 402 | 1223 | | |
| | | | | | | 52% | 741 | 1232 | | |
| | | | | | | 46% | 633 | 1211 | | |
| | | | | | | 44% | 633 | 1211 | | |
| | | | | | | 53% | 783 | 1223 | | |
| | | | | | | 51% | 675 | 1142 | | |
| | | | | | | 50% | 780 | 1223 | | |
| | | | | | | 47% | 738 | 1211 | | |
| | | | | | | 55% | 741 | 1100 | | |
| | | | | | | 64% | 1205 | 1255 | | |
| | | | | | | 58% | 1205 | 1255 | | |
| | | | | | | 58% | 1205 | 1255 | | |
| | | | | | | 64% | 1205 | 1255 | | |
| | | | | | | 58% | 1205 | 1255 | | |
| | | | | | | 58% | 1205 | 1255 | | |
| | | | | | | 58% | 1205 | 1255 | | |
| | | | | | | 52% | 1205 | 1255 | | |
| | | | | | | 52% | 1205 | 1255 | | |
| | | | | | | 52% | 1205 | 1255 | | |
| | | | | | | 52% | 1205 | 1255 | | |
| | | | | | | 52% | 1205 | 1255 | | |
| | | | | | | 52% | 1205 | 1255 | | |
| | | | | | | 52% | 1205 | 1255 | | |
| | | | | | | 47% | 1205 | 1255 | | |
| | | | | | | 32% | 1162 | 1254 | | |
| HDPHG78 | 1143020 | 112 | blastx.14 | KRAB zinc finger protein; | gi\|1049301\|gb\|AAB0 | 53% | 833 | 1423 | | |
| | | | | Method: conceptual | 9749.1\| | 46% | 743 | 1351 | | |
| | | | | translation supplied by | | 55% | 995 | 1423 | | |
| | | | | author [Homo sapiens] | | 46% | 743 | 1276 | | |
| | | | | | | 41% | 740 | 1183 | | |
| | | | | | | 51% | 1160 | 1423 | | |
| | | | | | | 67% | 428 | 592 | | |
| | | | | | | 48% | 629 | 739 | | |
| | | | | | | 27% | 731 | 940 | | |
| | | | | | | 66% | 1423 | 1449 | | |
| | | | | | | 55% | 1423 | 1449 | | |
| | | | | | | 55% | 1423 | 1449 | | |
| | | | | | | 55% | 1423 | 1449 | | |
| | | | | | | 55% | 1423 | 1449 | | |
| | | | | | | 55% | 1423 | 1449 | | |
| HDPHG78 | 957957 | 559 | HMMER | PFAM: Zinc finger, C2H2 | PF00096 | 131.8 | 1016 | 1084 | | |
| | | | 2.1.1 | type | | | | | | |
| | | | blastx.2 | kruppel-related zinc finger | gb\|AAC51180.11 | 47% | 752 | 1420 | | |
| | | | | protein [Homo sapiens] | | 44% | 713 | 1432 | | |
| | | | | | | 44% | 722 | 1432 | | |
| | | | | | | 42% | 737 | 1420 | | |
| | | | | | | 48% | 830 | 1420 | | |
| | | | | | | 42% | 728 | 1432 | | |
| | | | | | | 42% | 722 | 1432 | | |
| | | | | | | 44% | 785 | 1432 | | |
| | | | | | | 44% | 752 | 1432 | | |
| | | | | | | 43% | 755 | 1432 | | |
| | | | | | | 39% | 728 | 1432 | | |
| | | | | | | 40% | 737 | 1432 | | |
| | | | | | | 45% | 893 | 1432 | | |
| | | | | | | 41% | 737 | 1342 | | |
| | | | | | | 47% | 962 | 1432 | | |
| | | | | | | 44% | 431 | 742 | | |
| | | | | | | 29% | 1336 | 1446 | | |
| | | | | | | 33% | 735 | 851 | | |
| | | | | | | 50% | 1411 | 1446 | | |
| | | | | | | 32% | 1336 | 1446 | | |
| HDPJB85 | 1096339 | 113 | blastx.14 | (AF017806) Zn-15 | gi\|4102929Igb\|AAD0 | 63% | 369 | 1328 | | |
| | | | | transcription factor [Mus | 1625.1\| | 71% | 2122 | 2892 | | |
| | | | | musculus] | | 67% | 1606 | 2139 | | |
| | | | | | | 90% | 1330 | 1614 | | |
| | | | | | | 72% | 3 | 212 | | |
| | | | | | | 69% | 204 | 371 | | |
| | | | | | | 40% | 423 | 527 | | |
| | | | | | | 23% | 1492 | 1656 | | |
| | | | | | | 33% | 564 | 662 | | |
| | | | | | | 39% | 1065 | 1133 | | |
| | | | | | | 39% | 1882 | 1950 | | |
| | | | | | | 38% | 1492 | 1554 | | |
| | | | | | | 38% | 1882 | 1944 | | |
| | | | | | | 30% | 564 | 641 | | |
| | | | | | | 33% | 1879 | 1950 | | |
| | | | | | | 27% | 1333 | 1440 | | |
| | | | | | | 23% | 1050 | 1163 | | |
| | | | | | | 33% | 1492 | 1554 | | |
| | | | | | | 26% | 1239 | 1316 | | |
| | | | | | | 26% | 1492 | 1569 | | |
| | | | | | | 28% | 1233 | 1316 | | |
| | | | | | | 36% | 1378 | 1434 | | |
| | | | | | | 36% | 1882 | 1956 | | |
| | | | | | | 34% | 1059 | 1127 | | |
| | | | | | | 37% | 1230 | 1301 | | |
| | | | | | | 33% | 1882 | 1944 | | |
| | | | | | | 21% | 2062 | 2175 | | |
| | | | | | | 21% | 1236 | 1304 | | |
| | | | | | | 21% | 1879 | 1947 | | |
| | | | | | | 33% | 1065 | 1127 | | |
| | | | | | | 29% | 1378 | 1479 | | |
| | | | | | | 33% | 564 | 626 | | |
| | | | | | | 31% | 1873 | 1968 | | |
| | | | | | | 47% | 564 | 626 | | |
| | | | | | | 30% | 429 | 506 | | |
| | | | | | | 33% | 1492 | 1554 | | |
| | | | | | | 44% | 1447 | 1500 | | |
| | | | | | | 28% | 2074 | 2178 | | |
| | | | | | | 22% | 15 | 134 | | |
| | | | | | | 33% | 564 | 626 | | |
| | | | | | | 33% | 1492 | 1554 | | |
| | | | | | | 26% | 1882 | 1971 | | |
| | | | | | | 36% | 312 | 377 | | |
| | | | | | | 26% | 429 | 506 | | |
| | | | | | | 20% | 762 | 938 | | |
| | | | | | | 18% | 648 | 827 | | |
| | | | | | | 29% | 1056 | 1127 | | |
| | | | | | | 25% | 723 | 818 | | |
| | | | | | | 26% | 1492 | 1569 | | |
| | | | | | | 22% | 429 | 494 | | |
| | | | | | | 36% | 705 | 770 | | |
| | | | | | | 35% | 567 | 626 | | |
| | | | | | | 27% | 1053 | 1151 | | |
| | | | | | | 22% | 1882 | 1947 | | |
| | | | | | | 46% | 2128 | 2172 | | |
| | | | | | | 33% | 1363 | 1434 | | |
| | | | | | | 21% | 1561 | 1683 | | |
| | | | | | | 30% | 1372 | 1449 | | |
| HDPJB85 | 954563 | 560 | HMMER | PFAM: Zinc finger, C2H2 | PF00096 | 18.63 | 1497 | 1568 | | |
| | | | 1.8 | type | | | | | | |
| HDPJF03 | 923874 | 114 | HMMER | PFAM: Zinc finger, C2H2 | PF00096 | 9.45 | 266 | 334 | | |
| | | | 1.8 | type | | | | | | |
| | | | blastx.2 | (AF058914) contains | gb\|AAC13593.1\| | 35% | 53 | 520 | | |
| | | | | similarity to Arabidopsis | | | | | | |
| | | | | thaliana 1 | | | | | | |
| HDPKI74 | 958622 | 115 | HMMER | PFAM: Zinc finger, C2H2 | PF00096 | 11.07 | 314 | 382 | | |
| | | | 1.8 | type | | | | | | |
| HDPNE2O | 917330 | 561 | HMMER | PFAM: Zinc finger, C2H2 | PF00096 | 85.8 | 26 | 94 | | |
| | | | 2.1.1 | type | | | | | | |
| | | | blastx.2 | (AB021643) gonadotropin | dbj\|BAA86989.1\| | 77% | 2 | 301 | | |
| | | | | inducible transcription | | 63% | 2 | 262 | | |
| | | | | repressor-3 [Homo | | 62% | 2 | 262 | | |
| | | | | sapiens] | | 62% | 8 | 262 | | |
| | | | | | | 57% | 2 | 262 | | |
| | | | | | | 58% | 2 | 262 | | |
| | | | | | | 54% | 8 | 262 | | |
| | | | | | | 47% | 17 | 262 | | |
| HDPOK83 | 921394 | 562 | HMMER | PFAM: Zinc finger, C2H2 | PF00096 | 9.63 | 375 | 437 | | |
| | | | 1.8 | type | | | | | | |
| | | | blastx.2 | (AF118566) | gb\|AAF24093.1\|AF1 | 96% | 159 | 431 | | |
| | | | | hematopoictic zinc finger | 18566_1 | | | | | |
| | | | | protein [Mus musculus] | | | | | | |
| HDPOM13 | 950831 | 563 | HMMER | PFAM: Zinc finger, C2H2 | PF00096 | 65.1 | 108 | 40 | | |
| | | | 2.1.1 | type | | | | | | |
| | | | blastx.14 | zinc finger protein [Fugu | gi\|2618752\|gb\|AAC6 | 80% | 345 | 7 | | |
| | | | | rubripes] | 0294.1\| | 36% | 276 | 7 | | |
| | | | | | | 37% | 270 | 4 | | |
| | | | | | | 38% | 270 | 4 | | |
| | | | | | | 37% | 270 | 4 | | |
| | | | | | | 34% | 282 | 4 | | |
| | | | | | | 33% | 282 | 7 | | |
| | | | | | | 41% | 282 | 49 | | |
| | | | | | | 32% | 273 | 7 | | |
| HDPRJ04 | 909040 | 119 | HMMER | PFAM: Zinc finger, C2H2 | PF00096 | 52.4 | 192 | 263 | | |
| | | | 2.1.1 | type | | | | | | |
| | | | blastx.2 | zinc finger protein | gb\|AAC50252.1\| | 40% | 12 | 377 | | |
| | | | | ZNF132 [Homo sapiens] | | 36% | 12 | 377 | | |
| | | | | | | 46% | 335 | 553 | | |
| | | | | | | 47% | 335 | 553 | | |
| | | | | | | 47% | 335 | 538 | | |
| | | | | | | 35% | 18 | 377 | | |
| | | | | | | 34% | 12 | 377 | | |
| | | | | | | 41% | 335 | 574 | | |
| | | | | | | 34% | 12 | 377 | | |
| | | | | | | 38% | 335 | 574 | | |
| | | | | | | 31% | 12 | 377 | | |
| | | | | | | 44% | 335 | 538 | | |
| | | | | | | 28% | 12 | 377 | | |
| | | | | | | 43% | 335 | 553 | | |
| | | | | | | 30% | 12 | 377 | | |
| | | | | | | 37% | 335 | 574 | | |
| | | | | | | 31% | 12 | 377 | | |
| | | | | | | 41% | 335 | 553 | | |
| | | | | | | 31% | 12 | 377 | | |
| | | | | | | 49% | 380 | 538 | | |
| | | | | | | 36% | 326 | 556 | | |
| | | | | | | 28% | 12 | 377 | | |
| | | | | | | 30% | 39 | 371 | | |
| | | | | | | 36% | 335 | 553 | | |
| | | | | | | 35% | 380 | 571 | | |
| | | | | | | 37% | 335 | 517 | | |
| | | | | | | 27% | 12 | 377 | | |
| | | | | | | 34% | 380 | 553 | | |
| | | | | | | 33% | 380 | 538 | | |
| | | | | | | 26% | 93 | 371 | | |
| | | | | | | 33% | 51 | 194 | | |
| | | | | | | 36% | 513 | 611 | | |
| | | | | | | 50% | 570 | 611 | | |
| | | | | | | 30% | 534 | 611 | | |
| | | | | | | 69% | 573 | 611 | | |
| | | | | | | 30% | 534 | 611 | | |
| | | | | | | 46% | 573 | 611 | | |
| | | | | | | 46% | 573 | 611 | | |
| | | | | | | 60% | 582 | 611 | | |
| | | | | | | 27% | 513 | 599 | | |
| | | | | | | 34% | 303 | 365 | | |
| | | | | | | 30% | 513 | 611 | | |
| | | | | | | 45% | 292 | 354 | | |
| | | | | | | 46% | 573 | 611 | | |
| | | | | | | 40% | 327 | 371 | | |
| | | | | | | 45% | 544 | 576 | | |
| | | | | | | 45% | 544 | 576 | | |
| HDPSB10 | 961309 | 564 | HMMER | PFAM: Zinc finger, C2H2 | PF00096 | 32.9 | 67 | 135 | | |
| | | | 2.1.1 | type | | | | | | |
| | | | blastx.2 | (AF091457) zinc finger | gb\|AAD22522.1\|AF0 | 61% | 1 | 252 | | |
| | | | | protein RIN ZF [Rattus | 91457_1 | | | | | |
| | | | | norvegicus] | | | | | | |
| HDPSD12 | 1179711 | 121 | blastx.14 | zinc finger protein [Fugu | gi\|2618752\|gb\|AAC6 | 93% | 103 | 459 | | |
| | | | | rubripes] | 0294.1[ | 36% | 109 | 462 | | |
| | | | | | | 32% | 76 | 426 | | |
| | | | | | | 34% | 103 | 441 | | |
| | | | | | | 37% | 109 | 423 | | |
| | | | | | | 33% | 115 | 432 | | |
| | | | | | | 28% | 103 | 426 | | |
| | | | | | | 36% | 169 | 426 | | |
| | | | | | | 29% | 94 | 450 | | |
| HDPSD12 | 943027 | 565 | HMMER | PFAM: Zinc finger, C2H2 | PF00096 | 66.4 | 188 | 256 | | |
| | | | 2.1.1 | type | | | | | | |
| | | | blastx.2 | zinc finger protein [Fugu | gb\|AAC60294.1\| | 92% | 92 | 358 | | |
| | | | | rubripes] | | 38% | 98 | 361 | | |
| | | | | | | 38% | 92 | 340 | | |
| | | | | | | 30% | 65 | 358 | | |
| | | | | | | 39% | 95 | 331 | | |
| | | | | | | 37% | 98 | 352 | | |
| | | | | | | 31% | 104 | 358 | | |
| | | | | | | 30% | 92 | 340 | | |
| | | | | | | 29% | 77 | 355 | | |
| | | | | | | 29% | 83 | 358 | | |
| | | | | | | 100% | 364 | 399 | | |
| | | | | | | 43% | 72 | 119 | | |
| HDPST56 | 1223385 | 122 | blastx.14 | ZINC FINGER PROTEIN | sp\|P51523\|ZN84_HU | 62% | 2 | 1342 | | |
| | | | | 84 (ZINC FINGER | MAN | 61% | 14 | 1342 | | |
| | | | | PROTEIN HPF2). | | 61% | 2 | 1342 | | |
| | | | | | | 58% | 2 | 1342 | | |
| | | | | | | 61% | 2 | 1261 | | |
| | | | | | | 58% | 35 | 1342 | | |
| | | | | | | 62% | 2 | 1186 | | |
| | | | | | | 64% | 2 | 1105 | | |
| | | | | | | 50% | 1689 | 1766 | | |
| | | | | | | 46% | 1689 | 1766 | | |
| | | | | | | 42% | 1689 | 1766 | | |
| | | | | | | 40% | 1692 | 1766 | | |
| | | | | | | 42% | 1689 | 1745 | | |
| | | | | | | 31% | 8 | 73 | | |
| HDPST56 | 908662 | 566 | HMMER | PFAM: Zinc finger, C2H2 | PF00096 | 67.2 | 98 | 166 | | |
| | | | 2.1.1 | type | | | | | | |
| | | | blastx.2 | (AL031393) dJ733D15.1 | emb\|CAA20564.1\| | 63% | 2 | 319 | | |
| | | | | (Zinc-finger protein) | | 58% | 2 | 322 | | |
| | | | | [Homo sapiens] | | 54% | 14 | 337 | | |
| | | | | | | 57% | 2 | 304 | | |
| | | | | | | 52% | 2 | 340 | | |
| | | | | | | 59% | 2 | 262 | | |
| | | | | | | 52% | 8 | 340 | | |
| | | | | | | 50% | 2 | 325 | | |
| | | | | | | 50% | 23 | 337 | | |
| | | | | | | 46% | 2 | 289 | | |
| | | | | | | 41% | 35 | 337 | | |
| | | | | | | 42% | 264 | 347 | | |
| | | | | | | 57% | 285 | 347 | | |
| | | | | | | 54% | 285 | 350 | | |
| HDPXK10 | 964148 | 567 | HMMER | PFAM:KRAB box | PF01352 | 87.7 | 249 | 368 | | |
| | | | 2.1.1 | | | | | | | |
| | | | blastx.2 | (AC007842)BC331191_1 | gb\|AAD39268.1\|AC0 | 71% | 234 | 368 | | |
| | | | | [Homo sapiens] | 07842_3 | 36% | 327 | 764 | | |
| | | | | | | 51% | 597 | 719 | | |
| | | | | | | 45% | 597 | 749 | | |
| | | | | | | 46% | 597 | 719 | | |
| | | | | | | 46% | 597 | 719 | | |
| | | | | | | 43% | 597 | 749 | | |
| | | | | | | 39% | 597 | 749 | | |
| | | | | | | 43% | 597 | 719 | | |
| | | | | | | 41% | 597 | 719 | | |
| | | | | | | 43% | 600 | 752 | | |
| | | | | | | 38% | 597 | 743 | | |
| | | | | | | 42% | 597 | 752 | | |
| | | | | | | 41% | 597 | 749 | | |
| | | | | | | 41% | 597 | 719 | | |
| | | | | | | 38% | 597 | 752 | | |
| | | | | | | 36% | 594 | 719 | | |
| | | | | | | 81% | 668 | 700 | | |
| | | | | | | 72% | 668 | 700 | | |
| | | | | | | 80% | 622 | 651 | | |
| | | | | | | 40% | 597 | 653 | | |
| | | | | | | 72% | 668 | 700 | | |
| | | | | | | 53% | 665 | 709 | | |
| | | | | | | 36% | 668 | 757 | | |
| | | | | | | 87% | 668 | 691 | | |
| | | | | | | 87% | 668 | 691 | | |
| | | | | | | 58% | 671 | 706 | | |
| HDQDG05 | 1204691 | 124 | blastx.14 | ORF (FRAGMENT). | sp\|Q15022\|Q15022 | 99% | 16 | 825 | | |
| HDQDG05 | 964924 | 568 | HMMER | PFAM: Zinc finger, C2H2 | PF00096 | 15.8 | 65 | 130 | | |
| | | | 1.8 | type | | | | | | |
| HDQHM27 | 908805 | 569 | HMMER | PFAM: Zinc finger, C2H2 | PF00096 | 10.43 | 320 | 388 | | |
| | | | 1.8 | type | | | | | | |
| HDTFH41 | 712076 | 570 | HMMER | PFAM: Zinc finger, C2H2 | PF00096 | 15.94 | 311 | 373 | | |
| | | | 1.8 | type | | | | | | |
| HDTFS83 | 909089 | 571 | HMMER | PFAM: Zinc finger, C2H2 | PF00096 | 145.4 | 227 | 295 | | |
| | | | 2.1.1 | type | | | | | | |
| | | | blastx.2 | (AF167320) zinc finger | gb\|AAD45929.1\|AF1 | 66% | 2 | 496 | | |
| | | | | protein ZFP1 13 [Mus | 67320_1 | 62% | 2 | 526 | | |
| | | | | musculus] | 66% | 2 | 472 | | | |
| | | | | | | 60% | 2 | 502 | | |
| | | | | | | 68% | 2 | 394 | | |
| | | | | | | 55% | 62 | 502 | | |
| | | | | | | 65% | 2 | 349 | | |
| HDTFT81 | 909054 | 128 | HMMER | PFAM: Zinc finger, C2H2 | PF00096 | 83 | 915 | 983 | | |
| | | | 2.1.1 | type | | | | | | |
| | | | blastx.2 | (AB013897) HKR1 | dbj\|BAA86058.1\| | 62% | 654 | 1112 | | |
| | | | | [Homo sapiens] | | 60% | 645 | 1112 | | |
| | | | | | | 59% | 654 | 1112 | | |
| | | | | | | 54% | 645 | 1172 | | |
| | | | | | | 57% | 654 | 1112 | | |
| | | | | | | 56% | 645 | 1112 | | |
| | | | | | | 56% | 657 | 1112 | | |
| | | | | | | 57% | 196 | 651 | | |
| | | | | | | 47% | 196 | 753 | | |
| | | | | | | 57% | 196 | 651 | | |
| | | | | | | 53% | 645 | 1172 | | |
| | | | | | | 36% | 238 | 1158 | | |
| | | | | | | 37% | 226 | 1173 | | |
| | | | | | | 48% | 657 | 1172 | | |
| | | | | | | 54% | 208 | 651 | | |
| | | | | | | 49% | 672 | 1172 | | |
| | | | | | | 46% | 393 | 1064 | | |
| | | | | | | 44% | 256 | 744 | | |
| | | | | | | 55% | 645 | 989 | | |
| | | | | | | 53% | 244 | 486 | | |
| | | | | | | 55% | 72 | 239 | | |
| | | | | | | 50% | 72 | 248 | | |
| | | | | | | 42% | 72 | 269 | | |
| | | | | | | 44% | 72 | 239 | | |
| | | | | | | 44% | 30 | 239 | | |
| | | | | | | 50% | 72 | 251 | | |
| | | | | | | 40% | 69 | 239 | | |
| | | | | | | 42% | 72 | 239 | | |
| | | | | | | 35% | 9 | 254 | | |
| | | | | | | 34% | 1063 | 1158 | | |
| HDTID61 | 1049305 | 129 | blastx.14 | Zinc finger [Homo | gi\|487840\|gb\|AAA36 | 46% | 45 | 317 | | |
| | | | | sapiens] | 818.1\| | 46% | 42 | 266 | | |
| | | | | | | 50% | 120 | 341 | | |
| | | | | | | 41% | 111 | 341 | | |
| | | | | | | 51% | 353 | 451 | | |
| | | | | | | 46% | 356 | 451 | | |
| | | | | | | 48% | 356 | 442 | | |
| | | | | | | 66% | 300 | 344 | | |
| | | | | | | 52% | 300 | 356 | | |
| | | | | | | 70% | 525 | 554 | | |
| | | | | | | 75% | 531 | 554 | | |
| HDTID61 | 908946 | 572 | HMMER | PFAM: Zinc finger, C2H2 | PF00096 | 7.07 | 407 | 430 | | |
| | | | 1.8 | type | | | | | | |
| | | | blastx.2 | (AK002053) unnamed | dbj\|BAA92059.1\| | 46% | 45 | 389 | | |
| | | | | protein product [Homo | | 53% | 45 | 341 | | |
| | | | | sapiens] | | 50% | 33 | 341 | | |
| | | | | | | 45% | 45 | 389 | | |
| | | | | | | 47% | 45 | 344 | | |
| | | | | | | 49% | 48 | 356 | | |
| | | | | | | 46% | 45 | 344 | | |
| | | | | | | 33% | 18 | 674 | | |
| | | | | | | 42% | 18 | 320 | | |
| | | | | | | 34% | 60 | 554 | | |
| | | | | | | 51% | 18 | 245 | | |
| | | | | | | 57% | 347 | 457 | | |
| | | | | | | 37% | 347 | 547 | | |
| | | | | | | 32% | 338 | 553 | | |
| | | | | | | 50% | 374 | 457 | | |
| | | | | | | 47% | 338 | 442 | | |
| | | | | | | 66% | 519 | 554 | | |
| HDTKB09 | 1199540 | 130 | blastx.14 | KLRUIPPEL-TYPEZINC | sp\|Q9UMP3\|Q9UMP | 61% | 56 | 481 | | |
| | | | | FINGER (FRAGMENT). | 3 | 57% | 56 | 481 | | |
| | | | | | | 56% | 59 | 481 | | |
| | | | | | | 54% | 59 | 481 | | |
| | | | | | | 60% | 56 | 400 | | |
| | | | | | | 52% | 113 | 481 | | |
| | | | | | | 60% | 56 | 340 | | |
| | | | | | | 45% | 194 | 481 | | |
| | | | | | | 40% | 65 | 190 | | |
| | | | | | | 34% | 62 | 208 | | |
| | | | | | | 36% | 131 | 238 | | |
| | | | | | | 50% | 59 | 112 | | |
| | | | | | | 50% | 801 | 848 | | |
| | | | | | | 50% | 801 | 848 | | |
| | | | | | | 50% | 801 | 848 | | |
| | | | | | | 50% | 801 | 848 | | |
| HDTKB09 | 908466 | 573 | HMMER | PFAM: Zinc finger, C2H2 | PF00096 | 104 | 308 | 376 | | |
| | | | 2.1.1 | type | | | | | | |
| | | | blastx.2 | (AL031393) dJ733D15.1 | emb\|CAA20564.1\| | 64% | 35 | 460 | | |
| | | | | (Zinc-finger protein) | | 59% | 38 | 460 | | |
| | | | | [Homo sapiens] | | 57% | 35 | 460 | | |
| | | | | | | 62% | 38 | 388 | | |
| | | | | | | 51% | 38 | 460 | | |
| | | | | | | 50% | 65 | 460 | | |
| | | | | | | 51% | 35 | 409 | | |
| | | | | | | 47% | 35 | 460 | | |
| | | | | | | 46% | 107 | 460 | | |
| | | | | | | 67% | 35 | 136 | | |
| HDTLD17 | 908601 | 131 | HMMER | PFAM: Zinc finger, C2H2 | PF00096 | 96.3 | 154 | 222 | | |
| | | | 2.1.1 | type | | | | | | |
| | | | blastx.2 | Zfp-29 [Mus musculus] | emb\|CAA38920.1\| | 48% | 49 | 636 | | |
| | | | | | | 65% | 49 | 399 | | |
| | | | | | | 66% | 49 | 399 | | |
| | | | | | | 66% | 70 | 399 | | |
| | | | | | | 65% | 49 | 411 | | |
| | | | | | | 62% | 49 | 369 | | |
| | | | | | | 64% | 70 | 381 | | |
| | | | | | | 47% | 115 | 636 | | |
| | | | | | | 58% | 49 | 324 | | |
| | | | | | | 42% | 372 | 641 | | |
| | | | | | | 50% | 375 | 569 | | |
| | | | | | | 47% | 375 | 569 | | |
| | | | | | | 47% | 375 | 569 | | |
| | | | | | | 48% | 372 | 569 | | |
| | | | | | | 43% | 372 | 578 | | |
| | | | | | | 42% | 372 | 602 | | |
| | | | | | | 46% | 375 | 569 | | |
| | | | | | | 35% | 279 | 569 | | |
| | | | | | | 43% | 372 | 569 | | |
| | | | | | | 43% | 375 | 569 | | |
| | | | | | | 46% | 375 | 569 | | |
| | | | | | | 63% | 547 | 636 | | |
| | | | | | | 63% | 547 | 636 | | |
| | | | | | | 52% | 538 | 651 | | |
| | | | | | | 56% | 547 | 642 | | |
| | | | | | | 35% | 375 | 491 | | |
| | | | | | | 66% | 641 | 667 | | |
| HE2DV73 | 909246 | 574 | HMMER | PFAM: Zinc finger, C2H2 | PF00096 | 95.6 | 263 | 331 | | |
| | | | 2.1.1 | type | | | | | | |
| | | | blastx.2 | (AL133070) hypothetical | emb\|CAB61393.1\| | 98% | 38 | 460 | | |
| | | | | protein [Homo sapiens] | | 55% | 41 | 460 | | |
| | | | | | | 48% | 47 | 421 | | |
| | | | | | | 40% | 14 | 448 | | |
| | | | | | | 43% | 20 | 337 | | |
| | | | | | | 43% | 239 | 532 | | |
| | | | | | | 56% | 450 | 521 | | |
| | | | | | | 48% | 469 | 546 | | |
| | | | | | | 54% | 478 | 510 | | |
| HE2LG78 | 1217036 | 133 | blastx.14 | CG6769 PROTEIN. | sp\|Q9VX08\|Q9VX08 | 56% | 888 | 1214 | | |
| | | | | | | 55% | 133 | 309 | | |
| | | | | | | 46% | 1260 | 1427 | | |
| | | | | | | 47% | 313 | 414 | | |
| | | | | | | 39% | 1440 | 1523 | | |
| | | | | | | 39% | 337 | 405 | | |
| | | | | | | 26% | 1041 | 1130 | | |
| | | | | | | 25% | 334 | 429 | | |
| | | | | | | 22% | 1404 | 1562 | | |
| HE2LG78 | 916611 | 575 | HMMER | PFAM: Zinc finger, C2H2 | PF00096 | 11.09 | 330 | 398 | | |
| | | | 1.8 | type | | | | | | |
| | | | blastx.2 | Contains similaiity to | gb\|AAB47598.1\| | 35% | 867 | 1517 | | |
| | | | | Pfam domain: PF00096 | | 37% | 135 | 473 | | |
| | | | | (zf-C2H2), 1 | | | | | | |
| HE2PH12 | 909191 | 134 | HMMER | PFAM: Zinc finger, C2H2 | PF00096 | 41.6 | 138 | 206 | | |
| | | | 2.1.1 | type | | | | | | |
| | | | blastx.2 | (AB021643) gonadotropin | dbj\|BAA86989.1\| | 85% | 3 | 467 | | |
| | | | | inducible transcription | | 47% | 3 | 467 | | |
| | | | | repressor-3 [Homo | | 48% | 36 | 260 | | |
| | | | | sapiens] | | 50% | 36 | 206 | | |
| HE8MA36 | 706858 | 135 | HMMER | PFAM: Zinc finger, C2H2 | PF00096 | 14.77 | 329 | 382 | | |
| | | | 1.8 | type | | | | | | |
| HE8MU06 | 909075 | 136 | HMMER | PFAM: Zinc finger, C2H2 | PF00096 | 76.5 | 59 | 127 | | |
| | | | 2.1.1 | type | | | | | | |
| | | | blastx.2 | (AF221712) Smad- and | gb\|AAF28354.1\| | 54% | 2 | 778 | | |
| | | | | Olf-interacting zinc finger | | 46% | 444 | 842 | | |
| | | | | protein [Homo sapiens] | | 28% | 50 | 442 | | |
| | | | | | | 29% | 50 | 406 | | |
| | | | | | | 27% | 53 | 379 | | |
| | | | | | | 32% | 227 | 496 | | |
| | | | | | | 26% | 65 | 382 | | |
| | | | | | | 33% | 390 | 578 | | |
| | | | | | | 29% | 59 | 310 | | |
| | | | | | | 25% | 152 | 442 | | |
| | | | | | | 26% | 447 | 722 | | |
| | | | | | | 29% | 447 | 629 | | |
| | | | | | | 29% | 417 | 623 | | |
| | | | | | | 34% | 456 | 599 | | |
| | | | | | | 27% | 65 | 208 | | |
| | | | | | | 28% | 393 | 605 | | |
| | | | | | | 32% | 438 | 593 | | |
| | | | | | | 31% | 459 | 581 | | |
| | | | | | | 26% | 38 | 310 | | |
| | | | | | | 27% | 596 | 772 | | |
| | | | | | | 20% | 44 | 319 | | |
| | | | | | | 27% | 459 | 587 | | |
| | | | | | | 31% | 468 | 596 | | |
| | | | | | | 24% | 339 | 833 | | |
| | | | | | | 36% | 221 | 295 | | |
| | | | | | | 33% | 447 | 644 | | |
| | | | | | | 24% | 504 | 833 | | |
| | | | | | | 75% | 835 | 870 | | |
| HE8NP11 | 1152902 | 137 | blastx.14 | (AF039698) antigen NY- | gi\|3170196\|gb\|AAC1 | 85% | 2 | 202 | | |
| | | | | CO-33 [Homo sapiens] | 8047.1\| | 83% | 251 | 304 | | |
| HE8NP11 | 966201 | 576 | HMMER | PFAM: Zinc finger, C2H2 | PF00096 | 29.1 | 272 | 343 | | |
| | | | 2.1.1 | type | | | | | | |
| | | | blastx.2 | (AF039698) antigen NY- | gb\|AAC18047.1\| | 70% | 2 | 304 | | |
| | | | | CO-33 [Homo sapiens] | | | | | | |
| HE8OK79 | 1025100 | 138 | blastx.14 | (AF072439) zinc-finger | gi\|3264773\|gb\|AAC2 | 50% | 201 | 815 | | |
| | | | | protein-37; ZFP-37 | 4590.1\| | 50% | 231 | 815 | | |
| | | | | [Rattus norvegicus] | | 52% | 309 | 815 | | |
| | | | | | | 48% | 213 | 764 | | |
| | | | | | | 52% | 474 | 815 | | |
| | | | | | | 44% | 201 | 407 | | |
| | | | | | | 50% | 405 | 575 | | |
| | | | | | | 43% | 321 | 491 | | |
| | | | | | | 42% | 657 | 812 | | |
| | | | | | | 40% | 495 | 659 | | |
| | | | | | | 42% | 573 | 743 | | |
| | | | | | | 55% | 495 | 575 | | |
| | | | | | | 46% | 405 | 494 | | |
| | | | | | | 52% | 741 | 815 | | |
| | | | | | | 41% | 657 | 743 | | |
| | | | | | | 44% | 573 | 659 | | |
| | | | | | | 52% | 240 | 308 | | |
| | | | | | | 40% | 483 | 557 | | |
| | | | | | | 42% | 651 | 728 | | |
| | | | | | | 40% | 408 | 473 | | |
| | | | | | | 43% | 507 | 575 | | |
| | | | | | | 35% | 744 | 803 | | |
| | | | | | | 34% | 324 | 392 | | |
| | | | | | | 29% | 231 | 323 | | |
| | | | | | | 20% | 363 | 479 | | |
| | | | | | | 40% | 576 | 641 | | |
| | | | | | | 22% | 315 | 407 | | |
| | | | | | | 26% | 480 | 605 | | |
| HE8OK79 | 908619 | 577 | HMMER | PFAM: Zinc finger, C2H2 | PF00096 | 50.2 | 243 | 311 | | |
| | | | 2.1.1 | type | | | | | | |
| | | | blastx.2 | (AF022158)KRAB | gb\|AAC28425.1\| | 53% | 401 | 739 | | |
| | | | | domain zinc finger protein | | 51% | 401 | 739 | | |
| | | | | [Homo sapiens] | | 48% | 401 | 739 | | |
| | | | | | | 50% | 401 | 736 | | |
| | | | | | | 49% | 401 | 739 | | |
| | | | | | | 48% | 401 | 739 | | |
| | | | | | | 45% | 401 | 736 | | |
| | | | | | | 45% | 410 | 739 | | |
| | | | | | | 47% | 410 | 739 | | |
| | | | | | | 48% | 401 | 661 | | |
| | | | | | | 42% | 467 | 739 | | |
| | | | | | | 43% | 135 | 413 | | |
| | | | | | | 50% | 213 | 413 | | |
| | | | | | | 40% | 213 | 527 | | |
| | | | | | | 50% | 213 | 413 | | |
| | | | | | | 49% | 213 | 413 | | |
| | | | | | | 47% | 401 | 583 | | |
| | | | | | | 44% | 213 | 413 | | |
| | | | | | | 43% | 213 | 425 | | |
| | | | | | | 47% | 213 | 413 | | |
| | | | | | | 46% | 213 | 413 | | |
| | | | | | | 39% | 135 | 383 | | |
| | | | | | | 32% | 428 | 739 | | |
| | | | | | | 38% | 401 | 502 | | |
| | | | | | | 30% | 219 | 413 | | |
| | | | | | | 27% | 105 | 389 | | |
| | | | | | | 29% | 207 | 338 | | |
| | | | | | | 30% | 216 | 353 | | |
| HE8OM15 | 1195124 | 139 | blastx.14 | ZN-15 | sp\|Q9Z2U2\|Q9Z2U2 | 82% | 198 | 941 | | |
| | | | | TRANSCRIPTION | | 67% | 3 | 254 | | |
| | | | | FACTOR. | | 61% | 939 | 1055 | | |
| | | | | | | 22% | 9 | 356 | | |
| | | | | | | 21% | 48 | 281 | | |
| | | | | | | 31% | 480 | 611 | | |
| | | | | | | 28% | 682 | 795 | | |
| | | | | | | 31% | 615 | 701 | | |
| | | | | | | 22% | 12 | 161 | | |
| HE8OM15 | 839876 | 578 | HMMER | PFAM: Zinc finger, C2H2 | PF00096 | 6.53 | 534 | 587 | | |
| | | | 1.8 | type | | | | | | |
| | | | blastx.2 | (AF017806) Zn-15 | gb\|AAD01625.1\| | 82% | 3 | 689 | | |
| | | | | transcription factor [Mus | | 75% | 724 | 1056 | | |
| | | | | musculus] | | 22% | 9 | 494 | | |
| | | | | | | 25% | 48 | 401 | | |
| | | | | | | 23% | 12 | 401 | | |
| | | | | | | 31% | 480 | 611 | | |
| | | | | | | 34% | 525 | 587 | | |
| HE8QM92 | 1216778 | 140 | blastx.14 | finger protein mfg1 - | pir\|A39240\|A39240 | 42% | 92 | 217 | | |
| | | | | mouse (fragment) | | 44% | 116 | 217 | | |
| | | | | | | 51% | 137 | 217 | | |
| | | | | | | 43% | 101 | 217 | | |
| | | | | | | 42% | 464 | 547 | | |
| | | | | | | 42% | 464 | 547 | | |
| | | | | | | 39% | 464 | 547 | | |
| | | | | | | 52% | 719 | 781 | | |
| | | | | | | 35% | 464 | 547 | | |
| | | | | | | 52% | 719 | 781 | | |
| | | | | | | 31% | 719 | 823 | | |
| | | | | | | 42% | 719 | 781 | | |
| | | | | | | 40% | 473 | 547 | | |
| | | | | | | 38% | 545 | 607 | | |
| | | | | | | 42% | 545 | 607 | | |
| | | | | | | 38% | 545 | 607 | | |
| | | | | | | 38% | 545 | 607 | | |
| | | | | | | 58% | 545 | 580 | | |
| | | | | | | 35% | 264 | 323 | | |
| HE8QM92 | 969463 | 579 | HMMER | PFAM: Zinc finger, C2H2 | PF00096 | 68.6 | 472 | 540 | | |
| | | | 2.1.1 | type | | | | | | |
| | | | blastx.2 | kruppel-related zinc finger | gb\|AAC51180.1\| | 33% | 139 | 804 | | |
| | | | | protein [Homo sapiens] | | 28% | 139 | 783 | | |
| | | | | | | 29% | 151 | 783 | | |
| | | | | | | 27% | 139 | 783 | | |
| | | | | | | 23% | 139 | 849 | | |
| | | | | | | 29% | 139 | 783 | | |
| | | | | | | 27% | 97 | 783 | | |
| | | | | | | 27% | 139 | 609 | | |
| HE8QV82 | 908620 | 580 | HMMER | PFAM: Zinc finger, C2H2 | PF00096 | 28.7 | 376 | 447 | | |
| | | | 2.1.1 | type | | | | | | |
| | | | blastx.2 | HF.12 finger protein (1 is | emb\|CAA30269.1\| | 50% | 259 | 438 | | |
| | | | | 2nd base in codon) [Homo | | 46% | 238 | 438 | | |
| | | | | sapiens] | | 37% | 232 | 438 | | |
| HE8UZ63 | 959724 | 581 | HMMER | PFAM: Zinc finger, C2H2 | PF00096 | 17.28 | 551 | 613 | | |
| | | | 1.8 | type | | | | | | |
| | | | blastx.2 | (AF159548) nuclear | gb\|AAF15315.1\| | 85% | 26 | 1213 | | |
| | | | | FMRP interacting protein | | | | | | |
| | | | | 1 [Homo sapiens] | | | | | | |
| HE9CJ74 | 908903 | 143 | HMMER | PFAM: Zinc finger, C2H2 | PF00096 | 80.9 | 316 | 384 | | |
| | | | 2.1.1 | type | | | | | | |
| | | | blastx.2 | (AC004908) zinc finger | gb\|AAD05197.1\| | 89% | 1 | 546 | | |
| | | | | protein from gene of | | 55% | 1 | 564 | | |
| | | | | uncertain exon 1 | | 52% | 1 | 564 | | |
| | | | | | | 51% | 1 | 564 | | |
| | | | | | | 51% | 1 | 546 | | |
| | | | | | | 53% | 1 | 468 | | |
| | | | | | | 47% | 34 | 546 | | |
| | | | | | | 47% | 70 | 564 | | |
| | | | | | | 51% | 1 | 399 | | |
| | | | | | | 38% | 7 | 546 | | |
| | | | | | | 92% | 546 | 584 | | |
| | | | | | | 92% | 546 | 584 | | |
| | | | | | | 76% | 546 | 584 | | |
| | | | | | | 76% | 546 | 584 | | |
| | | | | | | 69% | 546 | 584 | | |
| | | | | | | 69% | 546 | 584 | | |
| | | | | | | 69% | 546 | 584 | | |
| | | | | | | 75% | 491 | 526 | | |
| HE9MK11 | 1228114 | 144 | blastx.14 | ORF (FRAGMENT). | sp\|Q15022\|Q15022 | 99% | 2 | 1441 | | |
| HE9MK11 | 964925 | 582 | HMMER | PFAM: Zinc finger, C2H2 | PF00096 | 15.06 | 898 | 963 | | |
| | | | 1.8 | type | | | | | | |
| HE9NO76 | 908918 | 583 | HMMER | PFAM: Zinc finger, C2H2 | PF00096 | 144.2 | 11 | 79 | | |
| | | | 2.1.1 | type | | | | | | |
| | | | blastx.2 | zinc finger protein | gb\|AAC50254.1\| | 60% | 8 | 484 | | |
| | | | | ZNF135 [Homo sapiens] | | 60% | 8 | 478 | | |
| | | | | | | 49% | 8 | 661 | | |
| | | | | | | 52% | 8 | 604 | | |
| | | | | | | 52% | 8 | 577 | | |
| | | | | | | 59% | 8 | 478 | | |
| | | | | | | 58% | 8 | 478 | | |
| | | | | | | 56% | 8 | 481 | | |
| | | | | | | 56% | 8 | 478 | | |
| | | | | | | 55% | 8 | 478 | | |
| | | | | | | 52% | 8 | 478 | | |
| | | | | | | 53% | 8 | 421 | | |
| | | | | | | 45% | 451 | 1071 | | |
| | | | | | | 50% | 460 | 1038 | | |
| | | | | | | 49% | 484 | 1038 | | |
| | | | | | | 51% | 475 | 969 | | |
| | | | | | | 47% | 484 | 1071 | | |
| | | | | | | 56% | 86 | 478 | | |
| | | | | | | 48% | 451 | 951 | | |
| | | | | | | 57% | 484 | 837 | | |
| | | | | | | 47% | 505 | 1041 | | |
| | | | | | | 44% | 484 | 969 | | |
| | | | | | | 60% | 484 | 756 | | |
| | | | | | | 53% | 254 | 481 | | |
| | | | | | | 62% | 475 | 672 | | |
| | | | | | | 42% | 661 | 951 | | |
| | | | | | | 54% | 451 | 588 | | |
| HE9OL74 | 765044 | 584 | HMMER | PFAM: Zinc finger, C2H2 | PF00096 | 30 | 116 | 187 | | |
| | | | 2.1.1 | type | | | | | | |
| HE9P195 | 909160 | 585 | HMMER | PFAM: Zinc finger, C2H2 | PF00096 | 47.2 | 73 | 141 | | |
| | | | 2.1.1 | type | | | | | | |
| | | | blastx.2 | (AF067165) zinc finger | gb\|AAD32449.1\|AF0 | 60% | 1 | 207 | | |
| | | | | protein 3 [Homo sapiens] | 67165_1 | 47% | 1 | 279 | | |
| | | | | | | 58% | 1 | 201 | | |
| | | | | | | 57% | 1 | 210 | | |
| | | | | | | 62% | 1 | 177 | | |
| | | | | | | 64% | 1 | 177 | | |
| | | | | | | 71% | 177 | 332 | | |
| | | | | | | 66% | 174 | 332 | | |
| | | | | | | 60% | 1 | 183 | | |
| | | | | | | 59% | 1 | 177 | | |
| | | | | | | 63% | 177 | 332 | | |
| | | | | | | 46% | 1 | 234 | | |
| | | | | | | 59% | 1 | 177 | | |
| | | | | | | 67% | 177 | 332 | | |
| | | | | | | 63% | 177 | 332 | | |
| | | | | | | 55% | 1 | 177 | | |
| | | | | | | 65% | 177 | 332 | | |
| | | | | | | 61% | 177 | 332 | | |
| | | | | | | 61% | 177 | 332 | | |
| | | | | | | 49% | 1 | 189 | | |
| | | | | | | 63% | 1 | 147 | | |
| | | | | | | 59% | 177 | 332 | | |
| | | | | | | 53% | 177 | 332 | | |
| | | | | | | 63% | 177 | 314 | | |
| | | | | | | 51% | 177 | 332 | | |
| | | | | | | 53% | 177 | 332 | | |
| | | | | | | 45% | 1 | 177 | | |
| | | | | | | 46% | 177 | 332 | | |
| | | | | | | 50% | 338 | 433 | | |
| | | | | | | 45% | 338 | 436 | | |
| | | | | | | 50% | 338 | 433 | | |
| | | | | | | 50% | 338 | 433 | | |
| | | | | | | 43% | 338 | 433 | | |
| | | | | | | 46% | 338 | 433 | | |
| | | | | | | 50% | 338 | 433 | | |
| | | | | | | 46% | 338 | 433 | | |
| | | | | | | 46% | 338 | 433 | | |
| | | | | | | 36% | 338 | 436 | | |
| | | | | | | 40% | 338 | 433 | | |
| | | | | | | 33% | 338 | 436 | | |
| | | | | | | 34% | 58 | 144 | | |
| HE9QL92 | 1163068 | 148 | blastx.14 | (AF072439) zinc-finger | gi\|3264773\|gb\|AAC2 | 64% | 34 | 711 | | |
| | | | | protein-37; ZFP-37 | 4590.1\| | 63% | 7 | 657 | | |
| | | | | [Rattus norvegicus] | | 59% | 115 | 711 | | |
| | | | | | | 62% | 277 | 711 | | |
| | | | | | | 63% | 1 | 405 | | |
| | | | | | | 60% | 367 | 720 | | |
| | | | | | | 75% | 22 | 243 | | |
| | | | | | | 64% | 298 | 468 | | |
| | | | | | | 59% | 46 | 216 | | |
| | | | | | | 61% | 382 | 552 | | |
| | | | | | | 57% | 214 | 384 | | |
| | | | | | | 61% | 466 | 636 | | |
| | | | | | | 52% | 130 | 300 | | |
| | | | | | | 55% | 550 | 723 | | |
| | | | | | | 62% | 4 | 132 | | |
| | | | | | | 51% | 298 | 384 | | |
| | | | | | | 55% | 382 | 468 | | |
| | | | | | | 51% | 550 | 636 | | |
| | | | | | | 51% | 466 | 552 | | |
| | | | | | | 46% | 634 | 723 | | |
| | | | | | | 37% | 214 | 309 | | |
| | | | | | | 56% | 385 | 453 | | |
| | | | | | | 56% | 133 | 201 | | |
| | | | | | | 56% | 637 | 705 | | |
| | | | | | | 52% | 469 | 537 | | |
| | | | | | | 54% | 49 | 114 | | |
| | | | | | | 50% | 301 | 366 | | |
| | | | | | | 52% | 553 | 621 | | |
| | | | | | | 62% | 1 | 48 | | |
| | | | | | | 45% | 217 | 276 | | |
| | | | | | | 35% | 376 | 468 | | |
| | | | | | | 27% | 190 | 300 | | |
| | | | | | | 32% | 460 | 552 | | |
| | | | | | | 26% | 91 | 204 | | |
| | | | | | | 26% | 427 | 540 | | |
| | | | | | | 29% | 40 | 132 | | |
| | | | | | | 27% | 274 | 384 | | |
| | | | | | | 32% | 124 | 216 | | |
| | | | | | | 25% | 388 | 552 | | |
| | | | | | | 18% | 343 | 456 | | |
| HE9QL92 | 908460 | 586 | HMMER | PFAM: Zinc finger, C2H2 | PF00096 | 92.2 | 53 | 121 | | |
| | | | 2.1.1 | type | | | | | | |
| | | | blastx.2 | DNA binding protein | gb\|AAA79359.1\| | 64% | 2 | 388 | | |
| | | | | [Homo sapiens] | | 70% | 2 | 373 | | |
| | | | | | | 65% | 2 | 385 | | |
| | | | | | | 64% | 2 | 418 | | |
| | | | | | | 52% | 2 | 526 | | |
| | | | | | | 66% | 2 | 385 | | |
| | | | | | | 53% | 2 | 538 | | |
| | | | | | | 50% | 2 | 538 | | |
| | | | | | | 59% | 2 | 418 | | |
| | | | | | | 51% | 2 | 538 | | |
| | | | | | | 50% | 2 | 538 | | |
| | | | | | | 59% | 2 | 418 | | |
| | | | | | | 62% | 2 | 385 | | |
| | | | | | | 49% | 2 | 538 | | |
| | | | | | | 50% | 2 | 463 | | |
| | | | | | | 46% | 2 | 526 | | |
| | | | | | | 51% | 414 | 560 | | |
| | | | | | | 55% | 414 | 560 | | |
| | | | | | | 44% | 333 | 560 | | |
| | | | | | | 51% | 414 | 560 | | |
| | | | | | | 73% | 414 | 503 | | |
| | | | | | | 48% | 414 | 560 | | |
| | | | | | | 48% | 414 | 560 | | |
| | | | | | | 53% | 414 | 560 | | |
| | | | | | | 48% | 414 | 560 | | |
| | | | | | | 48% | 414 | 560 | | |
| | | | | | | 46% | 414 | 560 | | |
| | | | | | | 33% | 364 | 567 | | |
| | | | | | | 42% | 414 | 560 | | |
| | | | | | | 50% | 364 | 471 | | |
| | | | | | | 42% | 414 | 560 | | |
| | | | | | | 50% | 364 | 471 | | |
| | | | | | | 47% | 364 | 471 | | |
| | | | | | | 41% | 364 | 480 | | |
| | | | | | | 47% | 364 | 471 | | |
| | | | | | | 40% | 364 | 474 | | |
| | | | | | | 45% | 367 | 471 | | |
| | | | | | | 41% | 364 | 471 | | |
| | | | | | | 44% | 370 | 471 | | |
| | | | | | | 48% | 373 | 471 | | |
| HE9TE84 | 1085611 | 149 | blastx.14 | (AF039698) antigen NY- | gi\|3170196\|gb\|AAC1 | 93% | 75 | 656 | | |
| | | | | CO-33 [Homo sapiens] | 8047.1\| | 80% | 657 | 701 | | |
| HE9TE84 | 782311 | 587 | HMMER | PFAM: Zinc finger, C2H2 | PF00096 | 10.21 | 217 | 285 | | |
| | | | 1.8 | type | | | | | | |
| | | | blastx.2 | (AF039698) antigen NY- | gb\|AAC18047.1\| | 91% | 199 | 648 | | |
| | | | | CO-33 [Homo sapiens] | | 97% | 75 | 176 | | |
| | | | | | | 100% | 176 | 202 | | |
| | | | | | | 38% | 162 | 239 | | |
| HEMDJ83 | 1153885 | 150 | blastx.14 | zinc fingerprotein | gi\|457883\|gb\|AAA16 | 61% | 146 | 238 | | |
| | | | | [Drosophila melanogaster] | 473.1\| | 73% | 485 | 529 | | |
| | | | | | | 52% | 380 | 436 | | |
| | | | | | | 44% | 7 | 60 | | |
| HEMDJ83 | 792237 | 588 | HMMER | PFAM: Zinc finger, C2H2 | PF00096 | 19.56 | 106 | 159 | | |
| | | | 1.8 | type | | | | | | |
| | | | blastx.2 | zinc finger protein | gb\|AAA16473.1\| | 61% | 70 | 162 | | |
| | | | | [Drosophila melanogaster] | | 33% | 327 | 452 | | |
| HEOQC76 | 909032 | 151 | HMMER | PFAM: Zinc finger, C2H2 | PF00096 | 86.9 | 169 | 237 | | |
| | | | 2.1.1 | type | | | | | | |
| | | | blastx.2 | (AK001753) unnamed | dbj\|BAA91884.1\| | 37% | 139 | 609 | | |
| | | | | protein product [Homo | | 33% | 139 | 609 | | |
| | | | | sapiens] | | 35% | 139 | 480 | | |
| | | | | | | 52% | 154 | 306 | | |
| | | | | | | 29% | 196 | 582 | | |
| HEORH04 | 932782 | 589 | HMMER | PFAM: Zinc finger, C2H2 | PF00096 | 8.26 | 498 | 548 | | |
| | | | 1.8 | type | | | | | | |
| HETBU05 | 932852 | 590 | HMMER | PFAM:KRABbox | PF01352 | 58.8 | 3 | 116 | | |
| | | | 2.1.1 | | | | | | | |
| | | | blastx.2 | (AB021643) gonadotropin | dbj\|BAA86989.1\| | 41% | 273 | 614 | | |
| | | | | inducible transcription | | 45% | 375 | 614 | | |
| | | | | repressor-3 [Homo | | 35% | 222 | 614 | | |
| | | | | sapiens] | | 40% | 357 | 614 | | |
| | | | | | | 30% | 108 | 593 | | |
| | | | | | | 50% | 3 | 194 | | |
| | | | | | | 29% | 210 | 614 | | |
| | | | | | | 31% | 375 | 470 | | |
| | | | | | | 25% | 444 | 599 | | |
| HFANC50 | 909221 | 591 | HMMER | PFAM: Zinc finger, C2H2 | PF00096 | 163.7 | 495 | 563 | | |
| | | | 2.1.1 | type | | | | | | |
| | | | blastx.2 | zinc finger protein [Homo | emb\|CAA55533.1\| | 59% | 3 | 635 | | |
| | | | | sapiens] | | 57% | 3 | 635 | | |
| | | | | | | 57% | 6 | 635 | | |
| | | | | | | 57% | 3 | 635 | | |
| | | | | | | 57% | 3 | 635 | | |
| | | | | | | 57% | 3 | 635 | | |
| | | | | | | 55% | 3 | 635 | | |
| | | | | | | 55% | 3 | 635 | | |
| | | | | | | 57% | 42 | 635 | | |
| | | | | | | 57% | 3 | 575 | | |
| HFKIN35 | 1152244 | 155 | blastx.14 | finger protein (clone | pir\|SO6561\|S06561 | 48% | 52 | 375 | | |
| | | | | X1cGF8.2db) - African | | 47% | 52 | 375 | | |
| | | | | clawed frog (fragment) | | 47% | 52 | 375 | | |
| | | | | | | 43% | 52 | 360 | | |
| | | | | | | 49% | 109 | 375 | | |
| | | | | | | 47% | 193 | 381 | | |
| | | | | | | 72% | 19 | 51 | | |
| | | | | | | 63% | 19 | 51 | | |
| | | | | | | 66% | 25 | 51 | | |
| | | | | | | 55% | 28 | 54 | | |
| HFKIN35 | 908695 | 592 | HMMER | PFAM: Zinc finger, C2H2 | PF00096 | 86 | 270 | 338 | | |
| | | | 2.1.1 | type | | | | | | |
| | | | blastx.2 | zinc finger protein 42 | gb\|AAA59898.1\| | 55% | 3 | 341 | | |
| | | | | [Homo sapiens] | | 51% | 3 | 353 | | |
| | | | | | | 49% | 3 | 353 | | |
| | | | | | | 49% | 3 | 353 | | |
| | | | | | | 47% | 3 | 353 | | |
| | | | | | | 46% | 18 | 353 | | |
| | | | | | | 43% | 27 | 359 | | |
| | | | | | | 53% | 105 | 353 | | |
| | | | | | | 44% | 3 | 263 | | |
| | | | | | | 41% | 3 | 341 | | |
| | | | | | | 45% | 3 | 179 | | |
| HFKLV78 | 1152333 | 156 | blastx.14 | (AF132599) RANTES | gi\|4633816\|gb\|AAD | 275% | 9 | 242 | | |
| | | | | factor of late activated T | 6864.1\|AF132599_1 | 35% | 724 | 807 | | |
| | | | | lymphocytes- 1 [Homo | | | | | | |
| | | | | sapiens] | | | | | | |
| HFKLV78 | 908666 | 593 | HMMER | PFAM: Zinc finger, C2H2 | PF00096 | 59.3 | 41 | 115 | | |
| | | | 2.1.1 | type | | | | | | |
| | | | blastx.2 | (AF132599) RANTES | gb\|AAD26864.1\|AF1 | 80% | 2 | 202 | | |
| | | | | factor of late activated T | 32599_1 | 38% | 5 | 202 | | |
| | | | | lymphocytes-1 [Homo | | | | | | |
| | | | | sapiens] | | | | | | |
| HFPEG38 | 702985 | 594 | HMMER | PFAM: Zinc finger, C2H2 | PF00096 | 19.65 | 298 | 360 | | |
| | | | 1.8 | type | | | | | | |
| | | | blastx.2 | (AL050276) hypothetical | emb\|CAB43377.1\| | 99% | 1 | 372 | | |
| | | | | protein [Homo sapiens] | | | | | | |
| HFPFK09 | 1152335 | 158 | blastx.14 | (AJ245587) Kruppel-type | gi\|5730196\|emb\|CAB | 68% | 2 | 424 | | |
| | | | | zinc finger [Homo | 52547.1\| | 67% | 2 | 424 | | |
| | | | | sapiens] | | 65% | 2 | 415 | | |
| | | | | | | 61% | 5 | 424 | | |
| | | | | | | 63% | 2 | 343 | | |
| | | | | | | 58% | 44 | 424 | | |
| | | | | | | 62% | 2 | 274 | | |
| | | | | | | 51% | 20 | 124 | | |
| | | | | | | 38% | 233 | 334 | | |
| | | | | | | 43% | 317 | 406 | | |
| | | | | | | 37% | 2 | 82 | | |
| | | | | | | 66% | 5 | 40 | | |
| HFPFK09 | 909039 | 595 | HMMER | PFAM: Zinc finger, C2H2 | PF00096 | 20.13 | 249 | 299 | | |
| | | | 1.8 | type | | | | | | |
| | | | blastx.2 | zinc finger protein | gb\|AAC50254.1\| | 63% | 2 | 256 | | |
| | | | | ZNF135 [Homo sapiens] | | 60% | 5 | 280 | | |
| | | | | | | 55% | 2 | 307 | | |
| | | | | | | 62% | 2 | 265 | | |
| | | | | | | 56% | 5 | 307 | | |
| | | | | | | 56% | 2 | 280 | | |
| | | | | | | 56% | 2 | 307 | | |
| | | | | | | 57% | 2 | 274 | | |
| | | | | | | 61% | 2 | 256 | | |
| | | | | | | 56% | 23 | 307 | | |
| | | | | | | 53% | 2 | 307 | | |
| | | | | | | 57% | 2 | 265 | | |
| | | | | | | 52% | 5 | 271 | | |
| | | | | | | 61% | 2 | 220 | | |
| | | | | | | 55% | 53 | 280 | | |
| | | | | | | 38% | 135 | 359 | | |
| | | | | | | 36% | 99 | 344 | | |
| | | | | | | 40% | 135 | 344 | | |
| | | | | | | 56% | 228 | 344 | | |
| | | | | | | 48% | 228 | 344 | | |
| HFPFV06 | 1152338 | 159 | blastx.14 | (AL117462) hypothetical | gi\|5911924\|emb\|CAB | 79% | 51 | 212 | | |
| | | | | protein [Homo sapiens] | 55938.1\| | 77% | 261 | 365 | | |
| | | | | | | 48% | 531 | 659 | | |
| | | | | | | 38% | 54 | 161 | | |
| | | | | | | 39% | 267 | 350 | | |
| | | | | | | 50% | 99 | 158 | | |
| | | | | | | 34% | 288 | 365 | | |
| | | | | | | 51% | 414 | 494 | | |
| | | | | | | 26% | 581 | 658 | | |
| HFPFV06 | 933827 | 596 | HMMER | PFAM: Zinc finger, C2H2 | PF00096 | 11.97 | 322 | 390 | | |
| | | | 1.8 | type | | | | | | |
| | | | blastx.2 | (AL117462) hypothetical | emb\|CAB55938.1\| | 46% | 181 | 702 | | |
| | | | | protein [Homo sapiens] | | 70% | 80 | 178 | | |
| HFPGV06 | 1223393 | 160 | blastx.14 | IKAROS. | sp\|093581\|O93581 | 49% | 1234 | 1392 | | |
| | | | | | | 33% | 457 | 735 | | |
| | | | | | | 38% | 454 | 618 | | |
| | | | | | | 25% | 529 | 645 | | |
| | | | | | | 34% | 475 | 552 | | |
| | | | | | | 35% | 559 | 618 | | |
| | | | | | | 43% | 1126 | 1173 | | |
| | | | | | | 66% | 379 | 405 | | |
| HFPGV06 | 933817 | 597 | HMMER | PFAM: Zinc finger, C2H2 | PF00096 | 13.72 | 471 | 533 | | |
| | | | 1.8 | type | | | | | | |
| HFTBY36 | 1129412 | 161 | blastx.14 | zinc finger protein [Fugu | gi\|2618752\|gb\|AAC6 | 77% | 188 | 1147 | | |
| | | | | rubripes] | 0294.1\| | 36% | 129 | 185 | | |
| HFTBY36 | 909146 | 598 | HMMER | PFAM: Zinc finger, C2H2 | PF00096 | 98.7 | 321 | 389 | | |
| | | | 2.1.1 | type | | | | | | |
| | | | blastx.2 | zinc finger protein [Fugu | gb\|AAC60294.1\| | 74% | 6 | 437 | | |
| | | | | rubripes] | | 35% | 12 | 434 | | |
| | | | | | | 35% | 3 | 443 | | |
| | | | | | | 32% | 9 | 434 | | |
| | | | | | | 37% | 3 | 398 | | |
| | | | | | | 35% | 15 | 434 | | |
| | | | | | | 40% | 153 | 434 | | |
| | | | | | | 29% | 6 | 434 | | |
| | | | | | | 33% | 75 | 440 | | |
| | | | | | | 30% | 3 | 320 | | |
| | | | | | | 31% | 225 | 440 | | |
| HFVKA93 | 908885 | 162 | HMMER | PFAM: Zinc finger, C2H2 | PF00096 | 46.9 | 324 | 392 | | |
| | | | 2.1.1 | type | | | | | | |
| | | | blastx.2 | (AC003682) R27945_2 | gb\|AAC24607.1\| | 44% | 6 | 572 | | |
| | | | | [Homo sapiens] | | 33% | 36 | 572 | | |
| | | | | | | 34% | 36 | 572 | | |
| | | | | | | 35% | 36 | 572 | | |
| | | | | | | 33% | 36 | 572 | | |
| | | | | | | 38% | 156 | 572 | | |
| | | | | | | 40% | 156 | 572 | | |
| | | | | | | 38% | 117 | 572 | | |
| | | | | | | 33% | 36 | 542 | | |
| | | | | | | 42% | 366 | 572 | | |
| | | | | | | 31% | 36 | 320 | | |
| HGBDK80 | 909249 | 599 | HMMER | PFAM: Zinc finger, C2H2 | PF00096 | 83.8 | 79 | 147 | | |
| | | | 2.1.1 | type | | | | | | |
| | | | blastx.2 | (AC007228) BC37295_1 | gb\|AAD23607.1\|AC0 | 56% | 1 | 363 | | |
| | | | | [Homo sapiens] | 07228_2 | 54% | 1 | 366 | | |
| | | | | | | 50% | 1 | 363 | | |
| | | | | | | 50% | 1 | 366 | | |
| | | | | | | 49% | 1 | 363 | | |
| | | | | | | 47% | 1 | 363 | | |
| | | | | | | 47% | 1 | 363 | | |
| | | | | | | 44% | 1 | 363 | | |
| | | | | | | 46% | 1 | 366 | | |
| | | | | | | 50% | 1 | 306 | | |
| | | | | | | 47% | 46 | 363 | | |
| | | | | | | 56% | 1 | 237 | | |
| | | | | | | 43% | 1 | 366 | | |
| HHANU83 | 1155477 | 164 | blastx.14 | (AL110217) hypothetical | gi\|5817149\|emb\|CAB | 58% | 11 | 529 | | |
| | | | | protein [Homo sapiens] | 53677.1\| | 58% | 11 | 529 | | |
| | | | | | | 56% | 11 | 550 | | |
| | | | | | | 58% | 11 | 529 | | |
| | | | | | | 55% | 11 | 556 | | |
| | | | | | | 57% | 20 | 529 | | |
| | | | | | | 56% | 11 | 529 | | |
| | | | | | | 57% | 11 | 529 | | |
| | | | | | | 55% | 11 | 526 | | |
| | | | | | | 54% | 11 | 529 | | |
| | | | | | | 54% | 11 | 529 | | |
| | | | | | | 51% | 11 | 550 | | |
| | | | | | | 55% | 11 | 502 | | |
| | | | | | | 54% | 11 | 526 | | |
| | | | | | | 55% | 44 | 529 | | |
| | | | | | | 57% | 20 | 424 | | |
| | | | | | | 43% | 38 | 322 | | |
| | | | | | | 39% | 197 | 478 | | |
| | | | | | | 36% | 113 | 391 | | |
| | | | | | | 37% | 290 | 529 | | |
| | | | | | | 41% | 20 | 229 | | |
| | | | | | | 58% | 523 | 609 | | |
| | | | | | | 62% | 523 | 609 | | |
| | | | | | | 56% | 523 | 612 | | |
| | | | | | | 58% | 523 | 609 | | |
| | | | | | | 55% | 523 | 609 | | |
| | | | | | | 58% | 523 | 609 | | |
| | | | | | | 50% | 502 | 609 | | |
| | | | | | | 58% | 523 | 609 | | |
| | | | | | | 53% | 520 | 609 | | |
| | | | | | | 55% | 523 | 609 | | |
| | | | | | | 55% | 523 | 609 | | |
| | | | | | | 48% | 523 | 609 | | |
| | | | | | | 55% | 523 | 609 | | |
| | | | | | | 51% | 523 | 609 | | |
| | | | | | | 48% | 523 | 609 | | |
| | | | | | | 51% | 523 | 609 | | |
| | | | | | | 48% | 523 | 609 | | |
| | | | | | | 41% | 502 | 609 | | |
| | | | | | | 47% | 523 | 585 | | |
| | | | | | | 42% | 323 | 385 | | |
| | | | | | | 37% | 308 | 388 | | |
| | | | | | | 57% | 248 | 289 | | |
| | | | | | | 45% | 158 | 217 | | |
| | | | | | | 34% | 464 | 550 | | |
| | | | | | | 44% | 80 | 133 | | |
| | | | | | | 41% | 11 | 61 | | |
| | | | | | | 63% | 248 | 280 | | |
| | | | | | | 63% | 523 | 555 | | |
| HHANU83 | 909258 | 600 | HMMER | PFAM: Zinc finger, C2H2 | PF00096 | 117.4 | 172 | 240 | | |
| | | | 2.1.1 | type | | | | | | |
| | | | blastx.2 | (AL110217)hypothetical | emb\|CAB53677.1\| | 56% | 25 | 537 | | |
| | | | | protein [Homo sapiens] | | 56% | 25 | 537 | | |
| | | | | | | 54% | 25 | 537 | | |
| | | | | | | 57% | 67 | 546 | | |
| | | | | | | 57% | 67 | 537 | | |
| | | | | | | 55% | 25 | 537 | | |
| | | | | | | 56% | 67 | 546 | | |
| | | | | | | 52% | 25 | 546 | | |
| | | | | | | 53% | 25 | 537 | | |
| | | | | | | 54% | 49 | 537 | | |
| | | | | | | 54% | 67 | 537 | | |
| | | | | | | 51% | 25 | 546 | | |
| | | | | | | 54% | 67 | 537 | | |
| | | | | | | 51% | 25 | 537 | | |
| | | | | | | 52% | 73 | 534 | | |
| | | | | | | 54% | 103 | 537 | | |
| | | | | | | 56% | 67 | 450 | | |
| | | | | | | 46% | 25 | 537 | | |
| | | | | | | 55% | 25 | 351 | | |
| | | | | | | 38% | 70 | 546 | | |
| | | | | | | 39% | 67 | 537 | | |
| | | | | | | 38% | 220 | 537 | | |
| | | | | | | 36% | 115 | 453 | | |
| | | | | | | 52% | 6 | 62 | | |
| | | | | | | 50% | 6 | 59 | | |
| | | | | | | 47% | 6 | 62 | | |
| | | | | | | 55% | 6 | 59 | | |
| | | | | | | 50% | 6 | 59 | | |
| | | | | | | 47% | 6 | 62 | | |
| | | | | | | 47% | 6 | 62 | | |
| | | | | | | 55% | 6 | 59 | | |
| | | | | | | 47% | 6 | 62 | | |
| | | | | | | 42% | 6 | 62 | | |
| | | | | | | 47% | 6 | 62 | | |
| | | | | | | 47% | 6 | 62 | | |
| | | | | | | 44% | 6 | 59 | | |
| | | | | | | 47% | 6 | 62 | | |
| | | | | | | 42% | 6 | 62 | | |
| | | | | | | 42% | 6 | 62 | | |
| HHAVYO6 | 933829 | 601 | HMMER | PFAM: Zinc finger, C2H2 | PF00096 | 52.3 | 243 | 311 | | |
| | | | 2.1.1 | type | | | | | | |
| | | | blastx.2 | zinc finger protein [Mus | gb\|AAA64428.1\| | 44% | 69 | 311 | | |
| | | | | musculus] | | 40% | 69 | 311 | | |
| | | | | | | 41% | 81 | 311 | | |
| | | | | | | 38% | 69 | 311 | | |
| | | | | | | 35% | 69 | 311 | | |
| HHEKG31 | 909270 | 602 | HMMER | PFAM: Zinc finger, C2H2 | PF00096 | 59 | 79 | 147 | | |
| | | | 2.1.1 | type | | | | | | |
| | | | blastx.2 | (AC004890) similar to | gb\|AAD45824.1\|AC0 | 67% | 1 | 228 | | |
| | | | | zinc finger proteins; | 04890_1 | 53% | 1 | 240 | | |
| | | | | similar to AAC01956 | | 51% | 1 | 240 | | |
| | | | | (PTD:g2843 171) [Homo | | 45% | 1 | 240 | | |
| | | | | sapiens] | | 41% | 1 | 240 | | |
| | | | | | | 40% | 1 | 231 | | |
| | | | | | | 35% | 1 | 240 | | |
| HHENL35 | 908615 | 603 | HMMER | PFAM: Zinc finger, C2H2 | PF00096 | 7.82 | 563 | 634 | | |
| | | | 1.8 | type | | | | | | |
| | | | blastx.2 | (AK001596) unnamed | dbj\|BAA91777.1\| | 88% | 146 | 682 | | |
| | | | | protein product [Homo | | 59% | 648 | 845 | | |
| | | | | sapiens] | | 35% | 648 | 800 | | |
| | | | | | | 27% | 639 | 800 | | |
| | | | | | | 40% | 696 | 800 | | |
| | | | | | | 26% | 645 | 800 | | |
| | | | | | | 38% | 687 | 827 | | |
| | | | | | | 34% | 687 | 800 | | |
| | | | | | | 88% | 129 | 155 | | |
| | | | | | | 26% | 672 | 821 | | |
| HHESX78 | 1154643 | 168 | blastx.14 | (AF159567) C2H2 | gi\|5453423\|gb\|AAD4 | 100% | 13 | 495 | | |
| | | | | (Kruppel-type) zinc finger | 3569.1\|AF159567_1 | 53% | 58 | 387 | | |
| | | | | protein [Homo sapiens] | | 55% | 10 | 219 | | |
| | | | | | | 38% | 14 | 394 | | |
| | | | | | | 44% | 11 | 307 | | |
| | | | | | | 39% | 11 | 361 | | |
| | | | | | | 36% | 23 | 388 | | |
| | | | | | | 39% | 77 | 394 | | |
| | | | | | | 30% | 11 | 388 | | |
| | | | | | | 29% | 14 | 394 | | |
| | | | | | | 31% | 152 | 388 | | |
| | | | | | | 34% | 8 | 223 | | |
| | | | | | | 42% | 298 | 417 | | |
| | | | | | | 61% | 397 | 489 | | |
| | | | | | | 37% | 399 | 485 | | |
| | | | | | | 54% | 409 | 474 | | |
| | | | | | | 32% | 397 | 489 | | |
| | | | | | | 58% | 500 | 535 | | |
| HHESX78 | 909154 | 604 | HMMER | PFAM: Zinc finger, C2H2 | PF00096 | 103.8 | 194 | 262 | | |
| | | | 2.1.1 | type | | | | | | |
| | | | blastx.2 | (AF159567) C2H2 | gb\|AAD43569.1\|AF1 | 96% | 2 | 547 | | |
| | | | | (Kruppel-type) zinc finger | 59567_1 | 45% | 2 | 439 | | |
| | | | | protein [Homo sapiens] | | 41% | 45 | 446 | | |
| | | | | | | 40% | 48 | 413 | | |
| | | | | | | 44% | 48 | 359 | | |
| | | | | | | 35% | 48 | 440 | | |
| | | | | | | 39% | 129 | 446 | | |
| | | | | | | 30% | 48 | 440 | | |
| | | | | | | 30% | 45 | 446 | | |
| | | | | | | 31% | 204 | 440 | | |
| | | | | | | 48% | 407 | 541 | | |
| | | | | | | 60% | 552 | 596 | | |
| | | | | | | 54% | 461 | 526 | | |
| | | | | | | 32% | 449 | 541 | | |
| HHFHW96 | 914984 | 605 | HMMER | PFAM: Zinc finger, C2H2 | PF00096 | 130.3 | 530 | 598 | | |
| | | | 2.1.1 | type | | | | | | |
| | | | blastx.2 | (AL137516) hypothetical | emb\|CAB70782.1\| | 71% | 245 | 1150 | | |
| | | | | protein [Homo sapiens] | | 38% | 257 | 712 | | |
| | | | | | | 46% | 440 | 727 | | |
| | | | | | | 100% | 11 | 118 | | |
| | | | | | | 31% | 356 | 793 | | |
| | | | | | | 35% | 368 | 718 | | |
| | | | | | | 35% | 251 | 598 | | |
| | | | | | | 34% | 786 | 1157 | | |
| | | | | | | 27% | 536 | 796 | | |
| | | | | | | 25% | 579 | 1043 | | |
| | | | | | | 42% | 786 | 869 | | |
| | | | | | | 36% | 14 | 118 | | |
| | | | | | | 26% | 747 | 896 | | |
| | | | | | | 37% | 789 | 869 | | |
| | | | | | | 37% | 14 | 118 | | |
| | | | | | | 35% | 786 | 869 | | |
| | | | | | | 41% | 771 | 842 | | |
| | | | | | | 29% | 786 | 866 | | |
| | | | | | | 33% | 23 | 118 | | |
| HHFLJ65 | 908698 | 606 | HMMER | PFAM: Zinc finger, C2H2 | PF00096 | 49.4 | 5 | 76 | | |
| | | | 2.1.1 | type | | | | | | |
| | | | blastx.2 | (AF221712) Smad- and | gb\|AAF28354.1\| | 97% | 265 | 543 | | |
| | | | | Olf-interacting zinc finger | | 98% | 2 | 268 | | |
| | | | | protein [Homo sapiens] | | 35% | 5 | 250 | | |
| | | | | | | 37% | 5 | 247 | | |
| | | | | | | 32% | 5 | 274 | | |
| | | | | | | 34% | 11 | 283 | | |
| | | | | | | 28% | 5 | 280 | | |
| | | | | | | 27% | 5 | 271 | | |
| | | | | | | 35% | 268 | 453 | | |
| | | | | | | 23% | 5 | 277 | | |
| | | | | | | 36% | 277 | 420 | | |
| | | | | | | 35% | 265 | 414 | | |
| | | | | | | 31% | 271 | 420 | | |
| | | | | | | 30% | 265 | 408 | | |
| | | | | | | 27% | 271 | 420 | | |
| | | | | | | 32% | 277 | 420 | | |
| | | | | | | 34% | 274 | 420 | | |
| | | | | | | 28% | 265 | 420 | | |
| | | | | | | 37% | 265 | 366 | | |
| | | | | | | 24% | 265 | 450 | | |
| | | | | | | 33% | 277 | 420 | | |
| | | | | | | 25% | 271 | 420 | | |
| | | | | | | 43% | 271 | 339 | | |
| | | | | | | 38% | 349 | 420 | | |
| | | | | | | 30% | 274 | 420 | | |
| | | | | | | 27% | 268 | 438 | | |
| | | | | | | 37% | 170 | 262 | | |
| | | | | | | 36% | 274 | 348 | | |
| | | | | | | 38% | 167 | 244 | | |
| | | | | | | 42% | 5 | 61 | | |
| | | | | | | 28% | 349 | 453 | | |
| | | | | | | 28% | 271 | 408 | | |
| | | | | | | 33% | 343 | 531 | | |
| | | | | | | 36% | 86 | 151 | | |
| | | | | | | 47% | 277 | 327 | | |
| | | | | | | 32% | 265 | 345 | | |
| | | | | | | 31% | 355 | 486 | | |
| HHFMH56 | 1212648 | 171 | blastx.14 | developmental control | pir\|S15917\|S15917 | 88% | 136 | 939 | | |
| | | | | protein mkr1 - mouse | | 56% | 349 | 999 | | |
| | | | | | | 51% | 370 | 999 | | |
| | | | | | | 50% | 253 | 612 | | |
| | | | | | | 43% | 607 | 1014 | | |
| | | | | | | 86% | 10 | 144 | | |
| | | | | | | 28% | 40 | 207 | | |
| | | | | | | 21% | 85 | 249 | | |
| | | | | | | 47% | 28 | 78 | | |
| | | | | | | 21% | 364 | 462 | | |
| | | | | | | 28% | 1030 | 1113 | | |
| HHFMH56 | 909279 | 607 | HMMER | PFAM: Zinc finger, C2H2 | PF00096 | 68.7 | 405 | 473 | | |
| | | | 2.1.1 | type | | | | | | |
| | | | blastx.2 | finger protein (put.); | gb\|AAA37639.1\| | 78% | 3 | 575 | | |
| | | | | putative [Mus musculus] | | 40% | 63 | 569 | | |
| | | | | | | 37% | 33 | 569 | | |
| | | | | | | 39% | 21 | 566 | | |
| | | | | | | 36% | 33 | 512 | | |
| | | | | | | 64% | 523 | 570 | | |
| HHFOS26 | 931982 | 608 | HMMER | PFAM: Zinc finger, C2H2 | PF00096 | 37.01 | 360 | 422 | | |
| | | | 1.8 | type | | | | | | |
| | | | blastx.2 | (AK000424) unnamed | dbj\|BAA91155.1\| | 100% | 237 | 464 | | |
| | | | | protein product [Homo | | 36% | 135 | 461 | | |
| | | | | sapiens] | | 35% | 90 | 461 | | |
| | | | | | | 33% | 120 | 464 | | |
| | | | | | | 46% | 457 | 534 | | |
| HHFOU24 | 1227643 | 173 | blastx.14 | CDNA FLJ20086 FIS, | sp\|BAA90940\|BAA9 | 65% | 535 | 1059 | | |
| | | | | CLONE COL03629. | 0940 | 52% | 1219 | 1401 | | |
| | | | | | | 64% | 439 | 549 | | |
| | | | | | | 32% | 373 | 510 | | |
| | | | | | | 42% | 835 | 897 | | |
| | | | | | | 38% | 460 | 522 | | |
| | | | | | | 30% | 916 | 984 | | |
| | | | | | | 34% | 646 | 714 | | |
| | | | | | | 38% | 1590 | 1643 | | |
| | | | | | | 28% | 1291 | 1374 | | |
| | | | | | | 66% | 129 | 164 | | |
| HHFOU24 | 909076 | 609 | HMMER | PFAM: Zinc finger, C2H2 | PF00096 | 32.1 | 454 | 522 | | |
| | | | 2.1.1 | type | | | | | | |
| | | | blastx.2 | (AK000102) unnamed | dbj\|BAA90947.1\| | 54% | 334 | 1038 | | |
| | | | | protein product [Homo | | 37% | 7 | 180 | | |
| | | | | sapiens] | | 72% | 969 | 1022 | | |
| HHPEF49 | 810650 | 610 | HMMER | PFAM: Zinc finger, C2H2 | PF00096 | 44.7 | 9 | 77 | | |
| | | | 2.1.1 | type | | | | | | |
| | | | blastx.2 | (AC007228) R31665_2 | gb\|AAD23606.1\|AC0 | 75% | 3 | 263 | | |
| | | | | [AA 1- 673][Homo | 07228_1 | 65% | 3 | 203 | | |
| | | | | sapiens] | | 49% | 3 | 269 | | |
| | | | | | | 48% | 3 | 281 | | |
| | | | | | | 56% | 3 | 203 | | |
| | | | | | | 48% | 3 | 263 | | |
| | | | | | | 46% | 3 | 269 | | |
| | | | | | | 46% | 3 | 269 | | |
| | | | | | | 43% | 3 | 269 | | |
| | | | | | | 61% | 3 | 173 | | |
| | | | | | | 55% | 3 | 179 | | |
| | | | | | | 72% | 170 | 313 | | |
| | | | | | | 41% | 3 | 269 | | |
| | | | | | | 46% | 75 | 203 | | |
| | | | | | | 50% | 176 | 265 | | |
| | | | | | | 48% | 173 | 265 | | |
| | | | | | | 90% | 265 | 297 | | |
| | | | | | | 37% | 200 | 292 | | |
| | | | | | | 70% | 265 | 294 | | |
| | | | | | | 60% | 265 | 294 | | |
| | | | | | | 29% | 217 | 294 | | |
| | | | | | | 60% | 265 | 294 | | |
| | | | | | | 41% | 265 | 300 | | |
| HHPFL91 | 796929 | 175 | HMMER | PFAM: Zinc finger, C2H2 | PF00096 | 6.41 | 35 | 79 | | |
| | | | 1.8 | type | | | | | | |
| | | | blastx.2 | (AL049784) hypothetical | emb\|CAB42442.1\| | 44% | 2 | 469 | | |
| | | | | protein [Homo sapiens] | | | | | | |
| HHPTA82 | 694018 | 611 | HMMER | PFAM: Zinc finger, C2H2 | PF00096 | 58 | 160 | 234 | | |
| | | | 2.1.1 | type | | | | | | |
| | | | blastx.2 | (AL080125) hypothetical | emb\|CAB45723.1\| | 57% | 13 | 501 | | |
| | | | | protein [Homo sapiens] | | 53% | 13 | 501 | | |
| | | | | | | 55% | 13 | 501 | | |
| | | | | | | 45% | 16 | 564 | | |
| | | | | | | 46% | 1 | 498 | | |
| | | | | | | 47% | 10 | 501 | | |
| | | | | | | 52% | 13 | 414 | | |
| | | | | | | 44% | 13 | 501 | | |
| | | | | | | 43% | 67 | 561 | | |
| | | | | | | 43% | 148 | 501 | | |
| | | | | | | 48% | 13 | 330 | | |
| | | | | | | 52% | 13 | 231 | | |
| HHSGB32 | 909220 | 613 | HMMER | PFAM: Zinc finger, C2H2 | PF00096 | 10.3 | 238 | 285 | | |
| | | | 1.8 | type | | | | | | |
| | | | blastx.2 | (AK001753) unnamed | dbj\|BAA91884.1\| | 80% | 3 | 233 | | |
| | | | | protein product [Homo | | 65% | 18 | 236 | | |
| | | | | sapiens] | | 61% | 21 | 236 | | |
| | | | | | | 57% | 3 | 233 | | |
| | | | | | | 57% | 3 | 233 | | |
| | | | | | | 55% | 3 | 212 | | |
| | | | | | | 50% | 3 | 233 | | |
| | | | | | | 45% | 3 | 233 | | |
| | | | | | | 50% | 238 | 285 | | |
| | | | | | | 27% | 238 | 303 | | |
| HJPAY56 | 1201121 | 178 | blastx.14 | zinc finger protein kox25 - | pir\|S00754\|S00754 | 55% | 3 | 212 | | |
| | | | | human (fragment) | | 53% | 3 | 203 | | |
| | | | | | | 51% | 3 | 212 | | |
| | | | | | | 51% | 9 | 212 | | |
| | | | | | | 53% | 6 | 161 | | |
| | | | | | | 59% | 81 | 206 | | |
| | | | | | | 50% | 181 | 234 | | |
| | | | | | | 50% | 181 | 234 | | |
| | | | | | | 44% | 181 | 234 | | |
| HJPAY56 | 909242 | 614 | HMMER | PFAM: Zinc finger, C2H2 | PF00096 | 39.9 | 78 | 146 | | |
| | | | 2.1.1 | type | | | | | | |
| | | | blastx.2 | (AC004076) R30217_1 | gb\|AAB97932.1\| | 62% | 3 | 212 | | |
| | | | | [Homo sapiens] | | 64% | 3 | 206 | | |
| | | | | | | 59% | 3 | 200 | | |
| | | | | | | 54% | 3 | 206 | | |
| | | | | | | 56% | 6 | 206 | | |
| | | | | | | 47% | 9 | 212 | | |
| | | | | | | 42% | 3 | 233 | | |
| | | | | | | 43% | 18 | 212 | | |
| | | | | | | 49% | 3 | 191 | | |
| | | | | | | 40% | 21 | 212 | | |
| | | | | | | 38% | 3 | 206 | | |
| | | | | | | 43% | 21 | 191 | | |
| | | | | | | 40% | 3 | 212 | | |
| | | | | | | 43% | 12 | 212 | | |
| | | | | | | 42% | 3 | 149 | | |
| | | | | | | 42% | 3 | 149 | | |
| | | | | | | 48% | 6 | 161 | | |
| | | | | | | 37% | 69 | 212 | | |
| | | | | | | 36% | 3 | 149 | | |
| | | | | | | 39% | 166 | 234 | | |
| | | | | | | 47% | 172 | 234 | | |
| | | | | | | 38% | 172 | 234 | | |
| | | | | | | 33% | 172 | 234 | | |
| | | | | | | 44% | 181 | 234 | | |
| | | | | | | 50% | 181 | 234 | | |
| | | | | | | 55% | 181 | 234 | | |
| | | | | | | 25% | 154 | 234 | | |
| | | | | | | 50% | 181 | 234 | | |
| | | | | | | 77% | 208 | 234 | | |
| | | | | | | 44% | 181 | 234 | | |
| | | | | | | 55% | 208 | 234 | | |
| | | | | | | 46% | 190 | 234 | | |
| HJPDD85 | 961607 | 179 | HMMER | PFAM: Zinc finger, C2H2 | PF00096 | 24.7 | 250 | 312 | | |
| | | | 1.8 | type | | | | | | |
| UKAJU15 | 768022 | 615 | HMMER | PFAM: Zinc finger, C2H2 | PF00096 | 22.79 | 191 | 253 | | |
| | | | 1.8 | type | | | | | | |
| | | | blastx.2 | (AB015427) zinc finger | dbj\|BAA90526.1\| | 93% | 17 | 310 | | |
| | | | | protein 219 [Homo | | | | | | |
| | | | | sapiens] | | | | | | |
| HKAPC11 | 966122 | 616 | HMMER | PFAM: Zinc finger, C2H2 | PF00096 | 19.01 | 694 | 756 | | |
| | | | 1.8 | type | | | | | | |
| | | | blastx.2 | (AF003924) ANC_2H01 | gb\|AAF21240.1\|AF0 | 100% | 229 | 807 | | |
| | | | | [Homo sapiens] | 03924_1 | 24% | 367 | 798 | | |
| HLFBE30 | 1153895 | 182 | blastx.14 | finger protein (clone | pir\|S06576\|S06S76 | 52% | 25 | 342 | | |
| | | | | X1cGF52-1) - African | | 47% | 28 | 342 | | |
| | | | | clawed frog (fragment) | | 45% | 16 | 342 | | |
| | | | | | | 44% | 28 | 342 | | |
| | | | | | | 44% | 73 | 342 | | |
| | | | | | | 70% | 28 | 57 | | |
| HLFBE30 | 909139 | 617 | HMMER | PFAM: Zinc finger, C2H2 | PF00096 | 86.3 | 251 | 319 | | |
| | | | 2.1.1 | type | | | | | | |
| | | | blastx.2 | zinc finger protein [Mus | dbj\|BAA01477.1\| | 56% | 2 | 319 | | |
| | | | | musculus] | | 53% | 2 | 319 | | |
| | | | | | | 54% | 2 | 319 | | |
| | | | | | | 53% | 2 | 319 | | |
| | | | | | | 52% | 2 | 319 | | |
| | | | | | | 50% | 2 | 319 | | |
| | | | | | | 50% | 2 | 319 | | |
| | | | | | | 50% | 2 | 319 | | |
| | | | | | | 50% | 2 | 319 | | |
| | | | | | | 52% | 2 | 262 | | |
| | | | | | | 48% | 65 | 319 | | |
| HLHCB06 | 1150827 | 183 | blastx.14 | finger protein 1, placental | pir\|A32891\|A32891 | 63% | 796 | 446 | | |
| | | | | - human | | 61% | 799 | 446 | | |
| | | | | | | 62% | 796 | 446 | | |
| | | | | | | 60% | 799 | 446 | | |
| | | | | | | 60% | 799 | 446 | | |
| | | | | | | 57% | 799 | 446 | | |
| | | | | | | 58% | 799 | 446 | | |
| | | | | | | 57% | 799 | 446 | | |
| | | | | | | 58% | 799 | 452 | | |
| | | | | | | 55% | 796 | 446 | | |
| | | | | | | 52% | 796 | 446 | | |
| | | | | | | 53% | 784 | 446 | | |
| | | | | | | 55% | 799 | 515 | | |
| | | | | | | 56% | 796 | 680 | | |
| | | | | | | 25% | 427 | 194 | | |
| | | | | | | 28% | 433 | 206 | | |
| | | | | | | 27% | 427 | 206 | | |
| | | | | | | 25% | 427 | 206 | | |
| | | | | | | 27% | 427 | 206 | | |
| | | | | | | 25% | 427 | 206 | | |
| | | | | | | 25% | 427 | 206 | | |
| | | | | | | 25% | 427 | 206 | | |
| | | | | | | 29% | 427 | 266 | | |
| | | | | | | 29% | 427 | 266 | | |
| | | | | | | 23% | 424 | 206 | | |
| HLHCB06 | 908934 | 618 | HMMER | PFAM: Zinc finger, C2H2 | PF00096 | 80.3 | 39 | 107 | | |
| | | | 2.1.1 | type | | | | | | |
| | | | blastx.2 | Zinc-finger protein [Homo | dbj\|BAA24050.1\| | 57% | 18 | 380 | | |
| | | | | sapiens] | | 57% | 18 | 380 | | |
| | | | | | | 59% | 15 | 380 | | |
| | | | | | | 57% | 18 | 380 | | |
| | | | | | | 56% | 15 | 380 | | |
| | | | | | | 55% | 15 | 380 | | |
| | | | | | | 56% | 18 | 377 | | |
| | | | | | | 55% | 18 | 380 | | |
| | | | | | | 60% | 15 | 308 | | |
| | | | | | | 51% | 15 | 380 | | |
| | | | | | | 50% | 21 | 380 | | |
| | | | | | | 60% | 15 | 233 | | |
| | | | | | | 46% | 60 | 380 | | |
| HLJBK38 | 1189741 | 184 | blastx.14 | CACCC box-binding | gi\|388319\|gb\|AAA36 | 57% | 22 | 261 | | |
| | | | | protein [Homo sapiens] | 664.1\| | 66% | 70 | 267 | | |
| HLJBK38 | 908647 | 619 | HMMER | PFAM: Zinc finger, C2H2 | PF00096 | 40.4 | 138 | 206 | | |
| | | | 2.1.1 | type | | | | | | |
| | | | blastx.2 | CACCC box-binding | gb\|AAA36664.1\| | 56% | 3 | 239 | | |
| | | | | protein [Homo sapiens] | | 66% | 48 | 245 | | |
| HLKAA78 | 917505 | 620 | HMMER | PFAM:Zinc finger, C2H2 | PF00096 | 8.16 | 1085 | 1156 | | |
| | | | 1.8 | type | | | | | | |
| HLQEF42 | 1133655 | 186 | blastx.14 | Zinc-finger protein [Homo | gi\|2723316\|dbj\|BAA2 | 51% | 277 | 540 | | |
| | | | | sapiens] | 4050.1\| | 46% | 283 | 579 | | |
| | | | | | | 48% | 277 | 549 | | |
| | | | | | | 44% | 283 | 579 | | |
| | | | | | | 44% | 277 | 576 | | |
| | | | | | | 48% | 277 | 540 | | |
| | | | | | | 49% | 283 | 549 | | |
| | | | | | | 43% | 277 | 549 | | |
| | | | | | | 42% | 277 | 579 | | |
| | | | | | | 45% | 277 | 540 | | |
| | | | | | | 46% | 331 | 579 | | |
| | | | | | | 42% | 277 | 579 | | |
| | | | | | | 45% | 1 | 258 | | |
| | | | | | | 40% | 1 | 270 | | |
| | | | | | | 43% | 1 | 258 | | |
| | | | | | | 39% | 1 | 258 | | |
| | | | | | | 40% | 1 | 258 | | |
| | | | | | | 38% | 1 | 279 | | |
| | | | | | | 40% | 1 | 258 | | |
| | | | | | | 38% | 1 | 258 | | |
| | | | | | | 40% | 1 | 258 | | |
| | | | | | | 38% | 1 | 258 | | |
| | | | | | | 37% | 4 | 258 | | |
| | | | | | | 41% | 4 | 213 | | |
| | | | | | | 44% | 403 | 549 | | |
| | | | | | | 60% | 559 | 663 | | |
| | | | | | | 48% | 559 | 663 | | |
| | | | | | | 52% | 562 | 663 | | |
| | | | | | | 50% | 562 | 663 | | |
| | | | | | | 52% | 562 | 663 | | |
| | | | | | | 43% | 541 | 663 | | |
| | | | | | | 51% | 559 | 663 | | |
| | | | | | | 50% | 559 | 654 | | |
| | | | | | | 50% | 568 | 663 | | |
| | | | | | | 47% | 562 | 663 | | |
| | | | | | | 44% | 562 | 663 | | |
| | | | | | | 39% | 160 | 258 | | |
| | | | | | | 41% | 559 | 666 | | |
| | | | | | | 25% | 578 | 730 | | |
| | | | | | | 44% | 656 | 730 | | |
| | | | | | | 40% | 656 | 730 | | |
| | | | | | | 41% | 656 | 727 | | |
| | | | | | | 26% | 593 | 730 | | |
| | | | | | | 68% | 559 | 606 | | |
| | | | | | | 31% | 593 | 727 | | |
| | | | | | | 45% | 656 | 727 | | |
| | | | | | | 41% | 656 | 727 | | |
| | | | | | | 41% | 656 | 727 | | |
| | | | | | | 40% | 687 | 776 | | |
| | | | | | | 36% | 687 | 776 | | |
| | | | | | | 36% | 687 | 776 | | |
| | | | | | | 33% | 687 | 776 | | |
| | | | | | | 47% | 714 | 776 | | |
| | | | | | | 47% | 714 | 776 | | |
| | | | | | | 43% | 659 | 727 | | |
| | | | | | | 53% | 732 | 776 | | |
| | | | | | | 53% | 732 | 776 | | |
| | | | | | | 50% | 735 | 776 | | |
| | | | | | | 30% | 687 | 776 | | |
| | | | | | | 30% | 687 | 776 | | |
| | | | | | | 33% | 472 | 543 | | |
| | | | | | | 58% | 656 | 691 | | |
| HLQEF42 | 908907 | 621 | HMMER | PFAM: Zinc finger, C2H2 | PF00096 | 57.1 | 106 | 174 | | |
| | | | 2.1.1 | type | | | | | | |
| | | | blastx.2 | zinc finger protein | gb\|AAC50254.1\| | 45% | 4 | 399 | | |
| | | | | ZNF135 [Homo sapiens] | 43% | 4 432 | | | | |
| | | | | | | 41% | 1 | 390 | | |
| | | | | | | 41% | 1 | 399 | | |
| | | | | | | 40% | 1 | 390 | | |
| | | | | | | 42% | 1 | 375 | | |
| | | | | | | 41% | 1 | 399 | | |
| | | | | | | 42% | 4 | 378 | | |
| | | | | | | 38% | 10 | 456 | | |
| | | | | | | 50% | 402 | 662 | | |
| | | | | | | 47% | 381 | 662 | | |
| | | | | | | 46% | 402 | 653 | | |
| | | | | | | 43% | 387 | 656 | | |
| | | | | | | 42% | 381 | 662 | | |
| | | | | | | 45% | 393 | 662 | | |
| | | | | | | 42% | 381 | 662 | | |
| | | | | | | 42% | 369 | 662 | | |
| | | | | | | 41% | 387 | 662 | | |
| | | | | | | 46% | 402 | 662 | | |
| | | | | | | 41% | 393 | 662 | | |
| | | | | | | 44% | 381 | 662 | | |
| | | | | | | 43% | 1 | 258 | | |
| | | | | | | 32% | 1 | 336 | | |
| | | | | | | 50% | 381 | 539 | | |
| | | | | | | 48% | 655 | 729 | | |
| | | | | | | 43% | 640 | 729 | | |
| | | | | | | 44% | 655 | 729 | | |
| | | | | | | 41% | 637 | 729 | | |
| | | | | | | 31% | 640 | 762 | | |
| | | | | | | 43% | 640 | 729 | | |
| | | | | | | 40% | 640 | 729 | | |
| | | | | | | 44% | 655 | 729 | | |
| | | | | | | 40% | 640 | 729 | | |
| | | | | | | 44% | 655 | 729 | | |
| | | | | | | 40% | 640 | 729 | | |
| | | | | | | 45% | 658 | 729 | | |
| | | | | | | 33% | 686 | 775 | | |
| | | | | | | 33% | 686 | 775 | | |
| | | | | | | 50% | 734 | 775 | | |
| | | | | | | 26% | 686 | 775 | | |
| | | | | | | 30% | 686 | 775 | | |
| | | | | | | 47% | 725 | 775 | | |
| | | | | | | 46% | 731 | 775 | | |
| | | | | | | 26% | 686 | 775 | | |
| | | | | | | 33% | 686 | 775 | | |
| | | | | | | 26% | 686 | 775 | | |
| | | | | | | 42% | 734 | 775 | | |
| | | | | | | 66% | 387 | 422 | | |
| | | | | | | 42% | 734 | 775 | | |
| HLSDA17 | 1162851 | 187 | blastx.14 | similar to Zinc finger, | gi\|3877204\|emb\|CAA | 39% | 399 | 914 | | |
| | | | | C2H2 type; eDNA EST 1 | 94823.1\| | 47% | 927 | 1079 | | |
| | | | | 11 gene; | | 32% | 252 | 428 | | |
| | | | | | | 36% | 1114 | 1251 | | |
| | | | | | | 66% | 198 | 224 | | |
| | | | | | | 27% | 855 | 962 | | |
| | | | | | | 25% | 876 | 911 | | |
| | | | | | | 31% | 696 | 752 | | |
| HLSDA17 | 927392 | 622 | HMMER | PFAM: Zinc finger, C2H2 | PF00096 | 31.2 | 704 | 778 | | |
| | | | 2.1.1 | type | | | | | | |
| | | | blastx.2 | similar to Zinc finger, | emb\|CAA94823.1\| | 36% | 194 | 1363 | | |
| | | | | C2H2 type; eDNA EST | | | | | | |
| | | | | EMBL:D27516 comes 11 | | | | | | |
| | | | | gene; cDNA EST | | | | | | |
| | | | | EMBL:T02163 comes | | | | | | |
| | | | | from this gene; | | | | | | |
| HLTIB64 | 1228119 | 188 | blastx.14 | AE-1 BINDING | sp\|Q9Z248\|Q9Z248 | 89% | 3 | 599 | | |
| | | | | PROTEIN AEBP2. | | | | | | |
| HLTIB64 | 958156 | 623 | HMMER | PFAM: Zinc finger, C2H2 | PF00096 | 15.76 | 72 | 140 | | |
| | | | 1.8 | type | | | | | | |
| | | | blastx.2 | (AF090326) AE-1 binding | gb\|AAD02854.1\| | 85% | 72 | 452 | | |
| | | | | protein AEBP2 [Mus | | 100% | 2 | 67 | | |
| | | | | musculus] | | 88% | 453 | 479 | | |
| HLTIL56 | 909187 | 624 | HMMER | PFAM: Zinc finger, C2H2 | PF00096 | 93.3 | 295 | 363 | | |
| | | | 2.1.1 | type | | | | | | |
| | | | blastx.2 | (AL031393) dJ733D15.1 | emb\|CAA20564.1\| | 57% | 4 | 543 | | |
| | | | | (Zinc-finger protein) | | 56% | 1 | 552 | | |
| | | | | [Homo sapiens] | | 52% | 22 | 552 | | |
| | | | | | | 46% | 1 | 552 | | |
| | | | | | | 49% | 1 | 552 | | |
| | | | | | | 59% | 178 | 549 | | |
| | | | | | | 41% | 1 | 552 | | |
| | | | | | | 56% | 184 | 531 | | |
| | | | | | | 43% | 121 | 552 | | |
| | | | | | | 45% | 1 | 291 | | |
| | | | | | | 45% | 108 | 467 | | |
| HLWAF59 | 1194725 | 190 | blastx.14 | hypothetical protein | pir\|T24396\|T24396 | 47% | 654 | 755 | | |
| | | | | T03F6.2 - Caenorhabditis | | 47% | 654 | 755 | | |
| | | | | elegans | | 54% | 1158 | 1229 | | |
| | | | | | | 45% | 3 | 62 | | |
| | | | | | | 28% | 1158 | 1232 | | |
| HLWAF59 | 944901 | 625 | HMMER | PEAM: Zinc finger, C2H2 | PF00096 | 16.02 | 706 | 774 | | |
| | | | 1.8 | type | | | | | | |
| | | | blastx.2 | similar to DnaJ, | emb\|CAB03279.1\| | 39% | 55 | 576 | | |
| | | | | prokaryotic heat shock | | 41% | 706 | 855 | | |
| | | | | protein, Zinc finger, 11 | | | | | | |
| | | | | gene; cDNAEST | | | | | | |
| | | | | yk474e4.5 comes from | | | | | | |
| | | | | this gene; cDNA | | | | | | |
| HLWAZ29 | 876461 | 626 | HMMER | PFAM: Zinc finger, C2H2 | PF00096 | 8.77 | 222 | 287 | | |
| | | | 1.8 | type | | | | | | |
| HLWBU16 | 1162853 | 192 | blastx.14 | similar to Human Zinc | gi\|1510147\|dbj\|BAA1 | 34% | 824 | 997 | | |
| | | | | finger protein(ZNFl42) | 3242.1\| | 30% | 56 | 244 | | |
| | | | | [Homo sapiens] | | 28% | 2 | 235 | | |
| | | | | | | 37% | 827 | 970 | | |
| | | | | | | 36% | 830 | 970 | | |
| | | | | | | 25% | 8 | 244 | | |
| | | | | | | 29% | 824 | 967 | | |
| | | | | | | 28% | 821 | 970 | | |
| | | | | | | 27% | 800 | 964 | | |
| | | | | | | 26% | 788 | 979 | | |
| | | | | | | 27% | 464 | 658 | | |
| | | | | | | 28% | 821 | 967 | | |
| | | | | | | 26% | 503 | 691 | | |
| | | | | | | 37% | 146 | 256 | | |
| | | | | | | 28% | 497 | 643 | | |
| | | | | | | 37% | 536 | 640 | | |
| | | | | | | 25% | 86 | 247 | | |
| | | | | | | 31% | 14 | 157 | | |
| | | | | | | 25% | 503 | 679 | | |
| | | | | | | 27% | 824 | 964 | | |
| | | | | | | 29% | 11 | 142 | | |
| | | | | | | 25% | 50 | 238 | | |
| | | | | | | 39% | 689 | 787 | | |
| | | | | | | 38% | 140 | 232 | | |
| | | | | | | 29% | 413 | 598 | | |
| | | | | | | 25% | 71 | 247 | | |
| | | | | | | 30% | 548 | 655 | | |
| | | | | | | 35% | 497 | 613 | | |
| | | | | | | 40% | 155 | 235 | | |
| | | | | | | 24% | 59 | 244 | | |
| | | | | | | 42% | 68 | 145 | | |
| | | | | | | 34% | 887 | 964 | | |
| | | | | | | 27% | 503 | 601 | | |
| | | | | | | 19% | 572 | 754 | | |
| | | | | | | 38% | 887 | 979 | | |
| | | | | | | 40% | 155 | 259 | | |
| | | | | | | 33% | 908 | 997 | | |
| | | | | | | 32% | 146 | 247 | | |
| | | | | | | 33% | 113 | 229 | | |
| | | | | | | 40% | 68 | 148 | | |
| | | | | | | 34% | 812 | 880 | | |
| | | | | | | 26% | 626 | 775 | | |
| | | | | | | 33% | 497 | 568 | | |
| | | | | | | 44% | 827 | 880 | | |
| | | | | | | 37% | 812 | 883 | | |
| | | | | | | 22% | 788 | 892 | | |
| | | | | | | 26% | 653 | 787 | | |
| | | | | | | 40% | 824 | 883 | | |
| | | | | | | 35% | 674 | 766 | | |
| | | | | | | 36% | 8 | 73 | | |
| | | | | | | 23% | 503 | 667 | | |
| | | | | | | 30% | 902 | 979 | | |
| | | | | | | 35% | 1160 | 1243 | | |
| | | | | | | 24% | 653 | 787 | | |
| | | | | | | 31% | 566 | 670 | | |
| | | | | | | 32% | 569 | 652 | | |
| | | | | | | 37% | 77 | 157 | | |
| | | | | | | 28% | 68 | 151 | | |
| | | | | | | 42% | 11 | 73 | | |
| | | | | | | 27% | 461 | 571 | | |
| | | | | | | 30% | 155 | 253 | | |
| | | | | | | 36% | 1160 | 1234 | | |
| | | | | | | 39% | 1163 | 1231 | | |
| | | | | | | 34% | 812 | 880 | | |
| | | | | | | 36% | 830 | 895 | | |
| | | | | | | 29% | 488 | 568 | | |
| | | | | | | 25% | 68 | 151 | | |
| | | | | | | 39% | 584 | 652 | | |
| | | | | | | 30% | 581 | 670 | | |
| | | | | | | 26% | 566 | 643 | | |
| | | | | | | 33% | 71 | 151 | | |
| | | | | | | 27% | 503 | 568 | | |
| | | | | | | 40% | 680 | 754 | | |
| | | | | | | 28% | 908 | 982 | | |
| | | | | | | 42% | 824 | 880 | | |
| | | | | | | 24% | 14 | 136 | | |
| | | | | | | 25% | 56 | 163 | | |
| | | | | | | 31% | 179 | 274 | | |
| | | | | | | 24% | 827 | 925 | | |
| | | | | | | 27% | 548 | 655 | | |
| | | | | | | 26% | 14 | 115 | | |
| | | | | | | 35% | 548 | 607 | | |
| | | | | | | 31% | 905 | 970 | | |
| | | | | | | 27% | 638 | 745 | | |
| | | | | | | 31% | 668 | 763 | | |
| | | | | | | 33% | 692 | 754 | | |
| | | | | | | 34% | 2 | 70 | | |
| | | | | | | 22% | 668 | 787 | | |
| | | | | | | 26% | 80 | 157 | | |
| | | | | | | 32% | 887 | 970 | | |
| | | | | | | 29% | 500 | 571 | | |
| | | | | | | 38% | 89 | 151 | | |
| | | | | | | 31% | 86 | 151 | | |
| | | | | | | 35% | 14 | 73 | | |
| | | | | | | 28% | 689 | 763 | | |
| | | | | | | 29% | 497 | 568 | | |
| | | | | | | 26% | 80 | 157 | | |
| | | | | | | 21% | 35 | 145 | | |
| | | | | | | 25% | 68 | 151 | | |
| | | | | | | 34% | 566 | 643 | | |
| | | | | | | 36% | 1166 | 1231 | | |
| | | | | | | 33% | 2 | 73 | | |
| | | | | | | 30% | 890 | 967 | | |
| | | | | | | 38% | 500 | 553 | | |
| | | | | | | 29% | 692 | 742 | | |
| | | | | | | 29% | 155 | 247 | | |
| | | | | | | 33% | 71 | 142 | | |
| | | | | | | 25% | 863 | 970 | | |
| | | | | | | 20% | 53 | 142 | | |
| | | | | | | 38% | 780 | 818 | | |
| | | | | | | 23% | 554 | 667 | | |
| | | | | | | 38% | 170 | 232 | | |
| | | | | | | 31% | 92 | 157 | | |
| | | | | | | 28% | 170 | 244 | | |
| | | | | | | 33% | 692 | 754 | | |
| | | | | | | 29% | 1163 | 1234 | | |
| | | | | | | 22% | 890 | 982 | | |
| | | | | | | 34% | 119 | 187 | | |
| | | | | | | 29% | 503 | 553 | | |
| | | | | | | 34% | 1166 | 1234 | | |
| | | | | | | 33% | 692 | 745 | | |
| | | | | | | 31% | 680 | 745 | | |
| | | | | | | 21% | 1124 | 1234 | | |
| | | | | | | 35% | 1172 | 1231 | | |
| | | | | | | 27% | 173 | 238 | | |
| | | | | | | 29% | 152 | 244 | | |
| | | | | | | 28% | 146 | 250 | | |
| | | | | | | 27% | 8 | 73 | | |
| | | | | | | 27% | 488 | 553 | | |
| | | | | | | 30% | 14 | 73 | | |
| | | | | | | 28% | 680 | 742 | | |
| | | | | | | 30% | 588 | 716 | | |
| | | | | | | 20% | 449 | 592 | | |
| | | | | | | 26% | 1286 | 1423 | | |
| | | | | | | 31% | 1160 | 1225 | | |
| | | | | | | 27% | 830 | 895 | | |
| | | | | | | 28% | 83 | 157 | | |
| | | | | | | 32% | 1160 | 1234 | | |
| | | | | | | 25% | 488 | 559 | | |
| | | | | | | 28% | 83 | 145 | | |
| HLWBU16 | 908886 | 627 | HMMER | PFAM: Zinc finger, C2H2 | PF00096 | 14.36 | 81 | 146 | | |
| | | | 1.8 | type | | | | | | |
| HLYAB58 | 1155403 | 193 | blastx.14 | (AF039698) antigen NY- | gi\|3170196\|gb\|AAC1 | 80% | 21 | 410 | | |
| | | | | CO-33 [Homo sapiens] | 8047.11 | 39% | 411 | 539 | | |
| HLYAB58 | 885463 | 628 | HMMER | PFAM: Zinc finger, C2H2 | PF00096 | 15.56 | 386 | 448 | | |
| | | | 1.8 | type | | | | | | |
| | | | blastx.2 | (AF039698) antigen NY- | gb\|AAC18047.1\| | 63% | 23 | 622 | | |
| | | | | CO-33 [Homo sapiens] | | | | | | |
| HLYAFO4 | 972743 | 629 | HMMER | PFAM: Ubiquitin | PF00442 | 26.2 | 777 | 842 | | |
| | | | 2.1.1 | carboxyl-terminal | | | | | | |
| | | | | hydrolases family 2 | | | | | | |
| | | | blastx.2 | (AF040640) Contains | gb\|AAD34652.1\|AF0 | 63% | 246 | 1085 | | |
| | | | | similarity to Pfam | 40640_1 | | | | | |
| | | | | domain: 1 elegans] | | | | | | |
| HLYCL13 | 656829 | 195 | HMMER | PFAM: Zinc finger, C2H2 | PF00096 | 8.7 | 73 | 141 | | |
| | | | 1.8 | type | | | | | | |
| HMACX62 | 908611 | 196 | HMMER | PFAM: Zinc finger, C2H2 | PF00096 | 13.33 | 328 | 396 | | |
| | | | 1.8 | type | | | | | | |
| | | | blastx.2 | (AB017615) Eos protein | dbj\|BAA36213.1\| | 88% | 10 | 405 | | |
| | | | | [Mus museums] | | | | | | |
| HMAGK54 | 915304 | 630 | HMMER | PFAM: Zinc finger, C2H2 | PF00096 | 8.35 | 255 | 317 | | |
| | | | 1.8 | type | | | | | | |
| | | | blastx.2 | (AL117462) hypothetical | emb\|CAB5593 8.1\| | 91% | 3 | 446 | | |
| | | | | protein [Homo sapiens] | | 60% | 559 | 627 | | |
| HMCDT29 | 1189009 | 198 | blastx.14 | zinc finger protein [Mus | gi\|220637\|dbj\|BAA01 | 65% | 9 | 392 | | |
| | | | | musculus] | 477.1\| | 63% | 9 | 392 | | |
| | | | | | | 64% | 9 | 392 | | |
| | | | | | | 64% | 9 | 392 | | |
| | | | | | | 63% | 9 | 395 | | |
| | | | | | | 62% | 9 | 392 | | |
| | | | | | | 60% | 9 | 392 | | |
| | | | | | | 59% | 9 | 392 | | |
| | | | | | | 62% | 54 | 392 | | |
| | | | | | | 61% | 9 | 335 | | |
| | | | | | | 45% | 1107 | 1205 | | |
| | | | | | | 46% | 1107 | 1196 | | |
| | | | | | | 43% | 1107 | 1196 | | |
| | | | | | | 46% | 1107 | 1196 | | |
| | | | | | | 48% | 1107 | 1187 | | |
| | | | | | | 43% | 1107 | 1196 | | |
| | | | | | | 43% | 1107 | 1196 | | |
| | | | | | | 45% | 1107 | 1172 | | |
| | | | | | | 30% | 1425 | 1583 | | |
| | | | | | | 30% | 1425 | 1583 | | |
| | | | | | | 28% | 1425 | 1583 | | |
| | | | | | | 50% | 431 | 496 | | |
| | | | | | | 28% | 1425 | 1583 | | |
| | | | | | | 25% | 1425 | 1592 | | |
| | | | | | | 26% | 1425 | 1583 | | |
| | | | | | | 45% | 431 | 496 | | |
| | | | | | | 45% | 431 | 496 | | |
| | | | | | | 45% | 431 | 496 | | |
| | | | | | | 85% | 1745 | 1765 | | |
| | | | | | | 25% | 1425 | 1580 | | |
| | | | | | | 50% | 1656 | 1709 | | |
| HMCDT29 | 909042 | 631 | HMMER | PFAM: Zinc finger, C2H2 | PF00096 | 115 | 240 | 308 | | |
| | | | 2.1.1 | type | | | | | | |
| | | | blastx.2 | zinc finger protein | gb\|AAC50254.1\| | 64% | 9 | 392 | | |
| | | | | ZNF135 [Homo sapiens] | | 64% | 9 | 392 | | |
| | | | | | | 64% | 9 | 392 | | |
| | | | | | | 62% | 9 | 398 | | |
| | | | | | | 61% | 3 | 392 | | |
| | | | | | | 59% | 3 | 392 | | |
| | | | | | | 58% | 9 | 392 | | |
| | | | | | | 52% | 9 | 461 | | |
| | | | | | | 60% | 9 | 392 | | |
| | | | | | | 59% | 9 | 392 | | |
| | | | | | | 57% | 9 | 392 | | |
| | | | | | | 57% | 9 | 392 | | |
| | | | | | | 59% | 63 | 392 | | |
| | | | | | | 64% | 18 | 314 | | |
| HMEIY94 | 908618 | 199 | HMMER | PFAM: Zinc finger, C2H2 | PF00096 | 115.1 | 252 | 320 | | |
| | | | 2.1.1 | type | | | | | | |
| | | | blastx.2 | (AK001753) unnamed | dbj\|BAA91884.1\| | 66% | 18 | 467 | | |
| | | | | protein product [Homo | | 62% | 18 | 470 | | |
| | | | | sapiens] | | 53% | 18 | 473 | | |
| | | | | | | 57% | 21 | 416 | | |
| | | | | | | 59% | 21 | 335 | | |
| | | | | | | 38% | 6 | 467 | | |
| | | | | | | 53% | 18 | 251 | | |
| | | | | | | 33% | 39 | 473 | | |
| HMHBN01 | 1204940 | 200 | blastx.14 | CDNA FLJ20755 FIS, | sp\|BAA91367\|BAA9 | 40% | 1078 | 1167 | | |
| | | | | CLONE HEP01924. | 1367 | 36% | 1078 | 1167 | | |
| | | | | | | 46% | 1090 | 1167 | | |
| | | | | | | 38% | 1300 | 1377 | | |
| | | | | | | 42% | 1300 | 1377 | | |
| | | | | | | 40% | 565 | 660 | | |
| | | | | | | 36% | 1300 | 1389 | | |
| | | | | | | 40% | 1177 | 1242 | | |
| | | | | | | 30% | 1078 | 1167 | | |
| | | | | | | 44% | 499 | 579 | | |
| | | | | | | 41% | 1090 | 1161 | | |
| | | | | | | 39% | 1174 | 1242 | | |
| | | | | | | 33% | 1300 | 1380 | | |
| | | | | | | 44% | 1306 | 1380 | | |
| | | | | | | 34% | 493 | 570 | | |
| | | | | | | 34% | 349 | 417 | | |
| | | | | | | 31% | 493 | 579 | | |
| | | | | | | 32% | 763 | 837 | | |
| | | | | | | 34% | 493 | 579 | | |
| | | | | | | 37% | 1090 | 1161 | | |
| | | | | | | 34% | 493 | 579 | | |
| | | | | | | 26% | 340 | 417 | | |
| | | | | | | 40% | 763 | 837 | | |
| | | | | | | 37% | 766 | 837 | | |
| | | | | | | 42% | 1180 | 1242 | | |
| | | | | | | 32% | 763 | 837 | | |
| | | | | | | 25% | 568 | 660 | | |
| | | | | | | 33% | 355 | 417 | | |
| | | | | | | 32% | 763 | 837 | | |
| | | | | | | 33% | 766 | 837 | | |
| | | | | | | 40% | 598 | 663 | | |
| | | | | | | 34% | 1174 | 1242 | | |
| | | | | | | 36% | 1177 | 1242 | | |
| | | | | | | 35% | 598 | 657 | | |
| | | | | | | 22% | 568 | 660 | | |
| | | | | | | 38% | 1325 | 1363 | | |
| HMHBN01 | 917252 | 632 | HMMER | PFAM: Zinc finger, C2H2 | PF00096 | 14.72 | 346 | 408 | | |
| | | | 1.8 | type | | | | | | |
| HMIBG02 | 919595 | 633 | HMMER | PFAM: Zinc finger, C2H2 | PF00096 | 6.78 | 7 | 72 | | |
| | | | 1.8 | type | | | | | | |
| HMQDJ89 | 1153906 | 202 | blastx.14 | zinc finger protein [Mus | gi\|220643\|dbj\|BAA01 | 47% | 104 | 331 | | |
| | | | | musculus] | 478.1\| | 50% | 104 | 331 | | |
| | | | | | | 44% | 349 | 570 | | |
| | | | | | | 48% | 107 | 331 | | |
| | | | | | | 46% | 104 | 331 | | |
| | | | | | | 44% | 346 | 570 | | |
| | | | | | | 46% | 104 | 331 | | |
| | | | | | | 47% | 349 | 570 | | |
| | | | | | | 42% | 104 | 331 | | |
| | | | | | | 51% | 140 | 331 | | |
| | | | | | | 43% | 349 | 570 | | |
| | | | | | | 43% | 349 | 570 | | |
| | | | | | | 37% | 349 | 570 | | |
| | | | | | | 42% | 104 | 331 | | |
| | | | | | | 40% | 349 | 570 | | |
| | | | | | | 39% | 349 | 570 | | |
| | | | | | | 40% | 104 | 331 | | |
| | | | | | | 42% | 388 | 570 | | |
| | | | | | | 42% | 349 | 495 | | |
| | | | | | | 58% | 11 | 61 | | |
| | | | | | | 47% | 11 | 61 | | |
| | | | | | | 52% | 11 | 61 | | |
| | | | | | | 41% | 11 | 61 | | |
| | | | | | | 47% | 11 | 61 | | |
| | | | | | | 47% | 11 | 61 | | |
| | | | | | | 50% | 14 | 61 | | |
| | | | | | | 35% | 11 | 61 | | |
| HMQDJ89 | 908952 | 634 | HMMER | PFAM: Zinc finger, C2H2 | PF00096 | 127.5 | 741 | 673 | | |
| | | | | 2.1.1 | type | | | | | |
| | | | blastx.2 | zinc finger protein | gb\|AAC50261.1\| | 42% | 879 | 340 | | |
| | | | | ZNF136 [Homo sapiens] | | 44% | 807 | 340 | | |
| | | | | | | 40% | 807 | 340 | | |
| | | | | | | 43% | 783 | 340 | | |
| | | | | | | 42% | 879 | 400 | | |
| | | | | | | 38% | 879 | 340 | | |
| | | | | | | 39% | 807 | 340 | | |
| | | | | | | 37% | 807 | 340 | | |
| | | | | | | 38% | 807 | 340 | | |
| HMTMC64 | 909081 | 203 | HMMER | PFAM: Zinc finger, C2H2 | PF00096 | 51.3 | 274 | 342 | | |
| | | | 2.1.1 | type | | | | | | |
| HMUAL10 | 909199 | 635 | HMMER | PFAM: Zinc finger, C2H2 | PF00096 | 14.19 | 190 | 231 | | |
| | | | 1.8 | type | | | | | | |
| | | | blastx.2 | zinc finger protein | gb\|AAC50254.1\| | 46% | 30 | 323 | | |
| | | | | ZNF135 [Homo sapiens] | | 45% | 30 | 311 | | |
| | | | | | | 44% | 30 | 320 | | |
| | | | | | | 44% | 30 | 323 | | |
| | | | | | | 45% | 30 | 311 | | |
| | | | | | | 53% | 30 | 218 | | |
| | | | | | | 44% | 30 | 308 | | |
| | | | | | | 44% | 30 | 308 | | |
| | | | | | | 67% | 30 | 176 | | |
| | | | | | | 41% | 30 | 308 | | |
| | | | | | | 41% | 30 | 311 | | |
| | | | | | | 38% | 30 | 308 | | |
| | | | | | | 34% | 30 | 308 | | |
| | | | | | | 52% | 30 | 173 | | |
| | | | | | | 52% | 190 | 315 | | |
| | | | | | | 64% | 190 | 231 | | |
| HMUAY64 | 909276 | 636 | HMMER | PFAM: Zinc finger, C2H2 | PF00096 | 36.8 | 198 | 266 | | |
| | | | 2.1.1 | type | | | | | | |
| | | | blastx.2 | (AF091457) zinc finger | gb\|AAD22522.1\|AF0 | 77% | 15 | 554 | | |
| | | | | protein RIN ZF[Rattus | 91457_1 | 73% | 15 | 59 | | |
| | | | | norvegicus] | | 83% | 18 | 53 | | |
| HMUBM26 | 1070974 | 206 | blastx.14 | zinc finger protein C2H2- | gi\|1199604\|gb\|AAA9 | 60% | 276 | 605 | | |
| | | | | 25 [Homo sapiens] | 3261.1\| | 60% | 276 | 605 | | |
| | | | | | | 56% | 276 | 608 | | |
| | | | | | | 57% | 276 | 605 | | |
| | | | | | | 54% | 276 | 605 | | |
| | | | | | | 54% | 276 | 605 | | |
| | | | | | | 63% | 276 | 524 | | |
| | | | | | | 50% | 276 | 605 | | |
| | | | | | | 46% | 285 | 605 | | |
| | | | | | | 61% | 3 | 179 | | |
| | | | | | | 59% | 9 | 179 | | |
| | | | | | | 59% | 3 | 179 | | |
| | | | | | | 59% | 9 | 179 | | |
| | | | | | | 59% | 9 | 179 | | |
| | | | | | | 57% | 9 | 179 | | |
| | | | | | | 57% | 9 | 179 | | |
| | | | | | | 52% | 9 | 179 | | |
| | | | | | | 54% | 9 | 179 | | |
| | | | | | | 50% | 9 | 179 | | |
| | | | | | | 38% | 336 | 524 | | |
| | | | | | | 34% | 30 | 179 | | |
| | | | | | | 48% | 529 | 639 | | |
| | | | | | | 47% | 529 | 636 | | |
| | | | | | | 44% | 529 | 636 | | |
| | | | | | | 41% | 529 | 636 | | |
| | | | | | | 38% | 529 | 636 | | |
| | | | | | | 38% | 529 | 636 | | |
| | | | | | | 38% | 529 | 636 | | |
| | | | | | | 33% | 529 | 636 | | |
| | | | | | | 33% | 529 | 636 | | |
| HMUBM26 | 908912 | 637 | HMMER | PFAM: Zinc finger, C2H2 | PF00096 | 119.7 | 269 | 337 | | |
| | | | 2.1.1 | type | | | | | | |
| | | | blastx.2 | zinc finger protein C2H2- | gb\|AAA93261.1\| | 61% | 2 | 508 | | |
| | | | | 25 [Homo sapiens] | | 62% | 2 | 460 | | |
| | | | | | | 60% | 8 | 460 | | |
| | | | | | | 60% | 8 | 460 | | |
| | | | | | | 59% | 8 | 460 | | |
| | | | | | | 59% | 8 | 460 | | |
| | | | | | | 61% | 8 | 436 | | |
| | | | | | | 50% | 29 | 460 | | |
| | | | | | | 51% | 167 | 460 | | |
| | | | | | | 40% | 251 | 460 | | |
| | | | | | | 28% | 254 | 478 | | |
| | | | | | | 83% | 511 | 564 | | |
| | | | | | | 72% | 511 | 564 | | |
| | | | | | | 72% | 511 | 564 | | |
| | | | | | | 66% | 511 | 564 | | |
| | | | | | | 64% | 511 | 561 | | |
| | | | | | | 61% | 511 | 564 | | |
| | | | | | | 68% | 511 | 558 | | |
| | | | | | | 68% | 456 | 512 | | |
| | | | | | | 63% | 456 | 512 | | |
| | | | | | | 63% | 456 | 512 | | |
| | | | | | | 50% | 511 | 564 | | |
| | | | | | | 61% | 511 | 564 | | |
| | | | | | | 68% | 456 | 512 | | |
| | | | | | | 57% | 456 | 512 | | |
| | | | | | | 57% | 456 | 512 | | |
| | | | | | | 63% | 456 | 512 | | |
| | | | | | | 57% | 456 | 512 | | |
| | | | | | | 47% | 456 | 512 | | |
| | | | | | | 55% | 459 | 512 | | |
| HMVBE04 | 1228121 | 207 | blastx.14 | Cas-associated zinc finger | sp\|BAA89664\|BAA8 | 82% | 102 | 524 | | |
| | | | | protein. | 9664 | 79% | 30 | 263 | | |
| | | | | | | 39% | 96 | 284 | | |
| | | | | | | 42% | 30 | 206 | | |
| | | | | | | 28% | 117 | 455 | | |
| | | | | | | 47% | 183 | 290 | | |
| | | | | | | 34% | 297 | 437 | | |
| | | | | | | 35% | 291 | 452 | | |
| | | | | | | 42% | 186 | 290 | | |
| | | | | | | 48% | 450 | 530 | | |
| | | | | | | 40% | 447 | 527 | | |
| | | | | | | 29% | 447 | 527 | | |
| | | | | | | 26% | 450 | 527 | | |
| | | | | | | 40% | 1088 | 1153 | | |
| | | | | | | 50% | 1471 | 1512 | | |
| | | | | | | 77% | 72 | 98 | | |
| | | | | | | 29% | 635 | 757 | | |
| | | | | | | 43% | 623 | 670 | | |
| HMVBE04 | 909273 | 638 | HMMER | PFAM: Zinc finger, C2H2 | PF00096 | 37.1 | 108 | 176 | | |
| | | | 2.1.1 | type | | | | | | |
| | | | blastx.2 | (AB019281) Cas- | dbj\|BAA89664.1\| | 79% | 30 | 188 | | |
| | | | | associated zinc finger | | 83% | 191 | 352 | | |
| | | | | protein [Rattus | | 60% | 18 | 188 | | |
| | | | | norvegicus] | | 59% | 191 | 322 | | |
| | | | | | | 48% | 191 | 325 | | |
| | | | | | | 48% | 191 | 325 | | |
| | | | | | | 43% | 30 | 182 | | |
| | | | | | | 44% | 30 | 176 | | |
| | | | | | | 46% | 191 | 325 | | |
| | | | | | | 39% | 185 | 322 | | |
| | | | | | | 37% | 18 | 176 | | |
| | | | | | | 21% | 185 | 376 | | |
| | | | | | | 26% | 191 | 313 | | |
| | | | | | | 80% | 348 | 377 | | |
| UMVCA78 | 908600 | 639 | HMMER | PFAM: KRAB box | PF01352 | | | | | |
| | | | 2.1.1 | | | | | | | |
| | | | blastx.2 | pMLZ-4 [Mus musculus] | gb\|AAA39949.1\| | 86% | 357 | 647 | | |
| | | | | | | 54% | 435 | 647 | | |
| | | | | | | 55% | 438 | 647 | | |
| | | | | | | 45% | 444 | 647 | | |
| | | | | | | 50% | 444 | 647 | | |
| | | | | | | 50% | 444 | 620 | | |
| | | | | | | 48% | 405 | 620 | | |
| | | | | | | 47% | 444 | 647 | | |
| | | | | | | 47% | 444 | 647 | | |
| | | | | | | 43% | 435 | 647 | | |
| | | | | | | 73% | 613 | 681 | | |
| | | | | | | 68% | 613 | 687 | | |
| | | | | | | 60% | 613 | 687 | | |
| | | | | | | 39% | 671 | 739 | | |
| HMWEH92 | 1204941 | 209 | blastx.14 | zinc finger protein ZNF7 - | pir\|A34612\|A34612 | 60% | 354 | 971 | | |
| | | | | human | | 58% | 441 | 1058 | | |
| | | | | | | 53% | 261 | 887 | | |
| | | | | | | 54% | 186 | 803 | | |
| | | | | | | 59% | 510 | 1091 | | |
| | | | | | | 54% | 129 | 719 | | |
| | | | | | | 61% | 468 | 896 | | |
| | | | | | | 61% | 531 | 980 | | |
| | | | | | | 62% | 636 | 1067 | | |
| | | | | | | 60% | 300 | 728 | | |
| | | | | | | 58% | 387 | 812 | | |
| | | | | | | 51% | 198 | 644 | | |
| | | | | | | 55% | 135 | 560 | | |
| | | | | | | 58% | 720 | 1091 | | |
| | | | | | | 59% | 786 | 1091 | | |
| | | | | | | 51% | 135 | 386 | | |
| | | | | | | 54% | 351 | 554 | | |
| | | | | | | 55% | 849 | 1052 | | |
| | | | | | | 51% | 597 | 806 | | |
| | | | | | | 48% | 681 | 890 | | |
| | | | | | | 52% | 771 | 974 | | |
| | | | | | | 45% | 429 | 638 | | |
| | | | | | | 42% | 513 | 722 | | |
| | | | | | | 47% | 126 | 302 | | |
| | | | | | | 42% | 258 | 470 | | |
| | | | | | | 48% | 135 | 308 | | |
| | | | | | | 37% | 183 | 380 | | |
| | | | | | | 54% | 972 | 1103 | | |
| | | | | | | 37% | 939 | 1091 | | |
| | | | | | | 44% | 1020 | 1100 | | |
| | | | | | | 28% | 108 | 221 | | |
| | | | | | | 39% | 651 | 719 | | |
| | | | | | | 43% | 399 | 467 | | |
| | | | | | | 34% | 567 | 635 | | |
| | | | | | | 36% | 906 | 971 | | |
| | | | | | | 34% | 819 | 887 | | |
| | | | | | | 36% | 315 | 389 | | |
| | | | | | | 47% | 738 | 788 | | |
| | | | | | | 28% | 231 | 305 | | |
| | | | | | | 26% | 483 | 551 | | |
| | | | | | | 46% | 129 | 167 | | |
| | | | | | | 29% | 204 | 275 | | |
| | | | | | | 26% | 1023 | 1100 | | |
| HMWEH92 | 909151 | 640 | HMMER | PFAM: Zinc finger, C2H2 | PF00096 | 47.8 | 145 | 213 | | |
| | | | 2.1.1 | type | | | | | | |
| | | | blastx.2 | pMLZ-4 [Mus musculus] | gb\|AAA39949.1\| | 53% | 130 | 336 | | |
| | | | | | | 47% | 136 | 396 | | |
| | | | | | | 50% | 136 | 351 | | |
| | | | | | | 41% | 124 | 396 | | |
| | | | | | | 49% | 136 | 336 | | |
| | | | | | | 51% | 124 | 351 | | |
| | | | | | | 44% | 85 | 336 | | |
| | | | | | | 50% | 124 | 330 | | |
| | | | | | | 47% | 136 | 336 | | |
| | | | | | | 48% | 151 | 351 | | |
| | | | | | | 50% | 124 | 297 | | |
| | | | | | | 38% | 184 | 396 | | |
| | | | | | | 44% | 330 | 416 | | |
| | | | | | | 60% | 345 | 413 | | |
| | | | | | | 57% | 351 | 413 | | |
| | | | | | | 68% | 360 | 416 | | |
| | | | | | | 50% | 345 | 416 | | |
| | | | | | | 52% | 345 | 413 | | |
| | | | | | | 45% | 345 | 416 | | |
| | | | | | | 42% | 333 | 416 | | |
| | | | | | | 50% | 345 | 416 | | |
| | | | | | | 38% | 48 | 110 | | |
| HNBVD17 | 908917 | 641 | HMMER | PFAM: Zinc finger, C2H2 | PF00096 | 191.4 | 516 | 584 | | |
| | | | 2.1.1 | type | | | | | | |
| | | | blastx.2 | (AL080143) hypothetical | emb\|CAB45736.1\| | 98% | 3 | 773 | | |
| | | | | protein [Homo sapiens] | | 39% | 57 | 764 | | |
| | | | | | | 37% | 180 | 752 | | |
| | | | | | | 37% | 348 | 758 | | |
| HNFGM76 | 1122027 | 211 | blastx.14 | (AF150628) transcription | gi\|4929495\|gb\|AAD3 | 92% | 49 | 435 | | |
| | | | | factor NSLP1 [Homo | 4020.1\|AF150628_1 | 53% | 55 | 99 | | |
| | | | | sapiens] | | | | | | |
| HNFGM76 | 908665 | 642 | HMMER | PFAM: Zinc finger, C2H2 | PF00096 | 74.8 | 232 | 306 | | |
| | | | 2.1.1 | type | | | | | | |
| | | | blastx.2 | (AF132599) RANTES | gb\|AAD26864.1\|AF1 | 92% | 1 | 417 | | |
| | | | | factor of late activated T | 32599_1 | | | | | |
| | | | | lymphocytes-1 [Homo | | | | | | |
| | | | | sapiens] | | | | | | |
| HNFIX19 | 1155399 | 212 | blastx.14 | (AC004882) match to | gi\|6094656\|gb\|AAF03 | 98% | 136 | 459 | | |
| | | | | human[H55637 1 | 512.1\|AC004882_4 | 98% | 446 | 646 | | |
| | | | | (NID:g3813948)]ESTs | | | | | | |
| | | | | [Homo sapiens] | | | | | | |
| HNFIX19 | 968788 | 643 | HMMER | PFAM: Zinc finger, C2H2 | PF00096 | 7.94 | 147 | 218 | | |
| | | | 1.8 | type | | | | | | |
| | | | blastx.2 | (AC004882) match to | gb\|AAF03512.1\|AC0 | 100% | 129 | 392 | | |
| | | | | human [H55637 | 04882_4 | 86% | 392 | 529 | | |
| | | | | (NTD:g1108503)], 1 ESTs | | | | | | |
| | | | | [Homo sapiens] | | | | | | |
| HNGGR74 | 765698 | 644 | HMMER | PFAM: Zinc finger, C2H2 | PF00096 | 6.36 | 14 | 58 | | |
| | | | 1.8 | type | | | | | | |
| HNHIR90 | 810268 | 645 | HMMER | PFAM: Zinc finger, C2H2 | PF00096 | 17.83 | 54 | 116 | | |
| | | | 1.8 | type | | | | | | |
| | | | blastx.2 | (AL137516) hypothetical | emb\|CAB70782.1\| | 54% | 9 | 410 | | |
| | | | | protein [Homo sapiens] | | | | | | |
| HNIAB94 | 934851 | 646 | HMMER | PFAM: Zinc finger, C2H2 | PF00096 | 9.27 | 642 | 577 | | |
| | | | 1.8 | type | | | | | | |
| | | | blastx.2 | (AF051525) C2H2-type | gb\|AAF22430.1\|AF0 | 99% | 1155 | 523 | | |
| | | | | zinc finger protein [Mus | 51525_1 | 89% | 520 | 437 | | |
| | | | | musculus] | | | | | | |
| HNNAD37 | 1152348 | 216 | blastx.14 | CTCF [Homo sapiens] | gi\|924760\|gb\|AAB07 | 33% | 505 | 101 | | |
| | | | | | 788.1\| | 50% | 487 | 296 | | |
| | | | | | | 35% | 541 | 281 | | |
| | | | | | | 40% | 448 | 287 | | |
| | | | | | | 36% | 481 | 302 | | |
| | | | | | | 37% | 277 | 116 | | |
| | | | | | | 35% | 277 | 116 | | |
| | | | | | | 28% | 268 | 98 | | |
| | | | | | | 29% | 505 | 365 | | |
| | | | | | | 33% | 292 | 194 | | |
| | | | | | | 33% | 457 | 377 | | |
| | | | | | | 24% | 385 | 287 | | |
| | | | | | | 46% | 538 | 500 | | |
| | | | | | | 29% | 187 | 116 | | |
| | | | | | | 28% | 271 | 209 | | |
| HNNAD37 | 908890 | 647 | HMMER | PFAM: Zinc finger, C2H2 | PF00096 | 73.9 | 112 | 180 | | |
| | | | 2.1.1 | type | | | | | | |
| | | | blastx.2 | Zfp64 [Mus musculus] | gb\|AAC53039.1\| | 33% | 16 | 570 | | |
| | | | | | | 38% | 16 | 447 | | |
| | | | | | | 30% | 13 | 570 | | |
| | | | | | | 29% | 13 | 579 | | |
| | | | | | | 30% | 28 | 453 | | |
| HNNBG60 | 1152349 | 217 | blastx.14 | (AF013754) transcription | gi\|2772827\|gb\|AAB9 | 50% | 333 | 440 | | |
| | | | | factor RREB-1 [Gallus | 6584.1\| | 25% | 132 | 239 | | |
| | | | | gallus] | | 33% | 225 | 287 | | |
| | | | | | | 54% | 292 | 324 | | |
| | | | | | | 50% | 64 | 99 | | |
| HNNBG60 | 908700 | 648 | HMMER | PFAM: Zinc finger, C2H2 | PF00096 | 79.7 | 483 | 551 | | |
| | | | 2.1.1 | type | | | | | | |
| | | | blastx.2 | zinc finger protein [Mus | dbj\|BAA01478.1\| | 41% | 198 | 812 | | |
| | | | | musculus] | | 45% | 381 | 848 | | |
| | | | | | | 39% | 297 | 848 | | |
| | | | | | | 40% | 321 | 848 | | |
| | | | | | | 35% | 198 | 827 | | |
| | | | | | | 42% | 285 | 734 | | |
| | | | | | | 39% | 453 | 812 | | |
| HNTAR16 | 1152269 | 218 | blastx.14 | finger protein (clone | pir\|S06570\|S06570 | 30% | 609 | 938 | | |
| | | | | X1cGF42-1) - African | | 32% | 624 | 926 | | |
| | | | | clawed frog (fragment) | | 29% | 612 | 938 | | |
| | | | | | | 30% | 687 | 938 | | |
| | | | | | | 36% | 612 | 761 | | |
| | | | | | | 47% | 942 | 998 | | |
| | | | | | | 31% | 189 | 284 | | |
| | | | | | | 33% | 483 | 572 | | |
| | | | | | | 33% | 483 | 545 | | |
| | | | | | | 31% | 942 | 998 | | |
| | | | | | | 33% | 231 | 284 | | |
| | | | | | | 30% | 942 | 1001 | | |
| HNTAR16 | 908812 | 649 | HMMER | PFAM: Zinc finger, C2H2 | PF00096 | 7.5 | 319 | 381 | | |
| | | | 1.8 | type | | | | | | |
| HNTAT79 | 1217038 | 219 | blastx.14 | zinc finger protein - | pir\|PC416\|PC4161 | 65% | 605 | 682 | | |
| | | | | chicken (fragment) | | 38% | 116 | 247 | | |
| | | | | | | 61% | 358 | 396 | | |
| | | | | | | 41% | 230 | 280 | | |
| | | | | | | 50% | 541 | 606 | | |
| HNTAT79 | 774752 | 650 | HMMER | PFAM: Zinc finger, C2H2 | PF00096 | 13.71 | 542 | 604 | | |
| | | | 1.8 | type | | | | | | |
| | | | blastx.2 | zinc finger protein - | pir\|PC4161\|PC4161 | 48% | 53 | 295 | | |
| | | | | chicken (fragment) | | 31% | 304 | 702 | | |
| | | | | | | 34% | 530 | 604 | | |
| HNTBH53 | 909153 | 220 | HMMER | PFAM: Zinc finger, C2H2 | PF00096 | 47.5 | 420 | 488 | | |
| | | | 2.1.1 | type | | | | | | |
| | | | blastx.2 | zinc finger protein 95 | gb\|AAD00103.1\| | 89% | 859 | 1353 | | |
| | | | | [Mus musculus] | | 48% | 5 | 973 | | |
| | | | | | | 74% | 862 | 1212 | | |
| | | | | | | 46% | 916 | 1311 | | |
| | | | | | | 39% | 811 | 1311 | | |
| | | | | | | 41% | 850 | 1287 | | |
| | | | | | | 72% | 399 | 623 | | |
| | | | | | | 34% | 856 | 1308 | | |
| | | | | | | 48% | 811 | 1128 | | |
| | | | | | | 36% | 844 | 1278 | | |
| | | | | | | 44% | 856 | 1188 | | |
| | | | | | | 43% | 5 | 415 | | |
| | | | | | | 37% | 820 | 1215 | | |
| | | | | | | 32% | 682 | 1266 | | |
| | | | | | | 55% | 399 | 602 | | |
| | | | | | | 38% | 856 | 1113 | | |
| | | | | | | 45% | 239 | 448 | | |
| | | | | | | 41% | 399 | 602 | | |
| | | | | | | 38% | 1078 | 1311 | | |
| | | | | | | 41% | 399 | 602 | | |
| | | | | | | 43% | 239 | 424 | | |
| | | | | | | 32% | 345 | 596 | | |
| | | | | | | 37% | 206 | 448 | | |
| | | | | | | 38% | 227 | 436 | | |
| | | | | | | 34% | 408 | 596 | | |
| | | | | | | 27% | 396 | 671 | | |
| | | | | | | 34% | 399 | 596 | | |
| | | | | | | 37% | 492 | 776 | | |
| | | | | | | 24% | 242 | 448 | | |
| | | | | | | 29% | 411 | 602 | | |
| | | | | | | 40% | 492 | 623 | | |
| | | | | | | 27% | 227 | 424 | | |
| | | | | | | 61% | 396 | 449 | | |
| | | | | | | 37% | 835 | 945 | | |
| | | | | | | 32% | 1217 | 1372 | | |
| | | | | | | 18% | 399 | 596 | | |
| HNTEK43 | 909077 | 651 | HMMER | PFAM: Zinc finger, C2H2 | PF00096 | 66.8 | 366 | 437 | | |
| | | | 2.1.1 | type | | | | | | |
| | | | blastx.2 | (AF221712)Smad- and | gb\|AAF28354.1\| | 97% | 9 | 533 | | |
| | | | | Olf-interacting zinc finger | | 29% | 45 | 527 | | |
| | | | | protein [Homo sapiens] | | 27% | 45 | 437 | | |
| | | | | | | 32% | 450 | 542 | | |
| HNTOA18 | 695123 | 222 | HMMER | PFAM: Zinc finger, C2H2 | PF00096 | 36.4 | 366 | 434 | | |
| | | | 2.1.1 | type | | | | | | |
| | | | blastx.2 | (AC007228) BC37295_2 | gb\|AAD23608.1\|AC0 | 98% | 3 | 455 | | |
| | | | | (partial) [Homo sapiens] | 07228_3 | 38% | 159 | 452 | | |
| | | | | | | 43% | 186 | 455 | | |
| | | | | | | 40% | 201 | 455 | | |
| | | | | | | 40% | 186 | 452 | | |
| | | | | | | 35% | 186 | 452 | | |
| | | | | | | 36% | 201 | 452 | | |
| | | | | | | 33% | 159 | 455 | | |
| HNTOA40 | 710875 | 652 | HMMER | PFAM: Zinc finger, C2H2 | PF00096 | 19.79 | 236 | 301 | | |
| | | | 1.8 | type | | | | | | |
| HNTRB05 | 909162 | 653 | HMMER | PFAM: Zinc finger, C2H2 | PF00096 | 11.36 | 446 | 511 | | |
| | | | 1.8 | type | | | | | | |
| | | | blastx.2 | ZNF157 [Homo sapiens] | gb\|AAA97578.1\| | 55% | 85 | 435 | | |
| | | | | | | 57% | 85 | 435 | | |
| | | | | | | 54% | 76 | 435 | | |
| | | | | | | 54% | 94 | 435 | | |
| | | | | | | 55% | 94 | 435 | | |
| | | | | | | 52% | 91 | 435 | | |
| | | | | | | 62% | 85 | 384 | | |
| | | | | | | 50% | 85 | 432 | | |
| | | | | | | 57% | 85 | 384 | | |
| | | | | | | 47% | 85 | 435 | | |
| | | | | | | 38% | 118 | 435 | | |
| | | | | | | 54% | 374 | 517 | | |
| | | | | | | 44% | 329 | 517 | | |
| | | | | | | 28% | 83 | 517 | | |
| | | | | | | 68% | 410 | 496 | | |
| | | | | | | 38% | 329 | 517 | | |
| | | | | | | 72% | 27 | 101 | | |
| | | | | | | 70% | 30 | 101 | | |
| | | | | | | 70% | 30 | 101 | | |
| | | | | | | 44% | 27 | 182 | | |
| | | | | | | 68% | 27 | 101 | | |
| | | | | | | 44% | 27 | 182 | | |
| | | | | | | 64% | 27 | 101 | | |
| | | | | | | 42% | 27 | 182 | | |
| | | | | | | 38% | 27 | 176 | | |
| | | | | | | 58% | 30 | 101 | | |
| HOCMA08 | 1152416 | 225 | blastx.14 | (AF161540) HSPC055 | gi\|6841348\|gb\|AAF29 | 100% | 388 | 888 | | |
| | | | | [Homo sapiens] | 027.1\|AF161540_1 | | | | | |
| HOCMA08 | 957702 | 654 | HMMER | PFAM: Zinc finger C-x8- | PF00642 | 23.8 | 1167 | 1226 | | |
| | | | 2.1.1 | C-x5-C-x3-H type (and | | | | | | |
| | | | | similar). | | | | | | |
| | | | blastx.2 | (AF161540) HSPC055 | gb\|AAF29027.1\|AF1 | 100% | 852 | 1352 | | |
| | | | | [Homo sapiens] | 61540_1 | | | | | |
| HODCT96 | 909227 | 655 | HMMER | PFAM: Zinc finger, C2H2 | PF00096 | 43.5 | 90 | 158 | | |
| | | | 2.1.1 | type | | | | | | |
| | | | blastx.2 | ZINC FINGER PROTEIN | sp\|Q03924\|Z117_HU | 74% | 3 | 164 | | |
| | | | | 117(ZINCFINGER | MAN | 53% | 6 | 233 | | |
| | | | | PROTEIN HPF9) | | 60% | 3 | 170 | | |
| | | | | (FRAGMENT). | | 50% | 3 | 233 | | |
| | | | | | | 51% | 6 | 233 | | |
| | | | | | | 63% | 6 | 170 | | |
| | | | | | | 50% | 6 | 233 | | |
| | | | | | | 68% | 6 | 158 | | |
| | | | | | | 45% | 6 | 224 | | |
| | | | | | | 40% | 6 | 161 | | |
| | | | | | | 58% | 166 | 234 | | |
| | | | | | | 76% | 166 | 204 | | |
| HODEE69 | 1127952 | 227 | blastx.14 | DNA binding protein | gi\|1020145\|gb\|AAA7 | 63% | 90 | 422 | | |
| | | | | [Homo sapiens] | 9359.1\| | 62% | 90 | 422 | | |
| | | | | | | 60% | 90 | 422 | | |
| | | | | | | 63% | 90 | 422 | | |
| | | | | | | 63% | 90 | 422 | | |
| | | | | | | 58% | 90 | 422 | | |
| | | | | | | 61% | 105 | 422 | | |
| | | | | | | 57% | 90 | 422 | | |
| | | | | | | 56% | 78 | 422 | | |
| | | | | | | 56% | 90 | 422 | | |
| | | | | | | 56% | 90 | 422 | | |
| | | | | | | 55% | 90 | 422 | | |
| | | | | | | 56% | 90 | 422 | | |
| | | | | | | 56% | 90 | 422 | | |
| | | | | | | 60% | 90 | 401 | | |
| | | | | | | 54% | 90 | 422 | | |
| | | | | | | 47% | 90 | 422 | | |
| | | | | | | 59% | 90 | 320 | | |
| | | | | | | 37% | 403 | 474 | | |
| | | | | | | 37% | 403 | 474 | | |
| | | | | | | 50% | 427 | 474 | | |
| | | | | | | 50% | 427 | 474 | | |
| | | | | | | 50% | 427 | 474 | | |
| | | | | | | 43% | 427 | 474 | | |
| | | | | | | 50% | 427 | 474 | | |
| | | | | | | 37% | 403 | 474 | | |
| | | | | | | 43% | 427 | 474 | | |
| | | | | | | 43% | 427 | 474 | | |
| | | | | | | 43% | 427 | 474 | | |
| | | | | | | 37% | 427 | 474 | | |
| | | | | | | 43% | 427 | 474 | | |
| HODEE69 | 909223 | 656 | HMMER | PFAM: Zinc finger, C2H2 | PF00096 | 159.2 | 321 | 389 | | |
| | | | 2.1.1 | type | | | | | | |
| | | | blastx.2 | zinc finger protein [Homo | emb\|CAA55526.1 | 63% | 90 | 707 | | |
| | | | | sapiens] | | 58% | 90 | 698 | | |
| | | | | | | 58% | 90 | 707 | | |
| | | | | | | 57% | 90 | 707 | | |
| | | | | | | 57% | 90 | 707 | | |
| | | | | | | 60% | 135 | 707 | | |
| | | | | | | 55% | 78 | 707 | | |
| | | | | | | 55% | 90 | 707 | | |
| | | | | | | 60% | 216 | 707 | | |
| | | | | | | 51% | 12 | 653 | | |
| HODEI81 | 909027 | 657 | HMMER | PFAM: Zinc finger, C2H2 | PF00096 | 34.54 | 297 | 365 | | |
| | | | 1.8 | type | | | | | | |
| | | | blastx.2 | zinc regulatory factor | dbj\|BAA22262.1\| | 58% | 273 | 401 | | |
| | | | | [Homo sapiens] | | | | | | |
| HODEK70 | 1152255 | 229 | blastx.14 | finger protein (clone | pir\|S00833\|S00833 | 58% | 84 | 653 | | |
| | | | | XLcOF22) - African | | 54% | 78 | 629 | | |
| | | | | clawed frog | | 55% | 141 | 629 | | |
| | | | | | | 56% | 78 | 548 | | |
| | | | | | | 53% | 195 | 629 | | |
| | | | | | | 50% | 348 | 629 | | |
| | | | | | | 51% | 450 | 659 | | |
| | | | | | | 55% | 198 | 380 | | |
| | | | | | | 58% | 291 | 464 | | |
| | | | | | | 50% | 366 | 548 | | |
| | | | | | | 44% | 81 | 296 | | |
| | | | | | | 53% | 201 | 317 | | |
| | | | | | | 48% | 453 | 569 | | |
| | | | | | | 47% | 282 | 401 | | |
| | | | | | | 45% | 261 | 380 | | |
| | | | | | | 58% | 204 | 296 | | |
| | | | | | | 52% | 384 | 485 | | |
| | | | | | | 54% | 456 | 548 | | |
| | | | | | | 48% | 534 | 626 | | |
| | | | | | | 42% | 345 | 464 | | |
| | | | | | | 40% | 78 | 212 | | |
| | | | | | | 46% | 117 | 212 | | |
| | | | | | | 31% | 33 | 128 | | |
| | | | | | | 31% | 665 | 799 | | |
| | | | | | | 31% | 665 | 787 | | |
| | | | | | | 42% | 668 | 730 | | |
| HODEK70 | 909225 | 658 | HMMER | PFAM: Zinc finger, C2H2 | PF00096 | 114.8 | 481 | 549 | | |
| | | | 2.1.1 | type | | | | | | |
| | | | blastx.2 | DNA binding protein | gb\|AAA79359.1\| | 49% | 217 | 900 | | |
| | | | | [Homo sapiens] | | 58% | 217 | 711 | | |
| | | | | | | 65% | 217 | 648 | | |
| | | | | | | 46% | 217 | 900 | | |
| | | | | | | 57% | 217 | 705 | | |
| | | | | | | 58% | 217 | 711 | | |
| | | | | | | 55% | 217 | 708 | | |
| | | | | | | 63% | 217 | 624 | | |
| | | | | | | 56% | 217 | 708 | | |
| | | | | | | 55% | 217 | 711 | | |
| | | | | | | 54% | 217 | 711 | | |
| | | | | | | 44% | 217 | 900 | | |
| | | | | | | 60% | 232 | 621 | | |
| | | | | | | 53% | 214 | 648 | | |
| | | | | | | 64% | 217 | 552 | | |
| | | | | | | 47% | 223 | 711 | | |
| | | | | | | 67% | 217 | 477 | | |
| | | | | | | 40% | 36 | 299 | | |
| | | | | | | 38% | 18 | 299 | | |
| | | | | | | 40% | 39 | 299 | | |
| | | | | | | 36% | 15 | 338 | | |
| | | | | | | 35% | 39 | 299 | | |
| | | | | | | 44% | 18 | 218 | | |
| | | | | | | 43% | 36 | 218 | | |
| | | | | | | 39% | 72 | 299 | | |
| | | | | | | 33% | 24 | 212 | | |
| | | | | | | 33% | 651 | 848 | | |
| | | | | | | 32% | 660 | 854 | | |
| | | | | | | 31% | 660 | 857 | | |
| | | | | | | 34% | 663 | 890 | | |
| | | | | | | 31% | 660 | 890 | | |
| | | | | | | 31% | 672 | 854 | | |
| | | | | | | 30% | 660 | 860 | | |
| | | | | | | 30% | 660 | 848 | | |
| | | | | | | 25% | 176 | 544 | | |
| | | | | | | 32% | 660 | 854 | | |
| | | | | | | 30% | 660 | 854 | | |
| HODER91 | 789661 | 659 | HMMER | PFAM: Zinc finger, C2H2 | PF00096 | 11.06 | 163 | 225 | | |
| | | | 1.8 | type | | | | | | |
| | | | blastx.2 | (AC007059) Human | gb\|AAD19818.1\| | 35% | 1 | 294 | | |
| | | | | homolog of Mus musculus | | | | | | |
| | | | | wizL protein [AA 4-156 1] | | | | | | |
| | | | | [Homo sapiens] | | | | | | |
| HHFFG94 | 1157763 | 231 | blastx.14 | S-100 protein alpha chain | pir\|S35985\|S35985 | 35% | 198 | 368 | | |
| | | | | - weatherfish | | 31% | 529 | 576 | | |
| HHFFG94 | 963277 | 660 | HMMER | PFAM: EF hand | PF00036 | 8.04 | 291 | 371 | | |
| | | | 1.8 | | | | | | | |
| | | | blastx.14 | S-100 protein alpha chain | pir\|S35985\|S35985 | 35% | 207 | 377 | | |
| | | | | - weatherfish | | 31% | 538 | 585 | | |
| HE9NU41 | 928849 | 232 | HMMER | PFAM: Collagen triple | PF01391 | 217 | 22 | 201 | | |
| | | | 2.1.1 | helix repeat (20 copies) | | | | | | |
| | | | blastx.14 | (AL034452) dJ682J15.1 | gi\|5102636\|emb\|CAB | 100% | 331 | 513 | | |
| | | | | (novel Collagen triple | 45235.1\| | 36% | 103 | 510 | | |
| | | | | helix repeat containing | | 100% | 772 | 888 | | |
| | | | | protein) [Homo sapiens] | | 37% | 157 | 510 | | |
| | | | | | | 50% | 331 | 513 | | |
| | | | | | | 31% | 97 | 510 | | |
| | | | | | | 52% | 337 | 513 | | |
| | | | | | | 50% | 337 | 513 | | |
| | | | | | | 38% | 7 | 258 | | |
| | | | | | | 100% | 610 | 696 | | |
| | | | | | | 47% | 334 | 510 | | |
| | | | | | | 47% | 337 | 513 | | |
| | | | | | | 50% | 337 | 492 | | |
| | | | | | | 38% | 10 | 258 | | |
| | | | | | | 44% | 331 | 513 | | |
| | | | | | | 50% | 346 | 513 | | |
| | | | | | | 39% | 13 | 258 | | |
| | | | | | | 48% | 103 | 258 | | |
| | | | | | | 47% | 355 | 513 | | |
| | | | | | | 42% | 337 | 513 | | |
| | | | | | | 45% | 337 | 513 | | |
| | | | | | | 35% | 13 | 258 | | |
| | | | | | | 39% | 13 | 258 | | |
| | | | | | | 37% | 10 | 258 | | |
| | | | | | | 36% | 7 | 261 | | |
| | | | | | | 38% | 7 | 231 | | |
| | | | | | | 49% | 100 | 258 | | |
| | | | | | | 37% | 13 | 258 | | |
| | | | | | | 36% | 13 | 261 | | |
| | | | | | | 100% | 1222 | 1287 | | |
| | | | | | | 40% | 337 | 513 | | |
| | | | | | | 36% | 13 | 258 | | |
| | | | | | | 45% | 100 | 258 | | |
| | | | | | | 35% | 13 | 258 | | |
| | | | | | | 35% | 13 | 258 | | |
| | | | | | | 43% | 337 | 510 | | |
| | | | | | | 41% | 337 | 510 | | |
| | | | | | | 44% | 337 | 510 | | |
| | | | | | | 43% | 331 | 510 | | |
| | | | | | | 33% | 13 | 261 | | |
| | | | | | | 34% | 7 | 258 | | |
| | | | | | | 47% | 100 | 258 | | |
| | | | | | | 32% | 10 | 261 | | |
| | | | | | | 40% | 337 | 513 | | |
| | | | | | | 43% | 337 | 510 | | |
| | | | | | | 45% | 334 | 477 | | |
| | | | | | | 40% | 337 | 513 | | |
| | | | | | | 44% | 337 | 510 | | |
| | | | | | | 32% | 13 | 258 | | |
| | | | | | | 33% | 13 | 261 | | |
| | | | | | | 35% | 10 | 249 | | |
| | | | | | | 43% | 337 | 510 | | |
| | | | | | | 39% | 337 | 510 | | |
| | | | | | | 34% | 10 | 258 | | |
| | | | | | | 44% | 103 | 258 | | |
| | | | | | | 43% | 337 | 510 | | |
| | | | | | | 34% | 10 | 258 | | |
| | | | | | | 32% | 10 | 258 | | |
| | | | | | | 33% | 7 | 258 | | |
| | | | | | | 32% | 13 | 258 | | |
| | | | | | | 33% | 13 | 264 | | |
| | | | | | | 51% | 334 | 432 | | |
| | | | | | | 30% | 13 | 261 | | |
| | | | | | | 31% | 10 | 258 | | |
| | | | | | | 50% | 130 | 261 | | |
| | | | | | | 44% | 133 | 261 | | |
| | | | | | | 44% | 103 | 243 | | |
| | | | | | | 31% | 13 | 258 | | |
| | | | | | | 43% | 352 | 474 | | |
| | | | | | | 39% | 337 | 510 | | |
| | | | | | | 53% | 172 | 261 | | |
| | | | | | | 57% | 112 | 195 | | |
| | | | | | | 47% | 334 | 447 | | |
| | | | | | | 43% | 331 | 447 | | |
| | | | | | | 37% | 40 | 213 | | |
| | | | | | | 42% | 145 | 264 | | |
| | | | | | | 50% | 616 | 693 | | |
| | | | | | | 48% | 142 | 234 | | |
| | | | | | | 53% | 100 | 177 | | |
| | | | | | | 46% | 415 | 510 | | |
| | | | | | | 50% | 406 | 495 | | |
| | | | | | | 42% | 613 | 690 | | |
| | | | | | | 44% | 613 | 693 | | |
| | | | | | | 51% | 610 | 690 | | |
| | | | | | | 48% | 616 | 690 | | |
| | | | | | | 48% | 616 | 690 | | |
| | | | | | | 32% | 13 | 159 | | |
| | | | | | | 51% | 331 | 411 | | |
| | | | | | | 28% | 13 | 210 | | |
| | | | | | | 46% | 157 | 240 | | |
| | | | | | | 50% | 613 | 696 | | |
| | | | | | | 48% | 616 | 690 | | |
| | | | | | | 46% | 616 | 693 | | |
| | | | | | | 42% | 613 | 690 | | |
| | | | | | | 55% | 346 | 405 | | |
| | | | | | | 46% | 616 | 693 | | |
| | | | | | | 46% | 418 | 501 | | |
| | | | | | | 43% | 133 | 222 | | |
| | | | | | | 60% | 436 | 495 | | |
| | | | | | | 52% | 364 | 426 | | |
| | | | | | | 44% | 616 | 690 | | |
| | | | | | | 44% | 610 | 690 | | |
| | | | | | | 44% | 613 | 693 | | |
| | | | | | | 46% | 616 | 693 | | |
| | | | | | | 52% | 166 | 222 | | |
| | | | | | | 46% | 166 | 249 | | |
| | | | | | | 38% | 613 | 690 | | |
| | | | | | | 38% | 613 | 690 | | |
| | | | | | | 46% | 613 | 690 | | |
| | | | | | | 46% | 613 | 690 | | |
| | | | | | | 44% | 610 | 690 | | |
| | | | | | | 46% | 121 | 204 | | |
| | | | | | | 42% | 616 | 693 | | |
| | | | | | | 44% | 616 | 690 | | |
| | | | | | | 57% | 391 | 447 | | |
| | | | | | | 46% | 613 | 690 | | |
| | | | | | | 54% | 625 | 690 | | |
| | | | | | | 42% | 613 | 690 | | |
| | | | | | | 44% | 610 | 690 | | |
| | | | | | | 46% | 613 | 690 | | |
| | | | | | | 37% | 610 | 690 | | |
| | | | | | | 40% | 616 | 690 | | |
| | | | | | | 44% | 616 | 690 | | |
| | | | | | | 46% | 613 | 690 | | |
| | | | | | | 37% | 619 | 690 | | |
| | | | | | | 52% | 409 | 465 | | |
| | | | | | | 39% | 427 | 510 | | |
| | | | | | | 39% | 190 | 258 | | |
| | | | | | | 42% | 613 | 690 | | |
| | | | | | | 40% | 613 | 693 | | |
| | | | | | | 50% | 625 | 690 | | |
| | | | | | | 47% | 97 | 153 | | |
| | | | | | | 42% | 103 | 186 | | |
| | | | | | | 40% | 616 | 681 | | |
| | | | | | | 30% | 10 | 135 | | |
| | | | | | | 52% | 193 | 249 | | |
| | | | | | | 50% | 175 | 234 | | |
| | | | | | | 43% | 190 | 258 | | |
| | | | | | | 40% | 616 | 690 | | |
| | | | | | | 44% | 616 | 690 | | |
| | | | | | | 42% | 616 | 672 | | |
| | | | | | | 40% | 610 | 690 | | |
| | | | | | | 40% | 610 | 690 | | |
| | | | | | | 42% | 616 | 693 | | |
| | | | | | | 52% | 454 | 510 | | |
| | | | | | | 47% | 337 | 393 | | |
| | | | | | | 42% | 331 | 393 | | |
| | | | | | | 47% | 418 | 474 | | |
| | | | | | | 45% | 337 | 396 | | |
| | | | | | | 60% | 10 | 54 | | |
| | | | | | | 42% | 613 | 690 | | |
| | | | | | | 47% | 103 | 159 | | |
| | | | | | | 45% | 427 | 486 | | |
| | | | | | | 45% | 202 | 261 | | |
| | | | | | | 40% | 616 | 690 | | |
| | | | | | | 40% | 628 | 693 | | |
| | | | | | | 40% | 616 | 690 | | |
| | | | | | | 39% | 373 | 441 | | |
| | | | | | | 47% | 184 | 240 | | |
| | | | | | | 45% | 616 | 675 | | |
| | | | | | | 47% | 616 | 678 | | |
| | | | | | | 47% | 139 | 195 | | |
| | | | | | | 44% | 337 | 390 | | |
| | | | | | | 36% | 628 | 693 | | |
| | | | | | | 43% | 112 | 180 | | |
| | | | | | | 57% | 472 | 513 | | |
| | | | | | | 100% | 1039 | 1059 | | |
| | | | | | | 40% | 613 | 672 | | |
| | | | | | | 40% | 355 | 414 | | |
| HFXCA19 | 965688 | 233 | blastx.14 | Similar to D.melanogaster | gi\|1665821\|dbj\|BAA1 | 96% | 1120 | 935 | | |
| | | | | cadherin-related tumor | 3407.1\| | 100% | 1988 | 1842 | | |
| | | | | suppressor [Homo | | 100% | 1663 | 1541 | | |
| | | | | sapiens] | | 92% | 748 | 632 | | |
| | | | | | | 38% | 1988 | 1848 | | |
| | | | | | | 58% | 1895 | 1845 | | |
| | | | | | | 36% | 1630 | 1541 | | |
| | | | | | | 36% | 1096 | 1007 | | |
| | | | | | | 50% | 1892 | 1851 | | |
| | | | | | | 41% | 1961 | 1911 | | |
| | | | | | | 40% | 1976 | 1917 | | |
| | | | | | | 42% | 1892 | 1851 | | |
| | | | | | | 38% | 1036 | 983 | | |
| | | | | | | 42% | 1021 | 980 | | |
| | | | | | | 33% | 1033 | 980 | | |
| | | | | | | 33% | 1901 | 1848 | | |
| | | | | | | 42% | 1961 | 1920 | | |
| | | | | | | 38% | 1018 | 980 | | |
| | | | | | | 40% | 1105 | 1061 | | |
| | | | | | | 40% | 1916 | 1872 | | |
| HFXCA19 | 975380 | 661 | blastx.14 | Similar to D.melanogaster | gi\|1665821\|dbj\|BAA1 | 98% | 911 | 1096 | | |
| | | | | cadherin-related tumor | 3407.1\| | 100% | 43 | 189 | | |
| | | | | suppressor [Homo | | 100% | 368 | 490 | | |
| | | | | sapiens] | | 92% | 1283 | 1399 | | |
| | | | | | | 38% | 43 | 183 | | |
| | | | | | | 58% | 136 | 186 | | |
| | | | | | | 36% | 401 | 490 | | |
| | | | | | | 36% | 935 | 1024 | | |
| | | | | | | 50% | 139 | 180 | | |
| | | | | | | 41% | 70 | 120 | | |
| | | | | | | 40% | 55 | 114 | | |
| | | | | | | 42% | 139 | 180 | | |
| | | | | | | 38% | 995 | 1048 | | |
| | | | | | | 42% | 1010 | 1051 | | |
| | | | | | | 33% | 998 | 1051 | | |
| | | | | | | 33% | 130 | 183 | | |
| | | | | | | 42% | 70 | 111 | | |
| | | | | | | 38% | 1013 | 1051 | | |
| | | | | | | 40% | 926 | 970 | | |
| | | | | | | 40% | 115 | 159 | | |
| HODFR44 | 909255 | 662 | HMMER | PFAM: Zinc finger, C2H2 | PF00096 | 83.3 | 77 | 145 | | |
| | | | 2.1.1 | type | | | | | | |
| | | | blastx.2 | (AL137516) hypothetical | emb\|CAB70782.1\| | 83% | 11 | 469 | | |
| | | | | protein [Homo sapiens] | | 46% | 14 | 304 | | |
| | | | | | | 47% | 20 | 304 | | |
| | | | | | | 48% | 14 | 274 | | |
| | | | | | | 50% | 71 | 307 | | |
| | | | | | | 36% | 14 | 304 | | |
| | | | | | | 43% | 77 | 310 | | |
| | | | | | | 37% | 14 | 310 | | |
| | | | | | | 39% | 38 | 301 | | |
| HODGP95 | 908650 | 663 | HMMER | PFAM: Zinc finger, C2H2 | PF00096 | 18.49 | 209 | 271 | | |
| | | | 1.8 | type | | | | | | |
| | | | blastx.2 | (AC005498) R31665_1 | gb\|AAC32422.1\| | 61% | 125 | 310 | | |
| | | | | [Homo sapiens] | | 52% | 146 | 310 | | |
| | | | | | | 53% | 146 | 292 | | |
| | | | | | | 41% | 125 | 310 | | |
| | | | | | | 34% | 74 | 334 | | |
| | | | | | | 50% | 146 | 307 | | |
| | | | | | | 51% | 164 | 310 | | |
| | | | | | | 46% | 164 | 310 | | |
| | | | | | | 47% | 307 | 357 | | |
| | | | | | | 47% | 307 | 357 | | |
| | | | | | | 47% | 307 | 357 | | |
| | | | | | | 50% | 310 | 357 | | |
| | | | | | | 35% | 307 | 357 | | |
| | | | | | | 41% | 307 | 357 | | |
| HOEOE58 | 970553 | 664 | HMMER | PFAM: Zinc finger, C2H2 | PF00096 | 169.8 | 1089 | 1157 | | |
| | | | 2.1.1 | type | | | | | | |
| | | | blastx.2 | (AK000938) unnamed | dbj\|BAA91434.1\| | 76% | 408 | 1136 | | |
| | | | | protein product [Homo | | 49% | 639 | 1169 | | |
| | | | | sapiens] | | 83% | 326 | 601 | | |
| | | | | | | 43% | 717 | 1325 | | |
| | | | | | | 36% | 657 | 1160 | | |
| | | | | | | 90% | 241 | 339 | | |
| HOFMF82 | 1072079 | 237 | blastx.14 | zinc finger protein mfg1 | gi\|554203\|gb\|AAA39 | 61% | 243 | 467 | | |
| | | | | mRNA (put.); putative | 531.1\| | 61% | 243 | 467 | | |
| | | | | [Mus musculus] | | 61% | 279 | 467 | | |
| | | | | | | 56% | 243 | 467 | | |
| | | | | | | 49% | 243 | 437 | | |
| | | | | | | 66% | 351 | 467 | | |
| | | | | | | 42% | 42 | 104 | | |
| | | | | | | 33% | 42 | 104 | | |
| HOFMF82 | 693987 | 665 | HMMER | PFAM: Zinc finger, C2H2 | PF00096 | 10.91 | 44 | 106 | | |
| | | | 1.8 | type | | | | | | |
| HOFMF82 | 694062 | 666 | HMMER | PFAM: Zinc finger, C2H2 | PF00096 | 53.7 | 372 | 440 | | |
| | | | 2.1.1 | type | | | | | | |
| HOFMF82 | 909248 | 667 | HMMER | PFAM: Zinc finger, C2H2 | PF00096 | 48.3 | 61 | 129 | | |
| | | | 2.1.1 | type | | | | | | |
| | | | blastx.14 | zinc finger protein [Homo | gi\|495568\|gb\|AAC50 | 52% | 19 | 429 | | |
| | | | | sapiens] | 264.1\| | 50% | 55 | 429 | | |
| | | | | | | 50% | 25 | 402 | | |
| | | | | | | 44% | 79 | 429 | | |
| | | | | | | 28% | 4 | 66 | | |
| HOGAW39 | 862944 | 238 | HMMER | PFAM: Zinc finger, C2H2 | PF00096 | 10.04 | 318 | 386 | | |
| | | | 1.8 | type | | | | | | |
| | | | blastx.2 | (AK001277) unnamed | dbj\|BAA91596.1\| | 83% | 144 | 515 | | |
| | | | | protein product [Homo | | | | | | |
| | | | | sapiens] | | | | | | |
| HOGDU91 | 927915 | 668 | HMMER | PFAM: Zinc finger, C2H2 | PF00096 | 13.7 | 967 | 1029 | | |
| | | | 1.8 | type | | | | | | |
| | | | blastx.2 | (AK000164) unnamed | dbj\|BAA90985.1\| | 100% | 535 | 1038 | | |
| | | | protein product [Homo | | | | | | | |
| | | | sapiens] | | | | | | | |
| HOGED11 | 1150873 | 240 | blastx.14 | (AC007059) Human | gi\|4389513\|gb\|AAD1 | 74% | 12 | 533 | | |
| | | | | homolog of Mus musculus | 9818.1\| | 49% | 339 | 533 | | |
| | | | | wizL protein [AA 4-1561] | | 59% | 396 | 542 | | |
| | | | | [Homo sapiens] | | 50% | 372 | 530 | | |
| | | | | | | 54% | 396 | 527 | | |
| | | | | | | 36% | 282 | 347 | | |
| | | | | | | 36% | 33 | 107 | | |
| | | | | | | 47% | 265 | 315 | | |
| | | | | | | 60% | 91 | 120 | | |
| HOGED11 | 965537 | 669 | HMMER | PFAM: Zinc finger, C2H2 | PF00096 | 11.51 | 386 | 448 | | |
| | | | 1.8 | type | | | | | | |
| | | | blastx.2 | (AC007059) Human | gb\|AAD19818.1\| | 69% | 2 | 583 | | |
| | | | | homolog of Mus musculus | | 34% | 35 | 583 | | |
| | | | | wizL protein [AA 4-1561] | | 43% | 242 | 550 | | |
| | | | | [Homo sapiens] | | 50% | 362 | 520 | | |
| | | | | | | 43% | 386 | 583 | | |
| | | | | | | 36% | 272 | 337 | | |
| | | | | | | 36% | 23 | 97 | | |
| | | | | | | 34% | 81 | 176 | | |
| HOIAC78 | 902720 | 670 | HMMER | PFAM: Zinc finger, C2H2 | PF00096 | 13.5 | 35 | 97 | | |
| | | | 1.8 | type | | | | | | |
| HOPBC53 | 530056 | 242 | HMMER | PFAM: Zinc finger, C2H2 | PF00096 | 15.56 | 79 | 141 | | |
| | | | 1.8 | type | | | | | | |
| | | | blastx.2 | (AK001559) unnamed | dbj\|BAA91755.1\| | 60% | 7 | 216 | | |
| | | | | protein product [Homo | | | | | | |
| | | | | sapiens] | | | | | | |
| HORBQ29 | 1151600 | 243 | blastx.14 | (AL031581) | gi\|3702111\|emb\|CAA | 24% | 306 | 542 | | |
| | | | | /prediction=(method:““ge | 20891.1\| | 32% | 69 | 206 | | |
| | | | | nscan””, 1 1 1 | | 26% | 570 | 659 | | |
| | | | | dbase: ““PROSITE””, | | 52% | 692 | 742 | | |
| | | | | acc:““PS00014””, | | 29% | 468 | 569 | | |
| | | | | method:““ppsearch””); / | | 30% | 588 | 656 | | |
| | | | | | | 28% | 603 | 677 | | |
| HORBQ29 | 948636 | 671 | HMMER | PFAM: Zinc finger, C2H2 | PF00096 | 33.3 | 588 | 656 | | |
| | | | 2.1.1 | type | | | | | | |
| | | | blastx.2 | (AL031581) | emb\|CAA200891.1\| | 24% | 69 | 659 | | |
| | | | | /prediction=(method:““ge | | 36% | 692 | 790 | | |
| | | | | nscan””, version:““1.0””, 1 | | | | | | |
| | | | | 1 1 method:““ppsearch””); | | | | | | |
| | | | | / | | | | | | |
| HOSEB90 | 960867 | 672 | HMMER | PFAM: Zinc finger, C2H2 | PF00096 | 10.96 | 251 | 316 | | |
| | | | 1.8 | type | | | | | | |
| HOSNN16 | 1093284 | 245 | blastx.14 | (AF031656) zinc-finger | gi\|2641224\|gb\|AAC5 | 56% | 106 | 237 | | |
| | | | | protein 94 [Cricetulus | 3577.1\| | 54% | 106 | 237 | | |
| | | | | griseus] | | 66% | 106 | 204 | | |
| | | | | | | 54% | 106 | 237 | | |
| | | | | | | 54% | 106 | 237 | | |
| | | | | | | 47% | 106 | 237 | | |
| | | | | | | 48% | 195 | 335 | | |
| | | | | | | 51% | 112 | 234 | | |
| | | | | | | 44% | 106 | 234 | | |
| | | | | | | 43% | 106 | 237 | | |
| | | | | | | 42% | 195 | 329 | | |
| | | | | | | 43% | 195 | 338 | | |
| | | | | | | 42% | 195 | 335 | | |
| | | | | | | 43% | 195 | 317 | | |
| | | | | | | 39% | 198 | 335 | | |
| | | | | | | 40% | 195 | 320 | | |
| | | | | | | 35% | 195 | 338 | | |
| | | | | | | 51% | 308 | 400 | | |
| | | | | | | 48% | 308 | 400 | | |
| | | | | | | 36% | 308 | 421 | | |
| | | | | | | 45% | 308 | 400 | | |
| | | | | | | 44% | 314 | 400 | | |
| | | | | | | 48% | 308 | 400 | | |
| | | | | | | 41% | 308 | 400 | | |
| | | | | | | 41% | 308 | 400 | | |
| | | | | | | 36% | 175 | 264 | | |
| | | | | | | 34% | 474 | 569 | | |
| | | | | | | 47% | 474 | 530 | | |
| | | | | | | 30% | 474 | 572 | | |
| | | | | | | 42% | 474 | 530 | | |
| | | | | | | 40% | 471 | 530 | | |
| HOSNN16 | 909265 | 673 | HMMER | PFAM: Zinc finger, C2H2 | PF00096 | 16.19 | 40 | 87 | | |
| | | | 1.8 | type | | | | | | |
| | | | blastx.2 | zinc finger protein [Homo | gb\|AAC50257.1\| | 33% | 63 | 233 | | |
| | | | | sapiens] | | 36% | 96 | 227 | | |
| | | | | | | 50% | 40 | 135 | | |
| | | | | | | 44% | 239 | 319 | | |
| | | | | | | 75% | 2 | 37 | | |
| | | | | | | 42% | 372 | 428 | | |
| HOUAA18 | 1153908 | 246 | blastx.14 | (AK001277) unnamed | gi\|7022432\|dbj\|BAA9 | 98% | 515 | 1051 | | |
| | | | | protein product [Homo | | 1596.1\| | 95% | 141 | 473 | |
| | | | | sapiens] | | 43% | 1032 | 1121 | | |
| HOUAA18 | 862945 | 674 | HMMER | PFAM: Zinc finger, C2H2 | PF00096 | 11.41 | 253 | 321 | | |
| | | | 1.8 | type | | | | | | |
| | | | blastx.2 | (AK001277) unnamed | dbj\|BAA91596.1\| | 82% | 211 | 594 | | |
| | | | | protein product [Homo | | 94% | 760 | 993 | | |
| | | | | sapiens] | | 85% | 596 | 775 | | |
| | 100% | 134 | 181 | | | | | | | |
| HOVCM01 | 916537 | 675 | HMMER | PFAM: Zinc finger, C2H2 | PF00096 | 8.61 | 325 | 366 | | |
| | | | 1.8 | type | | | | | | |
| HOVEK70 | 1152418 | 248 | blastx.14 | Bowel [Drosophila | gi\|1388166\|gb\|AAB1 | 85% | 8 | 259 | | |
| | | | | melanogaster] | 7949.1\| | 34% | 8 | 277 | | |
| | | | | | | 34% | 14 | 259 | | |
| | | | | | | 47% | 113 | 277 | | |
| | | | | | | 32% | 250 | 324 | | |
| | | | | | | 32% | 240 | 323 | | |
| | | | | | | 29% | 257 | 349 | | |
| HOVEK70 | 909138 | 676 | HMMER | PFAM: Zinc finger, C2H2 | PF00096 | 68.7 | 225 | 293 | | |
| | | | 2.1.1 | type | | | | | | |
| | | | blastx.2 | Bowel [Drosophila | gb\|AAB17949.1\| | 88% | 93 | 377 | | |
| | | | | melanogaster] | | 35% | 111 | 431 | | |
| | | | | | | 34% | 132 | 377 | | |
| | | | | | | 85% | 2 | 82 | | |
| | | | | | | 32% | 81 | 209 | | |
| | | | | | | 33% | 368 | 457 | | |
| HPDOW30 | 1152421 | 249 | blastx.14 | zinc finger protein [Mus | gi\|220637\|dbj\|BAA01 | 51% | 209 | 436 | | |
| | | | | musculus] | 477.1\| | 51% | 209 | 436 | | |
| | | | | | | 48% | 209 | 436 | | |
| | | | | | | 47% | 209 | 436 | | |
| | | | | | | 47% | 209 | 436 | | |
| | | | | | | 46% | 209 | 436 | | |
| | | | | | | 44% | 209 | 436 | | |
| | | | | | | 47% | 209 | 436 | | |
| | | | | | | 47% | 209 | 436 | | |
| | | | | | | 40% | 446 | 676 | | |
| | | | | | | 40% | 446 | 676 | | |
| | | | | | | 38% | 446 | 676 | | |
| | | | | | | 41% | 446 | 676 | | |
| | | | | | | 43% | 209 | 436 | | |
| | | | | | | 37% | 446 | 676 | | |
| | | | | | | 37% | 446 | 676 | | |
| | | | | | | 36% | 446 | 676 | | |
| | | | | | | 37% | 446 | 676 | | |
| | | | | | | 36% | 446 | 676 | | |
| | | | | | | 34% | 434 | 676 | | |
| | | | | | | 48% | 257 | 436 | | |
| | | | | | | 45% | 14 | 166 | | |
| | | | | | | 43% | 14 | 166 | | |
| | | | | | | 41% | 14 | 166 | | |
| | | | | | | 39% | 14 | 166 | | |
| | | | | | | 39% | 14 | 166 | | |
| | | | | | | 41% | 14 | 166 | | |
| | | | | | | 39% | 14 | 166 | | |
| | | | | | | 38% | 506 | 676 | | |
| | | | | | | 46% | 209 | 355 | | |
| | | | | | | 37% | 14 | 166 | | |
| | | | | | | 37% | 14 | 166 | | |
| | | | | | | 39% | 446 | 604 | | |
| | | | | | | 40% | 11 | 166 | | |
| | | | | | | 35% | 14 | 166 | | |
| | | | | | | 48% | 80 | 166 | | |
| | | | | | | 44% | 446 | 532 | | |
| | | | | | | 40% | 209 | 283 | | |
| HPDOW30 | 908953 | 677 | HMMER | PFAM: Zinc finger, C2H2 | PF00096 | 20.27 | 231 | 293 | | |
| | | | 1.8 | type | | | | | | |
| | | | blastx.2 | (AF064790) zinc finger- | gb\|AAF16412.1\| | 47% | 36 | 155 | | |
| | | | | like protein [Homo | | 44% | 48 | 155 | | |
| | | | | sapiens] | | 33% | 33 | 155 | | |
| | | | | | | 46% | 151 | 228 | | |
| | | | | | | 41% | 151 | 201 | | |
| HPTBW01 | 1217060 | 250 | blastx.14 | Zinc finger protein | sp\|AAG09701\|AAG0 | 57% | 249 | 905 | | |
| | | | | ZNF286. | 9701 | 54% | 165 | 836 | | |
| | | | | | | 56% | 159 | 752 | | |
| | | | | | | 52% | 498 | 905 | | |
| | | | | | | 46% | 186 | 404 | | |
| | | | | | | 46% | 270 | 488 | | |
| | | | | | | 44% | 333 | 569 | | |
| | | | | | | 41% | 501 | 740 | | |
| | | | | | | 42% | 417 | 656 | | |
| | | | | | | 42% | 606 | 824 | | |
| | | | | | | 39% | 669 | 905 | | |
| | | | | | | 42% | 159 | 320 | | |
| | | | | | | 23% | 519 | 671 | | |
| HPJBW01 | 916082 | 678 | HMMER | PFAM: Zinc finger, C2H2 | PF00096 | 40.3 | 266 | 334 | | |
| | | | 2.1.1 | type | | | | | | |
| | | | blastx.2 | zinc finger protein | gb\|AAC50254.1\| | 61% | 375 | 674 | | |
| | | | | ZNF135 [Homo sapiens] | | 57% | 375 | 674 | | |
| | | | | | | 58% | 375 | 674 | | |
| | | | | | | 56% | 375 | 674 | | |
| | | | | | | 59% | 375 | 674 | | |
| | | | | | | 53% | 339 | 674 | | |
| | | | | | | 59% | 375 | 674 | | |
| | | | | | | 57% | 375 | 674 | | |
| | | | | | | 56% | 393 | 674 | | |
| | | | | | | 54% | 375 | 674 | | |
| | | | | | | 52% | 375 | 671 | | |
| | | | | | | 50% | 375 | 674 | | |
| | | | | | | 50% | 375 | 674 | | |
| | | | | | | 55% | 423 | 674 | | |
| | | | | | | 48% | 176 | 427 | | |
| | | | | | | 56% | 375 | 590 | | |
| | | | | | | 46% | 176 | 427 | | |
| | | | | | | 55% | 176 | 370 | | |
| | | | | | | 53% | 170 | 370 | | |
| | | | | | | 53% | 176 | 370 | | |
| | | | | | | 52% | 176 | 370 | | |
| | | | | | | 53% | 176 | 370 | | |
| | | | | | | 50% | 176 | 370 | | |
| | | | | | | 41% | 170 | 427 | | |
| | | | | | | 49% | 176 | 370 | | |
| | | | | | | 49% | 176 | 370 | | |
| | | | | | | 47% | 176 | 370 | | |
| | | | | | | 46% | 176 | 370 | | |
| | | | | | | 46% | 176 | 370 | | |
| | | | | | | 56% | 176 | 340 | | |
| HPJDY61 | 1204715 | 251 | blastx.14 | DJ322G13.4 (zinc finger | sp\|CAC03440\|CAC0 | 100% | 60 | 731 | | |
| | | | | protein) (Fragment). | 3440 | 47% | 75 | 410 | | |
| | | | | | | 43% | 60 | 407 | | |
| | | | | | | 44% | 60 | 407 | | |
| | | | | | | 40% | 141 | 407 | | |
| | | | | | | 54% | 60 | 125 | | |
| HPJDY61 | 908638 | 679 | HMMER | PFAM: Zinc finger, C2H2 | PF00096 | 91 | 314 | 382 | | |
| | | | 2.1.1 | type | | | | | | |
| | | | blastx.2 | finger protein (clone | pir\|S06566\|S06566 | 49% | 53 | 400 | | |
| | | | | X1cGF26-1) - African | | 54% | 53 | 382 | | |
| | | | | clawed frog (fragment) | | 48% | 53 | 400 | | |
| | | | | | | 49% | 53 | 400 | | |
| | | | | | | 48% | 56 | 400 | | |
| | | | | | | 48% | 53 | 400 | | |
| | | | | | | 45% | 53 | 400 | | |
| | | | | | | 46% | 53 | 400 | | |
| | | | | | | 45% | 53 | 400 | | |
| | | | | | | 45% | 131 | 400 | | |
| | | | | | | 46% | 53 | 298 | | |
| HPMFR38 | 1155397 | 252 | blastx.14 | (AF234680) activity- | gi\|7211775\|gb\|AAF40 | 49% | 494 | 790 | | |
| | | | | dependent neuroprotective | 431.1 | 52% | 59 | 229 | | |
| | | | | 1 | | 30% | 26 | 94 | | |
| HPMFR38 | 951654 | 680 | HMMER | PFAM: Zinc finger, C2112 | PF00096 | 10.15 | 29 | 94 | | |
| | | | 1.8 | type | | | | | | |
| | | | blastx.2 | (AF234680) activity- | gb\|AAF40431.1\| | 39% | 356 | 790 | | |
| | | | | dependent neuroprotective | | 37% | 29 | 409 | | |
| | | | protein [Rattus 1 | | 30% | 26 | 94 | | | |
| HPRBD71 | 961943 | 681 | HMMER | PFAM: Zinc finger, C2H2 | PF00096 | 28.1 | 3108 | 170 | | |
| | | | 1.8 | type | | | | | | |
| | | | blastx.2 | (AK001559) unnamed | dbj\|BAA91755.1\| | 100% | 3 | 215 | | |
| | | | | protein product [Homo | | | | | | |
| | | | | sapiens] | | | | | | |
| HPSNA15 | 908997 | 254 | HMMER | PFAM: Zinc finger, C2H2 | PF00096 | 48.2 | 370 | 438 | | |
| | | | 2.1.1 | type | | | | | | |
| | | | blastx.2 | zinc finger protein zfp30 | gb\|AAB16811.1\| | 34% | 367 | 660 | | |
| | | | | [Homo sapiens] | | 28% | 322 | 660 | | |
| HRABN32 | 1152439 | 255 | blastx.14 | (AK001252) unnamed | gi\|7022392\|dbj\|BAA9 | 46% | 90 | 290 | | |
| | | | | protein product [Homo | 1582.1\| | 43% | 129 | 293 | | |
| | | | | sapiens] | | 35% | 90 | 290 | | |
| HRABN32 | 909000 | 682 | HMMER | PFAM: Zinc finger, C2H2 | PF00096 | 53.5 | 212 | 280 | | |
| | | | 2.1.1 | type | | | | | | |
| | | | blastx.2 | (AF167318) zinc finger | gb\|AAD45927.1\|AF1 | 42% | 119 | 280 | | |
| | | | | protein ZFP111 [Mus | 67318_1 | 42% | 80 | 280 | | |
| | | | | musculus] | | 40% | 119 | 280 | | |
| | | | | | | 42% | 125 | 280 | | |
| | | | | | | 42% | 119 | 280 | | |
| | | | | | | 40% | 119 | 280 | | |
| | | | | | | 37% | 119 | 280 | | |
| | | | | | | 38% | 119 | 280 | | |
| | | | | | | 40% | 125 | 271 | | |
| | | | | | | 35% | 119 | 280 | | |
| | | | | | | 40% | 119 | 280 | | |
| | | | | | | 56% | 40 | 87 | | |
| HRADZ91 | 966120 | 683 | HMMER | PFAM: Zinc finger, C2H2 | PF00096 | 87.4 | 825 | 893 | | |
| | | | 2.1.1 | type | | | | | | |
| | | | blastx.2 | (AF003924) ANC_2H01 | gb\|AAF21240.1\|AF0 | 100% | 3 | 1073 | | |
| | | | | [Homo sapiens] | 03924_1 | 22% | 78 | 1094 | | |
| HRGBG45 | 966777 | 684 | HMMER | PFAM: Zinc finger, C2H2 | PF00096 | 7.46 | 198 | 254 | | |
| | | | 1.8 | type | | | | | | |
| HS2AC50 | 1163071 | 258 | blastx.14 | (AJ388557) zinc finger | gi\|5441615\|emb\|CAB | 56% | 60 | 1115 | | |
| | | | | protein [Canis familiaris] | 46856.1\| | 57% | 66 | 1112 | | |
| | | | | | | 56% | 60 | 1115 | | |
| | | | | | | 57% | 93 | 1115 | | |
| | | | | | | 53% | 12 | 1115 | | |
| | | | | | | 53% | 60 | 1115 | | |
| | | | | | | 55% | 60 | 1064 | | |
| | | | | | | 52% | 60 | 1049 | | |
| | | | | | | 41% | 18 | 545 | | |
| | | | | | | 37% | 96 | 569 | | |
| | | | | | | 38% | 612 | 1073 | | |
| | | | | | | 39% | 399 | 821 | | |
| | | | | | | 35% | 276 | 737 | | |
| | | | | | | 35% | 192 | 653 | | |
| | | | | | | 32% | 432 | 905 | | |
| | | | | | | 33% | 528 | 989 | | |
| | | | | | | 39% | 84 | 401 | | |
| | | | | | | 33% | 696 | 1085 | | |
| | | | | | | 31% | 780 | 1136 | | |
| | | | | | | 39% | 66 | 233 | | |
| | | | | | | 27% | 852 | 1115 | | |
| | | | | | | 53% | 1332 | 1427 | | |
| | | | | | | 59% | 1335 | 1415 | | |
| | | | | | | 46% | 1359 | 1454 | | |
| | | | | | | 46% | 1332 | 1427 | | |
| | | | | | | 53% | 1332 | 1415 | | |
| | | | | | | 42% | 1338 | 1442 | | |
| | | | | | | 50% | 1335 | 1424 | | |
| | | | | | | 64% | 1377 | 1427 | | |
| | | | | | | 46% | 1338 | 1427 | | |
| | | | | | | 59% | 1359 | 1424 | | |
| | | | | | | 46% | 1359 | 1442 | | |
| | | | | | | 63% | 1359 | 1415 | | |
| | | | | | | 50% | 1332 | 1415 | | |
| | | | | | | 50% | 1359 | 1442 | | |
| | | | | | | 76% | 1377 | 1415 | | |
| | | | | | | 75% | 1377 | 1412 | | |
| | | | | | | 33% | 60 | 149 | | |
| | | | | | | 50% | 1377 | 1424 | | |
| | | | | | | 87% | 1377 | 1400 | | |
| | | | | | | 26% | 1151 | 1318 | | |
| | | | | | | 28% | 1151 | 1318 | | |
| | | | | | | 36% | 1383 | 1439 | | |
| | | | | | | 26% | 1151 | 1318 | | |
| | | | | | | 25% | 1160 | 1321 | | |
| | | | | | | 24% | 1145 | 1318 | | |
| | | | | | | 47% | 1160 | 1216 | | |
| HS2AC50 | 908617 | 685 | HMMER | PFAM: Zinc finger, C2H2 | PF00096 | 93.6 | 324 | 392 | | |
| | | | 2.1.1 | type | | | | | | |
| | | | blastx.2 | DNA binding protein | gb\|AAA79359.1\| | 55% | 30 | 500 | | |
| | | | | [Homo sapiens] | | 55% | 48 | 500 | | |
| | | | | | | 54% | 30 | 500 | | |
| | | | | | | 54% | 30 | 500 | | |
| | | | | | | 52% | 51 | 500 | | |
| | | | | | | 49% | 12 | 500 | | |
| | | | | | | 52% | 30 | 500 | | |
| | | | | | | 51% | 27 | 500 | | |
| | | | | | | 61% | 111 | 488 | | |
| | | | | | | 56% | 111 | 500 | | |
| | | | | | | 47% | 12 | 500 | | |
| | | | | | | 50% | 30 | 500 | | |
| | | | | | | 59% | 120 | 500 | | |
| | | | | | | 45% | 36 | 500 | | |
| | | | | | | 64% | 111 | 407 | | |
| | | | | | | 51% | 30 | 320 | | |
| HSAMK64 | 1161177 | 259 | blastx.14 | zinc finger protein | gi\|488551\|gb\|AAC50 | 58% | 4 | 573 | | |
| | | | | ZNF132 [Homo sapiens] | 252.1\| | 57% | 4 | 573 | | |
| | | | | | | 58% | 1 | 573 | | |
| | | | | | | 55% | 7 | 546 | | |
| | | | | | | 53% | 4 | 573 | | |
| | | | | | | 54% | 4 | 573 | | |
| | | | | | | 57% | 4 | 528 | | |
| | | | | | | 54% | 4 | 573 | | |
| | | | | | | 53% | 4 | 564 | | |
| | | | | | | 51% | 7 | 537 | | |
| | | | | | | 49% | 55 | 546 | | |
| | | | | | | 42% | 139 | 573 | | |
| | | | | | | 34% | 220 | 375 | | |
| | | | | | | 34% | 136 | 291 | | |
| | | | | | | 40% | 106 | 237 | | |
| | | | | | | 34% | 52 | 207 | | |
| | | | | | | 38% | 13 | 168 | | |
| | | | | | | 34% | 268 | 414 | | |
| | | | | | | 48% | 442 | 534 | | |
| | | | | | | 35% | 328 | 504 | | |
| | | | | | | 25% | 88 | 291 | | |
| | | | | | | 30% | 226 | 375 | | |
| | | | | | | 34% | 4 | 135 | | |
| | | | | | | 29% | 64 | 207 | | |
| | | | | | | 36% | 196 | 309 | | |
| | | | | | | 35% | 4 | 123 | | |
| | | | | | | 28% | 424 | 537 | | |
| | | | | | | 42% | 670 | 726 | | |
| | | | | | | 35% | 670 | 720 | | |
| | | | | | | 30% | 7 | 84 | | |
| | | | | | | 36% | 664 | 720 | | |
| | | | | | | 28% | 649 | 744 | | |
| | | | | | | 32% | 646 | 720 | | |
| HSAMK64 | 908502 | 686 | HMMER | PFAM: Zinc finger, C2H2 | PF00096 | 144.4 | 38 | 106 | | |
| | | | 2.1.1 | type | | | | | | |
| | | | blastx.2 | zinc finger protein | gb\|AAC50252.1\| | 58% | 5 | 574 | | |
| | | | | ZNF132 [Homo sapiens] | | 49% | 5 | 745 | | |
| | | | | | | 52% | 2 | 700 | | |
| | | | | | | 48% | 5 | 721 | | |
| | | | | | | 47% | 5 | 727 | | |
| | | | | | | 57% | 5 | 529 | | |
| | | | | | | 49% | 5 | 685 | | |
| | | | | | | 47% | 5 | 709 | | |
| | | | | | | 51% | 8 | 538 | | |
| | | | | | | 41% | 8 | 709 | | |
| | | | | | | 37% | 5 | 700 | | |
| | | | | | | 40% | 5 | 574 | | |
| | | | | | | 33% | 5 | 610 | | |
| | | | | | | 32% | 137 | 535 | | |
| HSAMQ05 | 907518 | 260 | HMMER | PFAM: B-box zinc finger. | PF00643 | 50.2 | 914 | 1039 | | |
| | | | 2.1.1 | | | | | | | |
| | | | blastx.2 | (AF156272) RING finger | gb\|AAD40287.1\| | 44% | 785 | 1069 | | |
| | | | | protein terf [Rattus | | 67% | 291 | 401 | | |
| | | | | norvegicus] | | | | | | |
| HSAXS43 | 1154795 | 261 | blastx.14 | (AK000424) unnamed | gi\|7020503\|dbj\|BAA9 | 98% | 7 | 255 | | |
| | | | | protein product [Homo | 1155.1\| | 53% | 7 | 213 | | |
| | | | | sapiens] | | 50% | 7 | 213 | | |
| | | | | | | 49% | 1 | 213 | | |
| | | | | | | 41% | 10 | 213 | | |
| HSAXS43 | 908659 | 687 | HMMER | PFAM: Zinc finger, C2H2 | PF00096 | 49 | 61 | 129 | | |
| | | | 2.1.1 | type | | | | | | |
| | | | blastx.2 | (AK1000424) unnamed | dbj\|BAA91155.1\| | 97% | 7 | 255 | | |
| | | | | protein product [Homo | | 52% | 7 | 213 | | |
| | | | | sapiens] | | 50% | 7 | 213 | | |
| | | | | | | 49% | 1 | 213 | | |
| | | | | | | 41% | 10 | 213 | | |
| HSCPD07 | 951877 | 688 | HMMER | PFAM: Zinc finger, C2H2 | PF00096 | 8.62 | 46 | 117 | | |
| | | | 1.8 | type | | | | | | |
| HSDEF10 | 1155394 | 263 | blastx.14 | (AB011414) Kruppel-type | gi\|4519270\|dbj\|BAA7 | 71% | 1 | 231 | | |
| | | | | zinc finger protein [Homo | 5543.1\| | 52% | 1 | 219 | | |
| | | | | sapiens] | | 51% | 10 | 219 | | |
| | | | | | | 50% | 1 | 228 | | |
| | | | | | | 51% | 10 | 219 | | |
| | | | | | | 47% | 1 | 219 | | |
| | | | | | | 52% | 37 | 219 | | |
| | | | | | | 47% | 1 | 219 | | |
| | | | | | | 50% | 31 | 219 | | |
| | | | | | | 42% | 1 | 219 | | |
| | | | | | | 47% | 37 | 219 | | |
| | | | | | | 42% | 1 | 228 | | |
| | | | | | | 39% | 1 | 219 | | |
| | | | | | | 43% | 1 | 219 | | |
| | | | | | | 52% | 1 | 159 | | |
| | | | | | | 55% | 85 | 219 | | |
| | | | | | | 62% | 124 | 219 | | |
| | | | | | | 40% | 37 | 207 | | |
| | | | | | | 56% | 242 | 331 | | |
| | | | | | | 46% | 236 | 331 | | |
| | | | | | | 50% | 236 | 319 | | |
| | | | | | | 48% | 239 | 331 | | |
| | | | | | | 43% | 236 | 331 | | |
| | | | | | | 51% | 239 | 331 | | |
| | | | | | | 50% | 236 | 319 | | |
| | | | | | | 43% | 236 | 331 | | |
| | | | | | | 48% | 239 | 331 | | |
| | | | | | | 45% | 239 | 331 | | |
| | | | | | | 43% | 236 | 346 | | |
| | | | | | | 46% | 236 | 319 | | |
| | | | | | | 40% | 236 | 316 | | |
| | | | | | | 40% | 236 | 331 | | |
| | | | | | | 44% | 236 | 316 | | |
| | | | | | | 41% | 281 | 331 | | |
| | | | | | | 36% | 236 | 292 | | |
| | | | | | | 36% | 236 | 292 | | |
| HSDEF10 | 964883 | 689 | HMMER | PFAM: Zinc finger, C2H2 | PF00096 | 43.7 | 55 | 123 | | |
| | | | 2.1.1 | type | | | | | | |
| | | | blastx.2 | (AB011414) Kruppel-type | dbj\|BAA75543.1\| | 72% | 1 | 219 | | |
| | | | | zinc finger protein [Homo | | 57% | 4 | 207 | | |
| | | | | sapiens] | | 55% | 19 | 207 | | |
| | | | | | | 55% | 1 | 207 | | |
| | | | | | | 53% | 25 | 207 | | |
| | | | | | | 38% | 16 | 372 | | |
| | | | | | | 52% | 16 | 216 | | |
| | | | | | | 52% | 25 | 207 | | |
| | | | | | | 50% | 10 | 207 | | |
| | | | | | | 54% | 16 | 207 | | |
| | | | | | | 52% | 25 | 207 | | |
| | | | | | | 48% | 16 | 207 | | |
| | | | | | | 45% | 25 | 207 | | |
| | | | | | | 44% | 22 | 216 | | |
| | | | | | | 45% | 16 | 207 | | |
| | | | | | | 40% | 25 | 195 | | |
| | | | | | | 57% | 206 | 319 | | |
| | | | | | | 46% | 206 | 319 | | |
| | | | | | | 48% | 206 | 307 | | |
| | | | | | | 43% | 206 | 319 | | |
| | | | | | | 48% | 227 | 319 | | |
| | | | | | | 51% | 227 | 319 | | |
| | | | | | | 50% | 224 | 307 | | |
| | | | | | | 43% | 206 | 319 | | |
| | | | | | | 43% | 224 | 319 | | |
| | | | | | | 46% | 206 | 319 | | |
| | | | | | | 48% | 227 | 319 | | |
| | | | | | | 45% | 206 | 307 | | |
| | | | | | | 41% | 206 | 319 | | |
| | | | | | | 41% | 206 | 304 | | |
| | | | | | | 36% | 206 | 319 | | |
| | | | | | | 44% | 224 | 304 | | |
| | | | | | | 39% | 206 | 280 | | |
| HSDEV59 | 908503 | 264 | HMMER | PFAM: Zinc finger, C2H2 | PF00096 | 44 | 333 | 401 | | |
| | | | 2.1.1 | type | | | | | | |
| | | | blastx.2 | NK10 [Mus musculus] | emb\|CAA56225.1\| | 97% | 455 | 676 | | |
| | | | | | | 90% | 240 | 464 | | |
| | | | | | | 68% | 455 | 676 | | |
| | | | | | | 66% | 452 | 676 | | |
| | | | | | | 41% | 249 | 659 | | |
| | | | | | | 60% | 455 | 676 | | |
| | | | | | | 60% | 452 | 676 | | |
| | | | | | | 58% | 455 | 676 | | |
| | | | | | | 61% | 455 | 664 | | |
| | | | | | | 37% | 150 | 608 | | |
| | | | | | | 53% | 252 | 464 | | |
| | | | | | | 50% | 237 | 464 | | |
| | | | | | | 50% | 455 | 673 | | |
| | | | | | | 52% | 473 | 676 | | |
| | | | | | | 48% | 5 | 244 | | |
| | | | | | | 44% | 455 | 676 | | |
| | | | | | | 31% | 210 | 608 | | |
| | | | | | | 31% | 192 | 464 | | |
| | | | | | | 43% | 237 | 413 | | |
| | | | | | | 32% | 143 | 670 | | |
| | | | | | | 48% | 452 | 580 | | |
| | | | | | | 34% | 461 | 676 | | |
| | | | | | | 36% | 252 | 446 | | |
| | | | | | | 33% | 252 | 419 | | |
| | | | | | | 31% | 276 | 440 | | |
| | | | | | | 28% | 29 | 205 | | |
| | | | | | | 29% | 23 | 196 | | |
| | | | | | | 25% | 177 | 446 | | |
| | | | | | | 28% | 29 | 196 | | |
| | | | | | | 28% | 29 | 205 | | |
| | | | | | | 28% | 29 | 196 | | |
| | | | | | | 45% | 146 | 205 | | |
| | | | | | | 22% | 29 | 190 | | |
| HSDFV12 | 1154796 | 265 | blastx.14 | zinc finger protein [Homo | gi\|498719\|emb\|CAA5 | 42% | 82 | 423 | | |
| | | | | sapiens] | 5524.1\| | 38% | 82 | 417 | | |
| | | | | | | 35% | 82 | 417 | | |
| | | | | | | 46% | 160 | 417 | | |
| | | | | | | 33% | 82 | 396 | | |
| | | | | | | 32% | 88 | 330 | | |
| | | | | | | 38% | 82 | 246 | | |
| HSDFV12 | 908628 | 690 | HMMER | PFAM: Zinc finger, C2H2 | PF00096 | 67.1 | 544 | 612 | | |
| | | | 2.1.1 | type | | | | | | |
| | | | blastx.2 | (AF111101) zinc finger | gb\|AAD40226.1\|AF1 | 32% | 79 | 795 | | |
| | | | | protein Zim1 [Mus | 11101_1 | 35% | 307 | 795 | | |
| | | | | musculus] | | 34% | 460 | 795 | | |
| | | | | | | 30% | 358 | 777 | | |
| | | | | | | 31% | 466 | 795 | | |
| | | | | | | 26% | 376 | 795 | | |
| | | | | | | 30% | 466 | 795 | | |
| | | | | | | 29% | 460 | 774 | | |
| | | | | | | 34% | 460 | 711 | | |
| | | | | | | 27% | 147 | 245 | | |
| HSDFY86 | 908943 | 266 | HMMER | PFAM: Zinc finger, C2H2 | PF00096 | 60.1 | 352 | 420 | | |
| | | | 2.1.1 | type | | | | | | |
| | | | blastx.2 | (AF167320) zinc finger | gb\|AAD45929.1\|AF1 | 45% | 70 | 381 | | |
| | | | | protein ZFP113 [Mus | 67320_1 | 44% | 70 | 381 | | |
| | | | | musculus] | | 43% | 76 | 381 | | |
| | | | | | | 41% | 55 | 381 | | |
| | | | | | | 42% | 55 | 351 | | |
| | | | | | | 46% | 124 | 381 | | |
| | | | | | | 38% | 76 | 381 | | |
| | | | | | | 40% | 432 | 509 | | |
| | | | | | | 40% | 432 | 509 | | |
| | | | | | | 37% | 432 | 509 | | |
| HSDJK49 | 722868 | 267 | HMMER | PFAM: Zinc finger, C2H2 | PF00096 | 9.39 | 151 | 219 | | |
| | | | 1.8 | type | | | | | | |
| HSKJK41 | 908482 | 691 | HMMER | PFAM: Zinc finger, C2H2 | PF00096 | 42.1 | 23 | 94 | | |
| | | | 2.1.1 | type | | | | | | |
| | | | blastx.2 | (AK001744) unnamed | dbj\|BAA91876.1\| | 84% | 2 | 271 | | |
| | | | | protein product [Homo | | 74% | 241 | 477 | | |
| | | | | sapiens] | | 34% | 2 | 268 | | |
| | | | | | | 32% | 5 | 259 | | |
| | | | | | | 26% | 5 | 271 | | |
| | | | | | | 38% | 5 | 190 | | |
| | | | | | | 31% | 2 | 256 | | |
| | | | | | | 37% | 2 | 169 | | |
| | | | | | | 28% | 29 | 271 | | |
| | | | | | | 32% | 241 | 360 | | |
| | | | | | | 40% | 271 | 351 | | |
| | | | | | | 62% | 482 | 529 | | |
| | | | | | | 38% | 274 | 336 | | |
| | | | | | | 28% | 241 | 345 | | |
| HSKKD63 | 1121913 | 269 | blastx.14 | finger protein - African | pir\|S00647\|S00647 | 65% | 229 | 351 | | |
| | | | | clawed frog | | 63% | 229 | 351 | | |
| | | | | | | 65% | 229 | 348 | | |
| | | | | | | 67% | 229 | 348 | | |
| | | | | | | 63% | 229 | 351 | | |
| | | | | | | 57% | 229 | 348 | | |
| | | | | | | 60% | 229 | 351 | | |
| | | | | | | 62% | 229 | 348 | | |
| | | | | | | 67% | 229 | 348 | | |
| | | | | | | 58% | 229 | 351 | | |
| | | | | | | 58% | 229 | 351 | | |
| | | | | | | 60% | 229 | 348 | | |
| | | | | | | 60% | 229 | 348 | | |
| | | | | | | 60% | 229 | 348 | | |
| | | | | | | 60% | 229 | 351 | | |
| | | | | | | 55% | 229 | 348 | | |
| | | | | | | 55% | 229 | 348 | | |
| | | | | | | 56% | 229 | 351 | | |
| | | | | | | 53% | 229 | 351 | | |
| | | | | | | 55% | 229 | 348 | | |
| | | | | | | 57% | 229 | 348 | | |
| | | | | | | 41% | 71 | 256 | | |
| | | | | | | 37% | 32 | 229 | | |
| | | | | | | 38% | 71 | 247 | | |
| | | | | | | 36% | 32 | 247 | | |
| | | | | | | 38% | 71 | 265 | | |
| | | | | | | 52% | 229 | 348 | | |
| | | | | | | 40% | 71 | 247 | | |
| | | | | | | 34% | 71 | 271 | | |
| | | | | | | 35% | 71 | 271 | | |
| | | | | | | 52% | 229 | 348 | | |
| | | | | | | 50% | 235 | 348 | | |
| | | | | | | 35% | 53 | 247 | | |
| | | | | | | 61% | 229 | 336 | | |
| | | | | | | 51% | 229 | 351 | | |
| | | | | | | 35% | 71 | 247 | | |
| | | | | | | 50% | 229 | 348 | | |
| | | | | | | 35% | 71 | 247 | | |
| | | | | | | 35% | 71 | 229 | | |
| | | | | | | 32% | 80 | 271 | | |
| | | | | | | 55% | 244 | 351 | | |
| | | | | | | 37% | 71 | 229 | | |
| | | | | | | 50% | 235 | 348 | | |
| | | | | | | 30% | 32 | 247 | | |
| | | | | | | 31% | 71 | 271 | | |
| | | | | | | 28% | 71 | 271 | | |
| | | | | | | 38% | 62 | 226 | | |
| | | | | | | 31% | 71 | 271 | | |
| | | | | | | 35% | 65 | 226 | | |
| | | | | | | 33% | 71 | 247 | | |
| | | | | | | 28% | 71 | 247 | | |
| | | | | | | 34% | 71 | 226 | | |
| | | | | | | 33% | 59 | 247 | | |
| | | | | | | 47% | 229 | 330 | | |
| | | | | | | 40% | 229 | 348 | | |
| | | | | | | 50% | 229 | 330 | | |
| | | | | | | 38% | 77 | 226 | | |
| | | | | | | 28% | 71 | 271 | | |
| | | | | | | 29% | 71 | 271 | | |
| | | | | | | 36% | 71 | 226 | | |
| | | | | | | 48% | 229 | 333 | | |
| | | | | | | 34% | 229 | 351 | | |
| | | | | | | 46% | 229 | 318 | | |
| | | | | | | 27% | 35 | 271 | | |
| | | | | | | 50% | 152 | 229 | | |
| | | | | | | 29% | 53 | 226 | | |
| | | | | | | 33% | 229 | 318 | | |
| | | | | | | 46% | 313 | 351 | | |
| | | | | | | 20% | 5 | 109 | | |
| | | | | | | 66% | 438 | 464 | | |
| | | | | | | 46% | 310 | 348 | | |
| | | | | | | 37% | 570 | 617 | | |
| | | | | | | 35% | 570 | 620 | | |
| HSKKD63 | 908622 | 692 | HMMER | PFAM: Zinc finger, C2H2 | PF00096 | 52.7 | 229 | 297 | | |
| | | | 2.1.1 | type | | | | | | |
| | | | blastx.2 | finger protein - African | pir\|S00647\|S00647 | 65% | 127 | 249 | | |
| | | | | clawed frog | | 63% | 127 | 249 | | |
| | | | | | | 65% | 127 | 246 | | |
| | | | | | | 67% | 127 | 246 | | |
| | | | | | | 63% | 127 | 249 | | |
| | | | | | | 57% | 127 | 246 | | |
| | | | | | | 60% | 127 | 249 | | |
| | | | | | | 62% | 127 | 246 | | |
| | | | | | | 67% | 127 | 246 | | |
| | | | | | | 58% | 127 | 249 | | |
| | | | | | | 58% | 127 | 249 | | |
| | | | | | | 60% | 127 | 246 | | |
| | | | | | | 60% | 127 | 246 | | |
| | | | | | | 60% | 127 | 246 | | |
| | | | | | | 60% | 127 | 249 | | |
| | | | | | | 55% | 127 | 246 | | |
| | | | | | | 55% | 127 | 246 | | |
| | | | | | | 56% | 127 | 249 | | |
| | | | | | | 53% | 127 | 249 | | |
| | | | | | | 55% | 127 | 246 | | |
| | | | | | | 57% | 127 | 246 | | |
| | | | | | | 52% | 127 | 246 | | |
| | | | | | | 52% | 127 | 246 | | |
| | | | | | | 50% | 133 | 246 | | |
| | | | | | | 61% | 127 | 234 | | |
| | | | | | | 51% | 127 | 249 | | |
| | | | | | | 55% | 142 | 249 | | |
| | | | | | | 50% | 133 | 246 | | |
| | | | | | | 38% | 127 | 249 | | |
| | | | | | | 40% | 127 | 246 | | |
| | | | | | | 34% | 127 | 249 | | |
| | | | | | | 52% | 83 | 145 | | |
| | | | | | | 52% | 83 | 145 | | |
| | | | | | | 57% | 51 | 92 | | |
| | | | | | | 57% | 51 | 92 | | |
| | | | | | | 64% | 83 | 124 | | |
| | | | | | | 50% | 51 | 92 | | |
| | | | | | | 47% | 83 | 145 | | |
| | | | | | | 27% | 6 | 92 | | |
| | | | | | | 42% | 83 | 145 | | |
| | | | | | | 64% | 83 | 124 | | |
| | | | | | | 40% | 83 | 139 | | |
| | | | | | | 50% | 51 | 92 | | |
| | | | | | | 42% | 51 | 92 | | |
| | | | | | | 47% | 95 | 145 | | |
| | | | | | | 50% | 324 | 374 | | |
| | | | | | | 50% | 51 | 92 | | |
| | | | | | | 50% | 51 | 92 | | |
| | | | | | | 41% | 54 | 104 | | |
| | | | | | | 42% | 51 | 92 | | |
| | | | | | | 38% | 83 | 145 | | |
| | | | | | | 50% | 51 | 92 | | |
| | | | | | | 87% | 101 | 124 | | |
| | | | | | | 42% | 51 | 92 | | |
| | | | | | | 42% | 51 | 92 | | |
| | | | | | | 50% | 51 | 92 | | |
| HSKKR04 | 926751 | 693 | HMMER | PFAM: Zinc finger, C2H2 | PF00096 | 41.2 | 394 | 462 | | |
| | | | 2.1.1 | type | | | | | | |
| HSOBE61 | 908598 | 694 | HMMER | PFAM: Zinc finger, C2H2 | PF00096 | 11.74 | 226 | 288 | | |
| | | | 1.8 | type | | | | | | |
| | | | blastx.2 | zinc finger protein [Homo | emb\|CAA55532.1\| | 62% | 1 | 300 | | |
| | | | | sapiens] | | 50% | 28 | 381 | | |
| | | | | | | 58% | 13 | 300 | | |
| | | | | | | 59% | 16 | 300 | | |
| | | | | | | 52% | 73 | 381 | | |
| | | | | | | 51% | 13 | 300 | | |
| | | | | | | 67% | 356 | 493 | | |
| | | | | | | 63% | 356 | 493 | | |
| | | | | | | 63% | 356 | 493 | | |
| | | | | | | 54% | 356 | 493 | | |
| | | | | | | 67% | 356 | 475 | | |
| | | | | | | 56% | 356 | 493 | | |
| | | | | | | 56% | 347 | 490 | | |
| | | | | | | 38% | 356 | 463 | | |
| | | | | | | 52% | 288 | 335 | | |
| HSSET42 | 909010 | 695 | HMMER | PFAM: Zinc finger, C2H2 | PF00096 | 129.1 | 210 | 278 | | |
| | | | 2.1.1 | type | | | | | | |
| | | | blastx.2 | Ztp-29 [Mus musculus] | emb\|CAA38920.1\| | 58% | 428 | 865 | | |
| | | | | | | 54% | 431 | 865 | | |
| | | | | | | 54% | 431 | 865 | | |
| | | | | | | 54% | 431 | 865 | | |
| | | | | | | 54% | 425 | 865 | | |
| | | | | | | 55% | 431 | 865 | | |
| | | | | | | 53% | 425 | 865 | | |
| | | | | | | 53% | 410 | 865 | | |
| | | | | | | 61% | 48 | 425 | | |
| | | | | | | 59% | 48 | 425 | | |
| | | | | | | 57% | 48 | 425 | | |
| | | | | | | 50% | 431 | 865 | | |
| | | | | | | 58% | 48 | 440 | | |
| | | | | | | 59% | 48 | 422 | | |
| | | | | | | 58% | 48 | 425 | | |
| | | | | | | 55% | 48 | 440 | | |
| | | | | | | 50% | 434 | 865 | | |
| | | | | | | 59% | 48 | 425 | | |
| | | | | | | 55% | 48 | 437 | | |
| | | | | | | 56% | 48 | 425 | | |
| | | | | | | 55% | 428 | 799 | | |
| | | | | | | 57% | 48 | 380 | | |
| | | | | | | 52% | 60 | 425 | | |
| | | | | | | 46% | 602 | 865 | | |
| HSSFW37 | 667688 | 696 | HMMER | PFAM: Zinc finger, C2H2 | PF00096 | 6.44 | 263 | 295 | | |
| | | | 1.8 | type | | | | | | |
| HSSJE32 | 909261 | 697 | HMMER | PFAM: Zinc finger, C2H2 | PF00096 | 110.3 | 455 | 523 | | |
| | | | 2.1.1 | type | | | | | | |
| | | | blastx.2 | (AJ388557) zinc finger | emb\|CAB46856.1\| | 51% | 8 | 583 | | |
| | | | | protein [Canis familiaris] | | 46% | 8 | 619 | | |
| | | | | | | 51% | 8 | 568 | | |
| | | | | | | 50% | 8 | 568 | | |
| | | | | | | 49% | 8 | 568 | | |
| | | | | | | 48% | 8 | 568 | | |
| | | | | | | 48% | 8 | 568 | | |
| | | | | | | 48% | 8 | 568 | | |
| | | | | | | 47% | 11 | 568 | | |
| | | | | | | 48% | 8 | 574 | | |
| | | | | | | 48% | 26 | 568 | | |
| | | | | | | 44% | 8 | 568 | | |
| | | | | | | 42% | 26 | 547 | | |
| | | | | | | 44% | 38 | 583 | | |
| | | | | | | 42% | 8 | 532 | | |
| | | | | | | 45% | 65 | 574 | | |
| | | | | | | 39% | 134 | 556 | | |
| | | | | | | 36% | 62 | 568 | | |
| | | | | | | 34% | 131 | 571 | | |
| | | | | | | 82% | 577 | 663 | | |
| | | | | | | 74% | 577 | 657 | | |
| | | | | | | 77% | 580 | 660 | | |
| | | | | | | 62% | 559 | 654 | | |
| | | | | | | 70% | 577 | 657 | | |
| | | | | | | 62% | 577 | 663 | | |
| | | | | | | 54% | 559 | 663 | | |
| | | | | | | 76% | 580 | 654 | | |
| | | | | | | 46% | 508 | 657 | | |
| | | | | | | 70% | 583 | 663 | | |
| | | | | | | 51% | 559 | 657 | | |
| | | | | | | 66% | 577 | 657 | | |
| | | | | | | 65% | 577 | 654 | | |
| | | | | | | 57% | 577 | 654 | | |
| | | | | | | 61% | 577 | 654 | | |
| | | | | | | 65% | 577 | 654 | | |
| | | | | | | 43% | 529 | 657 | | |
| | | | | | | 56% | 589 | 663 | | |
| | | | | | | 52% | 565 | 615 | | |
| | | | | | | 43% | 583 | 630 | | |
| HSTAO59 | 908993 | 698 | HMMER | PFAM: Zinc finger, C2H2 | PF00096 | 55.2 | 271 | 339 | | |
| | | | 2.1.1 | type | | | | | | |
| | | | blastx.2 | Zfp64 [Mus musculus] | gb\|AAC53039.1\| | 78% | 1 | 342 | | |
| | | | | | | 40% | 10 | 339 | | |
| | | | | | | 42% | 58 | 342 | | |
| | | | | | | 40% | 64 | 333 | | |
| | | | | | | 36% | 1 | 333 | | |
| | | | | | | 35% | 1 | 339 | | |
| | | | | | | 65% | 329 | 442 | | |
| | | | | | | 38% | 356 | 433 | | |
| | | | | | | 41% | 353 | 424 | | |
| | | | | | | 29% | 353 | 424 | | |
| | | | | | | 30% | 103 | 186 | | |
| HSYDC34 | 922881 | 699 | HMMER | PFAM: Zinc finger, C2H2 | PF00096 | 101.7 | 331 | 399 | | |
| | | | 2.1.1 | type | | | | | | |
| | | | blastx.2 | zinc finger protein | gb\|AAC50254.1\| | 48% | 13 | 603 | | |
| | | | | ZNF135 [Homo sapiens] | | 62% | 16 | 414 | | |
| | | | | | | 47% | 16 | 588 | | |
| | | | | | | 49% | 16 | 609 | | |
| | | | | | | 46% | 16 | 609 | | |
| | | | | | | 43% | 16 | 609 | | |
| | | | | | | 46% | 16 | 603 | | |
| | | | | | | 52% | 16 | 465 | | |
| | | | | | | 58% | 16 | 405 | | |
| | | | | | | 49% | 16 | 492 | | |
| | | | | | | 43% | 67 | 609 | | |
| | | | | | | 45% | 142 | 603 | | |
| | | | | | | 38% | 633 | 929 | | |
| | | | | | | 31% | 633 | 989 | | |
| | | | | | | 33% | 633 | 995 | | |
| | | | | | | 37% | 633 | 908 | | |
| | | | | | | 35% | 633 | 926 | | |
| | | | | | | 35% | 630 | 908 | | |
| | | | | | | 35% | 633 | 908 | | |
| | | | | | | 34% | 633 | 908 | | |
| | | | | | | 31% | 455 | 805 | | |
| | | | | | | 32% | 633 | 788 | | |
| | | | | | | 42% | 698 | 775 | | |
| | | | | | | 38% | 710 | 802 | | |
| | | | | | | 38% | 917 | 970 | | |
| HTAEZ50 | 909259 | 700 | HMMER | PFAM: Zinc finger, C2H2 | PF00096 | 127.8 | 217 | 285 | | |
| | | | 2.1.1 | type | | | | | | |
| | | | blastx.2 | zinc finger protein [Homo | emb\|CAA55524.1\| | 59% | 100 | 567 | | |
| | | | | sapiens] | | 63% | 127 | 564 | | |
| | | | | | | 56% | 100 | 549 | | |
| | | | | | | 61% | 211 | 567 | | |
| HTEBJ03 | 908596 | 701 | HMMER | PFAM: Zinc finger, C2H2 | PF00096 | 88 | 106 | 174 | | |
| | | | 2.1.1 | type | | | | | | |
| | | | blastx.2 | pMLZ-4 [Mus musculus] | gb\|AAA39949.1\| | 98% | 1 | 264 | | |
| | | | | | | 68% | 4 | 261 | | |
| | | | | | | 66% | 4 | 261 | | |
| | | | | | | 62% | 1 | 261 | | |
| | | | | | | 63% | 4 | 261 | | |
| | | | | | | 63% | 4 | 261 | | |
| | | | | | | 64% | 1 | 261 | | |
| | | | | | | 63% | 4 | 261 | | |
| | | | | | | 58% | 4 | 261 | | |
| | | | | | | 56% | 4 | 261 | | |
| | | | | | | 50% | 34 | 261 | | |
| HTEGT13 | 979683 | 279 | blastx.14 | (AL049660) zinc finger- | gi\|4678280\|emb\|CAB | 28% | 296 | 508 | | |
| | | | | like protein [Arabidopsis | 41188.1\| | | | | | |
| | | | | thaliana] | | | | | | |
| HTEGT13 | 787522 | 702 | HMMER | PFAM: Zinc finger, C2H2 | PF00096 | 12.97 | 264 | 347 | | |
| | | | 1.8 | type | | | | | | |
| | | | blastx.2 | (AC002330) putative zinc | gb\|AAC78253.1\|AAC | 36% | 252 | 497 | | |
| | | | | finger protein | 78253 | | | | | |
| | | | | [Arabidopsis thaliana] | | | | | | |
| HTEIA48 | 762002 | 703 | HMMER | PFAM: Zinc finger, C2H2 | PF00096 | 9.3 | 319 | 390 | | |
| | | | 1.8 | type | | | | | | |
| | | | blastx.2 | (AL137478) hypothetical | emb\|CAB70759.1\| | 100% | 88 | 567 | | |
| | | | | protein [Homo sapiens] | | 100% | 569 | 607 | | |
| HTEMR65 | 1152260 | 281 | blastx.14 | zinc finger protein mfg1 | gi\|554203\|gb\|AAA39 | 53% | 11 | 295 | | |
| | | | | mRNA (put.); putative | 531.1\| | 50% | 11 | 292 | | |
| | | | | [Mus musculus] | | 49% | 20 | 292 | | |
| | | | | | | 48% | 11 | 256 | | |
| | | | | | | 46% | 11 | 190 | | |
| HTEMR65 | 909280 | 704 | HMMER | PFAM: Zinc finger, C2H2 | PF00096 | 51.5 | 35 | 103 | | |
| | | | | 2.1.1 | type | | | | | |
| | | | blastx.2 | zinc finger protein [Homo | emb\|CAA55533.1\| | 61% | 2 | 286 | | |
| | | | | sapiens] | | 56% | 2 | 286 | | |
| | | | | | | 56% | 2 | 286 | | |
| | | | | | | 54% | 2 | 292 | | |
| | | | | | | 52% | 2 | 286 | | |
| | | | | | | 50% | 2 | 304 | | |
| | | | | | | 53% | 2 | 286 | | |
| | | | | | | 51% | 2 | 286 | | |
| | | | | | | 51% | 2 | 286 | | |
| | | | | | | 53% | 5 | 286 | | |
| | | | | | | 51% | 2 | 283 | | |
| | | | | | | 52% | 5 | 286 | | |
| | | | | | | 51% | 2 | 283 | | |
| | | | | | | 40% | 909 | 998 | | |
| | | | | | | 45% | 866 | 931 | | |
| HTGAS31 | 1161573 | 282 | blastx.14 | zinc finger protein C2H2- | gi\|1199604\|gb\|AAA9 | 65% | 15 | 224 | | |
| | | | | 25 [Homo sapiens] | 3261.1\| | 61% | 21 | 215 | | |
| | | | | | | 59% | 18 | 215 | | |
| | | | | | | 57% | 21 | 224 | | |
| | | | | | | 57% | 21 | 224 | | |
| | | | | | | 55% | 21 | 224 | | |
| | | | | | | 52% | 15 | 224 | | |
| | | | | | | 53% | 21 | 215 | | |
| | | | | | | 50% | 21 | 224 | | |
| | | | | | | 51% | 24 | 215 | | |
| | | | | | | 55% | 21 | 134 | | |
| | | | | | | 35% | 33 | 224 | | |
| | | | | | | 45% | 312 | 371 | | |
| | | | | | | 37% | 300 | 371 | | |
| | | | | | | 50% | 318 | 371 | | |
| | | | | | | 50% | 318 | 371 | | |
| | | | | | | 50% | 318 | 371 | | |
| | | | | | | 50% | 318 | 371 | | |
| | | | | | | 50% | 318 | 371 | | |
| | | | | | | 39% | 318 | 386 | | |
| | | | | | | 44% | 318 | 371 | | |
| HTGAS31 | 909198 | 705 | HMMER | PFAM: Zinc finger, C2H2 | PF00096 | 53.4 | 99 | 167 | | |
| | | | 2.1.1 | type | | | | | | |
| | | | blastx.2 | Zinc finger [Homo | gb\|AAA36818.1\| | 52% | 30 | 179 | | |
| | | | | sapiens] | | 49% | 30 | 200 | | |
| | | | | | | 43% | 30 | 188 | | |
| | | | | | | 36% | 30 | 269 | | |
| | | | | | | 62% | 1 | 48 | | |
| | | | | | | 69% | 1 | 39 | | |
| | | | | | | 69% | 1 | 39 | | |
| | | | | | | 69% | 1 | 39 | | |
| | | | | | | 40% | 241 | 321 | | |
| HTLAI85 | 1216550 | 283 | blastx.14 | Smad-and Olf-interacting | sp\|AAF28354\|AAF28 | 24% | 785 | 1051 | | |
| | | | | zinc finger protein | 354 | 30% | 236 | 424 | | |
| | | | | (Fragment). | | 33% | 485 | 637 | | |
| | | | | | | 29% | 842 | 1006 | | |
| | | | | | | 28% | 842 | 997 | | |
| | | | | | | 32% | 914 | 1042 | | |
| | | | | | | 30% | 233 | 358 | | |
| | | | | | | 28% | 842 | 997 | | |
| | | | | | | 42% | 920 | 997 | | |
| | | | | | | 25% | 284 | 448 | | |
| | | | | | | 29% | 1226 | 1336 | | |
| | | | | | | 31% | 284 | 424 | | |
| | | | | | | 26% | 518 | 643 | | |
| | | | | | | 24% | 284 | 454 | | |
| | | | | | | 44% | 932 | 1006 | | |
| | | | | | | 44% | 290 | 364 | | |
| | | | | | | 31% | 926 | 1039 | | |
| | | | | | | 33% | 1343 | 1432 | | |
| | | | | | | 37% | 917 | 997 | | |
| | | | | | | 26% | 926 | 1015 | | |
| | | | | | | 31% | 113 | 217 | | |
| | | | | | | 32% | 920 | 994 | | |
| | | | | | | 36% | 560 | 634 | | |
| | | | | | | 25% | 1250 | 1402 | | |
| | | | | | | 22% | 920 | 1039 | | |
| | | | | | | 31% | 113 | 208 | | |
| | | | | | | 34% | 566 | 634 | | |
| | | | | | | 28% | 518 | 634 | | |
| | | | | | | 21% | 806 | 985 | | |
| | | | | | | 34% | 566 | 634 | | |
| | | | | | | 33% | 926 | 997 | | |
| | | | | | | 29% | 563 | 634 | | |
| | | | | | | 17% | 239 | 457 | | |
| | | | | | | 36% | 1352 | 1426 | | |
| | | | | | | 32% | 560 | 634 | | |
| | | | | | | 25% | 482 | 622 | | |
| | | | | | | 40% | 368 | 433 | | |
| | | | | | | 42% | 563 | 625 | | |
| | | | | | | 35% | 1031 | 1132 | | |
| | | | | | | 27% | 371 | 457 | | |
| | | | | | | 30% | 374 | 463 | | |
| | | | | | | 40% | 374 | 439 | | |
| | | | | | | 28% | 269 | 373 | | |
| | | | | | | 34% | 839 | 907 | | |
| | | | | | | 22% | 1259 | 1402 | | |
| | | | | | | 28% | 284 | 358 | | |
| | | | | | | 30% | 374 | 442 | | |
| | | | | | | 36% | 833 | 907 | | |
| | | | | | | 33% | 926 | 997 | | |
| | | | | | | 27% | 368 | 454 | | |
| | | | | | | 38% | 569 | 622 | | |
| | | | | | | 36% | 842 | 907 | | |
| | | | | | | 22% | 896 | 1000 | | |
| | | | | | | 23% | 842 | 931 | | |
| | | | | | | 34% | 971 | 1048 | | |
| | | | | | | 25% | 368 | 484 | | |
| | | | | | | 34% | 932 | 1009 | | |
| | | | | | | 50% | 485 | 526 | | |
| | | | | | | 28% | 643 | 759 | | |
| | | | | | | 40% | 284 | 343 | | |
| | | | | | | 26% | 263 | 421 | | |
| | | | | | | 33% | 1256 | 1318 | | |
| | | | | | | 36% | 1352 | 1417 | | |
| | | | | | | 29% | 557 | 637 | | |
| | | | | | | 22% | 518 | 625 | | |
| | | | | | | 31% | 1262 | 1318 | | |
| | | | | | | 31% | 1352 | 1417 | | |
| | | | | | | 31% | 563 | 628 | | |
| | | | | | | 33% | 113 | 175 | | |
| | | | | | | 43% | 1751 | 1798 | | |
| | | | | | | 42% | 1015 | 1056 | | |
| | | | | | | 31% | 1352 | 1417 | | |
| | | | | | | 30% | 563 | 622 | | |
| | | | | | | 33% | 284 | 355 | | |
| | | | | | | 38% | 566 | 628 | | |
| | | | | | | 28% | 899 | 982 | | |
| | | | | | | 30% | 890 | 1009 | | |
| | | | | | | 26% | 1259 | 1327 | | |
| | | | | | | 22% | 83 | 175 | | |
| | | | | | | 31% | 1262 | 1327 | | |
| | | | | | | 21% | 1250 | 1318 | | |
| | | | | | | 31% | 2288 | 2353 | | |
| | | | | | | 35% | 110 | 169 | | |
| | | | | | | 29% | 368 | 439 | | |
| | | | | | | 36% | 1349 | 1405 | | |
| | | | | | | 42% | 995 | 1051 | | |
| | | | | | | 71% | 1016 | 1036 | | |
| | | | | | | 36% | 1259 | 1315 | | |
| | | | | | | 35% | 485 | 526 | | |
| | | | | | | 26% | 1349 | 1405 | | |
| | | | | | | 34% | 1028 | 1096 | | |
| | | | | | | 31% | 563 | 628 | | |
| | | | | | | 20% | 794 | 898 | | |
| | | | | | | 40% | 359 | 403 | | |
| HTLAI85 | 929553 | 706 | HMMER | PFAM: Zinc finger, C2H2 | PF00096 | 13.97 | 205 | 267 | | |
| | | | 1.8 | type | | | | | | |
| | | | blastx.2 | similarto human ZFY | dbj\|BAA13202.1\| | 77% | 10 | 702 | | |
| | | | | protein. [Homo sapiens] | | | | | | |
| HTLAV59 | 693959 | 707 | HMMER | PFAM: Zinc finger, C2H2 | PF00096 | 36.8 | 119 | 187 | | |
| | | | 2.1.1 | type | | | | | | |
| | | | blastx.2 | (AC007228) BC37295_3 | gb\|AAD23609.1\|AC0 | 50% | 56 | 235 | | |
| | | | | [Homo sapiens] | 07228_4 | 51% | 62 | 235 | | |
| | | | | | | 48% | 56 | 235 | | |
| | | | | | | 43% | 56 | 235 | | |
| | | | | | | 45% | 56 | 220 | | |
| | | | | | | 45% | 56 | 235 | | |
| | | | | | | 41% | 56 | 235 | | |
| | | | | | | 37% | 56 | 223 | | |
| | | | | | | 30% | 9 | 68 | | |
| | | | | | | 35% | 9 | 59 | | |
| HTLDE64 | 908613 | 285 | HMMER | PFAM: Zinc finger, C2H2 | PF00096 | 47.6 | 197 | 271 | | |
| | | | 2.1.1 | type | | | | | | |
| | | | blastx.2 | Kruppei-like factor LKLF | gb\|AAA86728.1\| | 61% | 179 | 355 | | |
| | | | | [Mus musculus] | | 42% | 57 | 176 | | |
| HTLDF33 | 1153921 | 286 | blastx.14 | (AL022067) dJ134E15.1 | gi\|4455442\|emb\|CAB | 77% | 5 | 379 | | |
| | | | | (Blimp-1) [Homo sapiens] | 36862.1\| | 51% | 47 | 310 | | |
| | | | | | | 38% | 32 | 367 | | |
| | | | | | | 41% | 116 | 382 | | |
| | | | | | | 35% | 5 | 199 | | |
| HTLDF33 | 909254 | 708 | HMMER | PFAM: Zinc finger, C2H2 | PF00096 | 80.8 | 51 | 119 | | |
| | | | 2.1.1 | type | | | | | | |
| | | | blastx.2 | (AL022067) dJ134E15.1 | emb\|CAB36862.1\| | 70% | 12 | 422 | | |
| | | | | (Blimp-1) [Homo sapiens] | | 38% | 24 | 392 | | |
| HTLFE19 | 1178595 | 287 | blastx.14 | similarto human ZFY | gi\|1504006\|dbj\|BAA1 | 100% | 11 | 955 | | |
| | | | | protein. [Homo sapiens] | 3202.1\| | 100% | 1049 1213 | | | |
| | | | | | | 40% | 356 | 421 | | |
| | | | | | | 35% | 154 | 213 | | |
| | | | | | | 30% | 449 | 526 | | |
| | | | | | | 32% | 203 | 304 | | |
| | | | | | | 41% | 854 | 925 | | |
| | | | | | | 30% | 872 | 940 | | |
| | | | | | | 34% | 352 | 447 | | |
| | | | | | | 36% | 449 | 505 | | |
| | | | | | | 28% | 563 | 658 | | |
| | | | | | | 30% | 89 | 157 | | |
| | | | | | | 26% | 872 | 928 | | |
| | | | | | | 43% | 623 | 670 | | |
| HTLFE19 | 955240 | 709 | HMMER | PFAM: Zinc finger, C2H2 | PF00096 | 68.7 | 1693 | 1622 | | |
| | | | 2.1.1 | type | | | | | | |
| | | | blastx.2 | similarto human ZFY | dbj\|BAA13202.1\| | 89% | 2092 | 929 | | |
| | | | | protein. [Homo sapiens] | | 79% | 2132 | 2031 | | |
| | | | | | | 33% | 2071 | 1985 | | |
| HTLJE30 | 1186867 | 288 | blastx.14 | finger protein (clone | pir\|S06561\|S06561 | 35% | 13 | 165 | | |
| | | | | X1cGF8.2db) - African | | 38% | 13 | 159 | | |
| | | | | clawed frog (fragment) | | 44% | 331 | 438 | | |
| | | | | | | 34% | 13 | 159 | | |
| | | | | | | 48% | 358 | 438 | | |
| | | | | | | 34% | 13 | 159 | | |
| | | | | | | 42% | 331 | 435 | | |
| | | | | | | 50% | 358 | 435 | | |
| | | | | | | 32% | 13 | 159 | | |
| | | | | | | 44% | 358 | 438 | | |
| | | | | | | 42% | 607 | 690 | | |
| | | | | | | 42% | 502 | 600 | | |
| | | | | | | 36% | 340 | 438 | | |
| | | | | | | 47% | 91 | 159 | | |
| | | | | | | 37% | 358 | 438 | | |
| | | | | | | 38% | 610 | 687 | | |
| | | | | | | 36% | 502 | 600 | | |
| | | | | | | 36% | 502 | 600 | | |
| | | | | | | 36% | 502 | 600 | | |
| | | | | | | 36% | 502 | 600 | | |
| | | | | | | 30% | 502 | 600 | | |
| | | | | | | 42% | 610 | 687 | | |
| | | | | | | 34% | 610 | 687 | | |
| | | | | | | 34% | 610 | 687 | | |
| HTLIE30 | 947012 | 710 | HMMER | PFAM: Zinc finger, C2H2 | PF00096 | 69.4 | 653 | 721 | | |
| | | | 2.1.1 | type | | | | | | |
| | | | blastx.2 | zinc finger protein | gb\|AAC50254.1\| | 29% | 221 | 883 | | |
| | | | | ZNF135 [Homo sapiens] | | 29% | 221 | 964 | | |
| | | | | | | 26% | 128 | 904 | | |
| | | | | | | 25% | 221 | 997 | | |
| | | | | | | 32% | 563 | 964 | | |
| | | | | | | 24% | 272 | 964 | | |
| | | | | | | 25% | 221 | 724 | | |
| | | | | | | 25% | 341 | 904 | | |
| HTNBJ90 | 909275 | 711 | HMMER | PFAM: Zinc finger, C2H2 | PF00096 | 53.8 | 257 | 325 | | |
| | | | 2.1.1 | type | | | | | | |
| | | | blastx.2 | zinc finger protein (mkr5) | gb\|AAA37 120.1\| | 61% | 89 | 418 | | |
| | | | | [Mus musculus] | | 76% | 164 | 418 | | |
| | | | | | | 93% | 1 | 180 | | |
| | | | | | | 46% | 131 | 406 | | |
| | | | | | | 52% | 164 | 406 | | |
| | | | | | | 54% | 164 | 406 | | |
| | | | | | | 52% | 164 | 418 | | |
| | | | | | | 63% | 1 | 180 | | |
| | | | | | | 50% | 164 | 418 | | |
| | | | | | | 43% | 1 | 327 | | |
| | | | | | | 51% | 185 | 421 | | |
| | | | | | | 43% | 1 | 327 | | |
| | | | | | | 43% | 1 | 327 | | |
| | | | | | | 48% | 164 | 418 | | |
| | | | | | | 50% | 164 | 418 | | |
| | | | | | | 53% | 185 | 406 | | |
| | | | | | | 50% | 164 | 391 | | |
| | | | | | | 55% | 1 | 201 | | |
| | | | | | | 53% | 1 | 180 | | |
| | | | | | | 55% | 1 | 201 | | |
| | | | | | | 41% | 1 | 336 | | |
| | | | | | | 38% | 86 | 418 | | |
| | | | | | | 52% | 1 | 201 | | |
| | | | | | | 41% | 1 | 327 | | |
| | | | | | | 51% | 1 | 201 | | |
| | | | | | | 60% | 1 | 177 | | |
| | | | | | | 53% | 1 | 180 | | |
| | | | | | | 49% | 185 | 373 | | |
| | | | | | | 40% | 164 | 406 | | |
| | | | | | | 43% | 1 | 174 | | |
| | | | | | | 40% | 1 | 180 | | |
| | | | | | | 41% | 164 | 256 | | |
| | | | | | | 68% | 396 | 443 | | |
| | | | | | | 53% | 396 | 440 | | |
| | | | | | | 45% | 387 | 443 | | |
| | | | | | | 70% | 414 | 443 | | |
| | | | | | | 43% | 396 | 443 | | |
| | | | | | | 52% | 390 | 440 | | |
| | | | | | | 77% | 417 | 443 | | |
| | | | | | | 43% | 396 | 443 | | |
| | | | | | | 66% | 417 | 443 | | |
| | | | | | | 66% | 417 | 443 | | |
| | | | | | | 47% | 390 | 440 | | |
| | | | | | | 66% | 417 | 443 | | |
| | | | | | | 46% | 396 | 440 | | |
| HTOBG35 | 1081313 | 290 | blastx.14 | finger protein 1, placental | pir\|A32891\|A32891 | 66% | 30 | 410 | | |
| | | | | - human | | 67% | 30 | 410 | | |
| | | | | | | 66% | 27 | 407 | | |
| | | | | | | 67% | 39 | 410 | | |
| | | | | | | 63% | 39 | 410 | | |
| | | | | | | 65% | 30 | 410 | | |
| | | | | | | 62% | 30 | 410 | | |
| | | | | | | 65% | 39 | 410 | | |
| | | | | | | 65% | 51 | 410 | | |
| | | | | | | 58% | 9 | 410 | | |
| | | | | | | 61% | 36 | 410 | | |
| | | | | | | 58% | 39 | 407 | | |
| | | | | | | 84% | 412 | 450 | | |
| | | | | | | 76% | 412 | 450 | | |
| | | | | | | 76% | 412 | 450 | | |
| | | | | | | 56% | 406 | 453 | | |
| | | | | | | 60% | 412 | 456 | | |
| | | | | | | 57% | 412 | 453 | | |
| | | | | | | 57% | 412 | 453 | | |
| | | | | | | 61% | 412 | 450 | | |
| | | | | | | 61% | 412 | 450 | | |
| HTOBG35 | 909250 | 712 | HMMER | PFAM: Zinc finger, C2H2 | PF00096 | 10.85 | 187 228 | | | |
| | | | 1.8 | type | | | | | | |
| | | | blastx.2 | (AF161544) HSPC059 | gb\|AAF29031.1\|AF1 | 40% | 63 | 365 | | |
| | | | | [Homo sapiens] | 61544_1 | 39% | 78 | 365 | | |
| | | | | | | 42% | 63 | 359 | | |
| | | | | | | 43% | 1 | 285 | | |
| | | | | | | 37% | 1 | 351 | | |
| | | | | | | 39% | 81 | 362 | | |
| | | | | | | 45% | 1 | 219 | | |
| | | | | | | 35% | 1 | 276 | | |
| | | | | | | 38% | 1 | 243 | | |
| | | | | | | 43% | 1 | 243 | | |
| | | | | | | 52% | 240 | 365 | | |
| | | | | | | 42% | 78 | 296 | | |
| | | | | | | 57% | 240 | 365 | | |
| | | | | | | 38% | 78 | 329 | | |
| | | | | | | 49% | 1 | 219 | | |
| | | | | | | 35% | 66 | 299 | | |
| | | | | | | 61% | 136 | 228 | | |
| | | | | | | 61% | 151 | 243 | | |
| | | | | | | 41% | 231 | 335 | | |
| | | | | | | 87% | 78 | 125 | | |
| | | | | | | 61% | 63 | 125 | | |
| | | | | | | 30% | 1 | 159 | | |
| | | | | | | 57% | 303 | 365 | | |
| | | | | | | 28% | 31 | 228 | | |
| | | | | | | 29% | 234 | 365 | | |
| | | | | | | 41% | 1 | 72 | | |
| | | | | | | 35% | 137 | 247 | | |
| HTOHL35 | 1078106 | 291 | blastx.14 | (AL031277) dJ1177E19.1 | gi\|4467794\|emb\|CAB | 40% | 151 | 246 | | |
| | | | | (DNA-binding Zinc finger | 37642.1\| | 32% | 304 | 378 | | |
| | | | | protein RIZ (isoform 1)) | | 33% | 142 | 213 | | |
| | | | | [Homo sapiens] | | 31% | 5 | 70 | | |
| | | | | | | 31% | 31 | 135 | | |
| | | | | | | 50% | 375 | 410 | | |
| | | | | | | 33% | 235 | 288 | | |
| | | | | | | 33% | 193 | 246 | | |
| | | | | | | 77% | 14 | 40 | | |
| HTOHL35 | 537364 | 713 | HMMER | PFAM: Zinc finger, C2H2 | PF00096 | 6.52 | 4 | 33 | | |
| | | | 1.8 | type | | | | | | |
| HTPGS02 | 917578 | 714 | HMMER | PFAM: Zinc finger, C2H2 | PF00096 | 8.57 | 131 | 196 | | |
| | | | 1.8 | type | | | | | | |
| | | | blastx.2 | (AK000093) unnamed | dbj\|BAA90940.1\| | 100% | 2 | 253 | | |
| | | | | protein product [Homo | | | | | | |
| | | | | sapiens] | | | | | | |
| HTTDO19 | 908937 | 715 | HMMER | PFAM: Zinc finger, C2H2 | PF00096 | 42.8 | 22 | 90 | | |
| | | | 2.1.1 | type | | | | | | |
| | | | blastx.2 | zinc finger protein [Homo | emb\|CAA55529.1\| | 76% | 1 | 129 | | |
| | | | | sapiens] | | 72% | 1 | 129 | | |
| | | | | | | 45% | 1 | 237 | | |
| | | | | | | 67% | 1 | 129 | | |
| | | | | | | 44% | 1 | 237 | | |
| | | | | | | 67% | 1 | 129 | | |
| | | | | | | 50% | 13 | 234 | | |
| | | | | | | 63% | 125 | 190 | | |
| | | | | | | 36% | 180 | 287 | | |
| | | | | | | 71% | 149 | 190 | | |
| | | | | | | 90% | 161 | 190 | | |
| | | | | | | 36% | 180 | 287 | | |
| | | | | | | 36% | 180 | 287 | | |
| | | | | | | 57% | 180 | 221 | | |
| | | | | | | 50% | 180 | 227 | | |
| HTTEP88 | 1153922 | 294 | blastx.14 | (AK000424) unnamed | gi\|7020503\|dbj\|BAA9 | 100% | 287 | 934 | | |
| | | | | protein product [Homo | 1155.1 | | | | | |
| | | | | sapiens] | | | | | | |
| HTTEP88 | 931983 | 716 | HMMER | PFAM: Zinc finger, C2H2 | PF00096 | 36.97 | 428 | 490 | | |
| | | | 1.8 | type | | | | | | |
| | | | blastx.2 | (AK000424) unnamed | dbj\|BAA91155.1\| | 66% | 305 | 664 | | |
| | | | | protein product [Homo | | 50% | 508 | 693 | | |
| | | | | sapiens] | | 32% | 203 | 613 | | |
| | | | | | | 28% | 122 | 670 | | |
| HTWAA57 | 773333 | 717 | HMMER | PFAM: Zinc finger, C2H2 | PF00096 | 46 | 171 | 239 | | |
| | | | 2.1.1 | type | | | | | | |
| | | | blastx.2 | zinc finger protein [Homo | emb\|CAA55533.1\| | 43% | 105 | 410 | | |
| | | | | sapiens] | | 36% | 39 | 425 | | |
| | | | | | | 46% | 96 | 344 | | |
| | | | | | | 41% | 96 | 410 | | |
| | | | | | | 40% | 96 | 410 | | |
| | | | | | | 38% | 96 | 443 | | |
| | | | | | | 37% | 45 | 434 | | |
| | | | | | | 41% | 105 | 410 | | |
| | | | | | | 46% | 96 | 314 | | |
| | | | | | | 37% | 96 | 425 | | |
| | | | | | | 38% | 96 | 428 | | |
| | | | | | | 45% | 96 | 254 | | |
| | | | | | | 58% | 5 | 112 | | |
| | | | | | | 53% | 5 | 121 | | |
| | | | | | | 53% | 5 | 121 | | |
| | | | | | | 51% | 5 | 121 | | |
| | | | | | | 55% | 8 | 121 | | |
| | | | | | | 46% | 5 | 121 | | |
| | | | | | | 52% | 5 | 112 | | |
| | | | | | | 43% | 5 | 121 | | |
| | | | | | | 47% | 8 | 121 | | |
| | | | | | | 43% | 5 | 121 | | |
| | | | | | | 50% | 5 | 112 | | |
| HTWEP40 | 1189733 | 296 | blastx.14 | (AC004076) R30217_1 | gi\|2822143\|gb\|AAB9 | 46% | 71 | 226 | | |
| | | | | [Homo sapiens] | 7932.1\| | 50% | 2 | 49 | | |
| | | | | | | 50% | 2 | 49 | | |
| HTWEP40 | 694287 | 718 | HMMER | PFAM: Zinc finger, C2H2 | PF00096 | 34.3 | 65 | 133 | | |
| | | | 2.1.1 | type | | | | | | |
| | | | blastx.2 | (AL031393) dJ733D15.1 | emb\|CAA20564.1\| | 68% | 2 | 145 | | |
| | | | | (Zinc-finger protein) | | 66% | 2 | 145 | | |
| | | | | [Homo sapiens] | | 48% | 2 | 208 | | |
| | | | | | | 64% | 2 | 145 | | |
| | | | | | | 66% | 2 | 145 | | |
| | | | | | | 48% | 2 | 208 | | |
| | | | | | | 45% | 2 | 208 | | |
| | | | | | | 38% | 130 | 468 | | |
| | | | | | | 41% | 2 | 208 | | |
| | | | | | | 31% | 124 | 468 | | |
| | | | | | | 34% | 175 | 468 | | |
| | | | | | | 39% | 124 | 291 | | |
| | | | | | | 32% | 166 | 384 | | |
| | | | | | | 38% | 130 | 225 | | |
| HUCPE28 | 951876 | 719 | HMMER | PFAM: Zinc finger, C2H2 | PF00096 | 16.04 | 449 | 517 | | |
| | | | 1.8 | type | | | | | | |
| HUFDI79 | 774692 | 720 | HMMER | PFAM: Zinc finger, C2H2 | PF00096 | 18.82 | 172 | 228 | | |
| | | | 1.8 | type | | | | | | |
| | | | blastx.2 | (AK001753) unnamed | dbj\|BAA91884.1\| | 41% | 19 | 363 | | |
| | | | | protein product [Homo | | 37% | 52 | 372 | | |
| | | | | sapiens] | | 42% | 55 | 267 | | |
| | | | | | | 31% | 19 | 378 | | |
| HUJBQ75 | 908603 | 299 | HMMER | PFAM: Zinc finger, C2H2 | PF00096 | 163.1 | 641 | 709 | | |
| | | | 2.1.1 | type | | | | | | |
| | | | blastx.2 | (AJ388557) zinc finger | emb\|CAB46856.1\| | 43% | 527 | 1519 | | |
| | | | | protein [Canis familiaris] | | 44% | 536 | 1516 | | |
| | | | | | | 43% | 527 | 1519 | | |
| | | | | | | 43% | 515 | 1519 | | |
| | | | | | | 42% | 527 | 1519 | | |
| | | | | | | 39% | 509 | 1519 | | |
| | | | | | | 41% | 527 | 1519 | | |
| | | | | | | 45% | 515 | 1306 | | |
| | | | | | | 44% | 527 | 1306 | | |
| | | | | | | 38% | 530 | 1519 | | |
| | | | | | | 42% | 527 | 1303 | | |
| | | | | | | 42% | 515 | 1210 | | |
| | | | | | | 32% | 788 | 1516 | | |
| | | | | | | 32% | 380 | 967 | | |
| | | | | | | 43% | 241 | 543 | | |
| | | | | | | 45% | 286 | 543 | | |
| | | | | | | 42% | 241 | 543 | | |
| | | | | | | 38% | 241 | 543 | | |
| | | | | | | 37% | 241 | 543 | | |
| | | | | | | 38% | 241 | 552 | | |
| | | | | | | 40% | 241 | 543 | | |
| | | | | | | 37% | 205 | 543 | | |
| | | | | | | 39% | 241 | 543 | | |
| | | | | | | 38% | 247 | 543 | | |
| | | | | | | 37% | 241 | 543 | | |
| | | | | | | 34% | 241 | 543 | | |
| | | | | | | 34% | 241 | 543 | | |
| | | | | | | 37% | 286 | 543 | | |
| | | | | | | 37% | 247 | 483 | | |
| | | | | | | 28% | 241 | 543 | | |
| | | | | | | 31% | 286 | 543 | | |
| | | | | | | 25% | 250 | 543 | | |
| | | | | | | 33% | 99 | 302 | | |
| | | | | | | 28% | 295 | 465 | | |
| | | | | | | 35% | 1504 | 1605 | | |
| | | | | | | 22% | 295 | 543 | | |
| HUKET47 | 1164742 | 300 | blastx.14 | (AC004882) match to | gi\|6094656\|gb\|AAF03 | 100% | 143 | 652 | | |
| | | | | human[H556371 | 512.1[AC004882_4 | | | | | |
| | | | | (NTD:g3813948)]ESTs | | | | | | |
| | | | | [Homo sapiens] | | | | | | |
| HUKET47 | 968789 | 721 | HMMER | PFAM: Zinc finger, C2H2 | PF00096 | 7.18 | 154 | 225 | | |
| | | | 1.8 | type | | | | | | |
| | | | blastx.2 | (AC004882) match to | gb\|AAF03512.1\|AC0 | 100% | 136 | 645 | | |
| | | | | human [H55637 | 04882_4 | | | | | |
| | | | | (NID:g1108503)], 1 ESTs | | | | | | |
| | | | | [Homo sapiens] | | | | | | |
| HUSGE36 | 1147864 | 301 | blastx.14 | similar to Human zinc | gi\|1510147\|dbj\|BAA1 | 100% | 22 | 771 | | |
| | | | | finger protein(ZNF142) | 3242.1\| | 41% | 40 | 387 | | |
| | | | | [Homo sapiens] | | 31% | 55 | 384 | | |
| | | | | | | 31% | 25 | 318 | | |
| | | | | | | 27% | 292 | 660 | | |
| | | | | | | 34% | 136 | 411 | | |
| | | | | | | 31% | 148 | 411 | | |
| | | | | | | 28% | 397 | 651 | | |
| | | | | | | 26% | 154 | 417 | | |
| | | | | | | 23% | 331 | 582 | | |
| | | | | | | 23% | 421 | 663 | | |
| | | | | | | 26% | 70 | 303 | | |
| | | | | | | 21% | 226 | 498 | | |
| | | | | | | 27% | 19 | 216 | | |
| | | | | | | 43% | 292 | 387 | | |
| | | | | | | 28% | 37 | 237 | | |
| | | | | | | 28% | 547 | 747 | | |
| | | | | | | 25% | 295 | 471 | | |
| | | | | | | 29% | 328 | 480 | | |
| | | | | | | 27% | 46 | 153 | | |
| | | | | | | 26% | 142 | 300 | | |
| | | | | | | 28% | 496 | 651 | | |
| | | | | | | 33% | 538 | 654 | | |
| | | | | | | 40% | 133 | 222 | | |
| | | | | | | 37% | 322 | 393 | | |
| | | | | | | 32% | 289 | 399 | | |
| | | | | | | 30% | 13 | 159 | | |
| | | | | | | 41% | 499 | 570 | | |
| | | | | | | 21% | 310 | 480 | | |
| | | | | | | 28% | 550 | 654 | | |
| | | | | | | 25% | 547 | 651 | | |
| | | | | | | 33% | 589 | 660 | | |
| | | | | | | 37% | 142 | 222 | | |
| | | | | | | 44% | 334 | 408 | | |
| | | | | | | 39% | 43 | 111 | | |
| | | | | | | 47% | 418 | 480 | | |
| | | | | | | 31% | 589 | 654 | | |
| | | | | | | 34% | 310 | 405 | | |
| | | | | | | 23% | 379 | 492 | | |
| | | | | | | 29% | 565 | 657 | | |
| | | | | | | 25% | 241 | 372 | | |
| | | | | | | 35% | 160 | 219 | | |
| | | | | | | 32% | 388 | 480 | | |
| | | | | | | 40% | 328 | 387 | | |
| | | | | | | 47% | 247 | 309 | | |
| | | | | | | 30% | 61 | 138 | | |
| | | | | | | 33% | 403 | 474 | | |
| | | | | | | 37% | 244 | 315 | | |
| | | | | | | 35% | 163 | 222 | | |
| | | | | | | 30% | 142 | 219 | | |
| | | | | | | 25% | 142 | 222 | | |
| | | | | | | 25% | 220 | 303 | | |
| | | | | | | 35% | 73 | 132 | | |
| | | | | | | 36% | 43 | 132 | | |
| | | | | | | 29% | 478 | 600 | | |
| | | | | | | 28% | 226 | 300 | | |
| | | | | | | 31% | 211 | 267 | | |
| | | | | | | 29% | 481 | 561 | | |
| | | | | | | 34% | 589 | 666 | | |
| | | | | | | 31% | 589 | 654 | | |
| | | | | | | 36% | 154 | 219 | | |
| | | | | | | 31% | 160 | 216 | | |
| | | | | | | 35% | 250 | 300 | | |
| | | | | | | 29% | 226 | 327 | | |
| | | | | | | 26% | 568 | 657 | | |
| | | | | | | 27% | 574 | 684 | | |
| | | | | | | 32% | 376 | 477 | | |
| | | | | | | 31% | 598 | 654 | | |
| | | | | | | 24% | 340 | 489 | | |
| | | | | | | 22% | 325 | 429 | | |
| | | | | | | 28% | 79 | 141 | | |
| | | | | | | 23% | 37 | 165 | | |
| | | | | | | 30% | 223 | 300 | | |
| | | | | | | 31% | 328 | 414 | | |
| | | | | | | 40% | 421 | 480 | | |
| | | | | | | 25% | 331 | 426 | | |
| | | | | | | 22% | 328 | 435 | | |
| | | | | | | 35% | 136 | 186 | | |
| | | | | | | 33% | 322 | 384 | | |
| | | | | | | 23% | 58 | 135 | | |
| | | | | | | 47% | 18 | 68 | | |
| | | | | | | 47% | 18 | 68 | | |
| | | | | | | 62% | 160 | 183 | | |
| | | | | | | 23% | 154 | 243 | | |
| | | | | | | 29% | 33 | 134 | | |
| | | | | | | 60% | 948 | 977 | | |
| | | | | | | 28% | 142 | 216 | | |
| HUSGE36 | 908477 | 722 | HMMER | PFAM: Zinc finger, C2H2 | PF00096 | 102.8 | 409 | 477 | | |
| | | | 2.1.1 | type | | | | | | |
| | | | blastx.2 | similar to Human zinc | dbj\|BAA13242.1\| | 99% | 25 | 765 | | |
| | | | | finger protein(ZNP142) | | 35% | 34 | 759 | | |
| | | | | [Homo sapiens] | | 29% | 49 | 645 | | |
| | | | | | | 26% | 19 | 654 | | |
| | | | | | | 27% | 37 | 708 | | |
| | | | | | | 26% | 28 | 561 | | |
| | | | | | | 24% | 154 | 759 | | |
| | | | | | | 27% | 73 | 648 | | |
| | | | | | | 25% | 64 | 651 | | |
| | | | | | | 26% | 43 | 213 | | |
| | | | | | | 35% | 154 | 213 | | |
| | | | | | | 30% | 28 | 153 | | |
| HUTAB12 | 1152270 | 302 | blastx.14 | (AK001744) unnamed | gi\|7023198\|dbj\|BAA9 | 49% | 168 | 398 | | |
| | | | | protein product [Homo | 1876.1\| | 59% | 3 | 128 | | |
| | | | | sapiens] | | 35% | 12 | 95 | | |
| | | | | | | 34% | 12 | 107 | | |
| | | | | | | 40% | 30 | 95 | | |
| | | | | | | 43% | 27 | 95 | | |
| | | | | | | 28% | 12 | 95 | | |
| | | | | | | 33% | 12 | 92 | | |
| | | | | | | 33% | 12 | 92 | | |
| HUTAB12 | 961070 | 723 | HMMER | PFAM: Zinc finger, C2H2 | PF00096 | 34.1 | 219 | 287 | | |
| | | | 2.1.1 | type | | | | | | |
| | | | blastx.2 | (AK001744) unnamed | dbj\|BAA91876.1\| | 51% | 3 | 410 | | |
| | | | protein product [Homo | | | | | | | |
| | | | | sapiens] | | | | | | |
| HUVBC70 | 1013239 | 303 | blastx.14 | (AF068198) activity- | gi\|4406073\|gb\|AAD1 | 31% | 8 | 256 | | |
| | | | | dependent neuroprotective | 9843.1\| | | | | | |
| | | | protein [Mus musculus] | | | | | | | |
| HUVBC70 | 673917 | 724 | HMMER | PFAM: Zinc finger, C2H2 | PF00096 | 11.82 | 134 | 199 | | |
| | | | 1.8 | type | | | | | | |
| | | | blastx.2 | (AF234680) activity- | gb\|AAF40431.1\| | 29% | 8 | 346 | | |
| | | | | dependent neuroprotective | | | | | | |
| | | | protein [Rattus 1 | | | | | | | |
| HUVDG48 | 789250 | 725 | HMMER | PFAM: Zinc finger, C2H2 | PF00096 | 7.06 | 472 | 543 | | |
| | | | 1.8 | type | | | | | | |
| | | | blastx.2 | (AL137478) hypothetical | emb\|CAB70759.1\| | 54% | 259 | 603 | | |
| | | | | protein [Homo sapiens] | | 89% | 546 656 | | | |
| | | | | | | 67% | 638 | 721 | | |
| | | | | | | 91% | 251 | 286 | | |
| HLTVFT89 | 960524 | 305 | HMMER | PFAM: Zinc finger, C2H2 | PF00096 | 18.33 | 242 | 304 | | |
| | | | 1.8 | type | | | | | | |
| HUVGQ16 | 1163872 | 306 | blastx.14 | (AK002050) unnamed | gi\|7023697\|dbj\|BAA9 | 49% | 472 | 672 | | |
| | | | | protein product [Homo | 2056.1\| | 86% | 979 | 1089 | | |
| | | | | sapiens] | | 52% | 296 | 346 | | |
| HUVGQ16 | 927445 | 726 | HMMER | PFAM: Zinc finger, C2112 | PF00096 | 21.76 | 533 | 604 | | |
| | | | 1.8 | type | | | | | | |
| | | | blastx.2 | (AK002050) unnamed | dbj\|BAA92056.1\| | 42% | 473 | 730 | | |
| | | | | protein product [Homo | | 86% | 980 1090 | | | |
| | | | | sapiens] | | 52% | 297 | 347 | | |
| HVANX08 | 1152273 | 307 | blastx.14 | (AF090326) AE-1 binding | gi\|4106464\|gb\|AAD0 | 97% | 234 | 743 | | |
| | | | | protein AEBP2 [Mus | 2854.1\| | | | | | |
| | | | | musculus] | | | | | | |
| HVANX08 | 887222 | 727 | HMMER | PFAM: Zinc finger, C2H2 | PF00096 | 17.57 | 457 | 528 | | |
| | | | 1.8 | type | | | | | | |
| | | | blastx.2 | (AF090326) AE-1 binding | gb\|AAD02854.1\| | 95% | 295 | 612 | | |
| | | | | protein AEBP2 [Mus | | | | | | |
| | | | | musculus] | | | | | | |
| HWABF71 | 1226175 | 308 | blastx.14 | IKAROS. | sp\|O93581\|O93581 | 49% | 1308 | 1466 | | |
| | | | | | | 33% | 531 | 809 | | |
| | | | | | | 38% | 528 | 692 | | |
| | | | | | | 25% | 603 | 719 | | |
| | | | | | | 34% | 549 | 626 | | |
| | | | | | | 35% | 633 | 692 | | |
| | | | | | | 43% | 1200 | 1247 | | |
| | | | | | | 66% | 453 | 479 | | |
| HWABF71 | 908612 | 728 | HMMER | PFAM: Zinc finger, C2H2 | PF00096 | 19.57 | 44 | 109 | | |
| | | | 1.8 | type | | | | | | |
| | | | blastx.2 | (AF092175) ikaros [Danio | gb\|AAC61763.1\| | 49% | 716 | 874 | | |
| | | | | rerio] | | 25% | 8 | 469 | | |
| | | | | | | 23% | 8 | 427 | | |
| | | | | | | 25% | 11 | 127 | | |
| | | | | | | 32% | 41 | 136 | | |
| HWBBH02 | 919353 | 729 | HMMER | PFAM: Zinc finger, C2H2 | PF00096 | 65.8 | 525 | 593 | | |
| | | | 2.1.1 | type | | | | | | |
| | | | blastx.14 | (AF125158) zinc finger | gi\|4455118\|gb\|AAD2 | 87% | 315 | 872 | | |
| | | | | DNA binding protein 99 | 1084.1\| | 84% | 874 | 1086 | | |
| | | | | [Homo sapiens] | | 61% | 134 | 367 | | |
| | | | | | | 46% | 484 | 528 | | |
| HWHHR95 | 1154821 | 310 | blastx.14 | (AK000328) unnamed | gi\|7020341\|dbj\|BAA9 | 36% | 247 | 483 | | |
| | | | | protein product [Homo | 1089.1\| | 34% | 37 | 246 | | |
| | | | | sapiens] | | 34% | 31 | 228 | | |
| | | | | | | 41% | 379 | 480 | | |
| | | | | | | 27% | 220 | 381 | | |
| | | | | | | 40% | 187 | 246 | | |
| | | | | | | 26% | 247 | 324 | | |
| | | | | | | 50% | 55 | 90 | | |
| | | | | | | 50% | 394 | 423 | | |
| | | | | | | 31% | 61 | 108 | | |
| | | | | | | 66% | 13 | 39 | | |
| | | | | | | 40% | 78 | 137 | | |
| HWHHR95 | 693970 | 730 | HMMER | PFAM: Zinc finger, C2H2 | PF00096 | 6.7 | 226 | 288 | | |
| | | | 1.8 | type | | | | | | |
| HWLDC02 | 1152276 | 311 | blastx.14 | (AB021641) gonadotropin | gi\|6467200\|dbj\|BAA8 | 65% | 18 | 320 | | |
| | | | | inducible transcription | 6987.1\| | 63% | 21 | 302 | | |
| | | | | repressor-1 [Homo | | 57% | 21 | 332 | | |
| | | | | sapiens] | | 56% | 21 | 320 | | |
| | | | | | | 57% | 21 | 332 | | |
| | | | | | | 52% | 21 | 332 | | |
| | | | | | | 60% | 21 | 278 | | |
| | | | | | | 57% | 72 | 320 | | |
| | | | | | | 61% | 21 | 197 | | |
| | | | | | | 53% | 147 | 332 | | |
| | | | | | | 48% | 809 | 937 | | |
| | | | | | | 51% | 803 | 937 | | |
| | | | | | | 51% | 809 | 937 | | |
| | | | | | | 43% | 794 | 937 | | |
| | | | | | | 42% | 803 | 937 | | |
| | | | | | | 46% | 803 | 937 | | |
| | | | | | | 41% | 800 | 937 | | |
| | | | | | | 42% | 803 | 937 | | |
| | | | | | | 46% | 267 | 383 | | |
| | | | | | | 63% | 204 | 269 | | |
| | | | | | | 52% | 321 | 383 | | |
| | | | | | | 52% | 321 | 383 | | |
| | | | | | | 55% | 324 | 383 | | |
| | | | | | | 47% | 324 | 386 | | |
| | | | | | | 55% | 324 | 383 | | |
| | | | | | | 47% | 321 | 383 | | |
| | | | | | | 50% | 324 | 383 | | |
| | | | | | | 38% | 306 | 383 | | |
| | | | | | | 40% | 866 | 946 | | |
| | | | | | | 37% | 654 | 740 | | |
| | | | | | | 52% | 489 | 551 | | |
| | | | | | | 40% | 660 | 740 | | |
| | | | | | | 55% | 489 | 548 | | |
| | | | | | | 64% | 489 | 539 | | |
| | | | | | | 64% | 489 | 539 | | |
| | | | | | | 52% | 660 | 710 | | |
| | | | | | | 50% | 489 | 548 | | |
| | | | | | | 37% | 660 | 740 | | |
| | | | | | | 34% | 660 | 737 | | |
| | | | | | | 52% | 660 | 710 | | |
| | | | | | | 58% | 486 | 536 | | |
| | | | | | | 38% | 559 | 660 | | |
| | | | | | | 45% | 562 | 666 | | |
| | | | | | | 38% | 559 | 666 | | |
| | | | | | | 31% | 645 | 740 | | |
| | | | | | | 57% | 675 | 716 | | |
| | | | | | | 88% | 24 | 50 | | |
| | | | | | | 58% | 324 | 359 | | |
| | | | | | | 66% | 183 | 218 | | |
| | | | | | | 31% | 654 | 740 | | |
| | | | | | | 58% | 489 | 539 | | |
| | | | | | | 60% | 108 | 152 | | |
| | | | | | | 37% | 562 | 666 | | |
| | | | | | | 41% | 559 | 630 | | |
| | | | | | | 40% | 474 | 548 | | |
| | | | | | | 58% | 504 | 539 | | |
| | | | | | | 33% | 550 | 666 | | |
| | | | | | | 40% | 559 | 633 | | |
| | | | | | | 52% | 580 | 630 | | |
| | | | | | | 58% | 516 | 551 | | |
| | | | | | | 32% | 547 | 630 | | |
| | | | | | | 28% | 321 | 362 | | |
| HWLDC02 | 909247 | 731 | HMMER | PFAM: Zinc finger, C2H2 | PF00096 | 81.4 | 18 | 86 | | |
| | | | 2.1.1 | type | | | | | | |
| | | | blastx.14 | HZF-16.2=zinc finger | gi\|265484\|gb\|AAB25 | 60% | 3 | 317 | | |
| | | | | [alternatively spliced] | 346.1\| | 55% | 3 | 317 | | |
| | | | | [human, 1 | | 53% | 3 | 317 | | |
| | | | | | | 52% | 3 | 317 | | |
| | | | | | | 51% | 3 | 299 | | |
| | | | | | | 52% | 6 | 284 | | |
| | | | | | | 43% | 6 | 317 | | |
| | | | | | | 71% | 3 | 116 | | |
| | | | | | | 55% | 321 | 380 | | |
| | | | | | | 47% | 321 | 389 | | |
| | | | | | | 60% | 321 | 380 | | |
| | | | | | | 55% | 321 | 380 | | |
| | | | | | | 29% | 321 | 392 | | |
| | | | | | | 61% | 3 | 41 | | |
| | | | | | | 58% | 321 | 356 | | |
| HWLEH05 | 1202730 | 312 | blastx.14 | GONADOTROPIN | sp\|Q9ULZ8\|Q9ULZ8 | 50% | 1 | 510 | | |
| | | | | INDUCTBLE | | 57% | 1 | 396 | | |
| | | | | TRANSCRIPTION | | 56% | 1 | 393 | | |
| | | | | REPRESSOR-1 | | 48% | 49 | 510 | | |
| | | | | (FRAGMENT). | | 54% | 1 | 393 | | |
| | | | | | | 48% | 115 | 510 | | |
| | | | | | | 56% | 1 | 264 | | |
| | | | | | | 48% | 396 | 530 | | |
| | | | | | | 51% | 396 | 530 | | |
| | | | | | | 41% | 396 | 569 | | |
| | | | | | | 39% | 396 | 569 | | |
| | | | | | | 51% | 396 | 530 | | |
| | | | | | | 76% | 544 | 618 | | |
| | | | | | | 79% | 544 | 615 | | |
| | | | | | | 76% | 544 | 618 | | |
| | | | | | | 75% | 544 | 615 | | |
| | | | | | | 44% | 396 | 530 | | |
| | | | | | | 69% | 544 | 612 | | |
| | | | | | | 46% | 396 | 530 | | |
| | | | | | | 46% | 396 | 530 | | |
| | | | | | | 69% | 544 | 612 | | |
| | | | | | | 50% | 541 | 624 | | |
| | | | | | | 65% | 544 | 612 | | |
| | | | | | | 57% | 262 | 339 | | |
| | | | | | | 52% | 541 | 597 | | |
| | | | | | | 55% | 244 | 303 | | |
| | | | | | | 66% | 544 | 588 | | |
| | | | | | | 56% | 346 | 393 | | |
| | | | | | | 56% | 429 | 476 | | |
| | | | | | | 60% | 337 | 381 | | |
| | | | | | | 77% | 420 | 446 | | |
| | | | | | | 85% | 481 | 501 | | |
| | | | | | | 71% | 396 | 416 | | |
| HWLEH05 | 908239 | 732 | HMMER | PFAM: Zinc finger, C2H2 | PF00096 | 108.8 | 250 | 318 | | |
| | | | 2.1.1 | type | | | | | | |
| | | | blastx.14 | dJ29K1.2 [Homo sapiens] | gi\|2924250[emb\|CAB | 48% | 7 | 618 | | |
| | | | | | 11428.1\| | 56% | 7 | 396 | | |
| | | | | | | 46% | 43 | 498 | | |
| | | | | | | 51% | 13 | 393 | | |
| | | | | | | 49% | 7 | 390 | | |
| | | | | | | 52% | 43 | 393 | | |
| | | | | | | 37% | 13 | 546 | | |
| | | | | | | 50% | 1 | 318 | | |
| | | | | | | 49% | 7 | 330 | | |
| | | | | | | 57% | 121 | 393 | | |
| | | | | | | 53% | 13 | 249 | | |
| | | | | | | 46% | 241 | 510 | | |
| | | | | | | 53% | 199 | 393 | | |
| | | | | | | 33% | 178 | 393 | | |
| | | | | | | 60% | 1 | 114 | | |
| | | | | | | 45% | 223 | 375 | | |
| | | | | | | 53% | 396 | 530 | | |
| | | | | | | 45% | 142 | 279 | | |
| | | | | | | 65% | 541 | 618 | | |
| | | | | | | 65% | 544 | 621 | | |
| | | | | | | 46% | 399 | 533 | | |
| | | | | | | 69% | 541 | 618 | | |
| | | | | | | 44% | 396 | 530 | | |
| | | | | | | 73% | 544 | 612 | | |
| | | | | | | 48% | 396 | 530 | | |
| | | | | | | 34% | 396 | 578 | | |
| | | | | | | 68% | 544 | 618 | | |
| | | | | | | 69% | 544 | 612 | | |
| | | | | | | 57% | 396 | 479 | | |
| | | | | | | 32% | 142 | 360 | | |
| | | | | | | 40% | 402 | 533 | | |
| | | | | | | 41% | 396 | 533 | | |
| | | | | | | 64% | 544 | 618 | | |
| | | | | | | 41% | 396 | 533 | | |
| | | | | | | 57% | 316 | 399 | | |
| | | | | | | 28% | 37 | 213 | | |
| | | | | | | 57% | 399 | 476 | | |
| | | | | | | 58% | 547 | 618 | | |
| | | | | | | 36% | 7 | 129 | | |
| | | | | | | 56% | 544 | 618 | | |
| | | | | | | 53% | 427 | 504 | | |
| | | | | | | 23% | 325 | 564 | | |
| | | | | | | 35% | 316 | 468 | | |
| | | | | | | 60% | 565 | 624 | | |
| | | | | | | 43% | 247 | 336 | | |
| | | | | | | 30% | 148 | 297 | | |
| | | | | | | 46% | 7 | 84 | | |
| | | | | | | 52% | 544 | 612 | | |
| | | | | | | 44% | 88 | 168 | | |
| | | | | | | 52% | 475 | 543 | | |
| | | | | | | 48% | 169 | 243 | | |
| | | | | | | 36% | 229 | 336 | | |
| | | | | | | 52% | 399 | 455 | | |
| | | | | | | 57% | 337 | 393 | | |
| | | | | | | 29% | 64 | 174 | | |
| | | | | | | 32% | 7 | 108 | | |
| | | | | | | 61% | 484 | 522 | | |
| | | | | | | 42% | 399 | 476 | | |
| | | | | | | 38% | 247 | 309 | | |
| | | | | | | 50% | 166 | 213 | | |
| | | | | | | 42% | 366 | 422 | | |
| | | | | | | 80% | 556 | 585 | | |
| | | | | | | 75% | 544 | 579 | | |
| | | | | | | 29% | 334 | 426 | | |
| | | | | | | 50% | 423 | 476 | | |
| | | | | | | 58% | 583 | 618 | | |
| | | | | | | 41% | 586 | 621 | | |
| | | | | | | 50% | 82 | 129 | | |
| | | | | | | 28% | 417 | 491 | | |
| | | | | | | 54% | 325 | 357 | | |
| | | | | | | 47% | 7 | 57 | | |
| | | | | | | 54% | 408 | 440 | | |
| | | | | | | 57% | 544 | 585 | | |
| | | | | | | 29% | 513 | 584 | | |
| | | | | | | 43% | 119 | 166 | | |
| | | | | | | 66% | 142 | 168 | | |
| | | | | | | 33% | 544 | 597 | | |
| | | | | | | 60% | 55 | 84 | | |
| | | | | | | 45% | 157 | 189 | | |
| | | | | | | 27% | 250 | 357 | | |
| HWLFG83 | 924844 | 733 | HMMER | PFAM: Zinc finger | PF00569 | 48.2 | 113 | 250 | | |
| | | | | 2.1.1 | present in dystrophin, | | | | | |
| | | | | CBP/p300 | | | | | | |
| | | | blastx.14 | (AF143859) potassium | gi\|4838557\|gb\|AAD3 | 92% | 362 | 589 | | |
| | | | | channel modulatory factor | 1040.1\| | 100% | 592 | 627 | | |
| | | | | DEBT-91 [Mus musculus] | | 100% | 567 | 593 | | |
| | | | | | | 100% | 626 | 649 | | |
| HWLHJ68 | 957834 | 734 | HMMER | PFAM: Zinc finger, C2H2 | PF00096 | 6.35 | 216 | 278 | | |
| | | | 1.8 | type | | | | | | |
| | | | blastx.14 | (AB012265)wizL [Mus | gi\|3551182\|dbj\|BAA3 | 55% | 201 | 314 | | |
| | | | | musculus] | 2790.1\| | 39% | 101 | 169 | | |
| HWLUO25 | 908693 | 735 | HMMER | PFAM: Zinc finger, C2H2 | PF00096 | 68.9 | 866 | 937 | | |
| | | | 2.1.1 | type | | | | | | |
| | | | blastx.14 | Roaz [Rattus norvegicus] | gi\|2149792\|gb\|AAB5 | 80% | 638 | 1030 | | |
| | | | | | 8646.1\| | 88% | 3 | 263 | | |
| | | | | | | 70% | 272 | 433 | | |
| | | | | | | 33% | 683 | 925 | | |
| | | | | | | 51% | 515 | 607 | | |
| | | | | | | 33% | 866 | 1027 | | |
| | | | | | | 36% | 746 | 844 | | |
| | | | | | | 42% | 629 | 742 | | |
| | | | | | | 32% | 683 | 841 | | |
| | | | | | | 28% | 872 | 1030 | | |
| | | | | | | 26% | 689 | 838 | | |
| | | | | | | 33% | 129 | 236 | | |
| | | | | | | 43% | 515 | 583 | | |
| | | | | | | 32% | 749 | 841 | | |
| | | | | | | 28% | 518 | 634 | | |
| | | | | | | 45% | 518 | 589 | | |
| | | | | | | 31% | 114 | 227 | | |
| | | | | | | 45% | 518 | 583 | | |
| | | | | | | 45% | 770 | 841 | | |
| | | | | | | 40% | 518 | 583 | | |
| | | | | | | 35% | 848 | 940 | | |
| | | | | | | 36% | 677 | 751 | | |
| | | | | | | 40% | 662 | 742 | | |
| | | | | | | 34% | 875 | 1012 | | |
| | | | | | | 50% | 515 | 574 | | |
| | | | | | | 41% | 866 | 937 | | |
| | | | | | | 33% | 953 | 1033 | | |
| | | | | | | 42% | 284 | 340 | | |
| | | | | | | 42% | 515 | 571 | | |
| | | | | | | 27% | 731 | 838 | | |
| | | | | | | 42% | 515 | 577 | | |
| | | | | | | 47% | 515 | 577 | | |
| | | | | | | 28% | 947 | 1030 | | |
| | | | | | | 55% | 293 | 346 | | |
| | | | | | | 38% | 69 | 131 | | |
| | | | | | | 34% | 503 | 571 | | |
| | | | | | | 35% | 938 | 1021 | | |
| | | | | | | 31% | 518 | 574 | | |
| | | | | | | 34% | 515 | 583 | | |
| | | | | | | 33% | 962 | 1033 | | |
| | | | | | | 38% | 69 | 131 | | |
| | | | | | | 34% | 866 | 943 | | |
| | | | | | | 33% | 539 | 619 | | |
| | | | | | | 39% | 263 | 331 | | |
| | | | | | | 33% | 509 | 571 | | |
| | | | | | | 36% | 518 | 583 | | |
| | | | | | | 34% | 869 | 937 | | |
| | | | | | | 37% | 866 | 937 | | |
| | | | | | | 33% | 69 | 131 | | |
| | | | | | | 31% | 518 | 583 | | |
| | | | | | | 30% | 653 | 730 | | |
| | | | | | | 29% | 866 | 937 | | |
| | | | | | | 21% | 662 | 775 | | |
| | | | | | | 21% | 159 | 215 | | |
| | | | | | | 36% | 518 | 574 | | |
| | | | | | | 39% | 515 | 583 | | |
| | | | | | | 30% | 950 | 1027 | | |
| | | | | | | 71% | 1597 | 1617 | | |
| | | | | | | 42% | 159 | 215 | | |
| | | | | | | 26% | 21 | 203 | | |
| | | | | | | 35% | 278 | 328 | | |
| | | | | | | 41% | 518 | 568 | | |
| | | | | | | 26% | 284 | 340 | | |
| | | | | | | 28% | 668 | 742 | | |
| | | | | | | 41% | 779 | 829 | | |
| | | | | | | 36% | 69 | 125 | | |
| | | | | | | 22% | 165 | 308 | | |
| | | | | | | 33% | 287 | 340 | | |
| | | | | | | 30% | 935 | 1033 | | |
| | | | | | | 39% | 3 | 71 | | |
| | | | | | | 45% | 282 | 341 | | |
| | | | | | | 38% | 287 | 340 | | |
| | | | | | | 40% | 296 | 340 | | |
| | | | | | | 29% | 3 | 83 | | |
| | | | | | | 26% | 129 | 284 | | |
| | | | | | | 33% | 779 | 832 | | |
| | | | | | | 35% | 683 | 742 | | |
| HYAAO40 | 1154823 | 316 | blastx.14 | (AB021641) gonadotropin | gi\|6467200\|dbj\|BAA8 | 49% | 350 | 550 | | |
| | | | | inducible transcription | 6987.1\| | 38% | 758 | 997 | | |
| | | | | repressor-1 [Homo | | 54% | 848 | 997 | | |
| | | | | sapiens] | | 51% | 365 | 550 | | |
| | | | | | | 50% | 374 | 550 | | |
| | | | | | | 53% | 674 | 829 | | |
| | | | | | | 46% | 362 | 550 | | |
| | | | | | | 43% | 371 | 613 | | |
| | | | | | | 47% | 362 | 550 | | |
| | | | | | | 45% | 371 | 595 | | |
| | | | | | | 49% | 833 | 997 | | |
| | | | | | | 51% | 674 | 829 | | |
| | | | | | | 50% | 674 | 829 | | |
| | | | | | | 50% | 371 | 550 | | |
| | | | | | | 45% | 833 | 997 | | |
| | | | | | | 47% | 833 | 997 | | |
| | | | | | | 49% | 833 | 997 | | |
| | | | | | | 46% | 674 | 829 | | |
| | | | | | | 48% | 674 | 829 | | |
| | | | | | | 50% | 674 | 829 | | |
| | | | | | | 46% | 674 | 829 | | |
| | | | | | | 50% | 674 | 829 | | |
| | | | | | | 48% | 848 | 997 | | |
| | | | | | | 41% | 833 | 997 | | |
| | | | | | | 43% | 365 | 496 | | |
| | | | | | | 45% | 710 | 829 | | |
| | | | | | | 40% | 452 | 613 | | |
| | | | | | | 44% | 833 | 934 | | |
| | | | | | | 48% | 674 | 760 | | |
| | | | | | | 42% | 680 | 763 | | |
| | | | | | | 48% | 857 | 937 | | |
| | | | | | | 37% | 764 | 844 | | |
| | | | | | | 47% | 494 | 550 | | |
| | | | | | | 53% | 485 | 529 | | |
| | | | | | | 30% | 938 | 997 | | |
| | | | | | | 36% | 674 | 748 | | |
| HYAAO40 | 710802 | 736 | HMMER | PFAM: Zinc finger, C2H2 | PF00096 | 48.7 | 386 | 454 | | |
| | | | 2.1.1 | type | | | | | | |
| HYACI56 | 926867 | 737 | HMMER | PFAM: Zinc finger, C2H2 | PF00096 | 102.4 | 636 | 568 | | |
| | | | 2.1.1 | type | | | | | | |
| | | | blastx.14 | zinc finger protein [Mus | gi\|453373\|gb\|AAA81 | 58% | 843 | 484 | | |
| | | | | musculus] | 911.1\| | 61% | 462 | 370 | | |
| | | | | | | 24% | 705 | 559 | | |
| HE8UG13 | 875513 | 738 | HMMER | PFAM: Basic region plus | PF00170 | 32.7 | 8 | 157 | | |
| | | | 1.8 | leucine zipper | | | | | | |
| | | | | transcription factors | | | | | | |
| HHEUC33 | 1151486 | 319 | blastx.14 | (AF009368) Luman | gi\|2367450\|gb\|AAB6 | 62% | 93 | 428 | | |
| | | | | [Homo sapiens] | 9652.1\| | | | | | |
| HHEUC33 | 892371 | 739 | HMMER | PFAM: Basic region plus | PF00170 | 67.39 | 167 | 361 | | |
| | | | 1.8 | leucine zipper | | | | | | |
| | | | | transcription factors | | | | | | |
| HHEUC33 | 899640 | 740 | HMMER | PFAM: Basic region plus | PF00170 | 67.3 | 592 | 786 | | |
| | | | 1.8 | leucine zipper | | | | | | |
| | | | | transcription factors | | | | | | |
| HDQEG93 | 955676 | 320 | HMMER | PFAM: Ets-domain | PF00178 | 135.3 | 763 | 1008 | | |
| | | | 2.1.1 | | | | | | | |
| | | | blastx.14 | (AF124439) transcription | gi\|48384341gb\|AAD3 | 98% | 145 | 1044 | | |
| | | | | factor ESE-3B [Homo | 0991.1\|AF124439_1 | | | | | |
| | | | | sapiens] | | | | | | |
| HBCAS64 | 1152484 | 321 | blastx.14 | C32E8.5 gene product | gi\|1825727\|gb\|AAB4 | 72% | 13 | 462 | | |
| | | | | [Caenorhabditis elegans] | 2323.1\| | | | | | |
| HBCAS64 | 522712 | 741 | HMMER | PFAM: FHA domain | PF00498 | 89.5 | 372 | 614 | | |
| | | | 2.1.1 | | | | | | | |
| HLWAT35 | 742384 | 322 | HMMER | PFAM: FHA domain | PF00498 | 30 | 151 | 306 | | |
| | | | 2.1.1 | | | | | | | |
| HPLBB60 | 742385 | 742 | HMMER | PFAM: FHA domain | PF00498 | 30.4 | 56 | 214 | | |
| | | | 2.1.1 | | | | | | | |
| HTPHI43 | 907888 | 324 | HMMER | PFAM: EHA domain | PF00498 | 64.1 | 478 | 714 | | |
| | | | 2.1.1 | 1 | | | | | | |
| | | | blastx.14 | sarcolemmal associated | gi\|790238\|gb\|AAA65 | 97% | 793 | 1044 | | |
| | | | | protein-3 [Oryctolagus | 597.1\| | | | | | |
| | | | | cuniculus] | | | | | | |
| HCEGY46 | 1119278 | 325 | blastx.14 | fork head homologue 4 | gi\|1922310\|emb\|CAA | 67% | 344 | 565 | | |
| | | | | [Homo sapiens] | 67729.1\| | 33% | 137 | 217 | | |
| HCEGY46 | 889474 | 743 | HMMER | PFAM: Fork head domain | PF00250 | 173.1 | 344 | 556 | | |
| | | | 2.1.1 | | | | | | | |
| | | | blastx.2 | bp 399..701 forkhead | gb\|AAC37671.1\| | 67% | 344 | 565 | | |
| | | | | domain; putative [Rattus | | 27% | 101 | 367 | | |
| | | | | norvegicus] | | | | | | |
| HE2LQ16 | 1151472 | 326 | blastx.14 | mCBP [Mus musculus] | gi\|495128\|emb\|CAA5 | 65% | 222 | 599 | | |
| | | | | | 3546.1\| | 35% | 576 | 617 | | |
| HE2LQ16 | 917706 | 744 | HMMER | PFAM: RH domain | PF00013 | 45.05 | 901 | 1047 | | |
| | | | 1.8 | family of RNA binding | | | | | | |
| | | | | proteins | | | | | | |
| | | | blastx.14 | nuclear poly(C)-binding | gi\|1360003\|emb\|CAA | 62% | 200 | 631 | | |
| | | | | protein, splicevariantE 1 | 66619.1\| | 59% | 868 | 1125 | | |
| | | | | | | 53% | 592 | 798 | | |
| | | | | | | 42% | 589 | 651 | | |
| | | | | | | 42% | 1000 | 1062 | | |
| | | | | | | 28% | 787 | 900 | | |
| HHATX12 | 1162647 | 327 | blastx.14 | (AF061569) coding region | gi\|3273749\|gb\|AAC7 | 93% | 22 | 783 | | |
| | | | | determinant binding | 2743.1\| | 38% | 1043 | 1096 | | |
| | | | | protein [Mus musculus] | | | | | | |
| HHATX12 | 969455 | 745 | HMMER | PFAM: KH domain | PF00013 | 73.6 | 490 | 642 | | |
| | | | 2.1.1 | | | | | | | |
| | | | blastx.14 | (AF117106) IGF-II | gi\|4191608\|gb\|AAD0 | 93% | 1 | 750 | | |
| | | | | mRNA-binding protein 1 | 9826.1\| | 30% | 1010 | 1078 | | |
| | | | | [Homo 1 | | | | | | |
| HLJEB78 | 1204705 | 328 | blastx.14 | hypothetical protein | pir\|T50626\|T50626 | 99% | 299 | 808 | | |
| | | | | DKFZp762K1914.1 - | | | | | | |
| | | | | human (fragment) | | | | | | |
| HLJEB78 | 773242 | 746 | HMMER | PFAM: RH domain | PF00013 | 18.98 | 281 | 454 | | |
| | | | 1.8 | family of RNA binding | | | | | | |
| | | | | proteins | | | | | | |
| HODAC03 | 925324 | 747 | HMMER | PFAM: RH domain | PF00013 | 34.56 | 18 | 125 | | |
| | | | 1.8 | family of RNA binding | | | | | | |
| | | | | proteins | | | | | | |
| | | | blastx.14 | (AF057352) | gi\|4883681\|gb\|AAD3 | 60% | 3 | 125 | | |
| hepatocellular carcinoma | 1596.1\|AF057352_1 | 87% | 122 | 145 | | | | | | |
| | | | | autoantigen [Homo | | | | | | |
| | | | | sapiens] | | | | | | |
| HOHAO92 | 712543 | 330 | HMMER | PFAM: KH domain | PF00013 | 33 | 123 | 278 | | |
| | | | 2.1.1 | | | | | | | |
| HSDJE71 | 960622 | 748 | HMMER | PFAM: KH domain | PF00013 | 28.07 | 293 | 430 | | |
| | | | 1.8 | family of RNA binding | | | | | | |
| | | | | proteins | | | | | | |
| | | | blastx.14 | (AF132952) CGI-18 | gi\|4680675\|gb\|AAD2 | 99% | 110 | 748 | | |
| | | | | protein [Homo sapiens] | 7727.1\|AF132952_1 | 94% | 749 | 856 | | |
| HSYAM42 | 669615 | 749 | HMMER | PFAM: RH domain | PF00013 | 41.5 | 254 | 406 | | |
| | | | 2.1.1 | | | | | | | |
| HSLFT29 | 1105598 | 333 | blastx.14 | rpoD protein [Salmonella | gi\|154406\|gb\|AAA27 | 100% | 659 | 123 | | |
| | | | | typhimurium] | 242.1\| | | | | | |
| HSLFT29 | 680451 | 750 | HMMER | PFAM: Sigma-70 factors | PF00140 | 224.55 | 1 | 399 | | |
| | | | 1.8 | | | | | | | |
| HCE2Y61 | 685285 | 751 | HMMER | PFAM: HMG (high | PF00505 | 8.38 | 254 | 328 | | |
| | | | 1.8 | mobility group) | box | | | | | |
| HDQGV34 | 965252 | 335 | HMMER | PFAM: HMG (high | PF00505 | 79.23 | 829 | 1035 | | |
| | | | 1.8 | mobility group) box | | | | | | |
| | | | blastx.14 | CAGF9 [Homo sapiens] | gi\|2565048\|gb\|AAB9 | 67% | 841 | 1098 | | |
| | | | | | 1435.1\| | 38% | 1147 | 1248 | | |
| | | | | | | 34% | 1342 | 1437 | | |
| | | | | | | 30% | 1348 | 1437 | | |
| | | | | | | 35% | 1339 | 1440 | | |
| | | | | | | 29% | 1339 | 1440 | | |
| HGCAA66 | 672024 | 336 | HMMER | PFAM: HMG (high | PF00505 | 31.78 | 15 | 149 | | |
| | | | 1.8 | mobility group) box | | | | | | |
| HISAH34 | 957675 | 752 | HMMER | PFAM: HMG (high | PF00505 | 71.1 | 193 | 399 | | |
| | | | 2.1.1 | mobility group) box | | | | | | |
| | | | blastx.14 | (AF017777) bobby sox | gi\|3004657\|gb\|AAC2 | 53% | 160 | 432 | | |
| | | | | [Drosophila melanogaster] | 8404.1\| | 45% | 737 | 802 | | |
| | | | | | | 55% | 1465 | 1518 | | |
| | | | | | | 68% | 544 | 591 | | |
| | | | | | | 57% | 136 | 177 | | |
| HLWBQ84 | 782938 | 753 | HMMER | PFAM: HMG (high | PF00505 | 9.46 | 21 | 110 | | |
| | | | 1.8 | mobility group) box | | | | | | |
| HMSGD52 | 880227 | 339 | HMMER | PFAM:HMG(high | PF00505 | 8.86 | 526 | 573 | | |
| | | | 1.8 | mobility group) box | | | | | | |
| HMSHL44 | 1109680 | 340 | blastx.14 | (AL035530) dJ111C20.1 | gi\|6855339\|emb\|CAB | 100% | 207 | 341 | | |
| | | | | (similarto | 71195.1\| | 60% | 3 | 122 | | |
| | | | | Chlamydomonas radial | | | | | | |
| | | | | spoke protein 3) [Homo | | | | | | |
| | | | | sapiens] | | | | | | |
| HMSHL44 | 716614 | 755 | HMMER | PFAM: HMG (high | PF00505 | 10.42 | 133 | 228 | | |
| | | | 1.8 | mobility group) box | | | | | | |
| HNTCU29 | 968019 | 756 | HMMER | PFAM: PDZ domain | PF00595 | 22.2 | 632 | 730 | | |
| | | | 2.1.1 | (Also known as DHR or | | | | | | |
| | | | | GLGF). | | | | | | |
| | | | blastx.14 | (AF144237) LOMP | gi\|4929268\|gb\|AAD3 | 90% | 584 | 1285 | | |
| | | | | protein [Homo sapiens] | 3924.1\| | 71% | 99 | 575 | | |
| | | | | | | 80% | 1384 | 1491 | | |
| | | | | | | 100% | 1309 | 1338 | | |
| | | | | | | 39% | 1187 | 1255 | | |
| | | | | | | 24% | 1175 | 1297 | | |
| | | | | | | 28% | 1175 | 1258 | | |
| | | | | | | 36% | 1375 | 1431 | | |
| HSDBK60 | 531094 | 757 | HMMER | PFAM: HMG (high | PF00505 | 7.49 | 290 | 358 | | |
| | | | 1.8 | mobility group) box | | | | | | |
| HSDKF80 | 1151509 | 343 | blastx.14 | No definition line found | gi\|396358\|gb\|AAC43 | 78% | 435 | 175 | | |
| | | | | [Eseherichia coli] | 117.1\| | | | | | |
| HSDKF80 | 751976 | 758 | HMMER | PFAM: HMG (high | PF00505 | 8.3 | 155 | 211 | | |
| | | | 1.8 | mobility group) box | | | | | | |
| HSSJH10 | 1162666 | 344 | blastx.14 | predicted using | gi\|3876481\|emb\|CAB | 37% | 940 | 1101 | | |
| | | | | Genefinder | 01752.1\| | 42% | 694 | 807 | | |
| | | | | [Caenorhabditis elegans] | 26% | 505 | 654 | | | |
| | | | | | | 20% | 319 | 519 | | |
| | | | | | | 24% | 538 | 672 | | |
| | | | | | | 47% | 547 | 597 | | |
| | | | | | | 25% | 517 | 657 | | |
| HSSJH10 | 964536 | 759 | HMMER | PFAM:HMG(high | PF00505 | 8.94 | 182 | 256 | | |
| | | | 1.8 | mobility group) box | | | | | | |
| HTENI58 | 1117717 | 345 | blastx.14 | HMG-X protein [Xenopus | gi\|639691\|dbj\|BAA06 | 42% | 124 | 411 | | |
| | | | | laevis] | 440.1\| | 43% | 361 | 606 | | |
| | | | | | | 57% | 538 | 579 | | |
| HTENI58 | 917213 | 760 | HMMER | PFAM:HMG(high | PF00505 | 118.2 | 308 | 514 | | |
| | | | 2.1.1 | mobility group) box | | | | | | |
| | | | blastx.14 | HMG-X protein [Xenopus | gi\|639691\|dbj\|BAA06 | 43% | 269 | 514 | | |
| | | | | laevis] | 440.1\| | 43% | 101 | 319 | | |
| | | | | | | 26% | 89 | 214 | | |
| | | | | | | 57% | 446 | 487 | | |
| HTEOI36 | 870575 | 761 | HMMER | PFAM: HMG (high | PF00505 | 15.44 | 69 | 236 | | |
| | | | 1.8 | mobility group) box | | | | | | |
| HTGAW31 | 698190 | 762 | HMMER | PFAM: HMG (high | PF00505 | 13.2 | 144 | 242 | | |
| | | | 1.8 | mobility group) box | | | | | | |
| HTGCV57 | 1128279 | 348 | blastx.14 | (AK001601) unnamed | gi\|7022956\|dbj\|BAA9 | 86% | 326 | 922 | | |
| | | | | protein product [Homo | 1782.1\| | 98% | 922 | 1365 | | |
| | | | | sapiens] | | | | | | |
| HTGCV57 | 746395 | 763 | HMMER | PFAM: HMG (high | PF00505 | 59.24 | 396 | 569 | | |
| | | | 1.8 | mobility group) box | | | | | | |
| HTXGJ96 | 935942 | 764 | HMMER | PFAM: HMG (high | PF00505 | 10.62 | 1206 | 1325 | | |
| | | | 1.8 | mobility group) box | | | | | | |
| HSLDI32 | 1103425 | 350 | blastx.14 | Peptide chain release | gi\|1651601\|dbj\|BAA3 | 98% | 634 | 77 | | |
| | | | | factor 1 (rf-1). | 6069.1\| | | | | | |
| | | | | [Escherichia coli] | | | | | | |
| HSLDI32 | 757316 | 765 | HMMER | PFAM: Sigma-54 | PF00158 | 119.58 | 512 | 793 | | |
| | | | 1.8 | transcription factors | | | | | | |
| HSLJB67 | 1105531 | 351 | blastx.14 | Glycerol metabolism | gi\|4062784\|dbj\|BAA3 | 99% | 89 | 502 | | |
| | | | | operon regulatory protein. | 6058.1\| | | | | | |
| | | | | [Escherichia coli] | | | | | | |
| HSLJB67 | 751184 | 766 | HMMER | PFAM: Sigma-54 | PF00158 | 36.74 | 69 | 182 | | |
| | | | 1.8 | transcription factors | | | | | | |
| HAIBZ93 | 888120 | 767 | HMMER | PFAM: Helix-loop-helix | PFO0010 | 31.14 | 236 | 367 | | |
| | | | 1.8 | DNA-binding domain | | | | | | |
| HAQCI39 | 1124595 | 353 | blastx.14 | (AF061756) Hand1 | gi\|4377852\|gb\|AAD1 | 85% | 3 | 428 | | |
| | | | | protein [Homo sapiens] | 9280.1\| | | | | | |
| HAQCI39 | 920983 | 768 | HMMER | PFAM: Helix-loop-helix | PF00010 | 43.49 | 14 | 151 | | |
| | | | 1.8 | DNA-binding domain | | | | | | |
| | | | blastx.14 | HXT [Ovis aries] | gi\|1171346\|gb\|AAA8 | 95% | 14 | 133 | | |
| | | | | | 6275.1\| | | | | | |
| HCHAQ03 | 1151464 | 354 | blastx.14 | (AF009329) enhancer-of- | gi\|2267587\|gb\|AAB6 | 83% | 3 | 404 | | |
| | | | | split and hairy-related | 3586.1\| | | | | | |
| | | | | protein 1 [Rattus | | | | | | |
| | | | | norvegicus] | | | | | | |
| HCHAQ03 | 923857 | 769 | HMMER | PFAM: Helix-loop-helix | PF00010 | 25.98 | 30 | 194 | | |
| | | | 1.8 | DNA-binding domain | | | | | | |
| | | | blastx.14 | (AF009329) enhancer-of- | gi\|2267587\|gb\|AAB6 | 82% | 3 | 404 | | |
| | | | | split and hairy-related | 3586.1\| | | | | | |
| | | | | protein 1 [Rattus | | | | | | |
| | | | | norvegicus] | | | | | | |
| HFXHJ52 | 727152 | 770 | HMMER | PFAM: Helix-loop-helix | PF00010 | 11.6 | 265 | 297 | | |
| | | | 1.8 | DNA-binding domain | | | | | | |
| HHSDC06 | 935731 | 771 | HMMER | PFAM: Helix-loop-helix | PF00010 | 10.9 | 107 | 169 | | |
| | | | 1.8 | DNA-binding domain | | | | | | |
| | | | blastx.14 | (AF135440) huntington | gi\|5081610\|gb\|AAD3 | 70% | 5 | 283 | | |
| | | | | yeast partner C [Mus | 9464.1\|AF135440_1 | | | | | |
| | | | | musculus] | | | | | | |
| HMVCT65 | 899699 | 773 | HMMER | PFAM: Helix-loop-helix | PF00010 | 62.22 | 70 | 228 | | |
| | | | 1.8 | DNA-binding domain | | | | | | |
| HPJEQ51 | 893329 | 774 | HMMER | PFAM: Helix-loop-helix | PF00010 | 36.04 | 408 | 545 | | |
| | | | 1.8 | DNA-binding domain | | | | | | |
| HUVHA10 | 963114 | 775 | HMMER | PFAM: Helix-loop-helix | PF00010 | 51.97 | 258 | 419 | | |
| | | | 1.8 | DNA-binding domain | | | | | | |
| | | | blastx.14 | (AF151522) hairy and | gi\|5059323\|gb\|AAD3 | 85% | 105 | 524 | | |
| | | | | enhancer of split related-i | 8967.1\|AF151522_1 | | | | | |
| | | | | [Homo sapiens] | | | | | | |
| HWBEX27 | 1151533 | 360 | blastx.14 | (AF205935) MGA protein | gi\|6692607\|gb\|AAF24 | 78% | 17 | 400 | | |
| | | | | [Mus musculus] | 761.1\| | 42% | 14 | 55 | | |
| HWBEX27 | 682583 | 776 | HMMER | PFAM: Helix-loop-helix | PF00010 | 38.64 | 184 | 336 | | |
| | | | 1.8 | DNA-binding domain | | | | | | |
| HBJJT12 | 1154057 | 361 | blastx.14 | alpha-fetoprotein | gi\|219430\|dbj\|BAA01 | 75% | 49 | 576 | | |
| | | | | enhancer binding protein | 095.1\| | 45% | 70 | 240 | | |
| | | | | [Homo sapiens] | | 44% | 79 | 261 | | |
| | | | | | | 42% | 631 | 693 | | |
| | | | | | | 380% | 515 | 577 | | |
| | | | | | | 43% | 820 | 867 | | |
| | | | | | | 58% | 646 | 681 | | |
| HBJJT12 | 894345 | 777 | HMMER | PFAM: Homeobox | PF00046 | 64 | 201 | 371 | | |
| | | | 2.1.1 | domain | | | | | | |
| HE9QF27 | 894667 | 778 | HMMER | PFAM: Homeobox | PF00046 | 96.03 | 2 | 175 | | |
| | | | 1.8 | domain | | | | | | |
| HEAHE27 | 898346 | 779 | HMMER | PFAM: Homeobox | PF00046 | 90.76 | 840 | 661 | | |
| | | | 1.8 | domain | | | | | | |
| HFKLB30 | 890713 | 364 | HMMER | PFAM: Homeobox | PF00046 | 23.86 | 197 | 301 | | |
| | | | 1.8 | domain | | | | | | |
| HPMKM81 | 894416 | 365 | HMMER | PFAM: Homeobox | PF00046 | 82.2 | 94 | 228 | | |
| | | | 2.1.1 | domain | | | | | | |
| HPVAE51 | 895915 | 366 | HMMER | PFAM:Homeobox | PF00046 | 21.35 | 121 | 258 | | |
| | | | 1.8 | domain | | | | | | |
| HSRBC02 | 1163833 | 367 | blastx.14 | (AF106584) contains | gi\|3886075\|gb\|AAC7 | 38% | 469 | 609 | | |
| | | | | similarity to homeobox | 8220.1\| | 34% | 197 | 346 | | |
| | | | | domains 1 | | 47% | 592 | 693 | | |
| HSRBC02 | 869291 | 780 | HMMER | PFAM: Homeobox | PF00046 | 19.25 | 478 | 591 | | |
| | | | 1.8 | domain | | | | | | |
| HTTCC30 | 1225345 | 368 | blastx.14 | WUGSC:H_GS421I03.1 | sp\|O95030\|O95030 | 100% | 37 | 231 | | |
| | | | | PROTEIN 100% | 328 474 | | | | | |
| | | | | (FRAGMENT). | | 45% | 166 | 225 | | |
| HTTCC30 | 890717 | 781 | HMMER | PFAM: Homeobox | PF00046 | 76.94 | 340 | 513 | | |
| | | | 1.8 | domain | | | | | | |
| HMWDT23 | 1151369 | 369 | blastx.14 | single stranded DNA | gi\|188856\|gb\|AAA36 | 100% | 124 | 555 | | |
| | | | | binding protein [Homo | 332.1\| | | | | | |
| | | | | sapiens] | | | | | | |
| HMWDT23 | 971726 | 782 | HMMER | PFAM: Single-strand | PF00436 | 186.97 | 196 | 540 | | |
| | | | 1.8 | binding protein family | | | | | | |
| | | | blastx.14 | single stranded DNA | gi\|188856\|gb\|AAA36 | 100% | 115 | 546 | | |
| | | | | binding protein [Homo | 332.1\| | | | | | |
| | | | | sapiens] | | | | | | |
| HAMFW83 | 780996 | 783 | HMMER | PFAM: Bromodomain | PF00439 | 27.1 | 3 | 143 | | |
| | | | 2.1.1 | | | | | | | |
| HHPFT46 | 921075 | 784 | HMMER | PFAM: Bromodomain | PF00439 | 138.5 | 201 | 464 | | |
| | | | 2.1.1 | | | | | | | |
| | | | blastx. 14 | p300/CBP-associated | gi\|5468533\|gb\|AAC5 | 95% | 135 | 515 | | |
| | | | | factor [Homo sapiens] | 0890.2\| | 64% | 8 | 100 | | |
| | | | | | | 30% | 14 | 91 | | |
| HJBCL50 | 1080471 | 372 | blastx.14 | similar to Human | gi\|452Sl9\|dbj\|BAA05 | 96% | 3 | 386 | | |
| | | | | homolog of Drosophila | 393.1\| | 91% | 371 | 538 | | |
| | | | | female sterile homeotic | | 47% | 87 | 362 | | |
| | | | | mRNA (HUMFSHG) | | 48% | 638 | 718 | | |
| | | | | [Homo sapiens] | | 27% | 392 | 523 | | |
| | | | | | | 34% | 455 | 532 | | |
| | | | | | | 34% | 440 | 526 | | |
| | | | | | | 100% | 717 | 734 | | |
| | | | | | | 31% | 467 | 532 | | |
| HJBCL50 | 559089 | 785 | HMMER | PFAM: Bromodomain | PF00439 | 153.2 | 39 | 308 | | |
| | | | 2.1.1 | | | | | | | |
| HLTAAO6 | 840188 | 786 | HMMER | PFAM: Bromodomain | PF00439 | 239.3 | 22 | 291 | | |
| | | | 2.1.1 | | | | | | | |
| HMIBK68 | 915819 | 787 | HMMER | PFAM: Bromodomain | PF00439 | 79.96 | 226 | 396 | | |
| | | | 1.8 | | | | | | | |
| | | | blastx.14 | (AF072810) transcription | gi\|4049922\|gb\|AAC9 | 41% | 175 | 393 | | |
| | | | | factor WSTF [Homo | 7879.1\| | 45% | 52 | 111 | | |
| | | | | sapiens] | | | | | | |
| HMSJH92 | 771339 | 788 | HMMER | PFAM: Bromodomain | PF00439 | 47.24 | 304 | 471 | | |
| | | | | 1.8 | | | | | | |
| HROBJ60 | 1151506 | 376 | blastx.14 | polybromo 1 protein | gi\|951231\|emb\|CAA6 | 79% | 743 | 1348 | | |
| | | | | [Gallus gallus] | 2353.1\| | 90% | 326 | 745 | | |
| | | | | | | 95% | 8 | 259 | | |
| | | | | | | 37% | 962 | 1294 | | |
| | | | | | | 47% | 401 | 664 | | |
| | | | | | | 36% | 347 | 676 | | |
| | | | | | | 37% | 359 | 676 | | |
| | | | | | | 39% | 965 | 1264 | | |
| | | | | | | 33% | 965 | 1279 | | |
| | | | | | | 33% | 1004 | 1348 | | |
| | | | | | | 38% | 14 | 253 | | |
| | | | | | | 32% | 356 | 661 | | |
| | | | | | | 38% | 11 | 253 | | |
| | | | | | | 38% | 11 | 214 | | |
| | | | | | | 30% | 8 | 253 | | |
| | | | | | | 26% | 1076 | 1348 | | |
| | | | | | | 20% | 965 | 1126 | | |
| | | | | | | 34% | 395 | 463 | | |
| HROBJ60 | 739935 | 789 | HMMER | PFAM: Bromodomain | PF00439 | 125.6 | 255 | 524 | | |
| | | | 2.1.1 | | | | | | | |
| HSCKG52 | 1179732 | 377 | blastx.14 | (AF118088) PRO2000 | gi\|6650822\|gb\|AAF22 | 99% | 290 | 1375 | | |
| | | | | [Homo sapiens] | 032.1\|AF118094_27 | | | | | |
| HSCKG52 | 964438 | 790 | HMMER | PFAM: Bromodomain | PF00439 | 48.54 | 105 | 272 | | |
| | | | 1.8 | | | | | | | |
| | | | blastx.14 | DNA-binding protein | pir\|S32373\|S32373 | 47% | 105 | 257 | | |
| | | | | TAF-II 250K - fruit fly | | 58% | 15 | 50 | | |
| | | | | (Drosophila sp.) | | | | | | |
| | | | | (fragment) | | | | | | |
| HSLHL43 | 714843 | 791 | HMMER | PFAM: Bromodomain | PF00439 | 72.9 | 113 | 325 | | |
| | | | 2.1.1 | | | | | | | |
| HTEBE47 | 950427 | 792 | HMMER | PFAM: Bromodomain | PF00439 | 128.8 | 607 | 870 | | |
| | | | 2.1.1 | | | | | | | |
| | | | blastx.2 | (AJ271881) bromodomain | emb\|CAB72445.1\| | 99% | 208 | 2154 | | |
| | | | | containing protein [Homo | | 93% | 221 | 3 | | |
| | | | | sapiens] | | | | | | |
| HTELQ83 | 1151521 | 380 | blastx.14 | skeletal muscle abundant | gi\|1009426\|emb\|CAA | 51% | 133 | 492 | | |
| | | | | protein [Homo sapiens] | 60949.1\| | 54% | 25 | 117 | | |
| | | | | | | 30% | 22 | 90 | | |
| HTELQ83 | 780607 | 793 | HMMER | PFAM: Bromodomain | PF00439 | 101.9 | 177 | 440 | | |
| | | | | 2.1.1 | | | | | | |
| HUCNW18 | 1151523 | 381 | blastx.14 | polybromo 1 protein | gi\|951231\|emb\|CAA6 | 97% | 20 | 679 | | |
| | | | | [Gallus gallus] | 2353.1\| | 36% | 98 | 397 | | |
| | | | | | | 35% | 83 | 412 | | |
| | | | | | | 33% | 95 | 415 | | |
| | | | | | | 36% | 44 | 400 | | |
| | | | | | | 17% | 401 | 538 | | |
| HUCNW18 | 954948 | 794 | HMMER | PFAM: Bromodomain | PF00439 | 122.3 | 77 | 346 | | |
| | | | 2.1.1 | | | | | | | |
| | | | blastx.14 | polybromo 1 protein | gi\|951231\|emb\|CAA6 | 94% | 2 | 406 | | |
| | | | | [Gallus gallus] | 2353.1\| | 35% | 80 | 379 | | |
| | | | | | | 34% | 65 | 394 | | |
| | | | | | | 32% | 77 | 397 | | |
| | | | | | | 97% | 406 | 516 | | |
| | | | | | | 35% | 26 | 382 | | |
| | | | | | | 43% | 101 | 169 | | |
| HHEUX85 | 783803 | 382 | HMMER | PFAM: Myb-like DNA- | PF00249 | 33.3 | 82 | 216 | | |
| | | | 2.1.1 | binding domain | | | | | | |
| HTLAK30 | 810462 | 383 | HMMER | PFAM: Fork head domain | PF00250 | 29.6 | 1 | 78 | | |
| | | | 2.1.1 | | | | | | | |
| HOHAI78 | 811359 | 384 | HMMER | PFAM: Myb-like DNA- | PF00249 | 32.9 | 227 | 346 | | |
| | | | 2.1.1 | binding domain | | | | | | |
| HDQDV70 | 861365 | 385 | HMMER | PFAM: Myb-like DNA- | PF00249 | 30.4 | 594 | 457 | | |
| | | | 2.1.1 | binding domain | | | | | | |
| HCRMR24 | 875069 | 386 | HMMER | PFAM: Fork head domain | PF00250 | 82.5 | 5 | 112 | | |
| | | | 2.1.1 | | | | | | | |
| HOFNX66 | 883011 | 387 | HMMER | PFAM: ELM2 domain | PF01448 | 52.9 | 331 | 516 | | |
| | | | 2.1.1 | | | | | | | |
| HHEPG56 | 890938 | 388 | HMMER | PFAM: Transcription | PF00352 | 63.9 | 297 | 551 | | |
| | | | 2.1.1 | factor TFUD (or TATA- | | | | | | |
| | | | | binding protein, TBP) | | | | | | |
| HCROS74 | 900155 | 389 | HMMER | PFAM: Myb-like DNA- | PF00249 | 32.3 | 322 | 179 | | |
| | | | 2.1.1 | binding domain | | | | | | |
| HKGAG83 | 966445 | 390 | HMMER | PFAM: Fork head domain | PF00250 | 54.4 | 1 | 165 | | |
| | | | 2.1.1 | | | | | | | |
| | | | blastx.14 | glutamine-rich factor 1 - | pir\|A49395\|A49395 | 91% | 1 | 177 | | |
| | | | | mouse (fragment) | | | | | | |
| HHFCF42 | 968314 | 391 | HMMER | PFAM: Fork head domain | PF00250 | 108.8 | 655 | 876 | | |
| | | | 2.1.1 | | | | | | | |
| | | | blastx.14 | (AJ005891) JM2 [Homo | gi\|3114818\|emb\|CAA | 65% | 613 | 792 | | |
| | | | | sapiens] | 06748.1\| | 75% | 790 | 912 | | |
| | | | | | | 41% | 176 | 400 | | |
| HHFHH58 | 971868 | 797 | HMMER | PFAM: Myb-like DNA- | PF00249 | 32.3 | 150 | 293 | | |
| | | | 2.1.1 | binding domain | | | | | | |
| | | | blastx.14 | (AF145685) | gi\|5052660\|gb\|AAD3 | 56% | 51 | 242 | | |
| | | | | BcDNA.LD24527 | 8660.1\|AF145685_1 | 50% | 414 | 587 | | |
| | | | | [Drosophila melanogaster] | | 26% | 249 | 317 | | |
| HE8NB30 | 899757 | 393 | HMMER | PFAM: Nuclear transport | PF02136 | 30.4 | 109 | 468 | | |
| | | | 2.1.1 | factor 2 | (NTF2) domain | | | | | |
| HKGBO06 | 927953 | 394 | HMMER | PFAM: Nuclear transport | PF02136 | 32.3 | 120 | 479 | | |
| | | | 2.1.1 | factor 2 | (NTF2) domain | | | | | |
| | | | blastx.14 | (AF156957) NTF2-related | gi\|5880865\|gb\|AAD5 | 100% | 75 | 494 | | |
| | | | | export protein NXT1 | 4942.1\|AF156957_1 | | | | | |
| | | | | [Homo sapiens] | | | | | | |
| HMUBG24 | 525646 | 395 | HMMER | PFAM:KRABbox | PF01352 | 55.4 | 233 | 334 | | |
| | | | 2.1.1 | | | | | | | |
| HTEGI48 | 530595 | 396 | HMMER | PFAM: Zinc finger, | PF01530 | 43.8 | 344 | 436 | | |
| | | | 2.1.1 | C2HC type | | | | | | |
| HGFAB38 | 576913 | 397 | HMMER | PFAM: PHD-finger | PF00628 | 59.6 | 1177 | 1323 | | |
| | | | 2.1.1 | | | | | | | |
| HMADG29 | 597431 | 398 | HMMER | PFAM: Domain of | PF01795 | 347.6 | 3 | 500 | | |
| | | | 2.1.1 | unknown function | | | | | | |
| HMWTN49 | 615238 | 399 | HMMER | PFAM: BolA-like protein | PF01722 | 66.8 | 133 | 273 | | |
| | | | 2.1.1 | | | | | | | |
| HELGL09 | 625720 | 400 | HMMER | PFAM: Universal stress | PF00582 | 40.6 | 160 | 261 | | |
| | | | 2.1.1 | protein family | | | | | | |
| HHEPQ28 | 694010 | 401 | HMMER | PFAM: PHD-finger | PF00628 | 76.9 | 237 | 398 | | |
| | | | 2.1.1 | | | | | | | |
| HNTAI75 | 703283 | 402 | HMMER | PFAM: PHD-finger | PF00628 | 58.5 | 159 | 287 | | |
| | | | 2.1.1 | | | | | | | |
| HBMBR84 | 711121 | 403 | HMMER | PFAM: BTB/POZ domain | PF00651 | 122.6 | 164 | 505 | | |
| | | | 2.1.1 | | | | | | | |
| HOUTE88 | 718762 | 404 | HMMER | PFAM:KRAB box | PF01352 | 48.5 | 724 | 804 | | |
| | | | 2.1.1 | | | | | | | |
| HMTAZ58 | 735760 | 405 | HMMER | PFAM: BTB/POZ domain | PF00651 | 43 | 137 | 385 | | |
| | | | 2.1.1 | | | | | | | |
| HAJBM73 | 764228 | 406 | HMMER | PFAM: Domain of | PF01795 | 158.3 | 100 | 396 | | |
| | | | 2.1.1 | unknown function | | | | | | |
| HDPAV32 | 847613 | 407 | HMMER | PFAM: Transcription | PF01096 | 65.2 | 255 | 374 | | |
| | | | 2.1.1 | factor S-IT (TFIIS) | | | | | | |
| HMWIZ58 | 865033 | 408 | HMMER | PFAM: PHD-finger | PF00628 | 61.2 | 796 | 942 | | |
| | | | 2.1.1 | | | | | | | |
| HFKFL92 | 880139 | 409 | HMMER | PFAM: BolA-like protein | PF01722 | 42.2 | 230 | 382 | | |
| | | | 2.1.1 | | | | | | | |
| HWLGU06 | 882838 | 410 | HMMER | PFAM: PHD-finger | PF00628 | 26.8 | 275 | 445 | | |
| | | | 2.1.1 | | | | | | | |
| HOGBN73 | 892750 | 411 | HMMER | PFAM: BTB/POZ domain | PF00651 | 29.7 | 205 | 303 | | |
| | | | 2.1.1 | | | | | | | |
| HODCU15 | 899680 | 412 | HMMER | PFAM:Domain of | PF01795 | 128 | 1181 | 1564 | | |
| | | | 2.1.1 | unknown function | | | | | | |
| HE9PF14 | 908512 | 413 | HMMER | PFAM:KRABbox | PF01352 | 91.2 | 209 | 331 | | |
| | | | 2.1.1 | | | | | | | |
| | | | blastx.14 | (AL021918) b3418.1 | gi\|3135968\|emb\|CAA | 54% | 200 | 343 | | |
| | | | | (Kruppel related Zinc | 17278.1\| | 50% | 332 | 451 | | |
| | | | | Finger protein 184) | | 33% | 721 | 819 | | |
| | | | | [Homo sapiens] | | 33% | 721 | 819 | | |
| | | | | | | 27% | 721 | 819 | | |
| HHFKC40 | 908519 | 414 | HMMER | PFAM:KRAB box | PF01352 | 76.7 | 212 | 334 | | |
| | | | 2.1.1 | | | | | | | |
| | | | blastx.14 | C2H2-type zinc finger | gi\|3294544\|gb\|AAC2 | 58% | 188 | 331 | | |
| | | | | protein [Homo sapiens] | 5910.1\| | 37% | 432 | 479 | | |
| HWLEO07 | 908520 | 415 | HMMER | PFAM:KRAB box | PF01352 | 97.6 | 339 | 461 | | |
| | | | 2.1.1 | | | | | | | |
| | | | blastx.14 | NK10 [Mus musculus] | gi\|506502\|emb\|CAA5 | 70% | 330 | 461 | | |
| | | | | | 6225.1\| | | | | | |
| HPRBL56 | 908522 | 416 | HMMER | PFAM:KRAB box | PF01352 | 87.8 | 336 | 455 | | |
| | | | 2.1.1 | | | | | | | |
| | | | blastx.14 | Description: KRAB zinc | gi\|1049295\|gb\|AAB0 | 63% | 330 | 470 | | |
| | | | | finger protein; this is a 1 1 | 9748.1\| | 27% | 477 | 563 | | |
| | | | | 1 | | | | | | |
| HSANL93 | 908533 | 417 | HMMER | PFAM:KRAB box | PF01352 | 85.3 | 381 | 542 | | |
| | | | 2.1.1 | | | | | | | |
| | | | blastx.14 | NK10 [Mus musculus] | gi\|506502\|emb\|CAA5 | 57% | 342 | 545 | | |
| | | | | | 6225.1\| | | | | | |
| HWWFL94 | 908534 | 418 | HMMER | PFAM: KRAB box | PF01352 | 35.9 | 437 | 505 | | |
| | | | 2.1.1 | | | | | | | |
| | | | blastx.14 | (AC004983) similar to | gi\|4309888\|gb\|AAD1 | 97% | 242 | 529 | | |
| | | | | zinc finger proteins; | 5545.1\| | | | | | |
| | | | | similar 1 (NID:g1991774) | | | | | | |
| | | | | [Homo sapiens] | | | | | | |
| HSXFM49 | 908570 | 419 | HMMER | PFAM:KRAB box | PF01352 | 124.2 | 120 | 314 | | |
| | | | 2.1.1 | | | | | | | |
| | | | blastx.14 | zinc finger protein 30 | gi\|456269\|emb\|CAA8 | 64% | 84 | 296 | | |
| | | | | [Mus musculus | 2913.1\| | 45% | 270 | 335 | | |
| | | | | domesticus] | | | | | | |
| HAGII04 | 908571 | 420 | HMMER | PFAM:KRAB box | PF01352 | 139.4 | 210 | 398 | | |
| | | | 2.1.1 | | | | | | | |
| | | | blastx.14 | DNA binding proteingi\|1020145\|gb\|AAA7 | 62% | 189 | 437 | | | |
| | | | | [Homo sapiens] | 9359.1\| | | | | | |
| HDPJE32 | 908575 | 421 | HMMER | PFAM:KRAB box | PF01352 | 88.2 | 148 | 288 | | |
| | | | 2.1.1 | | | | | | | |
| | | | blastx.14 | (AF114817) KRAB-zinc | gi\|5059039\|gb\|AAD3 | 83% | 271 | 414 | | |
| | | | | finger protein SZF1-2 | 8880.1\|AF114817_1 | 97% | 139 | 267 | | |
| | | | | [Homo sapiens] | 58% | 464 | 556 | | | |
| | | | | | | 85% | 389 | 430 | | |
| HHFBT95 | 908578 | 422 | HMMER | PFAM:KRAB box | PF01352 | 88.2 | 249 | 389 | | |
| | | | 2.1.1 | | | | | | | |
| | | | blastx.14 | (AF114816) KRAB-zinc | gi\|5059037\|gb\|AAD3 | 97% | 372 | 581 | | |
| | | | | finger protein SZF1-1 | 8879.1\|AF114816_1 | 98% | 153 | 368 | | |
| | | | | [Homo sapiens] | | 73% | 562 | 687 | | |
| HUVDO59 | 908593 | 423 | HMMER | PFAM:KRAB box | PF01352 | 103.7 | 250 | 369 | | |
| | | | 2.1.1 | | | | | | | |
| | | | blastx.14 | (AF080070) zinc finger | gi\|3406676\|gb\|AAC2 | 71% | 235 | 372 | | |
| | | | | protein 54 [Mus | 9445.1\| | | | | | |
| | | | | musculus] | | | | | | |
| HCGAC50 | 908683 | 424 | HMMER | PFAM: BTB/POZ domain | PF00651 | 43.4 | 162 | 302 | | |
| | | | 2.1.1 | | | | | | | |
| | | | blastx.14 | (AL050276) hypothetical | gi\|4886505\|emb\|CAB | 70% | 132 | 356 | | |
| | | | | protein [Homo sapiens] | 43377.1\| | 65% | 359 | 436 | | |
| | | | | | | 38% | 433 | 486 | | |
| HODEV94 | 908947 | 425 | HMMER | PFAM: KRAB box | PF01352 | 104.9 | 276 | 404 | | |
| | | | 2.1.1 | | | | | | | |
| HTENS61 | 909007 | 426 | HMMER | PFAM:KRAB box | PF01352 | 97.7 | 189 | 344 | | |
| | | | 2.1.1 | | | | | | | |
| | | | blastx.14 | (AF060503) zinc finger | gi\|3511122\|gb\|AAC3 | 67% | 189 | 344 | | |
| | | | | protein [Homo sapiens] | 3716.1\| | | | | | |
| HHFJL16 | 909009 | 427 | HMMER | PFAM:KRAB box | PF01352 | 111.6 | 19 | 207 | | |
| | | | 2.1.1 | | | | | | | |
| | | | blastx.14 | (AL031985) dJ228H13.3 | gi\|5360985\|emb\|CAB | 50% | 1 | 264 | | |
| | | | | (Zinc Finger Protein) | 46383.1\| | | | | | |
| | | | | [Homo 1 | | | | | | |
| HPJEN26 | 909014 | 428 | HMMER | PFAM:KRAB box | PF01352 | 95.2 | 197 | 385 | | |
| | | | 2.1.1 | | | | | | | |
| | | | blastx.14 | (AC003682) F18547_1 | gi\|2689441\|gb\|AAC2 | 72% | 188 | 316 | | |
| | | | | [Homo sapiens] | 4605.1\| | 40% | 539 | 724 | | |
| | | | | | | 61% | 902 | 1009 | | |
| | | | | | | 61% | 902 | 1009 | | |
| | | | | | | 64% | 917 | 1009 | | |
| | | | | | | 64% | 917 | 1009 | | |
| | | | | | | 64% | 917 | 1009 | | |
| | | | | | | 54% | 917 | 1009 | | |
| | | | | | | 58% | 917 | 1009 | | |
| | | | | | | 54% | 917 | 1009 | | |
| | | | | | | 48% | 917 | 1009 | | |
| | | | | | | 52% | 902 | 1009 | | |
| | | | | | | 34% | 539 | 685 | | |
| | | | | | | 71% | 947 | 1009 | | |
| | | | | | | 50% | 920 | 1009 | | |
| | | | | | | 32% | 539 | 706 | | |
| | | | | | | 29% | 542 | 712 | | |
| | | | | | | 55% | 440 | 520 | | |
| | | | | | | 31% | 548 | 700 | | |
| | | | | | | 28% | 548 | 706 | | |
| | | | | | | 41% | 917 | 1009 | | |
| | | | | | | 52% | 935 | 1009 | | |
| | | | | | | 47% | 917 | 985 | | |
| | | | | | | 29% | 749 | 889 | | |
| | | | | | | 28% | 539 | 706 | | |
| | | | | | | 33% | 737 | 844 | | |
| | | | | | | 42% | 617 | 700 | | |
| | | | | | | 22% | 731 | 892 | | |
| | | | | | | 40% | 617 | 691 | | |
| | | | | | | 32% | 737 | 856 | | |
| | | | | | | 27% | 749 | 859 | | |
| | | | | | | 22% | 731 | 901 | | |
| | | | | | | 47% | 617 | 685 | | |
| | | | | | | 35% | 614 | 706 | | |
| | | | | | | 33% | 749 | 856 | | |
| | | | | | | 25% | 749 | 904 | | |
| | | | | | | 26% | 749 | 886 | | |
| | | | | | | 22% | 548 | 724 | | |
| | | | | | | 25% | 542 | 706 | | |
| | | | | | | 31% | 737 | 832 | | |
| | | | | | | 22% | 749 | 898 | | |
| | | | | | | 27% | 548 | 655 | | |
| | | | | | | 50% | 917 | 964 | | |
| | | | | | | 24% | 749 | 898 | | |
| | | | | | | 43% | 917 | 964 | | |
| | | | | | | 22% | 557 | 706 | | |
| | | | | | | 18% | 749 | 898 | | |
| | | | | | | 40% | 894 | 953 | | |
| | | | | | | 28% | 641 | 745 | | |
| | | | | | | 31% | 737 | 832 | | |
| HSCMA28 | 909018 | 429 | HMMER | PFAM: KRAB box | PF01352 | 123.5 | 216 | 404 | | |
| | | | 2.1.1 | | | | | | | |
| HE8NH04 | 909024 | 430 | HMMER | PFAM: KRAB box | PF01352 | 126.1 | 63 | 251 | | |
| | | | 2.1.1 | | | | | | | |
| | | | blastx.14 | DNA binding protein | gi\|1020145\|gb\|AAA7 | 56% | 42 | 266 | | |
| | | | | [Homo sapiens] | 9359.1\| | 48% | 636 | 785 | | |
| | | | | | | 28% | 312 | 611 | | |
| | | | | | | 42% | 636 | 785 | | |
| | | | | | | 42% | 636 | 785 | | |
| | | | | | | 38% | 636 | 785 | | |
| | | | | | | 40% | 636 | 785 | | |
| | | | | | | 38% | 636 | 785 | | |
| | | | | | | 44% | 636 | 764 | | |
| | | | | | | 40% | 636 | 785 | | |
| | | | | | | 36% | 636 | 785 | | |
| | | | | | | 40% | 636 | 770 | | |
| | | | | | | 39% | 636 | 764 | | |
| | | | | | | 36% | 636 | 785 | | |
| | | | | | | 45% | 636 | 734 | | |
| | | | | | | 34% | 636 | 785 | | |
| | | | | | | 51% | 636 | 716 | | |
| | | | | | | 32% | 636 | 785 | | |
| | | | | | | 34% | 636 | 785 | | |
| | | | | | | 42% | 636 | 734 | | |
| | | | | | | 64% | 722 | 763 | | |
| | | | | | | 28% | 636 | 785 | | |
| | | | | | | 50% | 636 | 683 | | |
| | | | | | | 64% | 790 | 831 | | |
| | | | | | | 88% | 790 | 816 | | |
| | | | | | | 100% | 790 | 810 | | |
| | | | | | | 100% | 790 | 810 | | |
| HE8TK33 | 909025 | 431 | HMMER | PFAM: KRAB box | PF01352 | 90.5 | 468 | 596 | | |
| | | | 2.1.1 | | | | | | | |
| | | | blastx.14 | hPMSR3 [Homo sapiens] | gi\|1061424\|gb\|AAA9 | 56% | 432 | 617 | | |
| | | | | 7459.1\| | | | | | | |
| HE8QP45 | 909026 | 432 | HMMER | PFAM: KRAB box | PF01352 | 132.1 | 160 | 348 | | |
| | | | 2.1.1 | | | | | | | |
| | | | blastx.14 | DNA binding protein | gi\|1020145\|gb\|AAA7 | 58% | 145 | 375 | | |
| | | | | [Homo sapiens] | 9359.1\| | 40% | 382 | 531 | | |
| | | | | | | 38% | 571 | 663 | | |
| | | | | | | 26% | 421 | 522 | | |
| | | | | | | 23% | 421 | 522 | | |
| | | | | | | 50% | 511 | 546 | | |
| | | | | | | 20% | 421 | 522 | | |
| | | | | | | 28% | 448 | 522 | | |
| HTEJR88 | 909033 | 433 | HMMER | PFAM:KRAB box | PF01352 | 102 | 186 | 359 | | |
| | | | 2.1.1 | | | | | | | |
| | | | blastx.14 | NK10 [Mus musculus] | gi\|506502\|emb\|CAA5 | 50% | 165 | 380 | | |
| | | | | | 6225.1\| | | | | | |
| HFKHA05 | 909088 | 434 | HMMER | PFAM: BTB/POZ domain | PF00651 | 59.6 | 215 | 436 | | |
| | | | 2.1.1 | | | | | | | |
| | | | blastx.14 | (AF067219) contains | gi\|3150513\|gb\|AAC1 | 36% | 194 | 451 | | |
| | | | | similarity to the | 7022.1\| | 33% | 439 | 636 | | |
| | | | | kelch/MIPP family | | | | | | |
| | | | | [Caenorhabditis elegans] | | | | | | |
| HTELI13 | 909092 | 435 | HMMER | PFAM: BTB/POZ domain | PF00651 | 101.2 | 139 | 471 | | |
| | | | 2.1.1 | | | | | | | |
| | | | blastx.14 | (AF059569) actin binding | gi\|3789797\|gb\|AAC6 | 37% | 151 | 879 | | |
| | | | | protein MAYVEN [Homo | 7502.1\| | 39% | 1234 | 1371 | | |
| | | | | sapiens] | | 39% | 1249 | 1371 | | |
| | | | | | | 37% | 1249 | 1368 | | |
| | | | | | | 28% | 1162 | 1359 | | |
| | | | | | | 34% | 1093 | 1215 | | |
| | | | | | | 28% | 1225 | 1371 | | |
| | | | | | | 20% | 1057 | 1215 | | |
| | | | | | | 24% | 1093 | 1215 | | |
| | | | | | | 41% | 1360 | 1431 | | |
| | | | | | | 23% | 1096 | 1221 | | |
| | | | | | | 53% | 1390 | 1434 | | |
| | | | | | | 20% | 1093 | 1221 | | |
| | | | | | | 27% | 1369 | 1476 | | |
| | | | | | | 29% | 1390 | 1461 | | |
| | | | | | | 36% | 944 | 1000 | | |
| | | | | | | 26% | 1213 | 1326 | | |
| | | | | | | 53% | 837 | 875 | | |
| | | | | | | 29% | 1384 | 1476 | | |
| HDABU92 | 909093 | 436 | HMMER | PFAM: BTB/POZ domain | PF00651 | 111 | 348 | 689 | | |
| | | | 2.1.1 | | | | | | | |
| | | | blastx.14 | (AB026190) Kelch motif | gi\|4650844\|db\|BAA7 | 47% | 363 | 710 | | |
| | | | | containing protein [Homo | 7027.1\| | | | | | |
| | | | | sapiens] | | | | | | |
| HUJBC25 | 909098 | 437 | HMMER | PFAM: BTB/POZ domain | PF00651 | 77.1 | 209 | 502 | | |
| | | | 2.1.1 | | | | | | | |
| | | | blastx.14 | (AF059569) actin binding | gi\|3789797\|gb\|AAC6 | 42% | 227 | 532 | | |
| | | | | protein MAYVEN [Homo | 7502.1\| | | | | | |
| | | | | sapiens] | | | | | | |
| HTXOA73 | 909107 | 438 | HMMER | PFAM: BTB/POZ domain | PF00651 | 91.7 | 140 | 412 | | |
| | | | 2.1.1 | | | | | | | |
| | | | blastx.14 | (AB026190) Kelch motif | gi\|4650844\|dbj\|BAA7 | 41% | 134 | 484 | | |
| | | | | containing protein [Homo | 7027.1\| | | | | | |
| | | | | sapiens] | | | | | | |
| HDPFU72 | 909108 | 439 | HMMER | PFAM: BTB/POZ domain | PF00651 | 45.5 | 157 | 300 | | |
| | | | 2.1.1 | | | | | | | |
| | | | blastx.14 | Miz-1 protein [Homo | gi\|2230871\|emb[CAA | 66% | 151 | 294 | | |
| | | | | sapiens] | 70889.1\| | | | | | |
| HE2J176 | 909110 | 440 | HMMER | PFAM: BTB/POZ domain | PF00651 | 87.7 | 118 | 453 | | |
| | | | 2.1.1 | | | | | | | |
| | | | blastx.14 | zinc finger protein C2H2- | gi\|1063670\|gb\|AAA8 | 53% | 97 | 258 | | |
| | | | | 171 [Homo sapiens] | 1368.1\| | 35% | 277 | 453 | | |
| HNTDJ81 | 909111 | 441 | HMMER | PFAM: BTB/POZ domain | PF00651 | 87.7 | 194 | 529 | | |
| | | | 2.1.1 | | | | | | | |
| HADDS16 | 909116 | 442 | HMMER | PFAM: BTB/POZ domain | PF00651 | 75 | 205 | 435 | | |
| | | | 2.1.1 | | | | | | | |
| | | | blastx.14 | Bach2 [Mus musculus] | gi\|1695696\|dbj\|BAA1 | 43% | 169 | 465 | | |
| | | | | | 3138.1\| | | | | | |
| HDQHG17 | 909120 | 443 | HMMER | PFAM: BTB/POZ domain | PF00651 | 26.5 | 9 | 254 | | |
| | | | 2.1.1 | | | | | | | |
| | | | blastx.14 | (AJ223321) RP58 protein | gi\|4128145\|emb\|CAA | 52% | 162 | 377 | | |
| | | | | [Homo sapiens] | 11262.1\| | 51% | 54 | 158 | | |
| | | | | | | 64% | 3 | 53 | | |
| HTAIR71 | 909129 | 444 | HMMER | PFAM: BTB/POZ domain | PF00651 | 86.5 | 192 | 530 | | |
| | | | 2.1.1 | | | | | | | |
| | | | blastx.14 | (AF124731) BACH-i | gi\|4262559\|gb\|AAD1 | 99% | 141 | 566 | | |
| | | | | [Homo sapiens] | 4689.1\| | | | | | |
| HWADM93 | 909140 | 445 | HMMER | PFAM: BTB/POZ domain | PF00651 | 77.3 | 131 | 361 | | |
| | | | 2.1.1 | | | | | | | |
| HMWIU35 | 909167 | 446 | HMMER | PFAM: BTB/POZ domain | PF00651 | 35.7 | 375 | 482 | | |
| | | | 2.1.1 | | | | | | | |
| | | | blastx.14 | BING1 [Homo sapiens] | gi\|2648019\|emb\|CAB | 60% | 333 | 482 | | |
| | | | | | 09990.1\| | 75% | 494 | 517 | | |
| HDPTQ41 | 913933 | 447 | HMMER | PFAM: BolA-like protein | PF01722 | 48.5 | 176 | 388 | | |
| | | | 2.1.1 | | | | | | | |
| HHELR05 | 916009 | 448 | HMMER | PFAM: SET domain | PF00856 | 125.3 | 1435 | 1809 | | |
| | | | 2.1.1 | | | | | | | |
| | | | blastx.14 | (AC005065) determined | gi\|4153862\|gb\|AAD0 | 95% | 1174 | 1911 | | |
| | | | | by GENSCAN prediction | 4721.1\| | 79% | 505 | 1179 | | |
| | | | | and 1 | | 100% | 450 | 500 | | |
| | | | | | | 53% | 1132 | 1176 | | |
| | | | | | | 20% | 1099 | 1248 | | |
| | | | | | | 28% | 1160 | 1255 | | |
| HLHFN70 | 917541 | 449 | HMMER | PFAM:KRAB box | PF01352 | 65.1 | 133 | 252 | | |
| | | | 2.1.1 | | | | | | | |
| | | | blastx.14 | (AJ388557) zinc finger | gi\|5441615\|emb\|CAB | 66% | 109 | 252 | | |
| | | | protein [Canis familiaris] | 46856.1\| | | | | | | |
| HTOFU03 | 921894 | 450 | HMMER | PFAM: BTB/POZ domain | PF00651 | 92.6 | 192 | 506 | | |
| | | | 2.1.1 | | | | | | | |
| | | | blastx.14 | (AB026190) Kelch motif | gi\|4650844\|dbj\|BAA7 | 43% | 198 | 506 | | |
| | | | | containing protein [Homo | 7027.1\| | | | | | |
| | | | | sapiens] | | | | | | |
| HTLDF63 | 924552 | 451 | HMMER | PFAM: KRAB box | PF01352 | 32.7 | 169 | 279 | | |
| | | | 2.1.1 | | | | | | | |
| | | | blastx.14 | (AC004877) sco-spondin- | gi\|3638957\|gb\|AAC3 | 66% | 162 | 136 | | |
| | | | | mucin-like; similar to | 6301.1\| | | | | | |
| | | | | P98167 1 sapiens] | | | | | | |
| HTTBX05 | 928079 | 452 | HMMER | PFAM:KRAB box | PF01352 | 104.8 | 159 | 317 | | |
| | | | 2.1.1 | | | | | | | |
| | | | blastx.14 | Description: KRAB zinc | gi\|1049295\|gb\|AAB0 | 69% | 153 | 311 | | |
| | | | | finger protein; this is a 1 1 | 9748.1\| | | | | | |
| | | | | 1 | | | | | | |
| HDPSX40 | 935352 | 453 | HMMER | PFAMI:Pentapeptide | PF00805 | | 76.6 | 1010 | 1129 | |
| | | | 2.1.1 | repeats (8 copies) | | | | | | |
| | | | blastx.14 | Similar to potassium | gi\|1086886\|gb\|AAA8 | 44% | 365 | 598 | | |
| | | | | channel protein. | 2468.1\| | 56% | 320 | 388 | | |
| | | | | [Caenorhabditis elegans] | | | | | | |
| HNFJB24 | 935689 | 454 | HMMER | PFAM: TSC-22/dip/bun | PF01166 | 100.4 | 165 | 347 | | |
| | | | 2.1.1 | family | | | | | | |
| | | | blastx.14 | a variant of TSC-22 | gi\|1181619\|dbj\|BAA1 | 70% | 93 | 329 | | |
| | | | | [Gallus gallus] | 1565.1\| | | | | | |
| HLWBE75 | 935690 | 455 | HMMER | PFAM: TSC-22/dip/bun | PF01166 | 110.4 | 409 | 591 | | |
| | | | 2.1.1 | family | | | | | | |
| | | | blastx.14 | TSC-22 [Homo sapiens] | gi\|1871130\|dbj\|BAA0 | 76% | 355 | 573 | | |
| | | | | | 7598.1\| | | | | | |
| HDPCW53 | 946458 | 456 | HMMER | PFAM: BTB/POZ domain | PF00651 | 91.6 | 695 | 1042 | | |
| | | | 2.1.1 | | | | | | | |
| | | | blastx.2 | (AC006963) similar to | gb\|AAF03529.1\|AC0 | 86% | 575 | 1216 | | |
| | | | | Kelch proteins; similar to 06963_1 | | | | | | |
| | | | | BAA77027 | | | | | | |
| | | | | (PID:g4650844) [Homo | | | | | | |
| | | | | sapiens] | | | | | | |
| HHASV05 | 948749 | 457 | HMMER | PFAM: PHD-finger | PF00628 | 34.4 | 794 | 654 | | |
| | | | 2.1.1 | | | | | | | |
| | | | blastx. 14 | (AL121733) hypothetical | gi\|6012973 \|emb\|CAB | 71% | 842 | 636 | | |
| | | | | protein [Homo sapiens] | 57324.1\| | 66% | 1598 | 1563 | | |
| HHEDS40 | 950456 | 458 | HMMER | PFAM: SAND domain | PF01342 | 71.3 | 2386 | 2144 | | |
| | | | 2.1.1 | | | | | | | |
| | | | blastx.2 | (AF173868) DNA binding | gb\|AAD51352.1\|AF1 | 100% | 162 | 1850 | | |
| | | | | protein p96PIF [Homo | 73868_1 | | | | | |
| | | | | sapiens] | | | | | | |
| HNTAQ63 | 951706 | 459 | HMMER | PFAM: Surp module | PF01805 | 88.1 | 272 | 436 | | |
| | | | 2.1.1 | | | | | | | |
| HNGEN6O | 951952 | 460 | HMMER | PFAM: BTB/POZ domain | PF00651 | 62 | 241 480 | | | |
| | | | 2.1.1 | | | | | | | |
| | | | blastx.14 | Miz-1 protein [Homo | gi\|223087\|emb\|CAA | 53% | 223 | 378 | | |
| | | | | sapiens] | 70889.1\| | 31% | 391 | 486 | | |
| HWBDS07 | 952796 | 461 | HMMER | PFAM:KRAB box | PF01352 | 135 | 187 | 378 | | |
| | | | 2.1.1 | | | | | | | |
| | | | blastx.14 | (AC007228) R31665_2 | gi\|4567178\|gb\|AAD2 | 59% | 133 | 309 | | |
| | | | | [AA1-673][Homo | 3606.1\|AC007228_1 | 54% | 310 | 381 | | |
| | | | | sapiens] | | 50% | 310 | 381 | | |
| HNTDI77 | 958279 | 462 | HMMER | PFAM:KRAB box | PF01352 | 86.2 | 217 | 336 | | |
| | | | 2.1.1 | | | | | | | |
| | | | blastx.14 | KRAB zinc finger protein; | gi\|1049301\|gb\|AAB0 | 51% | 178 | 393 | | |
| | | | | Method: conceptual | 9749.1\| | 42% | 424 | 480 | | |
| | | | | translation supplied by | | 44% | 424 | 477 | | |
| | | | | author [Homo sapiens] | | 60% | 483 | 512 | | |
| | | | | | | 36% | 421 | 477 | | |
| HDPDN03 | 960952 | 463 | HMMER | PFAM: Kelch motif | PF01344 | 234.6 | 1330 | 1470 | | |
| | | | 2.1.1 | | | | | | | |
| | | | blastx.14 | (AB026190) Kelch motif | gi\|4650844\|dbj\|BAA7 | 50% | 244 | 1035 | | |
| | | | | containing protein [Homo | 7027.1\| | 38% | 1054 | 1608 | | |
| | | | | sapiens] | | 38% | 1150 | 1605 | | |
| | | | | | | 35% | 1270 | 1611 | | |
| | | | | | | 38% | 1045 | 1275 | | |
| | | | | | | 44% | 1189 | 1392 | | |
| | | | | | | 36% | 1045 | 1323 | | |
| | | | | | | 38% | 1333 | 1551 | | |
| | | | | | | 43% | 1474 | 1605 | | |
| | | | | | | 27% | 1792 | 1956 | | |
| HT4EC82 | 961090 | 464 | HMMER | PFAM: PHD-finger | PF00628 | 30.2 | 429 | 590 | | |
| | | | 2.1.1 | | | | | | | |
| | | | blastx.2 | (AL021366) | emb\|CAA16158.1\| | 51% | 252 | 602 | | |
| | | | | cICK0721Q.4.1 (PHD | | 35% | 573 | 656 | | |
| | | | | finger protein 1) (isoform | | | | | | |
| | | | | 1) [Homo sapiens] | | | | | | |
| HHFLH10 | 963163 | 465 | HMMER | PFAM:KRAB box | PF01352 | 60.3 | 571 | 684 | | |
| | | | 2.1.1 | | | | | | | |
| | | | blastx.14 | zinc finger protein | gi\|487783\|gb\|AAC50 | 61% | 571 | 711 | | |
| | | | | ZNF133 [Homo sapiens] | 260.1\| | | 82% | 494 | 562 | |
| | | | | | | 32% | 679 | 888 | | |
| HPMGO02 | 963393 | 466 | HMMER | PFAM:KRAB box | PF01352 | 127.9 | 160 | 348 | | |
| | | | 2.1.1 | | | | | | | |
| | | | blastx.14 | KRAB/zinc finger | gi\|1389741\|gb\|AAD0 | 73% | 151 | 342 | | |
| | | | | suppressor protein 1 | 5020.1\| | 34% | 541 | 846 | | |
| | | | | [Rattus norvegicus] | | 56% | 385 | 495 | | |
| | | | | | | 32% | 700 | 855 | | |
| | | | | | | 32% | 700 | 849 | | |
| | | | | | | 32% | 700 | 855 | | |
| | | | | | | 33% | 697 | 849 | | |
| | | | | | | 28% | 697 | 876 | | |
| | | | | | | 28% | 709 | 855 | | |
| | | | | | | 28% | 709 | 855 | | |
| | | | | | | 23% | 691 | 855 | | |
| | | | | | | 22% | 712 | 855 | | |
| | | | | | | 40% | 577 | 681 | | |
| | | | | | | 47% | 369 | 419 | | |
| | | | | | | 40% | 571 | 651 | | |
| | | | | | | 27% | 778 | 876 | | |
| HDPBB38 | 965903 | 467 | HMMER | PFAM: PHD-finger | PF00628 | 35.6 | 1538 | 1627 | | |
| | | | 2.1.1 | | | | | | | |
| | | | blastx.14 | (AF119043) | gi\|4325109\|gb\|AAD1 | 98% | 2 | 448 | | |
| | | | | transcriptional | 7259.1\| | 89% | 581 | 1024 | | |
| | | | | intermediary factor 1 | | 72% | 1154 | 1639 | | |
| | | | | gamma; TIF1 gamma | | 61% | 813 | 851 | | |
| | | | | [Homo sapiens] | | 32% | 911 | 1021 | | |
| HMAFY88 | 966935 | 468 | HMMER | PFAM:KRAB box | PF01352 | 92 | 591 | 469 | | |
| | | | 2.1.1 | | | | | | | |
| | | | blastx.14 | (AF167320) zinc finger | gi\|5640017\|gb\|AAD4 | 71% | 627 | 472 | | |
| | | | | protein ZFP113 [Mus | 5929.1\|AF167320_1 | | | | | |
| | | | | musculus] | | | | | | |
| HTXFB61 | 967821 | 469 | HMMER | PFAM:KRAB box | PF01352 | 84.7 | 185 | 307 | | |
| | | | 2.1.1 | | | | | | | |
| | | | blastx.14 | (AC007228) BC37295_1 | gi\|4567179\|gb\|AAD2 | 71% | 185 | 310 | | |
| | | | | [Homo sapiens] | 3607.1\|AC007228_2 | 45% | 561 | 665 | | |
| HAGEL01 | 971510 | 470 | HMMER | PFAM: RNA polymerases | PF01193 | 113.6 | 283 | 516 | | |
| | | | 2.1.1 | L/l3to l6kDasubunit | | | | | | |
| | | | blastx.14 | (AF077044) RNA | gi\|4689136\|gb\|AAD2 | 100% | 337 | 435 | | |
| | | | | polymerase 116 kDa | 7777.1\|AF077044_1 | 100% | 178 | 219 | | |
| | | | | subunit [Homo sapiens] | | | | | | |
| HCEOB15 | 973102 | 471 | HMMER | PFAM: CXXC zinc finger | PF02008 | 60.7 | 709 | 852 | | |
| | | | 2.1.1 | | | | | | | |
| | | | blastx.14 | (AL031523) putative | gi\|3560222\|emb\|CAA | 37% | 304 | 528 | | |
| | | | | transcriptional regulatory | 20664.1\| | | | | | |
| | | | | 1 | | | | | | |

[0049] Table 2 further characterizes certain encoded polypeptides of the invention, by providing the results of comparisons to protein and protein family databases. The first column provides a unique clone identifier, “Clone ID NO:”, corresponding to a cDNA clone disclosed in Table 1A. The second column provides the unique contig identifier, “Contig ID:” which allows correlation with the information in Table 1A. The third column provides the sequence identifier, “SEQ ID NO:”, for the contig polynucleotide sequences. The fourth column provides the analysis method by which the homology/identity disclosed in the Table was determined. The fifth column provides a description of the PFAM/NR hit identified by each analysis. Column six provides the accession number of the PFAM/NR hit disclosed in the fifth column. Column seven, score/percent identity, provides a quality score or the percent identity, of the hit disclosed in column five. Comparisons were made between polypeptides encoded by polynucleotides of the invention and a non-redundant protein database (herein referred to as “NR”), or a database of protein families (herein referred to as “PFAM”), as described below.

[0050] The NR database, which comprises the NBRF PIR database, the NCBI GenPept database, and the SIB SwissProt and TrEMBL databases, was made non-redundant using the computer program nrdb2 (Warren Gish, Washington University in Saint Louis). Each of the polynucleotides shown in Table 1A, column 3 (e.g., SEQ ID NO:X or the ‘Query’ sequence) was used to search against the NR database. The computer program BLASTX was used to compare a 6-frame translation of the Query sequence to the NR database (for information about the BLASTX algorithm please see Altshul et al., J. Mol. Biol. 215:403-410 (1990); and Gish and States, Nat. Genet. 3:266-272 (1993). A description of the sequence that is most similar to the Query sequence (the highest scoring ‘Subject’) is shown in column five of Table 2 and the database accession number for that sequence is provided in column six. The highest scoring ‘Subject’ is reported in Table 2 if (a) the estimated probability that the match occurred by chance alone is less than 1.0e-07, and (b) the match was not to a known repetitive element. BLASTX returns alignments of short polypeptide segments of the Query and Subject sequences which share a high degree of similarity; these segments are known as High-Scoring Segment Pairs or HSPs. Table 2 reports the degree of similarity between the Query and the Subject for each HSP as a percent identity in Column 7. The percent identity is determined by dividing the number of exact matches between the two aligned sequences in the HSP, dividing by the number of Query amino acids in the HSP and multiplying by 100. The polynucleotides of SEQ ID NO:X which encode the polypeptide sequence that generates an HSP are delineated by columns 8 and 9 of Table 2.

[0051] The PFAM database, PFAM version 2.1, (Sonnhammer et al., Nucl. Acids Res., 26:320-322, 1998)) consists of a series of multiple sequence alignments; one alignment for each protein family. Each multiple sequence alignment is converted into a probability model called a Hidden Markov Model, or HMM, that represents the position-specific variation among the sequences that make up the multiple sequence alignment (see, e.g., Durbin et al., Biological sequence analysis: probabilistic models of proteins and nucleic acids, Cambridge University Press, 1998 for the theory of HMMs). The program HMMER version 1.8 (Sean Eddy, Washington University in Saint Louis) was used to compare the predicted protein sequence for each Query sequence (SEQ ID NO:Y in Table 1A) to each of the HMMs derived from PFAM version 2.1. A HMM derived from PFAM version 2.1 was said to be a significant match to a polypeptide of the invention if the score returned by HMMER 1.8 was greater than 0.8 times the HMMER 1.8 score obtained with the most distantly related known member of that protein family. The description of the PFAM family which shares a significant match with a polypeptide of the invention is listed in column 5 of Table 2, and the database accession number of the PFAM hit is provided in column 6. Column 7 provides the score returned by HMMER version 1.8 for the alignment. Columns 8 and 9 delineate the polynucleotides of SEQ ID NO:X which encode the polypeptide sequence which show a significant match to a PFAM protein family.

[0052] As mentioned, columns 8 and 9 in Table 2, “NT From” and “NT To”, delineate the polynucleotides of “SEQ ID NO:X” that encode a polypeptide having a significant match to the PFAM/NR database as disclosed in the fifth column. In one embodiment, the invention provides a protein comprising, or alternatively consisting of, a polypeptide encoded by the polynucleotides of SEQ ID NO:X delineated in columns 8 and 9 of Table 2. Also provided are polynucleotides encoding such proteins, and the complementary strand thereto.

[0053] The nucleotide sequence SEQ ID NO:X and the translated SEQ ID NO:Y are sufficiently accurate and otherwise suitable for a variety of uses well known in the art and described further below. For instance, the nucleotide sequences of SEQ ID NO:X are useful for designing nucleic acid hybridization probes that will detect nucleic acid sequences contained in SEQ ID NO:X or the cDNA contained in Clone ID NO:Z. These probes will also hybridize to nucleic acid molecules in biological samples, thereby enabling immediate applications in chromosome mapping, linkage analysis, tissue identification and/or typing, and a variety of forensic and diagnostic methods of the invention. Similarly, polypeptides identified from SEQ ID NO:Y may be used to generate antibodies which bind specifically to these polypeptides, or fragments thereof, and/or to the polypeptides encoded by the cDNA clones identified in, for example, Table 1A.

[0054] Nevertheless, DNA sequences generated by sequencing reactions can contain sequencing errors. The errors exist as misidentified nucleotides, or as insertions or deletions of nucleotides in the generated DNA sequence. The erroneously inserted or deleted nucleotides cause frame shifts in the reading frames of the predicted amino acid sequence. In these cases, the predicted amino acid sequence diverges from the actual amino acid sequence, even though the generated DNA sequence may be greater than 99.9% identical to the actual DNA sequence (for example, one base insertion or deletion in an open reading frame of over 1000 bases).

[0055] Accordingly, for those applications requiring precision in the nucleotide sequence or the amino acid sequence, the present invention provides not only the generated nucleotide sequence identified as SEQ ID NO:X, and a predicted translated amino acid sequence identified as SEQ ID NO:Y, but also a sample of plasmid DNA containing cDNA Clone ID NO:Z (deposited with the ATCC on Oct. 5, 2000, and receiving ATCC designation numbers PTA 2574 and PTA 2575; deposited with the ATCC on Jan. 5, 2001, and having depositor reference numbers TS-1, TS-2, AC-1, and AC-2; and/or as set forth, for example, in Table 1A, 6 and 7). The nucleotide sequence of each deposited clone can readily be determined by sequencing the deposited clone in accordance with known methods. Further, techniques known in the art can be used to verify the nucleotide sequences of SEQ ID NO:X.

[0056] The predicted amino acid sequence can then be verified from such deposits. Moreover, the amino acid sequence of the protein encoded by a particular clone can also be directly determined by peptide sequencing or by expressing the protein in a suitable host cell containing the deposited human cDNA, collecting the protein, and determining its sequence.

[0057] RACE Protocol For Recovery of Full-Length Genes

[0058] Partial cDNA clones can be made full-length by utilizing the rapid amplification of cDNA ends (RACE) procedure described in Frohman, M. A., et al., Proc. Nat'l. Acad. Sci. USA, 85:8998-9002 (1988). A cDNA clone missing either the 5′ or 3′ end can be reconstructed to include the absent base pairs extending to the translational start or stop codon, respectively. In some cases, cDNAs are missing the start codon of translation, therefor. The following briefly describes a modification of this original 5′ RACE procedure. Poly A+ or total RNA is reverse transcribed with Superscript II (Gibco/BRL) and an antisense or complementary primer specific to the cDNA sequence. The primer is removed from the reaction with a Microcon Concentrator (Amicon). The first-strand cDNA is then tailed with dATP and terminal deoxynucleotide transferase (Gibco/BRL). Thus, an anchor sequence is produced which is needed for PCR amplification. The second strand is synthesized from the dA-tail in PCR buffer, Taq DNA polymerase (Perkin-Elmer Cetus), an oligo-dT primer containing three adjacent restriction sites (XhoI, SalI and ClaI) at the 5′ end and a primer containing just these restriction sites. This double-stranded cDNA is PCR amplified for 40 cycles with the same primers as well as a nested cDNA-specific antisense primer. The PCR products are size-separated on an ethidium bromide-agarose gel and the region of gel containing cDNA products the predicted size of missing protein-coding DNA is removed. cDNA is purified from the agarose with the Magic PCR Prep kit (Promega), restriction digested with XhoI or SalI, and ligated to a plasmid such as pBluescript SKII (Stratagene) at XhoI and EcoRV sites. This DNA is transformed into bacteria and the plasmid clones sequenced to identify the correct protein-coding inserts. Correct 5′ ends are confirmed by comparing this sequence with the putatively identified homologue and overlap with the partial cDNA clone. Similar methods known in the art and/or commercial kits are used to amplify and recover 3′ ends.

[0059] Several quality-controlled kits are commercially available for purchase. Similar reagents and methods to those above are supplied in kit form from Gibco/BRL for both 5′ and 3′ RACE for recovery of full length genes. A second kit is available from Clontech which is a modification of a related technique, SLIC (single-stranded ligation to single-stranded cDNA), developed by Dumas et al., Nucleic Acids Res., 19:5227-32 (1991). The major differences in procedure are that the RNA is alkaline hydrolyzed after reverse transcription and RNA ligase is used to join a restriction site-containing anchor primer to the first-strand cDNA. This obviates the necessity for the dA-tailing reaction which results in a polyT stretch that is difficult to sequence past.

[0060] An alternative to generating 5′ or 3′ cDNA from RNA is to use cDNA library double-stranded DNA. An asymmetric PCR-amplified antisense cDNA strand is synthesized with an antisense cDNA-specific primer and a plasmid-anchored primer. These primers are removed and a symmetric PCR reaction is performed with a nested cDNA-specific antisense primer and the plasmid-anchored primer.

[0061] RNA Ligase Protocol For Generating The 5′ or 3′ End Sequences To Obtain Full Length Genes

[0062] Once a gene of interest is identified, several methods are available for the identification of the 5′ or 3′ portions of the gene which may not be present in the original cDNA plasmid. These methods include, but are not limited to, filter probing, clone enrichment using specific probes and protocols similar and identical to 5′ and 3′ RACE. While the full length gene may be present in the library and can be identified by probing, a useful method for generating the 5′ or 3′ end is to use the existing sequence information from the original cDNA to generate the missing information. A method similar to 5′ RACE is available for generating the missing 5′ end of a desired full-length gene. (This method was published by Fromont-Racine et al., Nucleic Acids Res., 21(7):1683-1684 (1993)). Briefly, a specific RNA oligonucleotide is ligated to the 5′ ends of a population of RNA presumably containing full-length gene RNA transcript and a primer set containing a primer specific to the ligated RNA oligonucleotide and a primer specific to a known sequence of the gene of interest, is used to PCR amplify the 5′ portion of the desired full length gene which may then be sequenced and used to generate the full length gene. This method starts with total RNA isolated from the desired source, poly A RNA may be used but is not a prerequisite for this procedure. The RNA preparation may then be treated with phosphatase if necessary to eliminate 5′ phosphate groups on degraded or damaged RNA which may interfere with the later RNA ligase step. The phosphatase if used is then inactivated and the RNA is treated with tobacco acid pyrophosphatase in order to remove the cap structure present at the 5′ ends of messenger RNAs. This reaction leaves a 5′ phosphate group at the 5′ end of the cap cleaved RNA which can then be ligated to an RNA oligonucleotide using T4 RNA ligase. This modified RNA preparation can then be used as a template for first strand cDNA synthesis using a gene specific oligonucleotide. The first strand synthesis-reaction can then be used as a template for PCR amplification of the desired 5′ end using a primer specific to the ligated RNA oligonucleotide and a primer specific to the known sequence of the gene of interest. The resultant product is then sequenced and analyzed to confirm that the 5′ end sequence belongs to the relevant gene.

[0063] The present invention also relates to vectors or plasmids which include such DNA sequences, as well as the use of the DNA sequences. The material deposited with the ATCC (deposited with the ATCC on Oct. 5, 2000, and receiving ATCC designation numbers PTA 2574 and PTA 2575; deposited with the ATCC on Jan. 5, 2001, and receiving ATCC designation numbers TS-1, TS-2, AC-1, and AC-2; and/or as set forth, for example, in Table 1A, Table 6, or Table 7) is a mixture of cDNA clones derived from a variety of human tissue and cloned in either a plasmid vector or a phage vector, as described, for example, in Table 7. These deposits are referred to as “the deposits” herein. The tissues from which some of the clones were derived are listed in Table 7, and the vector in which the corresponding cDNA is contained is also indicated in Table 7. The deposited material includes cDNA clones corresponding to SEQ ID NO:X described, for example, in Table 1A (Clone ID NO:Z). A clone which is isolatable from the ATCC Deposits by use of a sequence listed as SEQ ID NO:X, may include the entire coding region of a human gene or in other cases such clone may include a substantial portion of the coding region of a human gene. Furthermore, although the sequence listing may in some instances list only a portion of the DNA sequence in a clone included in the ATCC Deposits, it is well within the ability of one skilled in the art to sequence the DNA included in a clone contained in the ATCC Deposits by use of a sequence (or portion thereof) described in, for example Tables 1A or 2 by procedures hereinafter further described, and others apparent to those skilled in the art.

[0064] Also provided in Table 7 is the name of the vector which contains the cDNA clone. Each vector is routinely used in the art. The following additional information is provided for convenience.

[0065] Vectors Lambda Zap (U.S. Pat. Nos. 5,128,256 and 5,286,636), Uni-Zap XR (U.S. Pat. Nos. 5,128, 256 and 5,286,636), Zap Express (U.S. Pat. Nos. 5,128,256 and 5,286,636), pBluescript (pBS) (Short, J. M. et al., Nucleic Acids Res. 16:7583-7600 (1988); Alting-Mees, M. A. and Short, J. M., Nucleic Acids Res. 17:9494 (1989)) and pBK (Alting-Mees, M. A. et al., Strategies 5:58-61 (1992)) are commercially available from Stratagene Cloning Systems, Inc., 11011 N. Torrey Pines Road, La Jolla, Calif., 92037. pBS contains an ampicillin resistance gene and pBK contains a neomycin resistance gene. Phagemid pBS may be excised from the Lambda Zap and Uni-Zap XR vectors, and phagemid pBK may be excised from the Zap Express vector. Both phagemids may be transformed into E. coli strain XL-1 Blue, also available from Stratagene.

[0066] Vectors pSport1, pCMVSport 1.0, pCMVSport 2.0 and pCMVSport 3.0, were obtained from Life Technologies, Inc., P.O. Box 6009, Gaithersburg, Md. 20897. All Sport vectors contain an ampicillin resistance gene and may be transformed into E. coli strain DH10B, also available from Life Technologies. See, for instance, Gruber, C. E., et al., Focus 15:59-(1993). Vector lafmid BA (Bento Soares, Columbia University, New York, N.Y.) contains an ampicillin resistance gene and can be transformed into E. coli strain XL-1 Blue. Vector pCR®2.1, which is available from Invitrogen, 1600 Faraday Avenue, Carlsbad, Calif. 92008, contains an ampicillin resistance gene and may be transformed into E. coli strain DH10B, available from Life Technologies. See, for instance, Clark, J. M., Nuc. Acids Res. 16:9677-9686 (1988) and Mead, D. et al., Bio/Technology 9: (1991).

[0067] The present invention also relates to the genes corresponding to SEQ ID NO:X, SEQ ID NO:Y, and/or the deposited clone (Clone ID NO:Z). The corresponding gene can be isolated in accordance with known methods using the sequence information disclosed herein. Such methods include preparing probes or primers from the disclosed sequence and identifying or amplifying the corresponding gene from appropriate sources of genomic material.

[0068] Also provided in the present invention are allelic variants, orthologs, and/or species homologs. Procedures known in the art can be used to obtain full-length genes, allelic variants, splice variants, full-length coding portions, orthologs, and/or species homologs of genes corresponding to SEQ ID NO:X or the complement thereof, polypeptides encoded by genes corresponding to SEQ ID NO:X or the complement thereof, and/or the cDNA contained in Clone ID NO:Z, using information from the sequences disclosed herein or the clones deposited with the ATCC. For example, allelic variants and/or species homologs may be isolated and identified by making suitable probes or primers from the sequences provided herein and screening a suitable nucleic acid source for allelic variants and/or the desired homologue.

[0069] The polypeptides of the invention can be prepared in any suitable manner. Such polypeptides include isolated naturally occurring polypeptides, recombinantly produced polypeptides, synthetically produced polypeptides, or polypeptides produced by a combination of these methods. Means for preparing such polypeptides are well understood in the art.

[0070] The polypeptides may be in the form of the secreted protein, including the mature form, or may be a part of a larger protein, such as a fusion protein (see below). It is often advantageous to include an additional amino acid sequence which contains secretory or leader sequences, pro-sequences, sequences which aid in purification, such as multiple histidine residues, or an additional sequence for stability during recombinant production.

[0071] The polypeptides of the present invention are preferably provided in an isolated form, and preferably are substantially purified. A recombinantly produced version of a polypeptide, including the secreted polypeptide, can be substantially purified using techniques described herein or otherwise known in the art, such as, for example, by the one-step method described in Smith and Johnson, Gene 67:31-40 (1988). Polypeptides of the invention also can be purified from natural, synthetic or recombinant sources using techniques described herein or otherwise known in the art, such as, for example, antibodies of the invention raised against the polypeptides of the present invention in methods which are well known in the art.

[0072] The present invention provides a polynucleotide comprising, or alternatively consisting of, the nucleic acid sequence of SEQ ID NO:X, and/or the cDNA sequence contained in Clone ID NO:Z. The present invention also provides a polypeptide comprising, or alternatively, consisting of, the polypeptide sequence of SEQ ID NO:Y, a polypeptide encoded by SEQ ID NO:X or a complement thereof, a polypeptide encoded by the cDNA contained in Clone ID NO:Z, and/or the polypeptide sequence encoded by a nucleotide sequence in SEQ ID NO:B as defined in column 6 of Table 1B. Polynucleotides encoding a polypeptide comprising, or alternatively consisting of the polypeptide sequence of SEQ ID NO:Y, a polypeptide encoded by SEQ ID NO:X, a polypeptide encoded by the cDNA contained in Clone ID NO:Z, and/or a polypeptide sequence encoded by a nucleotide sequence in SEQ ID NO:B as defined in column 6 of Table 1B are also encompassed by the invention. The present invention further encompasses a polynucleotide comprising, or alternatively consisting of, the complement of the nucleic acid sequence of SEQ ID NO:X, a nucleic acid sequence encoding a polypeptide encoded by the complement of the nucleic acid sequence of SEQ ID NO:X, and/or the cDNA contained in Clone ID NO:Z.

[0073] Moreover, representative examples of polynucleotides of the invention comprise, or alternatively consist of, one, two, three, four, five, six, seven, eight, nine, ten, or more of the sequences delineated in Table 1B column 6, or any combination thereof. Additional, representative examples of polynucleotides of the invention comprise, or alternatively consist of, one, two, three, four, five, six, seven, eight, nine, ten, or more of the complementary strand(s) of the sequences delineated in Table 1B column 6, or any combination thereof. In further embodiments, the above-described polynucleotides of the invention comprise, or alternatively consist of, sequences delineated in Table 1B, column 6, and have a nucleic acid sequence which is different from that of the BAC fragment having the sequence disclosed in SEQ ID NO:B (see Table 1B, column 5). In additional embodiments, the above-described polynucleotides of the invention comprise, or alternatively consist of, sequences delineated in Table 1B, column 6, and have a nucleic acid sequence which is different from that published for the BAC clone identified as BAC ID NO:A (see Table 1B, column 4). In additional embodiments, the above-described polynucleotides of the invention comprise, or alternatively consist of, sequences delineated in Table 1B, column 6, and have a nucleic acid sequence which is different from that contained in the BAC clone identified as BAC ID NO:A (see Table 1B, column 4). Polypeptides encoded by these polynucleotides, other polynucleotides that encode these polypeptides, and antibodies that bind these polypeptides are also encompassed by the invention. Additionally, fragments and variants of the above-described polynucleotides and polypeptides are also encompassed by the invention.

[0074] Further, representative examples of polynucleotides of the invention comprise, or alternatively consist of, one, two, three, four, five, six, seven, eight, nine, ten, or more of the sequences delineated in column 6 of Table 1B which correspond to the same Clone ID NO:Z (see Table 1B, column 1), or any combination thereof. Additional, representative examples of polynucleotides of the invention comprise, or alternatively consist of, one, two, three, four, five, six, seven, eight, nine, ten, or more of the complementary strand(s) of the sequences delineated in column 6 of Table 1B which correspond to the same Clone ID NO:Z (see Table 1B, column 1), or any combination thereof. In further embodiments, the above-described polynucleotides of the invention comprise, or alternatively consist of, sequences delineated in column 6 of Table 1B which correspond to the same Clone ID NO:Z (see Table 1B, column 1) and have a nucleic acid sequence which is different from that of the BAC fragment having the sequence disclosed in SEQ ID NO:B (see Table 1B, column 5). In additional embodiments, the above-described polynucleotides of the invention comprise, or alternatively consist of, sequences delineated in column 6 of Table 1B which correspond to the same Clone ID NO:Z (see Table 1B, column 1) and have a nucleic acid sequence which is different from that published for the BAC clone identified as BAC ID NO:A (see Table 1B, column 4). In additional embodiments, the above-described polynucleotides of the invention comprise, or alternatively consist of, sequences delineated in column 6 of Table 1B which correspond to the same Clone ID NO:Z (see Table 1B, column 1) and have a nucleic acid sequence which is different from that contained in the BAC clone identified as BAC ID NO:A (see Table 1B, column 4). Polypeptides encoded by these polynucleotides, other polynucleotides that encode these polypeptides, and antibodies that bind these polypeptides are also encompassed by the invention. Additionally, fragments and variants of the above-described polynucleotides and polypeptides are also encompassed by the invention.

[0075] Further, representative examples of polynucleotides of the invention comprise, or alternatively consist of, one, two, three, four, five, six, seven, eight, nine, ten, or more of the sequences delineated in column 6 of Table 1B which correspond to the same contig sequence identifer SEQ ID NO:X (see Table 1B, column 2), or any combination thereof. Additional, representative examples of polynucleotides of the invention comprise, or alternatively consist of, one, two, three, four, five, six, seven, eight, nine, ten, or more of the complementary strand(s) of the sequences delineated in column 6 of Table 1B which correspond to the same contig sequence identifer SEQ ID NO:X (see Table 1B, column 2), or any combination thereof. In further embodiments, the above-described polynucleotides of the invention comprise, or alternatively consist of, sequences delineated in column 6 of Table 1B which correspond to the same contig sequence identifer SEQ ID NO:X (see Table 1B, column 2) and have a nucleic acid sequence which is different from that of the BAC fragment having the sequence disclosed in SEQ ID NO:B (see Table 1B, column 5). In additional embodiments, the above-described polynucleotides of the invention comprise, or alternatively consist of, sequences delineated in column 6 of Table 1B which correspond to the same contig sequence identifer SEQ ID NO:X (see Table 1B, column 2) and have a nucleic acid sequence which is different from that published for the BAC clone identified as BAC ID NO:A (see Table 1B, column 4). In additional embodiments, the above-described polynucleotides of the invention comprise, or alternatively consist of, sequences delineated in column 6 of Table 1B which correspond to the same contig sequence identifer SEQ ID NO:X (see Table 1B, column 2) and have a nucleic acid sequence which is different from that contained in the BAC clone identified as BAC ID NO:A (See Table 1B, column 4). Polypeptides encoded by these polynucleotides, other polynucleotides that encode these polypeptides, and antibodies that bind these polypeptides are also encompassed by the invention. Additionally, fragments and variants of the above-described polynucleotides and polypeptides are also encompassed by the invention.

[0076] Moreover, representative examples of polynucleotides of the invention comprise, or alternatively consist of, one, two, three, four, five, six, seven, eight, nine, ten, or more of the sequences delineated in the same row of Table 1B column 6, or any combination thereof. Additional, representative examples of polynucleotides of the invention comprise, or alternatively consist of, one, two, three, four, five, six, seven, eight, nine, ten, or more of the complementary strand(s) of the sequences delineated in the same row of Table 1B column 6, or any combination thereof. In preferred embodiments, the polynucleotides of the invention comprise, or alternatively consist of, one, two, three, four, five, six, seven, eight, nine, ten, or more of the complementary strand(s) of the sequences delineated in the same row of Table 1B column 6, wherein sequentially delineated sequences in the table (i.e. corresponding to those exons located closest to each other) are directly contiguous in a 5′ to 3′ orientation. In further embodiments, above-described polynucleotides of the invention comprise, or alternatively consist of, sequences delineated in the same row of Table 1B, column 6, and have a nucleic acid sequence which is different from that of the BAC fragment having the sequence disclosed in SEQ ID NO:B (see Table 1B, column 5). In additional embodiments, the above-described polynucleotides of the invention comprise, or alternatively consist of, sequences delineated in the same row of Table 1B, column 6, and have a nucleic acid sequence which is different from that published for the BAC clone identified as BAC ID NO:A (see Table 1B, column 4). In additional embodiments, the above-described polynucleotides of the invention comprise, or alternatively consist of, sequences delineated in the same row of Table 1B, column 6, and have a nucleic acid sequence which is different from that contained in the BAC clone identified as BAC ID NO:A (see Table 1B, column 4). Polypeptides encoded by these polynucleotides, other polynucleotides that encode these polypeptides, and antibodies that bind these polypeptides are also encompassed by the invention.

[0077] In additional specific embodiments, polynucleotides of the invention comprise, or alternatively consist of, one, two, three, four, five, six, seven, eight, nine, ten, or more of the sequences delineated in column 6 of Table 1B, and the polynucleotide sequence of SEQ ID NO:X (e.g., as defined in Table 1B, column 2) or fragments or variants thereof. Polypeptides encoded by these polynucleotides, other polynucleotides that encode these polypeptides, and antibodies that bind these polypeptides are also encompassed by the invention.

[0078] In additional specific embodiments, polynucleotides of the invention comprise, or alternatively consist of, one, two, three, four, five, six, seven, eight, nine, ten, or more of the sequences delineated in column 6 of Table 1B which correspond to the same Clone ID NO:Z (see Table 1B, column 1), and the polynucleotide sequence of SEQ ID NO:X (e.g., as defined in Table 1A or 1B) or fragments or variants thereof. In preferred embodiments, the delineated sequence(s) and polynucleotide sequence of SEQ ID NO:X correspond to the same Clone ID NO:Z. Polypeptides encoded by these polynucleotides, other polynucleotides that encode these polypeptides, and antibodies that bind these polypeptides are also encompassed by the invention.

[0079] In further specific embodiments, polynucleotides of the invention comprise, or alternatively consist of, one, two, three, four, five, six, seven, eight, nine, ten, or more of the sequences delineated in the same row of column 6 of Table 1B, and the polynucleotide sequence of SEQ ID NO:X (e.g., as defined in Table 1A or 1B) or fragments or variants thereof. In preferred embodiments, the delineated sequence(s) and polynucleotide sequence of SEQ ID NO:X correspond to the same row of column 6 of Table 1B. Polypeptides encoded by these polynucleotides, other polynucleotides that encode these polypeptides, and antibodies that bind these polypeptides are also encompassed by the invention.

[0080] In additional specific embodiments, polynucleotides of the invention comprise, or alternatively consist of a polynucleotide sequence in which the 3′ 10 polynucleotides of one of the sequences delineated in column 6 of Table 1B and the 5′ 10 polynucleotides of the sequence of SEQ ID NO:X are directly contiguous. Nucleic acids which hybridize to the complement of these 20 contiguous polynucleotides under stringent hybridization conditions or alternatively, under lower stringency conditions, are also encompassed by the invention. Polypeptides encoded by these polynucleotides and/or nucleic acids, other polynucleotides and/or nucleic acids that encode these polypeptides, and antibodies that bind these polypeptides are also encompassed by the invention. Additionally, fragments and variants of the above-described polynucleotides, nucleic acids, and polypeptides are also encompassed by the invention.

[0081] In additional specific embodiments, polynucleotides of the invention comprise, or alternatively consist of, a polynucleotide sequence in which the 3′ 10 polynucleotides of one of the sequences delineated in column 6 of Table 1B and the 5′ 10 polynucleotides of a fragment or variant of the sequence of SEQ ID NO:X are directly contiguous Nucleic acids which hybridize to the complement of these 20 contiguous polynucleotides under stringent hybridization conditions or alternatively, under lower stringency conditions, are also encompassed by the invention. Polypeptides encoded by these polynucleotides and/or nucleic acids, other polynucleotides and/or nucleic acids encoding these polypeptides, and antibodies that bind these polypeptides are also encompassed by the invention. Additionally, fragments and variants of the above-described polynucleotides, nucleic acids, and polypeptides are also encompassed by the invention.

[0082] In specific embodiments, polynucleotides of the invention comprise, or alternatively consist of, a polynucleotide sequence in which the 3′ 10 polynucleotides of the sequence of SEQ ID NO:X and the 5′ 10 polynucleotides of the sequence of one of the sequences delineated in column 6 of Table 1B are directly contiguous. Nucleic acids which hybridize to the complement of these 20 contiguous polynucleotides under stringent hybridization conditions or alternatively, under lower stringency conditions, are also encompassed by the invention. Polypeptides encoded by these polynucleotides and/or nucleic acids, other polynucleotides and/or nucleic acids encoding these polypeptides, and antibodies that bind these polypeptides are also encompassed by the invention. Additionally, fragments and variants of the above-described polynucleotides, nucleic acids, and polypeptides are also encompassed by the invention.

[0083] In specific embodiments, polynucleotides of the invention comprise, or alternatively consist of, a polynucleotide sequence in which the 3′ 10 polynucleotides of a fragment or variant of the sequence of SEQ ID NO:X and the 5′ 10 polynucleotides of the sequence of one of the sequences delineated in column 6 of Table 1B are directly contiguous. Nucleic acids which hybridize to the complement of these 20 contiguous polynucleotides under stringent hybridization conditions or alternatively, under lower stringency conditions, are also encompassed by the invention. Polypeptides encoded by these polynucleotides and/or nucleic acids, other polynucleotides and/or nucleic acids encoding these polypeptides, and antibodies that bind these polypeptides are also encompassed by the invention. Additionally, fragments and variants of the above-described polynucleotides, nucleic acids, and polypeptides, are also encompassed by the invention.

[0084] In further specific embodiments, polynucleotides of the invention comprise, or alternatively consist of, a polynucleotide sequence in which the 3′ 10 polynucleotides of one of the sequences delineated in column 6 of Table 1B and the 5′ 10 polynucleotides of another sequence in column 6 are directly contiguous. Nucleic acids which hybridize to the complement of these 20 contiguous polynucleotides under stringent hybridization conditions or alternatively, under lower stringency conditions, are also encompassed by the invention. Polypeptides encoded by these polynucleotides and/or nucleic acids, other polynucleotides and/or nucleic acids encoding these polypeptides, and antibodies that bind these polypeptides are also encompassed by the invention. Additionally, fragments and variants of the above-described polynucleotides, nucleic acids, and polypeptides are also encompassed by the invention.

[0085] In specific embodiments, polynucleotides of the invention comprise, or alternatively consist of, a polynucleotide sequence in which the 3′ 10 polynucleotides of one of the sequences delineated in column 6 of Table 1B and the 5′ 10 polynucleotides of another sequence in column 6 corresponding to the same Clone ID NO:Z (see Table 1B, column 1) are directly contiguous. Nucleic acids which hybridize to the complement of these 20 lower stringency conditions, are also encompassed by the invention. Polypeptides encoded by these polynucleotides and/or nucleic acids, other polynucleotides and/or nucleic acids encoding these polypeptides, and antibodies that bind these polypeptides are also encompassed by the invention. Additionally, fragments and variants of the above-described polynucleotides, nucleic acids, and polypeptides are also encompassed by the invention.

[0086] In specific embodiments, polynucleotides of the invention comprise, or alternatively consist of, a polynucleotide sequence in which the 3′ 10 polynucleotides of one sequence in column 6 corresponding to the same contig sequence identifer SEQ ID NO:X (see Table 1B, column 2) are directly contiguous. Nucleic acids which hybridize to the complement of these 20 contiguous polynucleotides under stringent hybridization conditions or alternatively, under lower stringency conditions, are also encompassed by the invention. Polypeptides encoded by these polynucleotides and/or nucleic acids, other polynucleotides and/or nucleic acids encoding these polypeptides, and antibodies that bind these polypeptides are also encompassed by the invention. Additionally, fragments and variants of the above-described polynucleotides, nucleic acids, and polypeptides are also encompassed by the invention.

[0087] In specific embodiments, polynucleotides of the invention comprise, or alternatively consist of a polynucleotide sequence in which the 3′ 10 polynucleotides of one of the sequences delineated in column 6 of Table 1B and the 5′ 10 polynucleotides of another sequence in column 6 corresponding to the same row are directly contiguous. In preferred embodiments, the 3′ 10 polynucleotides of one of the sequences delineated in column 6 of Table 1B is directly contiguous with the 5′ 10 polynucleotides of the next sequential exon delineated in Table 1B, column 6. Nucleic acids which hybridize to the complement of these 20 contiguous polynucleotides under stringent hybridization conditions or alternatively, under lower stringency conditions, are also encompassed by the invention. Polypeptides encoded by these polynucleotides and/or nucleic acids, other polynucleotides and/or nucleic acids encoding these polypeptides, and antibodies that bind these polypeptides are also encompassed by the invention. Additionally, fragments and variants of the above-described polynucleotides, nucleic acids, and polypeptides are also encompassed by the invention.

[0088] Many polynucleotide sequences, such as EST sequences, are publicly available and accessible through sequence databases and may have been publicly available prior to conception of the present invention. Preferably, such related polynucleotides are specifically excluded from the scope of the present invention. Accordingly, for each contig sequence (SEQ ID NO:X) listed in the fourth column of Table 1A, preferably excluded are one or more polynucleotides comprising a nucleotide sequence described by the general formula of a-b, where a is any integer between 1 and the final nucleotide minus 15 of SEQ ID NO:X, b is an integer of 15 to the final nucleotide of SEQ ID NO:X, where both a and b correspond to the positions of nucleotide residues shown in SEQ ID NO:X, and where b is greater than or equal to a+14. More specifically, preferably excluded are one or more polynucleotides comprising a nucleotide sequence described by the general formula of a-b, where a and b are integers as defined in columns 4 and 5, respectively, of Table 3. In specific embodiments, the polynucleotides of the invention do not consist of at least one, two, three, four, five, ten, or more of the specific polynucleotide sequences referenced by the Genbank Accession No. as disclosed in column 6 of Table 3 (including for example, published sequence in connection with a particular BAC clone). In further embodiments, preferably excluded from the invention are the specific polynucleotide sequence(s) contained in the clones corresponding to at least one, two, three, four, five, ten, or more of the available material having the accession numbers identified in the sixth column of this Table (including for example, the actual sequence contained in an identified BAC clone). In no way is this listing meant to encompass all of the sequences which may be excluded by the general formula, it is just a representative example. All references available through these accessions are hereby incorporated by reference in their entirety.

TABLE 3

| | SEQ | | | | |
|---|---|---|---|---|---|
| | ID | | | | |
| Clone ID | NO: | Contig | EST Disclaimer | | |
| NO:Z | X | ID: | Range of a | Range of b | Accession #'s |
| H2CBN05 | 11 | 1227632 | 1-3806 | 15-3820 | |
| HA5BC03 | 12 | 1152324 | 1-995 | 15-1009 | |
| HADCD02 | 13 | 1154783 | 1-917 | 15-931 | |
| HAHCK43 | 14 | 1227734 | 1-2432 | 15-2446 | |
| HAIBU93 | 15 | 1214849 | 1-1782 | 15-1796 | |
| HAJAT23 | 16 | 1214870 | 1-1680 | 15-1694 | |
| HAMFW25 | 17 | 1217025 | 1-2252 | 15-2266 | |
| HBGOG26 | 18 | 1152234 | 1-767 | 15-781 | |
| HBGOK19 | 19 | 1152235 | 1-693 | 15-707 | |
| HBING74 | 20 | 1228275 | 1-2091 | 15-2105 | |
| HBODN93 | 21 | 1162537 | 1-1767 | 15-1781 | |
| HDPYD63 | 22 | 1224874 | 1-1297 | 15-1311 | |
| HDQHZ11 | 23 | 1199932 | 1-2087 | 15-2101 | |
| HE8MO05 | 24 | 1197906 | 1-3081 | 15-3095 | |
| HE8TO43 | 25 | 1151645 | 1-650 | 15-664 | |
| HEEAA93 | 26 | 936268 | 1-839 | 15-853 | |
| HEMFK40 | 27 | 1155404 | 1-634 | 15-648 | |
| HEPBV26 | 28 | 965419 | 1-601 | 15-615 | AL358253. |
| HETAD36 | 29 | 1143220 | 1-241 | 15-255 | |
| HFIXH90 | 30 | 1162699 | 1-1712 | 15-1726 | |
| HHATO16 | 31 | 1222423 | 1-3306 | 15-3320 | |
| HHATO35 | 32 | 1226992 | 1-2787 | 15-2801 | |
| HHBEE90 | 33 | 1197912 | 1-1478 | 15-1492 | |
| HHBHK10 | 34 | 1204926 | 1-1748 | 15-1762 | |
| HHEWX25 | 35 | 1091674 | 1-1726 | 15-1740 | |
| HISDU47 | 36 | 1204962 | 1-3360 | 15-3374 | |
| HJTAC77 | 37 | 1197913 | 1-2022 | 15-2036 | |
| HKAKW19 | 38 | 1154644 | 1-589 | 15-603 | |
| HKB1E70 | 39 | 1152341 | 1-822 | 15-836 | |
| HLMIY60 | 40 | 1153900 | 1-760 | 15-774 | |
| HLWEE08 | 41 | 870452 | 1-1259 | 15-1273 | |
| HLWFP10 | 42 | 963412 | 1-776 | 15-790 | |
| HMAFD64 | 43 | 1197916 | 1-2229 | 15-2243 | |
| HMEKQ25 | 44 | 907891 | 1-1553 | 15-1567 | |
| HMIAL66 | 45 | 1197918 | 1-2367 | 15-2381 | |
| HOEOE25 | 46 | 907806 | 1-611 | 15-625 | AC018850, AC018850, AC012342, and |
| | | | | | AC012342. |
| HOGEB51 | 47 | 1091696 | 1-784 | 15-798 | |
| HPJDO64 | 48 | 1217040 | 1-3036 | 15-3050 | |
| HPMGN27 | 49 | 1155395 | 1-1383 | 15-1397 | |
| HSSGC06 | 50 | 1210329 | 1-766 | 15-780 | |
| HTAJO65 | 51 | 1186469 | 1-696 | 15-710 | |
| HTECC09 | 52 | 1064313 | 1-353 | 15-367 | |
| HTEJS34 | 53 | 1153919 | 1-602 | 15-616 | |
| HTEMK07 | 54 | 1152259 | 1-1064 | 15-1078 | |
| HTENY81 | 55 | 1224812 | 1-1444 | 15-1458 | |
| HTLHB07 | 56 | 1152265 | 1-1386 | 15-1400 | |
| HTPAG88 | 57 | 1124687 | 1-712 | 15-726 | |
| HUSGT72 | 58 | 1154801 | 1-545 | 15-559 | |
| HUVHL02 | 59 | 1215034 | 1-1765 | 15-1779 | |
| HWABK01 | 60 | 1226267 | 1-4105 | 15-4119 | |
| HWAFH10 | 61 | 1194813 | 1-1667 | 15-1681 | |
| HWLEP14 | 62 | 1118995 | 1-1508 | 15-1522 | |
| HWLEP57 | 63 | 1178824 | 1-2292 | 15-2306 | |
| HWLFR20 | 64 | 907968 | 1-483 | 15-497 | AC027716. |
| HDQGP59 | 65 | 1137749 | 1-1240 | 15-1254 | |
| HE9OO78 | 66 | 1189361 | 1-1640 | 15-1654 | |
| HFIYY25 | 67 | 1128990 | 1-2191 | 15-2205 | |
| HHFBZ57 | 68 | 961502 | 1-824 | 15-838 | |
| HLTFA51 | 69 | 908283 | 1-2415 | 15-2429 | |
| HMWEU15 | 70 | 1194780 | 1-978 | 15-992 | |
| HSKNJ36 | 71 | 1201009 | 1-627 | 15-641 | |
| HTEDF22 | 72 | 1153917 | 1-839 | 15-853 | |
| HUSIJ74 | 73 | 1154803 | 1-837 | 15-851 | |
| HWHGP91 | 74 | 1182053 | 1-2207 | 15-2221 | |
| HWLDO07 | 75 | 1152277 | 1-288 | 15-302 | |
| HWMGS22 | 76 | 1152428 | 1-1165 | 15-1179 | |
| HDAAQ07 | 77 | 1227648 | 1-3091 | 15-3105 | |
| HTEBC74 | 78 | 1222351 | 1-2444 | 15-2458 | |
| H2LAC34 | 79 | 1155406 | 1-1558 | 15-1572 | |
| H2MBH48 | 80 | 1197893 | 1-1870 | 15-1884 | |
| HADDT27 | 81 | 908924 | 1-512 | 15-526 | AC010422. |
| HADEU45 | 82 | 1154784 | 1-936 | 15-950 | |
| HAGGF27 | 83 | 1134356 | 1-691 | 15-705 | |
| HAMGP61 | 84 | 1175397 | 1-1683 | 15-1697 | |
| HAMHT22 | 85 | 968753 | 1-955 | 15-969 | |
| HATEE95 | 86 | 1155408 | 1-929 | 15-943 | |
| HBGMT12 | 87 | 1165291 | 1-1200 | 15-1214 | |
| HBGPJ37 | 88 | 1133633 | 1-729 | 15-743 | |
| HBIOS05 | 89 | 1226362 | 1-3070 | 15-3084 | |
| HBJCD80 | 90 | 1124609 | 1-993 | 15-1007 | |
| HBJLR31 | 91 | 900883 | 1-1440 | 15-1454 | |
| HBMTY04 | 92 | 1161434 | 1-1631 | 15-1645 | |
| HBMXV17 | 93 | 1180381 | 1-1343 | 15-1357 | |
| HBNMF62 | 94 | 1197896 | 1-1991 | 15-2005 | |
| HBWAG76 | 95 | 767711 | 1-811 | 15-825 | |
| HBWBG94 | 96 | 1227633 | 1-3339 | 15-3353 | |
| HCABL26 | 97 | 1153875 | 1-417 | 15-431 | |
| HCBAB76 | 98 | 1153876 | 1-820 | 15-834 | |
| HCE1Q39 | 99 | 1197897 | 1-1981 | 15-1995 | |
| HCE3V01 | 100 | 1151015 | 1-2000 | 15-2014 | |
| HCEDM42 | 101 | 1153877 | 1-1230 | 15-1244 | |
| HCEJG43 | 102 | 908879 | 1-444 | 15-458 | |
| HCELA90 | 103 | 1124675 | 1-2490 | 15-2504 | |
| HCHBK37 | 104 | 1223379 | 1-2897 | 15-2911 | |
| HCNBB29 | 105 | 1189000 | 1-1141 | 15-1155 | |
| HCRBE37 | 106 | 1197901 | 1-2457 | 15-2471 | |
| HCWEK76 | 107 | 964496 | 1-958 | 15-972 | |
| HDAAO88 | 108 | 1165232 | 1-1857 | 15-1871 | |
| HDAAS58 | 109 | 1223381 | 1-3285 | 15-3299 | |
| HDAAT58 | 110 | 1096244 | 1-658 | 15-672 | |
| HDLAE04 | 111 | 908931 | 1-1245 | 15-1259 | AC011460, AC011460, and AC011460. |
| HDPHG78 | 112 | 1143020 | 1-1436 | 15-1450 | |
| HDPJB85 | 113 | 1096339 | 1-3836 | 15-3850 | |
| HDPJF03 | 114 | 923874 | 1-1000 | 15-1014 | |
| HDPKI74 | 115 | 958622 | 1-482 | 15-496 | |
| HDPNE20 | 116 | 1152331 | 1-760 | 15-774 | |
| HDPOK83 | 117 | 1195328 | 1-703 | 15-717 | |
| HDPOM13 | 118 | 944244 | 1-767 | 15-781 | |
| HDPRJ04 | 119 | 909040 | 1-597 | 15-611 | AL390037, AL390037, AL390037, |
| | | | | | AL096677, AL096677, and AL096677. |
| HDPSB10 | 120 | 1134148 | 1-238 | 15-252 | |
| HDPSD12 | 121 | 1179711 | 1-2093 | 15-2107 | |
| HDPST56 | 122 | 1223385 | 1-2912 | 15-2926 | |
| HDPXK10 | 123 | 1223386 | 1-3279 | 15-3293 | |
| HDQDG05 | 124 | 1204691 | 1-2467 | 15-2481 | |
| HDQHM27 | 125 | 1163999 | 1-1827 | 15-1841 | |
| HDTFH41 | 126 | 1209542 | 1-1610 | 15-1624 | |
| HDTFS83 | 127 | 1162406 | 1-1708 | 15-1722 | |
| HDTFT81 | 128 | 909054 | 1-1169 | 15-1183 | AC021217, AC021217, and AC021217. |
| HDTID61 | 129 | 1049305 | 1-730 | 15-744 | |
| HDTKB09 | 130 | 1199540 | 1-2043 | 15-2057 | |
| HDTLD17 | 131 | 908601 | 1-654 | 15-668 | |
| HE2DV73 | 132 | 1153878 | 1-948 | 15-962 | |
| HE2LG78 | 133 | 1217036 | 1-1723 | 15-1737 | |
| HE2PH12 | 134 | 909191 | 1-455 | 15-469 | |
| HE8MA36 | 135 | 706858 | 1-456 | 15-470 | AP001619, AP001619, and AP001620. |
| HE8MU06 | 136 | 909075 | 1-883 | 15-897 | |
| HE8NP11 | 137 | 1152902 | 1-2030 | 15-2044 | |
| HE8OK79 | 138 | 1025100 | 1-949 | 15-963 | |
| HE8OM15 | 139 | 1195124 | 1-1042 | 15-1056 | |
| HE8QM92 | 140 | 1216778 | 1-1697 | 15-1711 | |
| HE8QV82 | 141 | 1212645 | 1-2907 | 15-2921 | |
| HE8UZ63 | 142 | 1194791 | 1-1716 | 15-1730 | |
| HE9CJ74 | 143 | 908903 | 1-571 | 15-585 | AC004908, AC004908, AF166490, and |
| | | | | | AF166490. |
| HE9MK11 | 144 | 1228114 | 1-3531 | 15-3545 | |
| HE9NO76 | 145 | 1162542 | 1-1781 | 15-1795 | |
| HE9OL74 | 146 | 1151724 | 1-2843 | 15-2857 | |
| HE9PI95 | 147 | 1152239 | 1-849 | 15-863 | |
| HE9QL92 | 148 | 1163068 | 1-1754 | 15-1768 | |
| HE9TE84 | 149 | 1085611 | 1-713 | 15-727 | |
| HEMDJ83 | 150 | 1153885 | 1-810 | 15-824 | |
| HEOQC76 | 151 | 909032 | 1-645 | 15-659 | |
| HEORH04 | 152 | 1152241 | 1-1363 | 15-1377 | |
| HETBU05 | 153 | 1177927 | 1-2230 | 15-2244 | |
| HFANC50 | 154 | 1178745 | 1-1580 | 15-1594 | |
| HFKIN35 | 155 | 1152244 | 1-908 | 15-922 | |
| HFKLV78 | 156 | 1152333 | 1-850 | 15-864 | |
| HFPEG38 | 157 | 1152248 | 1-1124 | 15-1138 | |
| HFPFK09 | 158 | 1152335 | 1-1101 | 15-1115 | |
| HFPFV06 | 159 | 1152338 | 1-703 | 15-717 | |
| HFPGV06 | 160 | 1223393 | 1-2746 | 15-2760 | |
| HFTBY36 | 161 | 1129412 | 1-1166 | 15-1180 | |
| HFVKA93 | 162 | 908885 | 1-558 | 15-572 | AC004017, and AC004017. |
| HGBDK80 | 163 | 1151040 | 1-701 | 15-715 | |
| HHANU83 | 164 | 1155477 | 1-623 | 15-637 | |
| HHAVY06 | 165 | 1134110 | 1-373 | 15-387 | |
| HHEKG31 | 166 | 1194802 | 1-586 | 15-600 | |
| HHENL35 | 167 | 1228115 | 1-2770 | 15-2784 | |
| HHESX78 | 168 | 1154643 | 1-600 | 15-614 | |
| HHFHW96 | 169 | 1150915 | 1-1332 | 15-1346 | |
| HHFLI65 | 170 | 1204698 | 1-2401 | 15-2415 | |
| HHFMH56 | 171 | 1212648 | 1-2759 | 15-2773 | |
| HHFOS26 | 172 | 1178803 | 1-1678 | 15-1692 | |
| HHFOU24 | 173 | 1227643 | 1-4269 | 15-4283 | |
| HHPEF49 | 174 | 1153894 | 1-1011 | 15-1025 | |
| HHPFL91 | 175 | 796929 | 1-476 | 15-490 | |
| HHPTA82 | 176 | 1077537 | 1-1729 | 15-1743 | |
| HHSGB32 | 177 | 1152251 | 1-1433 | 15-1447 | |
| HJPAY56 | 178 | 1201121 | 1-221 | 15-235 | |
| HJPDD85 | 179 | 961607 | 1-579 | 15-593 | |
| HKAJU15 | 180 | 1154645 | 1-961 | 15-975 | |
| HKAPC11 | 181 | 1193142 | 1-2141 | 15-2155 | |
| HLFBE30 | 182 | 1153895 | 1-656 | 15-670 | |
| HLHCB06 | 183 | 1150827 | 1-799 | 15-813 | |
| HLJBK38 | 184 | 1189741 | 1-1060 | 15-1074 | |
| HLKAA78 | 185 | 1228118 | 1-2044 | 15-2058 | |
| HLQEF42 | 186 | 1133655 | 1-762 | 15-776 | |
| HLSDA17 | 187 | 1162851 | 1-1551 | 15-1565 | |
| HLTIB64 | 188 | 1228119 | 1-2718 | 15-2732 | |
| HLTIL56 | 189 | 1178815 | 1-2673 | 15-2687 | |
| HLWAF59 | 190 | 1194725 | 1-1814 | 15-1828 | |
| HLWAZ29 | 191 | 1228153 | 1-2702 | 15-2716 | |
| HLWBU16 | 192 | 1162853 | 1-1644 | 15-1658 | |
| HLYAB58 | 193 | 1155403 | 1-785 | 15-799 | |
| HLYAF04 | 194 | 1198585 | 1-2280 | 15-2294 | |
| HLYCL13 | 195 | 656829 | 1-566 | 15-580 | |
| HMACX62 | 196 | 908611 | 1-500 | 15-514 | AC025162, AC025162, AC025162, |
| | | | | | AC027529, AC027529, AC034102, and |
| | | | | | AC034102. |
| HMAGK54 | 197 | 1229903 | 1-1803 | 15-1817 | |
| HMCDT29 | 198 | 1189009 | 1-1985 | 15-1999 | |
| HMEIY94 | 199 | 908618 | 1-460 | 15-474 | AC021112, AC021848, AC021848, and |
| | | | | | AC024120. |
| HMHBN01 | 200 | 1204940 | 1 -2246 | 15-2260 | |
| HMIBG02 | 201 | 1165247 | 1-1800 | 15-1814 | |
| HMQDJ89 | 202 | 1153906 | 1-907 | 15-921 | |
| HMTMC64 | 203 | 909081 | 1-1736 | 15-1750 | AC022219, AC022219, AC022219, |
| | | | | | AL136109, AL136109, AL136109, |
| | | | | | AC023147, and AC023147. |
| HMUAL10 | 204 | 1228146 | 1-2190 | 15-2204 | |
| HMUAY64 | 205 | 1227611 | 1-2615 | 15-2629 | |
| HMUBM26 | 206 | 1070974 | 1-638 | 15-652 | |
| HMVBE04 | 207 | 1228121 | 1-2311 | 15-2325 | |
| HMVCA78 | 208 | 1197920 | 1-2956 | 15-2970 | |
| HMWEH92 | 209 | 1204941 | 1-2261 | 15-2275 | |
| HNBVD17 | 210 | 1152343 | 1-822 | 15-836 | |
| HNFGM76 | 211 | 1122027 | 1-886 | 15-900 | |
| HNFIX19 | 212 | 1155399 | 1-933 | 15-947 | |
| HNGGR74 | 213 | 1176958 | 1-246 | 15-260 | |
| HNHIR90 | 214 | 1154791 | 1-1137 | 15-1151 | |
| HNIAB94 | 215 | 1220450 | 1-511 | 15-525 | |
| HNNAD37 | 216 | 1152348 | 1-565 | 15-579 | |
| HNNBG60 | 217 | 1152349 | 1-450 | 15-464 | |
| HNTAR16 | 218 | 1152269 | 1-1347 | 15-1361 | |
| HNTAT79 | 219 | 1217038 | 1-1921 | 15-1935 | |
| HNTBH53 | 220 | 909153 | 1-1382 | 15-1396 | AC005020, AC005020, and AC005020. |
| HNTEK43 | 221 | 1194804 | 1-1231 | 15-1245 | |
| HNTOA18 | 222 | 695123 | 1-442 | 15-456 | AC007228. |
| HNTOA40 | 223 | 1085587 | 1-987 | 15-1001 | |
| HNTRB05 | 224 | 1178674 | 1-1303 | 15-1317 | |
| HOCMA08 | 225 | 1152416 | 1-1613 | 15-1627 | |
| HODCT96 | 226 | 1194775 | 1-1293 | 15-1307 | |
| HODEE69 | 227 | 1127952 | 1-575 | 15-589 | |
| HODEI81 | 228 | 1193231 | 1-1408 | 15-1422 | |
| HODEK70 | 229 | 1152255 | 1-921 | 15-935 | |
| HODER91 | 230 | 1178820 | 1-1881 | 15-1895 | |
| HHFFG94 | 231 | 1157763 | 1-1072 | 15-1086 | |
| HE9NU41 | 232 | 928849 | 1-2361 | 15-2375 | |
| HFXCA19 | 233 | 965688 | 1-2187 | 15-2201 | |
| HODFR44 | 234 | 1152256 | 1-637 | 15-651 | |
| HODGP95 | 235 | 1124519 | 1-563 | 15-577 | |
| HOEOE58 | 236 | 980307 | 1-443 | 15-457 | |
| HOFMF82 | 237 | 1072079 | 1-464 | 15-478 | |
| HOGAW39 | 238 | 862944 | 1-546 | 15-560 | |
| HOGDU91 | 239 | 1204938 | 1-1787 | 15-1801 | |
| HOGED11 | 240 | 1150873 | 1-572 | 15-586 | |
| HOIAC78 | 241 | 1229477 | 1-4349 | 15-4363 | |
| HOPBC53 | 242 | 530056 | 1-219 | 15-233 | AL391069, and AL391069. |
| HORBQ29 | 243 | 1151600 | 1-818 | 15-832 | |
| HOSEB90 | 244 | 1154793 | 1-597 | 15-611 | |
| HOSNN16 | 245 | 1093284 | 1-811 | 15-825 | |
| HOUAA18 | 246 | 1153908 | 1-1419 | 15-1433 | |
| HOVCM01 | 247 | 1154794 | 1-1047 | 15-1061 | |
| HOVEK70 | 248 | 1152418 | 1-716 | 15-730 | |
| HPDOW30 | 249 | 1152421 | 1-1047 | 15-1061 | |
| HPIBW01 | 250 | 1217060 | 1-2117 | 15-2131 | |
| HPJDY61 | 251 | 1204715 | 1-2454 | 15-2468 | |
| HPMFR38 | 252 | 1155397 | 1-807 | 15-821 | |
| HPRBD71 | 253 | 1204942 | 1-2248 | 15-2262 | |
| HPSNA15 | 254 | 908997 | 1-932 | 15-946 | |
| HRABN32 | 255 | 1152439 | 1-1332 | 15-1346 | |
| HRADZ91 | 256 | 1194808 | 1-1722 | 15-1736 | |
| HRGBG45 | 257 | 1153912 | 1-1065 | 15-1079 | |
| HS2AC50 | 258 | 1163071 | 1-1599 | 15-1613 | |
| HSAMK64 | 259 | 1161177 | 1-1125 | 15-1139 | |
| HSAMQ05 | 260 | 907518 | 1-1095 | 15-1109 | AL161615, AL161615, AC008443, and |
| | | | | | AC008443. |
| HSAXS43 | 261 | 1154795 | 1-1029 | 15-1043 | |
| HSCPD07 | 262 | 1062794 | 1-574 | 15-588 | |
| HSDEF10 | 263 | 1155394 | 1-588 | 15-602 | |
| HSDEV59 | 264 | 908503 | 1-663 | 15-677 | AC074049, AC009092, AL139227, and |
| | | | | | AC009062. |
| HSDFV12 | 265 | 1154796 | 1-1259 | 15-1273 | |
| HSDFY86 | 266 | 908943 | 1-496 | 15-510 | AJ009611, AJ009611, AJ009611, |
| | | | | | AC006130, AC006130, and AC006130. |
| HSDJK49 | 267 | 722868 | 1-423 | 15-437 | AC011538, and AC011538. |
| HSKJK41 | 268 | 1178822 | 1-2088 | 15-2102 | |
| HSKKD63 | 269 | 1121913 | 1-608 | 15-622 | |
| HSKKR04 | 270 | 1022245 | 1-318 | 15-332 | |
| HSOBE61 | 271 | 1213193 | 1-1622 | 15-1636 | |
| HSSET42 | 272 | 1214833 | 1-1422 | 15-1436 | |
| HSSFW37 | 273 | 1154800 | 1-1611 | 15-1625 | |
| HSSJE32 | 274 | 1175036 | 1-1916 | 15-1930 | |
| HSTAO59 | 275 | 1219009 | 1-879 | 15-893 | |
| HSYDC34 | 276 | 1193094 | 1-2655 | 15-2669 | |
| HTAEZ50 | 277 | 1217062 | 1-2245 | 15-2259 | |
| HTEBJ03 | 278 | 1195830 | 1-2951 | 15-2965 | |
| HTEGT13 | 279 | 979683 | 1-2604 | 15-2618 | |
| HTEIA48 | 280 | 979184 | 1-592 | 15-606 | |
| HTEMR65 | 281 | 1152260 | 1-789 | 15-803 | |
| HTGAS31 | 282 | 1161573 | 1-1954 | 15-1968 | |
| HTLAI85 | 283 | 1216550 | 1-2603 | 15-2617 | |
| HTLAV59 | 284 | 1153920 | 1-956 | 15-970 | |
| HTLDE64 | 285 | 908613 | 1-838 | 15-852 | AC005087, AC005087, and AC005087. |
| HTLDF33 | 286 | 1153921 | 1-632 | 15-646 | |
| HTLFE19 | 287 | 1178595 | 1-2119 | 15-2133 | |
| HTLIE30 | 288 | 1186867 | 1-1268 | 15-1282 | |
| HTNBJ90 | 289 | 1147339 | 1-855 | 15-869 | |
| HTOBG35 | 290 | 1081313 | 1-443 | 15-457 | |
| HTOHL35 | 291 | 1078106 | 1-396 | 15-410 | |
| HTPGS02 | 292 | 1178823 | 1-2335 | 15-2349 | |
| HTTDO19 | 293 | 1134543 | 1-604 | 15-618 | |
| HTTEP88 | 294 | 1153922 | 1-1709 | 15-1723 | |
| HTWAA57 | 295 | 1153923 | 1-619 | 15-633 | |
| HTWEP40 | 296 | 1189733 | 1-832 | 15-846 | |
| HUCPE28 | 297 | 1209532 | 1-1393 | 15-1407 | |
| HUFDI79 | 298 | 1207005 | 1-1759 | 15-1773 | |
| HUJBQ75 | 299 | 908603 | 1-1640 | 15-1654 | AC021154, and AC010624. |
| HUKET47 | 300 | 1164742 | 1-950 | 15-964 | |
| HUSGE36 | 301 | 1147864 | 1-1207 | 15-1221 | |
| HUTAB12 | 302 | 1152270 | 1-952 | 15-966 | |
| HUVBC70 | 303 | 1013239 | 1-376 | 15-390 | |
| HUVDG48 | 304 | 1189014 | 1-2614 | 15-2628 | |
| HUVFT89 | 305 | 960524 | 1-520 | 15-534 | AL132795, AL132795, and AL132795. |
| HUVGQ16 | 306 | 1163872 | 1-1608 | 15-1622 | |
| HVANX08 | 307 | 1152273 | 1-753 | 15-767 | |
| HWABF71 | 308 | 1226175 | 1-4446 | 15-4460 | |
| HWBBH02 | 309 | 1150687 | 1-2426 | 15-2440 | |
| HWHHR95 | 310 | 1154821 | 1-577 | 15-591 | |
| HWLDC02 | 311 | 1152276 | 1-1072 | 15-1086 | |
| HWLEH05 | 312 | 1202730 | 1-632 | 15-646 | |
| HWLFG83 | 313 | 1173697 | 1-1680 | 15-1694 | |
| HWLHJ68 | 314 | 1175380 | 1-1923 | 15-1937 | |
| HWLUO25 | 315 | 1152281 | 1-1331 | 15-1345 | |
| HYAAO40 | 316 | 1154823 | 1-988 | 15-1002 | |
| HYACI56 | 317 | 1154824 | 1-1253 | 15-1267 | |
| HE8UG13 | 318 | 1178332 | 1-2536 | 15-2550 | |
| HHEUC33 | 319 | 1151486 | 1-1026 | 15-1040 | |
| HDQEG93 | 320 | 955676 | 1-1415 | 15-1429 | |
| HBCAS64 | 321 | 1152484 | 1-798 | 15-812 | |
| HLWAT35 | 322 | 742384 | 1-343 | 15-357 | |
| HPLBB60 | 323 | 1224875 | 1-340 | 15-354 | |
| HTPHI43 | 324 | 907888 | 1-1030 | 15-1044 | |
| HCEGY46 | 325 | 1119278 | 1-820 | 15-834 | |
| HE2LQ16 | 326 | 1151472 | 1-858 | 15-872 | |
| HHATX12 | 327 | 1162647 | 1-1168 | 15-1182 | |
| HLJEB78 | 328 | 1204705 | 1-1082 | 15-1096 | |
| HODAC03 | 329 | 1228356 | 1-3680 | 15-3694 | |
| HOHAO92 | 330 | 712543 | 1-808 | 15-822 | |
| HSDJE71 | 331 | 1193049 | 1-2001 | 15-2015 | |
| HSYAM42 | 332 | 1216570 | 1-2276 | 15-2290 | |
| HSLFT29 | 333 | 1105598 | 1-647 | 15-661 | |
| HCE2Y61 | 334 | 1228280 | 1-2897 | 15-2911 | |
| HDQGV34 | 335 | 965252 | 1-2750 | 15-2764 | |
| HGCAA66 | 336 | 672024 | 1-362 | 15-376 | |
| HISAH34 | 337 | 1204704 | 1-1340 | 15-1354 | |
| HLWBQ84 | 338 | 1104854 | 1-351 | 15-365 | |
| HMSGD52 | 339 | 880227 | 1-594 | 15-608 | |
| HMSHL44 | 340 | 1109680 | 1-546 | 15-560 | |
| HNTCU29 | 341 | 1199939 | 1-2472 | 15-2486 | |
| HSDBK60 | 342 | 1152489 | 1-467 | 15-481 | |
| HSDKF80 | 343 | 1151509 | 1-422 | 15-436 | |
| HSSJH10 | 344 | 1162666 | 1-1853 | 15-1867 | |
| HTENI58 | 345 | 1117717 | 1-725 | 15-739 | |
| HTEOI36 | 346 | 1185485 | 1-516 | 15-530 | |
| HTGAW31 | 347 | 1103686 | 1-410 | 15-424 | |
| HTGCV57 | 348 | 1128279 | 1-1395 | 15-1409 | |
| HTXGJ96 | 349 | 1193058 | 1-1550 | 15-1564 | |
| HSLDI32 | 350 | 1103425 | 1-622 | 15-636 | |
| HSLJB67 | 351 | 1105531 | 1-490 | 15-504 | |
| HAIBZ93 | 352 | 1222241 | 1-2540 | 15-2554 | |
| HAQCI39 | 353 | 1124595 | 1-820 | 15-834 | |
| HCHAQ03 | 354 | 1151464 | 1-484 | 15-498 | |
| HFXHJ52 | 355 | 1193039 | 1-1946 | 15-1960 | |
| HHSDC06 | 356 | 1150831 | 1-1031 | 15-1045 | |
| HMVCT65 | 357 | 1162654 | 1-2730 | 15-2744 | |
| HPJEQ51 | 358 | 1145717 | 1-1409 | 15-1423 | |
| HUVHA10 | 359 | 1226996 | 1-2197 | 15-2211 | |
| HWBEX27 | 360 | 1151533 | 1-425 | 15-439 | |
| HBJJT12 | 361 | 1154057 | 1-934 | 15-948 | |
| HE9QF27 | 362 | 1128104 | 1-653 | 15-667 | |
| HEAHE27 | 363 | 1105191 | 1-1082 | 15-1096 | |
| HFKLB30 | 364 | 890713 | 1-341 | 15-355 | |
| HPMKM81 | 365 | 894416 | 1-880 | 15-894 | AC004774, and AC004774. |
| HPVAE51 | 366 | 895915 | 1-745 | 15-759 | |
| HSRBC02 | 367 | 1163833 | 1-1681 | 15-1695 | |
| HTTCC30 | 368 | 1225345 | 1-699 | 15-713 | |
| HMWDT23 | 369 | 1151369 | 1-676 | 15-690 | |
| HAMFW83 | 370 | 1186171 | 1-759 | 15-773 | |
| HHPFT46 | 371 | 1227626 | 1-2818 | 15-2832 | |
| HJBCL50 | 372 | 1080471 | 1-732 | 15-746 | |
| HLTAA06 | 373 | 1204706 | 1-2639 | 15-2653 | |
| HMIBK68 | 374 | 1186172 | 1-1815 | 15-1829 | |
| HMSJH92 | 375 | 1124516 | 1-1191 | 15-1205 | |
| HROBJ60 | 376 | 1151506 | 1-1336 | 15-1350 | |
| HSCKG52 | 377 | 1179732 | 1-2692 | 15-2706 | |
| HSLHL43 | 378 | 1134403 | 1-1289 | 15-1303 | |
| HTEBE47 | 379 | 1173015 | 1-1337 | 15-1351 | |
| HTELQ83 | 380 | 1151521 | 1-892 | 15-906 | |
| HUCNW18 | 381 | 1151523 | 1-788 | 15-802 | |
| HHEUX85 | 382 | 783803 | 1-779 | 15-793 | |
| HTLAK30 | 383 | 810462 | 1-234 | 15-248 | |
| HOHAI78 | 384 | 811359 | 1-435 | 15-449 | AC005076, and AC005076. |
| HDQDV70 | 385 | 861365 | 1-792 | 15-806 | AC006146, and AC006146. |
| HCRMR24 | 386 | 875069 | 1-1628 | 15-1642 | |
| HOFNX66 | 387 | 883011 | 1-1181 | 15-1195 | |
| HHEPG56 | 388 | 890938 | 1-838 | 15-852 | |
| HCROS74 | 389 | 900155 | 1-500 | 15-514 | |
| HKGAG83 | 390 | 966445 | 1-449 | 15-463 | |
| HHFCF42 | 391 | 968314 | 1-1391 | 15-1405 | |
| HHFHH58 | 392 | 723683 | 1-791 | 15-805 | |
| HE8NB30 | 393 | 899757 | 1-1373 | 15-1387 | AL118496, AL118496, AL031387, and |
| | | | | | AL031387. |
| HKGBO06 | 394 | 927953 | 1-850 | 15 -864 | |
| HMUBG24 | 395 | 525646 | 1-442 | 15-456 | |
| HTEGI48 | 396 | 530595 | 1-615 | 15-629 | AA102044, H93506, AW362517, AF140360, |
| | | | | | and AF074606. |
| HGFAB38 | 397 | 576913 | 1-1706 | 15-1720 | AP000627. |
| HMADG29 | 398 | 597431 | 1-600 | 15-614 | AC074217. |
| HMWIN49 | 399 | 615238 | 1-349 | 15-363 | AI720450, AI037856, AI300842, AI311528, |
| | | | | | AI311400, AA532689, AA310786, |
| | | | | | AI474407, AA985268, AW051112, |
| | | | | | AA316357, AW381682, W68226, AI566802, |
| | | | | | AI589506, AI073958, AA935679, AI208100, |
| | | | | | AI267756, AA689231, AA542997, |
| | | | | | AA352183, AA320005, AA363414, |
| | | | | | AA541796, AA922650, N28607, AA176451, |
| | | | | | AI422657, AA398908, AA745933, W68225, |
| | | | | | AA689508, AA176457, W32907, |
| | | | | | AA652657, AA627101, AA374424, |
| | | | | | AW137988, AA876344, AI989393, |
| | | | | | AA425597, AA247451, N87306, |
| | | | | | AW405970, AW341775, AW163567, |
| | | | | | AL038843, N47392, AA161338, AA863326, |
| | | | | | AA092969, N89372, AA094843, AA933653, |
| | | | | | Z20829, AA320778, and A75039. |
| HELGL09 | 400 | 625720 | 1-391 | 15-405 | |
| HHEPQ28 | 401 | 694010 | 1-875 | 15-889 | AC013663. |
| HNTAI75 | 402 | 703283 | 1-473 | 15-487 | AL132868, AL132868, AL132868, |
| | | | | | AL136360, and AL136360. |
| HBMBR84 | 403 | 711121 | 1-620 | 15-634 | |
| HOUFE88 | 404 | 718762 | 1-858 | 15-872 | AC026964, AC026964, AC005324, and |
| | | | | | AC005324. |
| HMTAZ58 | 405 | 735760 | 1-423 | 15-437 | AL139321. |
| HAJBM73 | 406 | 764228 | 1-589 | 15-603 | |
| HDPAV32 | 407 | 847613 | 1-831 | 15-845 | AC010552, and AC010552. |
| HMWIZ58 | 408 | 865033 | 1-1382 | 15-1396 | |
| HFKFL92 | 409 | 880139 | 1-374 | 15-388 | H49207, W56338, AA412225, H46471, |
| | | | | | H41194, H46110, AI859297, H50393, |
| | | | | | AA044343, AA043175, AI819813, H45090, |
| | | | | | AA610590, AI601169, AA625654, |
| | | | | | AW301122, AI521678, Z44510, AF151901, |
| | | | | | AC037465, AC037465, AC037465, |
| | | | | | AC018785, and AC018785. |
| HWLGU06 | 410 | 882838 | 1-891 | 15-905 | AL390204, AL390204, AL390204, |
| | | | | | AC034149, AC034149, AC034149, |
| | | | | | AC027440, AC021890, AC021890, and |
| | | | | | AC021890. |
| HOGBN73 | 411 | 892750 | 1-291 | 15-305 | AC040962. |
| HODCU15 | 412 | 899680 | 1-2773 | 15-2787 | AC010935. |
| HE9PF14 | 413 | 908512 | 1-822 | 15-836 | AC023149, AC023149, AC023149, and |
| | | | | | AC020915. |
| HHFKC40 | 414 | 908519 | 1-614 | 15-628 | |
| HWLEO07 | 415 | 908520 | 1-589 | 15-603 | |
| HPRBL56 | 416 | 908522 | 1-609 | 15-623 | |
| HSANL93 | 417 | 908533 | 1-543 | 15-557 | |
| HWWFL94 | 418 | 908534 | 1-596 | 15-610 | |
| HSXFM49 | 419 | 908570 | 1-669 | 15-683 | |
| HAGII04 | 420 | 908571 | 1-479 | 15-493 | |
| HDPJE32 | 421 | 908575 | 1-551 | 15-565 | |
| HHFBT95 | 422 | 908578 | 1-690 | 15-704 | |
| HUVDO59 | 423 | 908593 | 1-601 | 15-615 | |
| HCGAC50 | 424 | 908683 | 1-516 | 15-530 | |
| HODEV94 | 425 | 908947 | 1-740 | 15-754 | |
| HTENS61 | 426 | 909007 | 1-484 | 15-498 | AC003005. |
| HHFJL16 | 427 | 909009 | 1-463 | 15-477 | |
| HPJEN26 | 428 | 909014 | 1-1000 | 15-1014 | AC003006, AC003006, and AC003006. |
| HSCMA28 | 429 | 909018 | 1-678 | 15-692 | |
| HE8NH04 | 430 | 909024 | 1-870 | 15-884 | |
| HE8TK33 | 431 | 909025 | 1-604 | 15-618 | AC026786, and AC026786. |
| HF8QP45 | 432 | 909026 | 1-676 | 15-690 | |
| HTEJR88 | 433 | 909033 | 1-680 | 15-694 | AC010192, AC010192, and AC026352. |
| HFKHA05 | 434 | 909088 | 1-625 | 15-639 | |
| HTELI13 | 435 | 909092 | 1-1519 | 15-1533 | |
| HDABU92 | 436 | 909093 | 1-991 | 15-1005 | |
| HUJBC25 | 437 | 909098 | 1-668 | 15-682 | |
| HTXOA73 | 438 | 909107 | 1-500 | 15-514 | |
| HDPFU72 | 439 | 909108 | 1-397 | 15-411 | |
| HE2JI76 | 440 | 909110 | 1-503 | 15-517 | AC078802, AC078802, and AC078802. |
| HNTDJ81 | 441 | 909111 | 1-721 | 15-735 | AC078802, AC078802, and AC078802. |
| HADDS16 | 442 | 909116 | 1-540 | 15-554 | |
| HDQHG17 | 443 | 909120 | 1-481 | 15-495 | AP001857, AP001483, AP001483, |
| | | | | | AP001160, AP001160, AP001160, |
| | | | | | AP001458, AP001458, AC015703, and |
| | | | | | AC015703. |
| HTAIR71 | 444 | 909129 | 1-553 | 15-567 | |
| HWADM93 | 445 | 909140 | 1-600 | 15-614 | |
| HMWIU35 | 446 | 909167 | 1-520 | 15-534 | AL161903, AL161903, AL161903, |
| | | | | | AL161906, AL161906, and AL161906. |
| HDPTQ41 | 447 | 913933 | 1-590 | 15-604 | AI878836, AI380704, AI949156, AI335537, |
| | | | | | AI359669, AI375465, AI279500, AI658822, |
| | | | | | AW001812, AI916799, AI436769, |
| | | | | | AA316348, AI879396, AI652095, AI767924, |
| | | | | | AA028103, AW299794, AI439173, |
| | | | | | AW301212, AW301192, AA970314, |
| | | | | | AW014195, AW236028, AI824939, F35913, |
| | | | | | AA977296, AA501553, AW135461, |
| | | | | | AI927228, D19636, AA636041, AI915866, |
| | | | | | AA603060, AA307748, AI823483, |
| | | | | | AA625548, AI478932, AI470601, AI419586, |
| | | | | | AA028124, AA062899, AA488040, |
| | | | | | AI760094, AA304578, and L12982. |
| HHELR05 | 448 | 916009 | 1-1942 | 15-1956 | |
| HLHFN70 | 449 | 917541 | 1-297 | 15-311 | |
| HTOFU03 | 450 | 921894 | 1-492 | 15-506 | |
| HTLDF63 | 451 | 924552 | 1-448 | 15-462 | |
| HTTBX05 | 452 | 928079 | 1-303 | 15-317 | AC011451, AC011451, AC008567, and |
| | | | | | AC008567. |
| HDPSX40 | 453 | 935352 | 1-1152 | 15-1166 | AC010815, and AC010815. |
| HNFJB24 | 454 | 935689 | 1-420 | 15-434 | |
| HLWBE75 | 455 | 935690 | 1-2308 | 15-2322 | |
| HDPCW53 | 456 | 946458 | 1-1209 | 15-1223 | AL161790, AL161790, AL162420, and |
| | | | | | AL162420. |
| HHASV05 | 457 | 948749 | 1-1803 | 15-1817 | AC003688, AC003688, AC003688, |
| | | | | | AC026954, and AC026954. |
| HHEDS40 | 458 | 950456 | 1-2758 | 15-2772 | |
| HNTAQ63 | 459 | 951706 | 1-654 | 15-668 | |
| HNGEN60 | 460 | 951952 | 1-481 | 15-495 | |
| HWBDS07 | 461 | 952796 | 1-382 | 15-396 | AC007676, AC007676, AC007676, |
| | | | | | AC016582, and AC016582. |
| HNTDI77 | 462 | 958279 | 1-506 | 15-520 | AC008759, and AC008759. |
| HDPDN03 | 463 | 960952 | 1-3068 | 15-3082 | AL359452, AC007731, AC007731, |
| | | | | | AC007731, AC005500, AC005500, and |
| | | | | | AC005500. |
| HT4EC82 | 464 | 961090 | 1-889 | 15-903 | |
| HHFLH10 | 465 | 963163 | 1-969 | 15-983 | |
| HPMGO02 | 466 | 963393 | 1-875 | 15-889 | |
| HDPBB38 | 467 | 965903 | 1-2240 | 15-2254 | |
| HMAFY88 | 468 | 966935 | 1-967 | 15-981 | |
| HTXFB61 | 469 | 967821 | 1-800 | 15-814 | |
| HAGEL01 | 470 | 971510 | 1-813 | 15-827 | AL136439, AL136439, AL138699, |
| | | | | | AL138699, and AL138699. |
| HCEOB15 | 471 | 973102 | 1-901 | 15-915 | AP002393, AP002393, and AC015962. |

[0089] TABLE 4

| Code | Description | Tissue | Organ | Cell Line | Disease | Vector |
|---|---|---|---|---|---|---|
| AR022 | a_Heart | a_Heart | | | | |
| AR023 | a_Liver | a_Liver | | | | |
| AR024 | a_mammary gland | a_mammary gland | | | | |
| AR025 | a_Prostate | a_Prostate | | | | |
| AR026 | a_small intestine | a_small intestine | | | | |
| AR027 | a_Stomach | a_Stomach | | | | |
| AR028 | Blood B cells | Blood B cells | | | | |
| AR029 | Blood B cells activated | Blood B cells | | | | |
| | | activated | | | | |
| AR030 | Blood B cells resting | Blood B cells | | | | |
| | | resting | | | | |
| AR031 | Blood T cells activated | Blood T cells | | | | |
| | | activated | | | | |
| AR032 | Blood T cells resting | Blood T cells resting | | | | |
| AR033 | brain | brain | | | | |
| AR034 | breast | breast | | | | |
| AR035 | breast cancer | breast cancer | | | | |
| AR036 | Cell Line CAOV3 | Cell Line CAOV3 | | | | |
| AR037 | cell line PA-1 | cell line PA-1 | | | | |
| AR038 | cell line transformed | cell line transformed | | | | |
| AR039 | colon | colon | | | | |
| AR040 | colon (9808co65R) | colon (9808co65R) | | | | |
| AR041 | colon (9809co15) | colon (9809co15) | | | | |
| AR042 | colon cancer | colon cancer | | | | |
| AR043 | colon cancer | colon cancer | | | | |
| | (9808co64R) | (9808co64R) | | | | |
| AR044 | colon cancer | colon cancer | | | | |
| | 9809co14 | 9809co14 | | | | |
| AR045 | corn clone 5 | corn clone 5 | | | | |
| AR046 | corn clone 6 | corn clone 6 | | | | |
| AR047 | corn clone 2 | corn clone 2 | | | | |
| AR048 | corn clone 3 | corn clone 3 | | | | |
| AR049 | Corn Clone 4 | Corn Clone 4 | | | | |
| AR050 | Donor II B Cells 24 hrs | Donor II B Cells | | | | |
| | | 24 hrs | | | | |
| AR051 | Donor II B Cells 72 hrs | Donor II B Cells | | | | |
| | | 72 hrs | | | | |
| AR052 | Donor II B-Cells 24 hrs. | Donor II B-Cells 24 | | | | |
| | | hrs. | | | | |
| AR053 | Donor II B-Cells 72 hrs | Donor II B-Cells | | | | |
| | | 72 hrs | | | | |
| AR054 | Donor II Resting B Cells | Donor II Resting B | | | | |
| | | Cells | | | | |
| AR055 | Heart | Heart | | | | |
| AR056 | Human Lung (clonetech) | Human Lung | | | | |
| | | (clonetech) | | | | |
| AR057 | Human Mammary | Human Mammary | | | | |
| | (clontech) | (clontech) | | | | |
| AR058 | Human Thymus | Human Thymus | | | | |
| | (clonetech) | (clonetech) | | | | |
| AR059 | Jurkat (unstimulated) | Jurkat | | | | |
| | | (unstimulated) | | | | |
| AR060 | Kidney | Kidney | | | | |
| AR061 | Liver | Liver | | | | |
| AR062 | Liver (Clontech) | Liver (Clontech) | | | | |
| AR063 | Lymphocytes chronic | Lymphocytes | | | | |
| | lymphocytic leukaemia | chronic lymphocytic | | | | |
| | | leukaemia | | | | |
| AR064 | Lymphocytes diffuse large | Lymphocytes | | | | |
| | B cell lymphoma | diffuse large B cell | | | | |
| | | lymphoma | | | | |
| AR065 | Lymphocytes follicular | Lymphocytes | | | | |
| | lymphoma | follicular lymphoma | | | | |
| AR066 | normal breast | normal breast | | | | |
| AR067 | Normal Ovarian | Normal Ovarian | | | | |
| | (4004901) | (4004901) | | | | |
| AR068 | Normal Ovary 9508G045 | Normal Ovary | | | | |
| | | 9508G045 | | | | |
| AR069 | Normal Ovary 9701G208 | Normal Ovary | | | | |
| | | 9701G208 | | | | |
| AR070 | Normal Ovary 9806G005 | Normal Ovary | | | | |
| | | 9806G005 | | | | |
| AR071 | Ovarian Cancer | Ovarian Cancer | | | | |
| AR072 | Ovarian Cancer | Ovarian Cancer | | | | |
| | (9702G001) | (9702G001) | | | | |
| AR073 | Ovarian Cancer | Ovarian Cancer | | | | |
| | (9707G029) | (9707G029) | | | | |
| AR074 | Ovarian Cancer | Ovarian Cancer | | | | |
| | (9804G011) | (9804G011) | | | | |
| AR075 | Ovarian Cancer | Ovarian Cancer | | | | |
| | (9806G019) | (9806G019) | | | | |
| AR076 | Ovarian Cancer | Ovarian Cancer | | | | |
| | (9807G017) | (9807G017) | | | | |
| AR077 | Ovarian Cancer | Ovarian Cancer | | | | |
| | (9809G001) | (9809G001) | | | | |
| AR078 | ovarian cancer 15799 | ovarian cancer | | | | |
| | | 15799 | | | | |
| AR079 | Ovarian Cancer | Ovarian Cancer | | | | |
| | 17717AID | 17717AID | | | | |
| AR080 | Ovarian Cancer | Ovarian Cancer | | | | |
| | 4004664B1 | 4004664B1 | | | | |
| AR081 | Ovarian Cancer | Ovarian Cancer | | | | |
| | 4005315A1 | 4005315A1 | | | | |
| AR082 | ovarian cancer 94127303 | ovarian cancer | | | | |
| | | 94127303 | | | | |
| AR083 | Ovarian Cancer 96069304 | Ovarian Cancer | | | | |
| | | 96069304 | | | | |
| AR084 | Ovarian Cancer 9707G029 | Ovarian Cancer | | | | |
| | | 9707G029 | | | | |
| AR085 | Ovarian Cancer 9807G045 | Ovarian Cancer | | | | |
| | | 9807G045 | | | | |
| AR086 | ovarian cancer 9809G001 | ovarian cancer | | | | |
| | | 9809G001 | | | | |
| AR087 | Ovarian Cancer | Ovarian Cancer | | | | |
| | 9905C032RC | 9905C032RC | | | | |
| AR088 | Ovarian cancer 9907 C00 | Ovarian cancer 9907 | | | | |
| | 3rd | C00 3rd | | | | |
| AR089 | Prostate | Prostate | | | | |
| AR090 | Prostate (clonetech) | Prostate (clonetech) | | | | |
| AR091 | prostate cancer | prostate cancer | | | | |
| AR092 | prostate cancer #15176 | prostate cancer | | | | |
| | | #15176 | | | | |
| AR093 | prostate cancer #15509 | prostate cancer | | | | |
| | | #15509 | | | | |
| AR094 | prostate cancer #15673 | prostate cancer | | | | |
| | | #15673 | | | | |
| AR095 | Small Intestine (Clontech) | Small Intestine | | | | |
| | | (Clontech) | | | | |
| AR096 | Spleen | Spleen | | | | |
| AR097 | Thymus T cells activated | Thymus T cells | | | | |
| | | activated | | | | |
| AR098 | Thymus T cells resting | Thymus T cells | | | | |
| | | resting | | | | |
| AR099 | Tonsil | Tonsil | | | | |
| AR100 | Tonsil geminal center | Tonsil geminal | | | | |
| | centroblast | center centroblast | | | | |
| AR101 | Tonsil germinal center B | Tonsil germinal | | | | |
| | cell | center B cell | | | | |
| AR102 | Tonsil lymph node | Tonsil lymph node | | | | |
| AR103 | Tonsil memory B cell | Tonsil memory B | | | | |
| | | cell | | | | |
| AR104 | Whole Brain | Whole Brain | | | | |
| AR105 | Xenograft ES-2 | Xenograft ES-2 | | | | |
| AR106 | Xenograft SW626 | Xenograft SW626 | | | | |
| H0002 | Human Adult Heart | Human Adult Heart | Heart | | | Uni-ZAP XR |
| H0004 | Human Adult Spleen | Human Adult | Spleen | | | Uni-ZAP XR |
| | | Spleen | | | | |
| H0008 | Whole 6 Week Old | | | | | Uni-ZAP XR |
| | Embryo | | | | | |
| H0009 | Human Fetal Brain | | | | | Uni-ZAP XR |
| H0011 | Human Fetal Kidney | Human Fetal Kidney | Kidney | | | Uni-ZAP XR |
| H0012 | Human Fetal Kidney | Human Fetal Kidney | Kidney | | | Uni-ZAP XR |
| H0013 | Human 8 Week Whole | Human 8 Week Old | Embryo | | | Uni-ZAP XR |
| | Embryo | Embryo | | | | |
| H0014 | Human Gall Bladder | Human Gall Bladder | Gall Bladder | | | Uni-ZAP XR |
| H0015 | Human Gall Bladder, | Human Gall Bladder | Gall Bladder | | | Uni-ZAP XR |
| | fraction II | | | | | |
| H0016 | Human Greater Omentum | Human Greater | peritoneum | | | Uni-ZAP XR |
| | | Omentum | | | | |
| H0018 | Human Greater Omentum, | Human Greater | peritoneum | | | Uni-ZAP XR |
| | fII remake | Omentum | | | | |
| H0022 | Jurkat Cells | Jurkat T-Cell Line | | | | Lambda |
| | | | | | | ZAP II |
| H0024 | Human Fetal Lung III | Human Fetal Lung | Lung | | | Uni-ZAP XR |
| H0028 | Human Old Ovary | Human Old Ovary | Ovary | | | pBluescript |
| H0030 | Human Placenta | | | | | Uni-ZAP XR |
| H0031 | Human Placenta | Human Placenta | Placenta | | | Uni-ZAP XR |
| H0032 | Human Prostate | Human Prostate | Prostate | | | Uni-ZAP XR |
| H0033 | Human Pituitary | Human Pituitary | | | | Uni-ZAP XR |
| H0034 | Human Parathyroid | Human Parathyroid | Parathyroid | | disease | Uni-ZAP XR |
| | Tumor | Tumor | | | | |
| H0035 | Human Salivary Gland | Human Salivary | Salivary | | | Uni-ZAP XR |
| | | Gland | gland | | | |
| H0036 | Human Adult Small | Human Adult Small | Small Int. | | | Uni-ZAP XR |
| | Intestine | Intestine | | | | |
| H0038 | Human Testes | Human Testes | Testis | | | Uni-ZAP XR |
| H0039 | Human Pancreas Tumor | Human Pancreas | Pancreas | | disease | Uni-ZAP XR |
| | | Tumor | | | | |
| H0040 | Human Testes Tumor | Human Testes | Testis | | disease | Uni-ZAP XR |
| | | Tumor | | | | |
| H0041 | Human Fetal Bone | Human Fetal Bone | Bone | | | Uni-ZAP XR |
| H0042 | Human Adult Pulmonary | Human Adult | Lung | | | Uni-ZAP XR |
| | | Pulmonary | | | | |
| H0046 | Human Endometrial | Human Endometrial | Uterus | | disease | Uni-ZAP XR |
| | Tumor | Tumor | | | | |
| H0048 | Human Pineal Gland | Human Pineal Gland | | | | Uni-ZAP XR |
| H0049 | Human Fetal Kidney | Human Fetal Kidney | Kidney | | | Uni-ZAP XR |
| H0050 | Human Fetal Heart | Human Fetal Heart | Heart | | | Uni-ZAP XR |
| H0051 | Human Hippocampus | Human | Brain | | | Uni-ZAP XR |
| | | Hippocampus | | | | |
| H0052 | Human Cerebellum | Human Cerebellum | Brain | | | Uni-ZAP XR |
| H0056 | Human Umbilical Vein, | Human Umbilical | Umbilical | | | Uni-ZAP XR |
| | Endo. remake | Vein Endothelial | vein | | | |
| | | Cells | | | | |
| H0057 | Human Fetal Spleen | | | | | Uni-ZAP XR |
| H0059 | Human Uterine Cancer | Human Uterine | Uterus | | disease | Lambda |
| | | Cancer | | | | ZAP II |
| H0063 | Human Thymus | Human Thymus | Thymus | | | Uni-ZAP XR |
| H0065 | Human Esophagus, | Human Esophagus, | Esophagus | | | Uni-ZAP XR |
| | Normal | normal | | | | |
| H0068 | Human Skin Tumor | Human Skin Tumor | Skin | | disease | Uni-ZAP XR |
| H0069 | Human Activated T-Cells | Activated T-Cells | Blood | Cell Line | | Uni-ZAP XR |
| H0078 | Human Lung Cancer | Human Lung Cancer | Lung | | disease | Lambda |
| | | | | | | ZAP II |
| H0081 | Human Fetal Epithelium | Human Fetal Skin | Skin | | | Uni-ZAP XR |
| | (Skin) | | | | | |
| H0083 | HUMAN JURKAT | Jurkat Cells | | | | Uni-ZAP XR |
| | MEMBRANE BOUND | | | | | |
| | POLYSOMES | | | | | |
| H0085 | Human Colon | Human Colon | | | | Lambda |
| | | | | | | ZAP II |
| H0086 | Human epithelioid | Epithelioid | Sk Muscle | | disease | Uni-ZAP XR |
| | sarcoma | Sarcoma, muscle | | | | |
| H0087 | Human Thymus | Human Thymus | | | | pBluescript |
| H0090 | Human T-Cell Lymphoma | T-Cell Lymphoma | T-Cell | | disease | Uni-ZAP XR |
| H0097 | Human Adult Heart, | Human Adult Heart | Heart | | | pBluescript |
| | subtracted | | | | | |
| H0098 | Human Adult Liver, | Human Adult Liver | Liver | | | Uni-ZAP XR |
| | subtracted | | | | | |
| H0099 | Human Lung Cancer, | Human Lung Cancer | Lung | | | pBluescript |
| | subtracted | | | | | |
| H0100 | Human Whole Six Week | Human Whole Six | Embryo | | | Uni-ZAP XR |
| | Old Embryo | Week Old Embryo | | | | |
| H0102 | Human Whole 6 Week | Human Whole Six | Embryo | | | pBluescript |
| | Old Embryo (II), subt | Week Old Embryo | | | | |
| H0103 | Human Fetal Brain, | Human Fetal Brain | Brain | | | Uni-ZAP XR |
| | subtracted | | | | | |
| H0105 | Human Fetal Heart, | Human Fetal Heart | Heart | | | pBluescript |
| | subtracted | | | | | |
| H0107 | Human Infant Adrenal | Human Infant | Adrenal | | | pBluescript |
| | Gland, subtracted | Adrenal Gland | gland | | | |
| H0108 | Human Adult Lymph | Human Adult | Lymph Node | | | Uni-ZAP XR |
| | Node, subtracted | Lymph Node | | | | |
| H0111 | Human Placenta, | Human Placenta | Placenta | | | pBluescript |
| | subtracted | | | | | |
| H0113 | Human skin Tumor, | Human Skin Tumor | Skin | | | Uni-ZAP XR |
| | subtracted | | | | | |
| H0118 | Human Adult Kidney | Human Adult | Kidney | | | Uni-ZAP XR |
| | | Kidney | | | | |
| H0123 | Human Fetal Dura Mater | Human Fetal Dura | Brain | | | Uni-ZAP XR |
| | | Mater | | | | |
| H0124 | Human | Human | Sk Muscle | | disease | Uni-ZAP XR |
| | Rhabdomyosarcoma | Rhabdomyosarcoma | | | | |
| H0125 | Cem cells cyclohexamide | Cyclohexamide | Blood | Cell Line | | Uni-ZAP XR |
| | treated | Treated Cem, Jurkat, | | | | |
| | | Raji, and Supt | | | | |
| H0130 | LNCAP untreated | LNCAP Cell Line | Prostate | Cell Line | | Uni-ZAP XR |
| H0131 | LNCAP + o.3 nM R1881 | LNCAP Cell Line | Prostate | Cell Line | | Uni-ZAP XR |
| H0132 | LNCAP + 30 nM R1881 | LNCAP Cell Line | Prostate | Cell Line | | Uni-ZAP XR |
| H0134 | Raji Cells, cyclohexamide | Cyclohexamide | Blood | Cell Line | | Uni-ZAP XR |
| | treated | Treated Cem, Jurkat, | | | | |
| | | Raji, and Supt | | | | |
| H0135 | Human Synovial Sarcoma | Human Synovial | Synovium | | | Uni-ZAP XR |
| | | Sarcoma | | | | |
| H0136 | Supt Cells, cyclohexamide | Cyclohexamide | Blood | Cell Line | | Uni-ZAP XR |
| | treated | Treated Cem, Jurkat, | | | | |
| | | Raji, and Supt | | | | |
| H0144 | Nine Week Old Early | 9 Wk Old Early | Embryo | | | Uni-ZAP XR |
| | Stage Human | Stage Human | | | | |
| H0149 | 7 Week Old Early Stage | Human Whole 7 | Embryo | | | Uni-ZAP XR |
| | Human, subtracted | Week Old Embryo | | | | |
| H0150 | Human Epididymus | Epididymis | Testis | | | Uni-ZAP XR |
| H0151 | Early Stage Human Liver | Human Fetal Liver | Liver | | | Uni-ZAP XR |
| H0153 | Human adult lymph node, | Human Adult | Lymph Node | | | Uni-ZAP XR |
| | subtracted | Lymph Node | | | | |
| H0156 | Human Adrenal Gland | Human Adrenal | Adrenal | | disease | Uni-ZAP XR |
| | Tumor | Gland Tumor | Gland | | | |
| H0159 | Activated T-Cells, 8 hrs., | Activated T-Cells | Blood | Cell Line | | Uni-ZAP XR |
| | ligation 2 | | | | | |
| H0163 | Human Synovium | Human Synovium | Synovium | | | Uni-ZAP XR |
| H0165 | Human Prostate Cancer, | Human Prostate | Prostate | | disease | Uni-ZAP XR |
| | Stage B2 | Cancer, stage B2 | | | | |
| H0166 | Human Prostate Cancer, | Human Prostate | Prostate | | disease | Uni-ZAP XR |
| | Stage B2 fraction | Cancer, stage B2 | | | | |
| H0168 | Human Prostate Cancer, | Human Prostate | Prostate | | disease | Uni-ZAP XR |
| | Stage C | Cancer, stage C | | | | |
| H0169 | Human Prostate Cancer, | Human Prostate | Prostate | | disease | Uni-ZAP XR |
| | Stage C fraction | Cancer, stage C | | | | |
| H0170 | 12 Week Old Early Stage | Twelve Week Old | Embryo | | | Uni-ZAP XR |
| | Human | Early Stage Human | | | | |
| H0171 | 12 Week Old Early Stage | Twelve Week Old | Embryo | | | Uni-ZAP XR |
| | Human, II | Early Stage Human | | | | |
| H0172 | Human Fetal Brain, | Human Fetal Brain | Brain | | | Lambda |
| | random primed | | | | | ZAP II |
| H0176 | CAMA1Ee Cell Line | CAMA1Ee Cell | Breast | Cell Line | | Uni-ZAP XR |
| | | Line | | | | |
| H0178 | Human Fetal Brain | Human Fetal Brain | Brain | | | Uni-ZAP XR |
| H0179 | Human Neutrophil | Human Neutrophil | Blood | Cell Line | | Uni-ZAP XR |
| H0181 | Human Primary Breast | Human Primary | Breast | | disease | Uni-ZAP XR |
| | Cancer | Breast Cancer | | | | |
| H0182 | Human Primary Breast | Human Primary | Breast | | disease | Uni-ZAP XR |
| | Cancer | Breast Cancer | | | | |
| H0183 | Human Colon Cancer | Human Colon | Colon | | disease | Uni-ZAP XR |
| | | Cancer | | | | |
| H0185 | Activated T-Cell labeled | T-Cells | Blood | Cell Line | | Lambda |
| | with 4-thioluri | | | | | ZAP II |
| H0187 | Resting T-Cell | T-Cells | Blood | Cell Line | | Lambda |
| | | | | | | ZAP II |
| H0188 | Human Normal Breast | Human Normal | Breast | | | Uni-ZAP XR |
| | | Breast | | | | |
| H0194 | Human Cerebellum, | Human Cerebellum | Brain | | | pBluescript |
| | subtracted | | | | | |
| H0196 | Human Cardiomyopathy, | Human | Heart | | | Uni-ZAP XR |
| | subtracted | Cardiomyopathy | | | | |
| H0201 | Human Hippocampus, | Human | Brain | | | pBluescript |
| | subtracted | Hippocampus | | | | |
| H0204 | Human Colon Cancer, | Human Colon | Colon | | | pBluescript |
| | subtracted | Cancer | | | | |
| H0205 | Human Colon Cancer, | Human Colon | Colon | | | pBluescript |
| | differential | Cancer | | | | |
| H0208 | Early Stage Human Lung, | Human Fetal Lung | Lung | | | pBluescript |
| | subtracted | | | | | |
| H0212 | Human Prostate, | Human Prostate | Prostate | | | pBluescript |
| | subtracted | | | | | |
| H0213 | Human Pituitary, | Human Pituitary | | | | Uni-ZAP XR |
| | subtracted | | | | | |
| H0214 | Raji cells, cyclohexamide | Cyclohexamide | Blood | Cell Line | | pBluescript |
| | treated, subtracted | Treated Cem, Jurkat, | | | | |
| | | Raji, and Supt | | | | |
| H0215 | Raji cells, cyclohexamide | Cyclohexamide | Blood | Cell Line | | pBluescript |
| | treated, differentially | Treated Cem, Jurkat, | | | | |
| | expressed | Raji, and Supt | | | | |
| H0216 | Supt cells, cyclohexamide | Cyclohexamide | Blood | Cell Line | | pBluescript |
| | treated, subtracted | Treated Cem, Jurkat, | | | | |
| | | Raji, and Supt | | | | |
| H0218 | Activated T-Cells, 0 hrs, | Activated T-Cells | Blood | Cell Line | | Uni-ZAP XR |
| | subtracted | | | | | |
| H0222 | Activated T-Cells, 8 hrs, | Activated T-Cells | Blood | Cell Line | | Uni-ZAP XR |
| | subtracted | | | | | |
| H0223 | Activated T-Cells, 8 hrs, | Activated T-Cells | Blood | Cell Line | | Uni-ZAP XR |
| | differentially expressed | | | | | |
| H0224 | Activated T-Cells, 12 hrs, | Activated T-Cells | Blood | Cell Line | | Uni-ZAP XR |
| | subtracted | | | | | |
| H0229 | Early Stage Human Brain, | Early Stage Human | Brain | | | Lambda |
| | random primed | Brain | | | | ZAP II |
| H0230 | Human Cardiomyopathy, | Human | Heart | | disease | Uni-ZAP XR |
| | diff exp | Cardiomyopathy | | | | |
| H0231 | Human Colon, subtraction | Human Colon | | | | pBluescript |
| H0232 | Human Colon, differential | Human Colon | | | | pBluescript |
| | expression | | | | | |
| H0235 | Human colon cancer, | Human Colon | Liver | | | pBluescript |
| | metaticized to liver, | Cancer, metasticized | | | | |
| | subtraction | to liver | | | | |
| H0239 | Human Kidney Tumor | Human Kidney | Kidney | | disease | Uni-ZAP XR |
| | | Tumor | | | | |
| H0242 | Human Fetal Heart, | Human Fetal Heart | Heart | | | pBluescript |
| | Differential (Fetal- | | | | | |
| | Specific) | | | | | |
| H0244 | Human 8 Week Whole | Human 8 Week Old | Embryo | | | Uni-ZAP XR |
| | Embryo, subtracted | Embryo | | | | |
| H0247 | Human Membrane Bound | Human Membrane | Blood | Cell Line | | Uni-ZAP XR |
| | Polysomes-Enzyme | Bound Polysomes | | | | |
| | Subtraction | | | | | |
| H0250 | Human Activated | Human Monocytes | | | | Uni-ZAP XR |
| | Monocytes | | | | | |
| H0251 | Human Chondrosarcoma | Human | Cartilage | | disease | Uni-ZAP XR |
| | | Chondrosarcoma | | | | |
| H0252 | Human Osteosarcoma | Human | Bone | | disease | Uni-ZAP XR |
| | | Osteosarcoma | | | | |
| H0253 | Human adult testis, large | Human Adult Testis | Testis | | | Uni-ZAP XR |
| | inserts | | | | | |
| H0254 | Breast Lymph node cDNA | Breast Lymph Node | Lymph Node | | | Uni-ZAP XR |
| | library | | | | | |
| H0255 | breast lymph node CDNA | Breast Lymph Node | Lymph Node | | | Lambda |
| | library | | | | | ZAP II |
| H0257 | HL-60, PMA 4H | HL-60 Cells, PMA | Blood | Cell Line | | Uni-ZAP XR |
| | | stimulated 4H | | | | |
| H0261 | H. cerebellum, Enzyme | Human Cerebellum | Brain | | | Uni-ZAP XR |
| | subtracted | | | | | |
| H0263 | human colon cancer | Human Colon | Colon | | disease | Lambda |
| | | Cancer | | | | ZAP II |
| H0264 | human tonsils | Human Tonsil | Tonsil | | | Uni-ZAP XR |
| H0265 | Activated T-Cell | T-Cells | Blood | Cell Line | | Uni-ZAP XR |
| | (12 hs)/Thiouridine | | | | | |
| | labelledEco | | | | | |
| H0266 | Human Microvascular | HMEC | Vein | Cell Line | | Lambda |
| | Endothelial Cells, fract. A | | | | | ZAP II |
| H0267 | Human Microvascular | HMEC | Vein | Cell Line | | Lambda |
| | Endothelial Cells, fract. B | | | | | ZAP II |
| H0268 | Human Umbilical Vein | HUVE Cells | Umbilical | Cell Line | | Lambda |
| | Endothelial Cells, fract. A | | vein | | | ZAP II |
| H0271 | Human Neutrophil, | Human Neutrophil- | Blood | Cell Line | | Uni-ZAP XR |
| | Activated | Activated | | | | |
| H0272 | HUMAN TONSILS, | Human Tonsil | Tonsil | | | Uni-ZAP XR |
| | FRACTION 2 | | | | | |
| H0274 | Human Adult Spleen, | Human Adult | Spleen | | | Uni-ZAP XR |
| | fractionII | Spleen | | | | |
| H0280 | K562 + PMA (36 hrs) | K562 Cell line | cell line | Cell Line | | ZAP Express |
| H0284 | Human OB MG63 control | Human | Bone | Cell Line | | Uni-ZAP XR |
| | fraction I | Osteoblastoma | | | | |
| | | MG63 cell line | | | | |
| H0286 | Human OB MG63 treated | Human | Bone | Cell Line | | Uni-ZAP XR |
| | (10 nM E2) fraction I | Osteoblastoma | | | | |
| | | MG63 cell line | | | | |
| H0288 | Human OB HOS control | Human | Bone | Cell Line | | Uni-ZAP XR |
| | fraction I | Osteoblastoma HOS | | | | |
| | | cell line | | | | |
| H0290 | Human OB HOS treated | Human | Bone | Cell Line | | Uni-ZAP XR |
| | (1 nM E2) fraction I | Osteoblastoma HOS | | | | |
| | | cell line | | | | |
| H0292 | Human GB HOS treated | Human | Bone | Cell Line | | Uni-ZAP XR |
| | (10 nM E2) fraction I | Osteoblastoma HOS | | | | |
| | | cell line | | | | |
| H0293 | WI 38 cells | | | | | Uni-ZAP XR |
| H0294 | Amniotic Cells-TNF | Amniotic Cells- | Placenta | Cell Line | | Uni-ZAP XR |
| | induced | TNF induced | | | | |
| H0295 | Amniotic Cells-Primary | Amniotic Cells- | Placenta | Cell Line | | Uni-ZAP XR |
| | Culture | Primary Culture | | | | |
| H0305 | CD34 positive cells (Cord | CD34 Positive Cells | Cord Blood | | | ZAP Express |
| | Blood) | | | | | |
| H0306 | CD34 depleted Buffy Coat | CD34 Depleted | Cord Blood | | | ZAP Express |
| | (Cord Blood) | Buffy Coat (Cord | | | | |
| | | Blood) | | | | |
| H0309 | Human Chronic Synovitis | Synovium, Chronic | Synovium | | disease | Uni-ZAP XR |
| | | Synovitis/ | | | | |
| | | Osteoarthritis | | | | |
| H0310 | human caudate nucleus | Brain | Brain | | | Uni-ZAP XR |
| H0316 | HUMAN STOMACH | Human Stomach | Stomach | | | Uni-ZAP XR |
| H0318 | HUMAN B CELL | Human B Cell | Lymph Node | | disease | Uni-ZAP XR |
| | LYMPHOMA | Lymphoma | | | | |
| H0320 | Human frontal cortex | Human Frontal | Brain | | | Uni-ZAP XR |
| | | Cortex | | | | |
| H0327 | human corpus colosum | Human Corpus | Brain | | | Uni-ZAP XR |
| | | Callosum | | | | |
| H0328 | human ovarian cancer | Ovarian Cancer | Ovary | | disease | Uni-ZAP XR |
| H0329 | Dermatofibrosarcoma | Dermatofibrosarcom | Skin | | disease | Uni-ZAP XR |
| | Protuberance | a Protuberans | | | | |
| H0331 | Hepatocellular Tumor | Hepatocellular | Liver | | disease | Lambda |
| | | Tumor | | | | ZAP II |
| H0333 | Hemangiopericytoma | Hemangiopericytom | Blood vessel | | disease | Lambda |
| | | a | | | | ZAP II |
| H0339 | Duodenum | Duodenum | | | | Uni-ZAP XR |
| H0340 | Corpus Callosum | Corpus Collosum- | | | | Uni-ZAP XR |
| | | 93052 | | | | |
| H0341 | Bone Marrow Cell Line | Bone Marrow Cell | Bone Marrow | Cell Line | | Uni-ZAP XR |
| | (RS4;11) | LineRS4;11 | | | | |
| H0343 | stomach cancer (human) | Stomach Cancer- | | | disease | Uni-ZAP XR |
| | | 5383A (human) | | | | |
| H0345 | SKIN | Skin-4000868H | Skin | | | Uni-ZAP XR |
| H0346 | Brain-medulloblastoma | Brain | Brain | | disease | Uni-ZAP XR |
| | | (Medulloblastoma)- | | | | |
| | | 9405C006R | | | | |
| H0349 | human adult liver cDNA | Human Adult Liver | Liver | | | pCMVSport |
| | library | | | | | 1 |
| H0351 | Glioblastoma | Glioblastoma | Brain | | disease | Uni-ZAP XR |
| H0352 | wilm's tumor | Wilm's Tumor | | | disease | Uni-ZAP XR |
| H0354 | Human Leukocytes | Human Leukocytes | Blood | Cell Line | | pCMVSport |
| | | | | | | 1 |
| H0355 | Human Liver | Human Liver, | | | | pCMVSport |
| | | normal Adult | | | | 1 |
| H0356 | Human Kidney | Human Kidney | Kidney | | | pCMVSport |
| | | | | | | 1 |
| H0361 | Human rejected kidney | Human Rejected | | | disease | pBluescript |
| | | Kidney | | | | |
| H0365 | Osteoclastoma-normalized | Human | | | disease | Uni-ZAP XR |
| | B | Osteoclastoma | | | | |
| H0366 | L428 cell line | L428 | | | | ZAP Express |
| H0369 | H. Atrophic Endometrium | Atrophic | | | | Uni-ZAP XR |
| | | Endometrium and | | | | |
| | | myometrium | | | | |
| H0370 | H. Lymph node breast | Lymph node with | | | disease | Uni-ZAP XR |
| | Cancer | Met. Breast Cancer | | | | |
| H0373 | Human Heart | Human Adult Heart | Heart | | | pCMVSport |
| | | | | | | 1 |
| H0374 | Human Brain | Human Brain | | | | pCMVSport |
| | | | | | | 1 |
| H0375 | Human Lung | Human Lung | | | | pCMVSport |
| | | | | | | 1 |
| H0380 | Human Tongue, frac 2 | Human Tongue | | | | pSportl |
| H0383 | Human Prostate BPH, re- | Human Prostate | | | | Uni-ZAP XR |
| | excision | BPH | | | | |
| H0384 | Brain, Kozak | Human Brain | | | | pCMVSport |
| | | | | | | 1 |
| H0386 | Leukocyte and Lung; 4 | Human Leukocytes | Blood | Cell Line | | pCMVSport |
| | screens | | | | | 1 |
| H0388 | Human Rejected Kidney, | Human Rejected | | | disease | pBluescript |
| | 704 re-excision | Kidney | | | | |
| H0392 | H. Meningima, M1 | Human Meningima | brain | | | pSport1 |
| H0393 | Fetal Liver, subtraction II | Human Fetal Liver | Liver | | | pBluescript |
| H0395 | A1-CELL LINE | Redd-Sternberg cell | | | | ZAP Express |
| H0398 | Human Newborn Bladder | Human Newborn | | | | pBluescript |
| | | Bladder | | | | |
| H0399 | Human Kidney Cortex, re- | Human Kidney | | | | Lambda |
| | rescue | Cortex | | | | ZAP II |
| H0402 | CD34 depleted Buffy Coat | CD34 Depleted | Cord Blood | | | ZAP Express |
| | (Cord Blood), re-excision | Buffy Coat (Cord | | | | |
| | | Blood) | | | | |
| H0408 | Human kidney Cortex, | Human Kidney | | | | pBluescnpt |
| | subtracted | Cortex | | | | |
| H0409 | H. Striatum Depression, | Human Brain, | Brain | | | pBluescript |
| | subtracted | Striatum Depression | | | | |
| H0411 | H Female Bladder, Adult | Human Female | Bladder | | | pSport1 |
| | | Adult Bladder | | | | |
| H0412 | Human umbilical vein | HUVE Cells | Umbilical | Cell Line | | pSport1 |
| | endothelial cells, IL-4 | | vein | | | |
| | induced | | | | | |
| H0413 | Human Umbilical Vein | HUVE Cells | Umbilical | Cell Line | | pSport1 |
| | Endothelial Cells, | | vein | | | |
| | uninduced | | | | | |
| H0415 | H. Ovarian Tumor, II, | Ovarian Tumor, | Ovary | | disease | pCMVSport |
| | OV5232 | OV5232 | | | | 2.0 |
| H0416 | Human Neutrophils, | Human Neutrophil- | Blood | Cell Line | | pBluescript |
| | Activated, re-excision | Activated | | | | |
| H0419 | Bone Cancer, re-excision | Bone Cancer | | | | Uni-ZAP XR |
| H0421 | Human Bone Marrow, re- | Bone Marrow | | | | pBluescript |
| | excision | | | | | |
| H0422 | T-Cell PHA 16 hrs | T-Cells | Blood | Cell Line | | pSport1 |
| H0423 | T-Cell PHA 24 hrs | T-Cells | Blood | Cell Line | | pSport1 |
| H0424 | Human Pituitary, subt IX | Human Pituitary | | | | pBluescript |
| H0427 | Human Adipose | Human Adipose, left | | | | pSport1 |
| | | hiplipoma | | | | |
| H0428 | Human Ovary | Human Ovary | Ovary | | | pSport1 |
| | | Tumor | | | | |
| H0429 | K562 + PMA (36 hrs),re- | K562 Cell line | cell line | Cell Line | | ZAP Express |
| | excision | | | | | |
| H0431 | H. Kidney Medulla, re- | Kidney medulla | Kidney | | | pBluescript |
| | excision | | | | | |
| H0434 | Human Brain, striatum, | Human Brain, | | | | pBluescript |
| | re-excision | Striatum | | | | |
| H0435 | Ovarian Tumor 10-3-95 | Ovarian Tumor, | Ovary | | | pCMVSport |
| | | OV350721 | | | | 2.0 |
| H0436 | Resting T-Cell Library,II | T-Cells | Blood | Cell Line | | pSport1 |
| H0437 | H Umbilical Vein | HUVE Cells | Umbilical | Cell Line | | Lambda |
| | Endothelial Cells, frac A, | | vein | | | ZAP II |
| | re-excision | | | | | |
| H0438 | H. Whole Brain #2, re- | Human Whole Brain | | | | ZAP Express |
| | excision | #2 | | | | |
| H0440 | FGF enriched mixed | Mixed libraries | | | | pCMVSport |
| | library | | | | | 1 |
| H0441 | H. Kidney Cortex, | Kidney cortex | Kidney | | | pBluescript |
| | subtracted | | | | | |
| H0444 | Spleen metastic melanoma | Spleen, Metastic | Spleen | | disease | pSport1 |
| | | malignant | | | | |
| | | melanoma | | | | |
| H0445 | Spleen, Chronic | Human Spleen, CLL | Spleen | | disease | pSport1 |
| | lymphocytic leukemia | | | | | |
| H0447 | Salivary gland, re-excision | Human Salivary | Salivary | | | Uni-ZAP XR |
| | | Gland | gland | | | |
| H0449 | CD34 + cell, I | CD34 positive cells | | | | pSport1 |
| H0450 | CD34 + cells, II | CD34 positive cells | | | | pCMVSport |
| | | | | | | 2.0 |
| H0453 | H. Kidney Pyramid, | Kidney pyramids | Kidney | | | pBluescript |
| | subtracted | | | | | |
| H0455 | H. Striatum Depression, | Human Brain, | Brain | | | pBluescript |
| | subt | Striatum Depression | | | | |
| H0457 | Human Eosinophils | Human Eosinophils | | | | pSport1 |
| H0458 | CD34 + cell, I, frac II | CD34 positive cells | | | | pSport1 |
| H0459 | CD34 + cells, II, | CD34 positive cells | | | | pCMVSport |
| | FRACTION 2 | | | | | 2.0 |
| H0461 | H. Kidney Medulla, | Kidney medulla | Kidney | | | pBluescript |
| | subtracted | | | | | |
| H0477 | Human Tonsil, Lib 3 | Human Tonsil | Tonsil | | | pSport1 |
| H0478 | Salivary Gland, Lib 2 | Human Salivary | Salivary | | | pSport1 |
| | | Gland | gland | | | |
| H0479 | Salivary Gland, Lib 3 | Human Salivary | Salivary | | | pSport1 |
| | | Gland | gland | | | |
| H0483 | Breast Cancer cell line, | Breast Cancer Cell | | | | pSport1 |
| | MDA 36 | line, MDA 36 | | | | |
| H0484 | Breast Cancer Cell line, | Breast Cancer Cell | | | | pSport1 |
| | angiogenic | line, Angiogenic, | | | | |
| | | 36T3 | | | | |
| H0485 | Hodgkin's Lymphoma I | Hodgkin's | | | disease | pCMVSport |
| | | Lymphoma I | | | | 2.0 |
| H0486 | Hodgkin's Lymphoma II | Hodgkin's | | | disease | pCMVSport |
| | | Lymphoma II | | | | 2.0 |
| H0488 | Human Tonsils, Lib 2 | Human Tonsils | | | | pCMVSport |
| | | | | | | 2.0 |
| H0489 | Crohn's Disease | Ileum | Intestine | | disease | pSport1 |
| H0490 | HI-60, untreated, | Human HL-60 | Blood | Cell Line | | Uni-ZAP XR |
| | subtracted | Cells, unstimulated | | | | |
| H0492 | HL-60, RA 4h, Subtracted | HL-60 Cells, RA | Blood | Cell Line | | Uni-ZAP XR |
| | | stimulated for 4H | | | | |
| H0494 | Keratinocyte | Keratinocyte | | | | pCMVSport |
| | | | | | | 2.0 |
| H0497 | HEL cell line | HEL cell line | HEL | | | pSport1 |
| | | | 92.1.7 | | | |
| H0506 | Ulcerative Colitis | Colon | Colon | | | pSportl |
| H0509 | Liver, Hepatoma | Human Liver, | Liver | | disease | pCMVSport |
| | | Hepatoma, patient 8 | | | | 3.0 |
| H0510 | Human Liver, normal | Human Liver, | Liver | | | pCMVSport |
| | | normal, Patient #8 | | | | 3.0 |
| H0518 | pBMC stimulated w/ poly | pBMC stimulated | | | | pCMVSport |
| | I/C | with poly I/C | | | | 3.0 |
| H0519 | NTERA2, control | NTBRA2, | | | | pCMVSport |
| | | Teratocarcinoma | | | | 3.0 |
| | | cell line | | | | |
| H0520 | NTERA2 + retinoic acid, | NTERA2, | | | | pSport1 |
| | 14 days | Teratocarcinoma | | | | |
| | | cell line | | | | |
| H0521 | Primary Dendritic Cells, | Primary Dendritic | | | | pCMVSport |
| | lib 1 | cells | | | | 3.0 |
| H0522 | Primary Dendritic | Primary Dendritic | | | | pCMVSport |
| | cells, frac 2 | cells | | | | 3.0 |
| H0525 | PCR, pBMC I/C treated | pBMC stimulated | | | | PCRII |
| | | with poly I/C | | | | |
| H0529 | Myoloid Progenitor Cell | TF-1 Cell Line; | | | | pCMVSport |
| | Line | Myoloid progenitor | | | | 3.0 |
| | | cell line | | | | |
| H0530 | Human Dermal | Human Dermal | | | | pSport1 |
| | Endothelial | Endothelial Cells; | | | | |
| | Cells, untreated | untreated | | | | |
| H0538 | Merkel Cells | Merkel cells | Lymph node | | | pSport1 |
| H0539 | Pancreas Islet Cell Tumor | Pancreas Islet Cell | Pancreas | | disease | pSport1 |
| | | Tumour | | | | |
| H0540 | Skin, burned | Skin, leg burned | Skin | | | pSport1 |
| H0542 | T Cell helper I | Helper T cell | | | | pCMVSport |
| | | | | | | 3.0 |
| H0543 | T cell helper II | Helper T cell | | | | pCMVSport |
| | | | | | | 3.0 |
| H0544 | Human endometrial | Human endometrial | | | | pCMVSport |
| | stromal cells | stromal cells | | | | 3.0 |
| H0545 | Human endometrial | Human endometrial | | | | pCMVSport |
| | stromal cells-treated with | stromal cells-treated | | | | 3.0 |
| | progesterone | with proge | | | | |
| H0546 | Human endometrial | Human endometrial | | | | pCMVSport |
| | stromal cells-treated with | stromal cells-treated | | | | 3.0 |
| | estradiol | with estra | | | | |
| H0547 | NTERA2 teratocarcinoma | NTERA2, | | | | pSport1 |
| | cell line-retinoic acid (14 | Teratocarcinoma | | | | |
| | days) | cell line | | | | |
| H0549 | H. Epididiymus, caput & | Human | | | | Uni-ZAP XR |
| | corpus | Epididiymus, caput | | | | |
| | | and corpus | | | | |
| H0550 | H. Epididiymus, cauda | Human | | | | Uni-ZAP XR |
| | | Epididiymus, cauda | | | | |
| H0551 | Human Thymus Stromal | Human Thymus | | | | pCMVSport |
| | Cells | Stromal Cells | | | | 3.0 |
| H0553 | Human Placenta | Human Placenta | | | | pCMVSport |
| | | | | | | 3.0 |
| H0555 | Rejected Kidney, lib 4 | Human Rejected | Kidney | | disease | pCMVSport |
| | | Kidney | | | | 3.0 |
| H0556 | Activated T- | T-Cells | Blood | Cell Line | | Uni-ZAP XR |
| | cell(12 h)/Thiouridine-re- | | | | | |
| | excision | | | | | |
| H0559 | HL-60, PMA 4H, re- | HL-60 Cells, PMA | Blood | Cell Line | | Uni-ZAP XR |
| | excision | stimulated 4H | | | | |
| H0560 | KMH2 | KMH2 | | | | pCMVSport |
| | | | | | | 3.0 |
| H0561 | L428 | L428 | | | | pCMVSport |
| | | | | | | 3.0 |
| H0562 | Human Fetal Brain, | Human Fetal Brain | | | | pCMVSport |
| | normalized c5-11-26 | | | | | 2.0 |
| H0563 | Human Fetal Brain, | Human Fetal Brain | | | | pCMVSport |
| | normalized 50021F | | | | | 2.0 |
| H0564 | Human Fetal Brain, | Human Fetal Brain | | | | pCMVSport |
| | normalized C5001F | | | | | 2.0 |
| H0567 | Human Fetal Brain, | Human Fetal Brain | | | | pCMVSport |
| | normalized A5002F | | | | | 2.0 |
| H0569 | Human Fetal Brain, | Human Fetal Brain | | | | pCMVSport |
| | normalized CO | | | | | 2.0 |
| H0570 | Human Fetal Brain, | Human Fetal Brain | | | | pCMVSport |
| | normalized C500H | | | | | 2.0 |
| H0574 | Hepatocellular Tumor; re- | Hepatocellular | Liver | | disease | Lambda |
| | excision | Tumor | | | | ZAP II |
| H0575 | Human Adult | Human Adult | Lung | | | Uni-ZAP XR |
| | Pulmonary; re-excision | Pulmonary | | | | |
| H0576 | Resting T-Cell; re- | T-Cells | Blood | Cell Line | | Lambda |
| | excision | | | | | ZAP II |
| H0579 | Pericardium | Pericardium | Heart | | | pSport1 |
| H0580 | Dendritic cells, pooled | Pooled dendritic | | | | pCMVSport |
| | | cells | | | | 3.0 |
| H0581 | Human Bone Marrow, | Human Bone | Bone Marrow | | | pCMVSport |
| | treated | Marrow | | | | 3.0 |
| H0583 | B Cell lymphoma | B Cell Lymphoma | B Cell | | disease | pCMVSport |
| | | | | | | 3.0 |
| H0585 | Activated T-Cells,12 | Activated T-Cells | Blood | Cell Line | | Uni-ZAP XR |
| | hrs, re-excision | | | | | |
| H0586 | Healing groin wound, 6.5 | healing groin | groin | | disease | pCMVSport |
| | hours post incision | wound, 6.5 hours | | | | 3.0 |
| | | post incision-2/ | | | | |
| H0587 | Healing groin wound; 7.5 | Groin-2/19/97 | groin | | disease | pCMVSport |
| | hours post incision | | | | | 3.0 |
| H0589 | CD34 positive cells (cord | CD34 Positive Cells | Cord Blood | | | ZAP Express |
| | blood),re-ex | | | | | |
| H0590 | Human adult small | Human Adult Small | Small Int. | | | Uni-ZAP XR |
| | intestine,re-excision | Intestine | | | | |
| H0591 | Human T-cell | T-CeIl Lymphoma | T-Cell | | disease | Uni-ZAP XR |
| | lymphoma; re-excision | | | | | |
| H0592 | Healing groin wound- | HGS wound healing | | | disease | pCMVSport |
| | zero hr post-incision | project; abdomen | | | | 3.0 |
| | (control) | | | | | |
| H0593 | Olfactory | Olfactory epithelium | | | | pCMVSport |
| | epithelium;nasalcavity | from roof of left | | | | 3.0 |
| | | nasal cacit | | | | |
| H0594 | Human Lung Cancer; re- | Human Lung Cancer | Lung | | disease | Lambda |
| | excision | | | | | ZAP II |
| H0595 | Stomach cancer | Stomach Cancer- | | | disease | Uni-ZAP XR |
| | (human); re-excision | 5383A (human) | | | | |
| H0596 | Human Colon Cancer; re- | Human Colon | Colon | | | Lambda |
| | excision | Cancer | | | | ZAP II |
| H0597 | Human Colon; re-excision | Human Colon | | | | Lambda |
| | | | | | | ZAP II |
| H0598 | Human Stomach; re- | Human Stomach | Stomach | | | Uni-ZAP XR |
| | excision | | | | | |
| H0599 | Human Adult Heart; re- | Human Adult Heart | Heart | | | Uni-ZAP XR |
| | excision | | | | | |
| H0600 | Healing Abdomen | Abdomen | | | disease | pCMVSport |
| | wound;70 & 90 min post | | | | | 3.0 |
| | incision | | | | | |
| H0604 | Human Pituitary, re- | Human Pituitary | | | | pBluescript |
| | excision | | | | | |
| H0606 | Human Primary Breast | Human Primary | Breast | | disease | Uni-ZAP XR |
| | Cancer; re-excision | Breast Cancer | | | | |
| H0609 | H. Leukocytes, | H.Leukocytes | | | | pCMVSport |
| | normalized cot > 500A | | | | | 1 |
| H0611 | H. Leukocytes, | H.Leukocytes | | | | pCMVSport |
| | normalized cot 500 B | | | | | 1 |
| H0612 | H.Leukocytes, normalized | H.Leukocytes | | | | pCMVSport |
| | cot 50 B | | | | | 1 |
| H0614 | H. Leukocytes, | H.Leukocytes | | | | pCMVSport |
| | normalized cot 500 A | | | | | 1 |
| H0615 | Human Ovarian Cancer | Ovarian Cancer | Ovary | | disease | Uni-ZAP XR |
| | Reexcision | | | | | |
| H0616 | Human Testes, Reexcision | Human Testes | Testis | | | Uni-ZAP XR |
| H0617 | Human Primary Breast | Human Primary | Breast | | disease | Uni-ZAP XR |
| | Cancer Reexcision | Breast Cancer | | | | |
| H0618 | Human Adult Testes, | Human Adult Testis | Testis | | | Uni-ZAP XR |
| | Large Inserts, Reexcision | | | | | |
| H0619 | Fetal Heart | Human Fetal Heart | Heart | | | Uni-ZAP XR |
| H0620 | Human Fetal Kidney; | Human Fetal Kidney | Kidney | | | Uni-ZAP XR |
| | Reexcision | | | | | |
| H0622 | Human Pancreas Tumor; | Human Pancreas | Pancreas | | disease | Uni-ZAP XR |
| | Reexcision | Tumor | | | | |
| H0623 | Human Umbilical Vein; | Human Umbilical | Umbilical | | | Uni-ZAP XR |
| | Reexcision | Vein Endothelial | vein | | | |
| | | Cells | | | | |
| H0624 | 12 Week Early Stage | Twelve Week Old | Embryo | | | Uni-ZAP XR |
| | Human II; Reexcision | Early Stage Human | | | | |
| H0625 | Ku 812F Basophils Line | Ku 812F Basophils | | | | pSport1 |
| H0626 | Saos2 Cells; Untreated | Saos2 Cell Line; | | | | pSport1 |
| | | Untreated | | | | |
| H0627 | Saos2 Cells; Vitamin D3 | Saos2 Cell Line; | | | | pSport1 |
| | Treated | Vitamin D3 Treated | | | | |
| H0628 | Human Pre-Differentiated | Human Pre- | | | | Uni-ZAP XR |
| | Adipocytes | Differentiated | | | | |
| | | Adipocytes | | | | |
| H0631 | Saos2, Dexamethosome | Saos2 Cell Line; | | | | pSport1 |
| | Treated | Dexamethosome | | | | |
| | | Treated | | | | |
| H0632 | Hepatocellular Tumor;re- | Hepatocellular | Liver | | | Lambda |
| | excision | Tumor | | | | ZAP II |
| H0633 | Lung Carcinoma A549 | TNFalpha activated | | | disease | pSport1 |
| | TNFalpha activated | A549-Lung | | | | |
| | | Carcinoma | | | | |
| H0634 | Human Testes Tumor, re- | Human Testes | Testis | | disease | Uni-ZAP XR |
| | excision | Tumor | | | | |
| H0635 | Human Activated T-Cells, | Activated T-Cells | Blood | Cell Line | | Uni-ZAP XR |
| | re-excision | | | | | |
| H0637 | Dendritic Cells From | Dentritic cells from | | | | pSport1 |
| | CD34 Cells | CD34 cells | | | | |
| H0638 | CD40 activated monocyte | CD40 activated | | | | pSport1 |
| | dendridic cells | monocyte dendridic | | | | |
| | | cells | | | | |
| H0640 | Ficolled Human Stromal | Ficolled Human | | | | Other |
| | Cells, Untreated | Stromal Cells, | | | | |
| | | Untreated | | | | |
| H0641 | LPS activated derived | LPS activated | | | | pSport1 |
| | dendritic cells | monocyte derived | | | | |
| | | dendritic cells | | | | |
| H0642 | Hep G2 Cells, lambda | Hep G2 Cells | | | | Other |
| | library | | | | | |
| H0643 | Hep G2 Cells, PCR library | Hep G2 Cells | | | | Other |
| H0644 | Human Placenta (re- | Human Placenta | Placenta | | | Uni-ZAP XR |
| | excision) | | | | | |
| H0645 | Fetal Heart, re-excision | Human Fetal Heart | Heart | | | Uni-ZAP XR |
| H0646 | Lung, Cancer (4005313 | Metastatic | | | | pSport1 |
| | A3): Invasive Poorly | squamous cell lung | | | | |
| | Differentiated Lung | carcinoma, poorly di | | | | |
| | Adenocarcinoma, | | | | | |
| H0647 | Lung, Cancer (4005163 | Invasive poorly | | | disease | pSport1 |
| | B7): Invasive, Poorly Diff. | differentiated lung | | | | |
| | Adenocarcinoma, | adenocarcinoma | | | | |
| | Metastatic | | | | | |
| H0648 | Ovary, Cancer: (4004562 | Papillary Cstic | | | disease | pSport1 |
| | B6) Papillary Serous | neoplasm of low | | | | |
| | Cystic Neoplasm, Low | malignant potentia | | | | |
| | Malignant Pot | | | | | |
| H0650 | B-Cells | B-Cells | | | | pCMVSport |
| | | | | | | 3.0 |
| H0651 | Ovary, Normal: | Normal Ovary | | | | pSport1 |
| | (9805C040R) | | | | | |
| H0653 | Stromal Cells | Stromal Cells | | | | pSport1 |
| H0656 | B-cells (unstimulated) | B-cells | | | | pSport1 |
| | | (unstimulated) | | | | |
| H0657 | B-cells (stimulated) | B-cells (stimulated) | | | | pSport1 |
| H0658 | Ovary, Cancer | 9809C332-Poorly | Ovary & | | disease | pSport1 |
| | (9809C332): Poorly | differentiate | Fallopian | | | |
| | differentiated | | Tubes | | | |
| | adenocarcinoma | | | | | |
| H0659 | Ovary, Cancer | Grade II Papillary | Ovary | | disease | pSport1 |
| | (15395A1F): Grade II | Carcinoma, Ovary | | | | |
| | Papillary Carcinoma | | | | | |
| H0660 | Ovary, Cancer: | Poorly differentiated | | | disease | pSport1 |
| | (15799A1F) Poorly | carcinoma, ovary | | | | |
| | differentiated carcinoma | | | | | |
| H0661 | Breast, Cancer: (4004943 | Breast cancer | | | disease | pSport1 |
| | A5) | | | | | |
| H0662 | Breast, Normal: | Normal Breast- | Breast | | | pSport1 |
| | (4005522B2) | #4005522(B2) | | | | |
| H0663 | Breast, Cancer: (4005522 | Breast Cancer- | Breast | | disease | pSport1 |
| | A2) | #4005522(A2) | | | | |
| H0664 | Breast, Cancer: | Breast Cancer | Breast | | disease | pSport1 |
| | (9806C012R) | | | | | |
| H0665 | Stromal cells 3.88 | Stromal cells 3.88 | | | | pSport1 |
| H0666 | Ovary, Cancer: (4004332 | Ovarian Cancer, | | | disease | pSport1 |
| | A2) | Sample | | | | |
| | | #4004332A2 | | | | |
| H0667 | Stromal cells (HBM3.18) | Stromal cell (HBM | | | | pSport1 |
| | | 3.18) | | | | |
| H0668 | stromal cell clone 2.5 | stromal cell clone | | | | pSport1 |
| | | 2.5 | | | | |
| H0669 | Breast, Cancer: (4005385 | Breast Cancer | Breast | | | pSport1 |
| | A2) | (4005385A2) | | | | |
| H0670 | Ovary, Cancer(4004650 | Ovarian Cancer- | | | | pSport1 |
| | A3): Well-Differentiated | 4004650A3 | | | | |
| | Micropapillary Serous | | | | | |
| | Carcinoma | | | | | |
| H0671 | Breast, Cancer: | Breast Cancer- | | | | pSport1 |
| | (9802C020E) | Sample # | | | | |
| | | 9802C020E | | | | |
| H0672 | Ovary, Cancer: (4004576 | Ovarian | Ovary | | | pSport1 |
| | AS) | Cancer(4004576A8) | | | | |
| H0673 | Human Prostate Cancer, | Human Prostate | Prostate | | | Uni-ZAP XR |
| | Stage B2; re-excision | Cancer, stage B2 | | | | |
| H0674 | Human Prostate Cancer, | Human Prostate | Prostate | | | Uni-ZAP XR |
| | Stage C; re-excission | Cancer, stage C | | | | |
| H0675 | Colon, Cancer: | Colon Cancer | | | | pCMVSport |
| | (9808C064R) | 9808C064R | | | | 3.0 |
| H0676 | Colon, Cancer: | Colon Cancer | | | | pCMVSport |
| | (9808C064R)-total RNA | 9808C064R | | | | 3.0 |
| H0677 | TNFR degenerate oligo | B-Cells | | | | PCRII |
| H0682 | Serous Papillary | serous papillary | | | | pCMVSport |
| | Adenocarcinoma | adenocarcinoma | | | | 3.0 |
| | | (9606G3045PA3B) | | | | |
| H0683 | Ovarian Serous Papillary | Serous papillary | | | | pCMVSport |
| | Adenocarcinoma | adenocarcinoma, | | | | 3.0 |
| | | stage 3C (9804G01 | | | | |
| H0684 | Serous Papillary | Ovarian Cancer- | Ovaries | | | pCMVSport |
| | Adenocarcinoma | 9810G606 | | | | 3.0 |
| H0685 | Adenocarcinoma of | Adenocarcinoma of | | | | pCMVSport |
| | Ovary, Human Cell Line, | Ovary, Human Cell | | | | 3.0 |
| | #OVCAR-3 | Line, #OVCAR | | | | |
| H0686 | Adenocarcinoma of | Adenocarcinoma of | | | | pCMVSport |
| | Ovary, Human Cell Line | Ovary, Human Cell | | | | 3.0 |
| | | Line, #SW-626 | | | | |
| H0687 | Human normal | Human normal | Ovary | | | pCMVSport |
| | ovary (#9610G215) | ovary(#9610G215) | | | | 3.0 |
| H0688 | Human Ovarian | Human Ovarian | | | | pCMVSport |
| | Cancer (#9807G017) | cancer(#9807G017), | | | | 3.0 |
| | | mRNA from Maura | | | | |
| | | Ru | | | | |
| H0689 | Ovarian Cancer | Ovarian Cancer, | | | | pCMVSport |
| | | #9806G019 | | | | 3.0 |
| H0690 | Ovarian Cancer, # | Ovarian Cancer, | | | | pCMVSport |
| | 9702G001 | #9702G001 | | | | 3.0 |
| H0691 | Normal Ovary, | normal ovary, | | | | pCMVSport |
| | #9710G208 | #9710G208 | | | | 3.0 |
| H0693 | Normal Prostate | Normal Prostate | | | | pCMVSport |
| | #ODQ3958EN | Tissue # | | | | 3.0 |
| | | ODQ3958EN | | | | |
| H0694 | Prostate gland | Prostate gland, | prostate | | | pCMVSport |
| | adenocarcinoma | adenocarcinoma, | gland | | | 3.0 |
| | | mod/diff, gleason | | | | |
| H0695 | mononucleocytes from | mononucleocytes | | | | pCMVSport |
| | patient | from patient at | | | | 3.0 |
| | | Shady Grove Hospit | | | | |
| N0006 | Human Fetal Brain | Human Fetal Brain | | | | |
| N0007 | Human Hippocampus | Human | | | | |
| | | Hippocampus | | | | |
| N0009 | Human Hippocampus, | Human | | | | |
| | prescreened | Hippocampus | | | | |
| S0001 | Brain frontal cortex | Brain frontal cortex | Brain | | | Lambda |
| | | | | | | ZAP II |
| S0002 | Monocyte activated | Monocyte-activated | blood | Cell Line | | Uni-ZAP XR |
| S0003 | Human Osteoclastoma | Osteoclastoma | bone | | disease | Uni-ZAP XR |
| S0005 | Heart | Heart-left ventricle | Heart | | | pCDNA |
| S0007 | Early Stage Human Brain | Human Fetal Brain | | | | Uni-ZAP XR |
| S0010 | Human Amygdala | Amygdala | | | | Uni-ZAP XR |
| S0011 | STROMAL- | Osteoclastoma | bone | | disease | Uni-ZAP XR |
| | OSTEOCLASTOMA | | | | | |
| S0013 | Prostate | Prostate | prostate | | | Uni-ZAP XR |
| S0014 | Kidney Cortex | Kidney cortex | Kidney | | | Uni-ZAP XR |
| S0015 | Kidney medulla | Kidney medulla | Kidney | | | Uni-ZAP XR |
| S0021 | Whole brain | Whole brain | Brain | | | ZAP Express |
| S0022 | Human Osteoclastoma | Osteoclastoma | | | | Uni-ZAP XR |
| | Stromal Cells- | Stromal Cells | | | | |
| | unamplified | | | | | |
| S0026 | Stromal cell TF274 | stromal cell | Bone marrow | Cell Line | | Uni-ZAP XR |
| S0027 | Smooth muscle, serum | Smooth muscle | Pulmanary | Cell Line | | Uni-ZAP XR |
| | treated | | artery | | | |
| S0028 | Smooth muscle,control | Smooth muscle | Pulmanary | Cell Line | | Uni-ZAP XR |
| | | | artery | | | |
| S0029 | brain stem | Brain stem | brain | | | Uni-ZAP XR |
| S0031 | Spinal cord | Spinal cord | spinal cord | | | Uni-ZAP XR |
| S0032 | Smooth muscle-ILb | Smooth muscle | Pulmanary | Cell Line | | Uni-ZAP XR |
| | induced | | artery | | | |
| S0036 | Human Substantia Nigra | Human Substantia | | | | Uni-ZAP XR |
| | | Nigra | | | | |
| S0037 | Smooth muscle, IL1b | Smooth muscle | Pulmanary | Cell Line | | Uni-ZAP XR |
| | induced | | artery | | | |
| S0038 | Human Whole Brain #2- | Human Whole Brain | | | | ZAP Express |
| | Oligo dT > 1.5 Kb | #2 | | | | |
| S0040 | Adipocytes | Human Adipocytes | | | | Uni-ZAP XR |
| | | from Osteoclastoma | | | | |
| S0042 | Testes | Human Testes | | | | ZAP Express |
| S0044 | Prostate BPH | prostate BPH | Prostate | | disease | Uni-ZAP XR |
| S0045 | Endothelial cells-control | Endotbelial cell | endothelial | Cell Line | | Uni-ZAP XR |
| | | | cell-lung | | | |
| S0046 | Endothelial-induced | Endothelial cell | endothelial | Cell Line | | Uni-ZAP XR |
| | | | cell-lung | | | |
| S0048 | Human Hypothalamus, | Human | | | disease | Uni-ZAP XR |
| | Alzheimer's | Hypothalamus, | | | | |
| | | Alzheimer's | | | | |
| S0049 | Human Brain, Striatum | Human Brain, | | | | Uni-ZAP XR |
| | | Striatum | | | | |
| S0050 | Human Frontal Cortex, | Human Frontal | | | disease | Uni-ZAP XR |
| | Schizophrenia | Cortex, | | | | |
| | | Schizophrenia | | | | |
| S0051 | Human | Human | | | disease | Uni-ZAP XR |
| | Hypothalmus,Schizophrenia | Hypothalamus, | | | | |
| | | Schizophrenia | | | | |
| S0052 | neutrophils control | human neutrophils | blood | Cell Line | | Uni-ZAP XR |
| S0053 | Neutrophils IL-1 and LPS | human neutrophil | blood | Cell Line | | Uni-ZAP XR |
| | induced | induced | | | | |
| S0106 | STRIATUM | | BRAIN | | disease | Uni-ZAP XR |
| | DEPRESSION | | | | | |
| S0110 | Brain Amygdala | | Brain | | disease | Uni-ZAP XR |
| | Depression | | | | | |
| S0112 | Hypothalamus | | Brain | | | Uni-ZAP XR |
| S0114 | Anergic T-cell | Anergic T-cell | | Cell Line | | Uni-ZAP XR |
| S0116 | Bone marrow | Bone marrow | Bone marrow | | | Uni-ZAP XR |
| S0118 | Smooth muscle control 2 | Smooth muscle | Pulmanary | Cell Line | | Uni-ZAP XR |
| | | | artery | | | |
| S0126 | Osteoblasts | Osteoblasts | Knee | Cell Line | | Uni-ZAP XR |
| S0132 | Epitbelial-TNFa and INF | Airway Epithelial | | | | Uni-ZAP XR |
| | induced | | | | | |
| S0134 | Apoptotic T-cell | apoptotic cells | | Cell Line | | Uni-ZAP XR |
| S0136 | PERM TF274 | stromal cell | Bone marrow | Cell Line | | Lambda |
| | | | | | | ZAP II |
| S0142 | Macrophage-oxLDL | macrophage- | blood | Cell Line | | Uni-ZAP XR |
| | | oxidized LDL | | | | |
| | | treated | | | | |
| S0144 | Macrophage (GM-CSF | Macrophage (GM- | | | | Uni-ZAP XR |
| | treated) | CSF treated) | | | | |
| S0146 | prostate-edited | prostate BPH | Prostate | | | Uni-ZAP XR |
| S0148 | Normal Prostate | Prostate | prostate | | | Uni-ZAP XR |
| S0150 | LNCAP prostate cell line | LNCAP Cell Line | Prostate | Cell Line | | Uni-ZAP XR |
| S0152 | PC3 Prostate cell line | PC3 prostate cell | | | | Uni-ZAP XR |
| | | line | | | | |
| S0174 | Prostate-BPH subtracted II | Human Prostate | | | | pBluescript |
| | | BPH | | | | |
| S0176 | Prostate, normal, | Prostate | prostate | | | Uni-ZAP XR |
| | subtraction I | | | | | |
| S0182 | Human B Cell 8866 | Human B-Cell 8866 | | | | Uni-ZAP XR |
| S0188 | Prostate,BPH, Lib 2 | Human Prostate | | | disease | pSport1 |
| | | BPH | | | | |
| S0190 | Prostate BPH,Lib 2, | Human Prostate | | | | pSport1 |
| | subtracted | BPH | | | | |
| S0192 | Synovial Fibroblasts | Synovial Fibroblasts | | | | pSport1 |
| | (control) | | | | | |
| S0194 | Synovial hypoxia | Synovial Fibroblasts | | | | pSport1 |
| S0196 | Synovial IL-1/TNF | Synovial Fibroblasts | | | | pSport1 |
| | stimulated | | | | | |
| S0206 | Smooth Muscle-HASTE | Smooth muscle | Pulmanary | Cell Line | | pBluescript |
| | normalized | | artery | | | |
| S0208 | Messangial cell, frac 1 | Messangial cell | | | | pSport1 |
| S0210 | Messangial cell, frac 2 | Messangial cell | | | | pSport1 |
| S0212 | Bone Marrow Stromal | Bone Marrow | | | | pSport1 |
| | Cell, untreated | Stromal | | | | |
| | | Cell, untreated | | | | |
| S0214 | Human Osteoclastoma, re- | Osteoclastoma | bone | | disease | Uni-ZAP XR |
| | excision | | | | | |
| S0216 | Neutrophils IL-1 and LPS | human neutrophil | blood | Cell Line | | Uni-ZAP XR |
| | induced | induced | | | | |
| S0218 | Apoptotic T-cell, re- | apoptotic cells | | Cell Line | | Uni-ZAP XR |
| | excision | | | | | |
| S0220 | H. hypothalamus, frac | Hypothalamus | Brain | | | ZAP Express |
| | A; re-excision | | | | | |
| S0222 | H. Frontal | H. Brain, Frontal | Brain | | disease | Uni-ZAP XR |
| | cortex, epileptic; re- | Cortex, Epileptic | | | | |
| | excision | | | | | |
| S0242 | Synovial Fibroblasts | Synovial Fibroblasts | | | | pSport1 |
| | (Ill/TNF), subt | | | | | |
| S0250 | Human Osteoblasts II | Human Osteoblasts | Femur | | disease | pCMVSport |
| | | | | | | 2.0 |
| S0260 | Spinal Cord, re-excision | Spinal cord | spinal cord | | | Uni-ZAP XR |
| S0262 | PYCS | Human Antrum | | | | PCRII |
| | | (PY CS) | | | | |
| S0276 | Synovial hypoxia-RSF | Synovial fobroblasts | Synovial | | | pSport1 |
| | subtracted | (rheumatoid) | tissue | | | |
| S0278 | H Macrophage (GM-CSF | Macrophage (GM- | | | | Uni-ZAP XR |
| | treated), re-excision | CSF treated) | | | | |
| S0280 | Human Adipose Tissue, | Human Adipose | | | | Uni-ZAP XR |
| | re-excision | Tissue | | | | |
| S0282 | Brain Frontal Cortex, re- | Brain frontal cortex | Brain | | | Lambda |
| | excision | | | | | ZAP II |
| S0292 | Osteoarthritis (OA-4) | Human | Bone | | disease | pSport1 |
| | | Osteoarthritic | | | | |
| | | Cartilage | | | | |
| S0294 | Larynx tumor | Larynx tumor | Larynx, vocal | | disease | pSport1 |
| | | | cord | | | |
| S0300 | Frontal lobe, dementia; re- | Frontal Lobe | Brain | | | Uni-ZAP XR |
| | excision | dementia/Alzheimer's | | | | |
| S0306 | Larynx normal #10 261- | Larynx normal | | | | pSport1 |
| | 273 | | | | | |
| S0310 | Normal trachea | Normal trachea | | | | pSport1 |
| S0312 | Human | Human | | | disease | pSport1 |
| | osteoarthritic; fraction II | ostcoarthritic | | | | |
| | | cartilage | | | | |
| S0314 | Human | Human | | | disease | pSport1 |
| | osteoarthritis; fraction I | osteoarthritic | | | | |
| | | cartilage | | | | |
| S0316 | Human Normal | Human Normal | | | | pSport1 |
| | Cartilage, Fraction I | Cartilage | | | | |
| S0318 | Human Normal Cartilage | Human Normal | | | | pSport1 |
| | Fraction II | Cartilage | | | | |
| S0320 | Human Larynx | Larynx | Epiglottis | | | pSport1 |
| S0324 | Human Brain | Brain | Cerebellum | | | pSport1 |
| S0326 | Mammary Gland | Mammary Gland | Whole | | | pSport1 |
| | | mammary | | | | |
| | | gland | | | | |
| S0328 | Palate carcinoma | Palate carcinoma | Uvula | | disease | pSport1 |
| S0330 | Palate normal | Palate normal | Uvula | | | pSport1 |
| S0332 | Pharynx carcinoma | Pharynx carcinoma | Hypopharynx | | | pSport1 |
| S0336 | Human Normal Cartilage | Human Normal | | | | pSport1 |
| | Fraction IV | Cartilage | | | | |
| S0342 | Adipocytes; re-excision | Human Adipocytes | | | | Uni-ZAP XR |
| | | from Osteoclastoma | | | | |
| S0344 | Macrophage-oxLDL; re- | macrophage- | blood | Cell Line | | Uni-ZAP XR |
| | excision | oxidized LDL | | | | |
| | | treated | | | | |
| S0346 | Human Amygdala; re- | Amygdala | | | | Uni-ZAP XR |
| | excision | | | | | |
| S0348 | Cheek Carcinoma | Cheek Carcinoma | | | disease | pSport1 |
| S0350 | Pharynx Carcinoma | Pharynx carcinoma | Hypopharynx | | disease | pSport1 |
| S0352 | Larynx Carcinoma | Larynx carcinoma | | | disease | pSport1 |
| S0354 | Colon Normal II | Colon Normal | Colon | | | pSport1 |
| S0356 | Colon Carcinoma | Colon Carcinoma | Colon | | disease | pSport1 |
| S0358 | Colon Normal III | Colon Normal | Colon | | | pSport1 |
| S0360 | Colon Tumor II | Colon Tumor | Colon | | disease | pSport1 |
| S0362 | Human Gastrocnemius | Gastrocnemius | | | | pSport1 |
| | | muscle | | | | |
| S0364 | Human Quadriceps | Quadriceps muscle | | | | pSport1 |
| S0366 | Human Soleus | Soleus Muscle | | | | pSport1 |
| S0370 | Larynx carcinoma II | Larynx carcinoma | | | disease | pSport1 |
| S0372 | Larynx carcinoma III | Larynx carcinoma | | | disease | pSport1 |
| S0374 | Normal colon | Normal colon | | | | pSport1 |
| S0376 | Colon Tumor | Colon Tumor | | | disease | pSport1 |
| S0378 | Pancreas normal PCA4 | Pancreas Normal | | | | pSport1 |
| | No | PCA4 No | | | | |
| S0380 | Pancreas Tumor PCA4 Tu | Pancreas Tumor | | | disease | pSport1 |
| | | PCA4 Tu | | | | |
| S0382 | Larynx carcinoma IV | Larynx carcinoma | | | disease | pSport1 |
| S0386 | Human Whole Brain, re- | Whole brain | Brain | | | ZAP Express |
| | excision | | | | | |
| S0388 | Human | Human | | | disease | Uni-ZAP XR |
| | Hypothalamus, schizophrenia, | Hypothalamus, | | | | |
| | re-excision | Schizophrenia | | | | |
| S0390 | Smooth muscle, control; | Smooth muscle | Pulmanary | Cell Line | | Uni-ZAP XR |
| | re-excision | | artery | | | |
| S0392 | Salivary Gland | Salivary gland; | | | | pSport1 |
| | | normal | | | | |
| S0394 | Stomach; normal | Stomach; normal | | | | pSport1 |
| S0396 | Uterus; normal | Uterus; normal | | | | pSport1 |
| S0400 | Brain; normal | Brain; normal | | | | pSport1 |
| S0402 | Adrenal Gland, normal | Adrenal gland; | | | | pSport1 |
| | | normal | | | | |
| S0404 | Rectum normal | Rectum, normal | | | | pSport1 |
| S0406 | Rectum tumour | Rectum tumour | | | | pSport1 |
| S0408 | Colon, normal | Colon, normal | | | | pSport1 |
| S0410 | Colon, tumour | Colon, tumour | | | | pSport1 |
| S0412 | Temporal cortex- | Temporal cortex, | | | disease | Other |
| | Alzheizmer; subtracted | alzheimer | | | | |
| S0414 | Hippocampus, Alzheimer | Hippocampus, | | | | Other |
| | Subtracted | Alzheimer | | | | |
| | | Subtracted | | | | |
| S0418 | CHME Cell Line; treated 5 | CHME Cell Line; | | | | pCMVSport |
| | hrs | treated | | | | 3.0 |
| S0420 | CHME Cell | CHME Cell line, | | | | pSport1 |
| | Line, untreated | untreatetd | | | | |
| S0422 | Mo7e Cell Line GM-CSF | Mo7e Cell Line | | | | pCMVSport |
| | treated (1 ng/ml) | GM-CSF treated | | | | 3.0 |
| | | (1 ng/ml) | | | | |
| S0424 | TF-1 Cell Line GM-CSF | TF-1 Cell Line | | | | pSport1 |
| | Treated | GM-CSF Treated | | | | |
| S0426 | Monocyte activated; re- | Monocyte-activated | blood | Cell Line | | Uni-ZAP XR |
| | excision | | | | | |
| S0428 | Neutrophils control; re- | human neutrophils | blood | Cell Line | | Uni-ZAP XR |
| | excision | | | | | |
| S0430 | Aryepiglottis Normal | Aryepiglottis | | | | pSport1 |
| | | Normal | | | | |
| S0434 | Stomach Normal | Stomach Normal | | | disease | pSport1 |
| S0436 | Stomach Tumour | Stomach Tumour | | | disease | pSport1 |
| S0438 | Liver Normal Met5No | Liver Normal | | | | pSport1 |
| | | Met5No | | | | |
| S0440 | Liver Tumour Met 5 Tu | Liver Tumour | | | | pSport1 |
| S0442 | Colon Normal | Colon Normal | | | | pSport1 |
| S0444 | Colon Tumor | Colon Tumour | | | disease | pSport1 |
| S0446 | Tongue Tumour | Tongue Tumour | | | | pSport1 |
| S0450 | Larynx Tumour | Larynx Tumour | | | | pSport1 |
| S0456 | Tongue Normal | Tongue Normal | | | | pSport1 |
| S0458 | Thyroid Normal (SDCA2 | Thyroid normal | | | | pSport1 |
| | No) | | | | | |
| S0460 | Thyroid Tumour | Thyroid Tumour | | | | pSport1 |
| S0464 | Larynx Normal | Larynx Normal | | | | pSport1 |
| S0468 | Ea.hy.926 cell line | Ea.hy.926 cell line | | | | pSport1 |
| S0470 | Adenocarcinoma | PYFD | | | disease | pSport1 |
| S0472 | Lung Mesothelium | PYBT | | | | pSport1 |
| S0474 | Human blood platelets | Platelets | Blood | | | Other |
| | | | platelets | | | |
| S0665 | Human Amygdala; re- | Amygdala | | | | Uni-ZAP XR |
| | excission | | | | | |
| S3012 | Smooth Muscle Serum | Smooth muscle | Pulmanary | Cell Line | | pBluescript |
| | Treated, Norm | | artery | | | |
| S3014 | Smooth muscle, serum | Smooth muscle | Pulmanary | Cell Line | | pBluescript |
| | induced, re-exc | | artery | | | |
| S6016 | H. Frontal Cortex, | H. Brain, Frontal | Brain | | disease | Uni-ZAP XR |
| | Epileptic | Cortex, Epileptic | | | | |
| S6024 | Alzheimers, spongy | Alzheimer's/Spongy | Brain | | disease | Uni-ZAP XR |
| | change | change | | | | |
| S6026 | Frontal Lobe, Dementia | Frontal Lobe | Brain | | | Uni-ZAP XR |
| | | dementia/Alzheimer's | | | | |
| S6028 | Human Manic Depression | Human Manic | Brain | | disease | Uni-ZAP XR |
| | Tissue | depression tissue | | | | |
| T0002 | Activated T-cells | Activated T-Cell, | Blood | Cell Line | | pBluescript |
| | | PBL fraction | | | | |
| T0003 | Human Fetal Lung | Human Fetal Lung | | | | pBluescript |
| | | | | | | SK− |
| T0004 | Human White Fat | Human White Fat | | | | pBluescript |
| | | | | | | SK− |
| T0006 | Human Pineal Gland | Human Pinneal | | | | pBluescript |
| | | Gland | | | | SK− |
| T0008 | Colorectal Tumor | Colorectal Tumor | | | disease | pBluescript |
| | | | | | | SK− |
| T0010 | Human Infant Brain | Human Infant Brain | | | | Other |
| T0023 | Human Pancreatic | Human Pancreatic | | | disease | pBluescript |
| | Carcinoma | Carcinoma | | | | SK− |
| T0039 | HSA 172 Cells | Human HSA 172 cell | | | | pBluescript |
| | | line | | | | SK− |
| T0040 | HSC 172 cells | SA 172 Cells | | | | pBluescript |
| | | | | | | SK− |
| T0041 | Jurkat T-cell G1 phase | Jurkat T-cell | | | | pBluescript |
| | | | | | | SK− |
| T0042 | Jurkat T-Cell, S phase | Jurkat T-Cell Line | | | | pBluescript |
| | | | | | | SK− |
| T0048 | Human Aortic | Human Aortic | | | | pBluescript |
| | Endothelium | Endothilium | | | | SK− |
| T0049 | Aorta endothelial cells + | Aorta endothelial | | | | pBluescript |
| | TNF-a | cells | | | | SK− |
| T0060 | Human White Adipose | Human White Fat | | | | pBluescript |
| | | | | | | SK− |
| T0067 | Human Thyroid | Human Thyroid | | | | pBluescript |
| | | | | | | SK− |
| T0068 | Normal Ovary, | Normal Ovary, | | | | pBluescript |
| | Premenopausal | Premenopausal | | | | SK− |
| T0069 | Human Uterus, normal | Human Uterus, | | | | pBluescript |
| | | normal | | | | SK− |
| T0082 | Human Adult Retina | Human Adult Retina | | | | pBluescript |
| | | | | | | SK− |
| T0103 | Human colon carcinoma | | | | | pBluescript |
| | (HCC) cell line | | | | | SK− |
| T0109 | Human (HCC) cell line | | | | | pBluescript |
| | liver (mouse) metastasis, | | | | | SK− |
| | remake | | | | | |
| T0110 | Human colon carcinoma | | | | | pBluescript |
| | (HCC) cell line, remake | | | | | SK− |
| T0114 | Human (Caco-2) cell line, | | | | | pBluescript |
| | adenocarcinoma, colon, | | | | | SK− |
| | remake | | | | | |
| T0115 | Human Colon Carcinoma | | | | | pBluescript |
| | (HCC) cell line | | | | | SK− |
| L0002 | Atrium cDNA library | | | | | |
| | Human heart | | | | | |
| L0005 | Clontech human aorta | | | | | |
| | polyA + mRNA (#6572) | | | | | |
| L0009 | EST from 8p21.3-p22 | | | | | |
| L0021 | Human adult (K. Okubo) | | | | | |
| L0022 | Human adult lung 3″ | | | | | |
| | directed MboI cDNA | | | | | |
| L0024 | Human brain A.R. Sanders | | | | | |
| L0040 | Human colon mucosa | | | | | |
| L0041 | Human epidermal | | | | | |
| | keratinocyte | | | | | |
| L0055 | Human promyelocyte | | | | | |
| L0065 | Liver HepG2 cell line. | | | | | |
| L0070 | Selected chromosome 21 | | | | | |
| | cDNA library | | | | | |
| L0097 | Subtracted human retinal | | | | | |
| | pigment epithelium (RPE) | | | | | |
| L0105 | Human aorta polyA + | aorta | | | | |
| | (T. Fujiwara) | | | | | |
| L0109 | Human brain cDNA | brain | | | | |
| L0118 | Human fetal brain S. | brain | | | | |
| | Meier-Ewert | | | | | |
| L0142 | Human placenta cDNA | placenta | | | | |
| | (T. Fujiwara) | | | | | |
| L0143 | Human placenta polyA + | placenta | | | | |
| | (T. Fujiwara) | | | | | |
| L0149 | D. K. F. Zphsnul | subthalamic nucleus | | | | |
| L0151 | Human testis (C. De | testis | | | | |
| | Smet) | | | | | |
| L0157 | Human fetal brain | | brain | | | |
| | (T. Fujiwara) | | | | | |
| L0163 | Human heart cDNA | | heart | | | |
| | (Y. Nakamura) | | | | | |
| L0169 | 4AF1/106/KO15 library | | | 4AF1/10 | | |
| | (Lap-Chee Tsui) | | | 6/K015 | | |
| L0179 | Human lung | lung | | GLC-82 | | |
| | adenocarcinoma (M. Wu) | adenocarcinoma | | | | |
| L0185 | Human immortalized | | | H574 and | | |
| | fibroblasts (H. L. Ozer) | | | its SV40- | | |
| | | | | transformed | | |
| | | | | sublines | | |
| L0194 | Human pancreatic cancer | pancreatic cancer | | Patu | | |
| | cell line Patu 8988t | | | 8988t | | |
| L0351 | Infant brain, Bento Soares | | | | | BA, M13- |
| | | | | | | derived |
| L0352 | Normalized infant brain, | | | | | BA, M13- |
| | Bento Soares | | | | | derived |
| L0355 | P, Human foetal Brain | | | | | Bluescript |
| | Whole tissue | | | | | |
| L0361 | Stratagene ovary | | ovary | | | Bluescript |
| | (#937217) | | | | | SK |
| L0362 | Stratagene ovarian cancer | | | | | Bluescript |
| | (#937219) | | | | | SK− |
| L0363 | NCI_CGAP_GC2 | germ cell tumor | | | | Bluescript |
| | | | | | | SK− |
| L0364 | NCI_CGAP_GC5 | germ cell tumor | | | | Bluescript |
| | | | | | | SK− |
| L0366 | Stratagene schizo brain | schizophrenic brain | | | | Bluescript |
| | S11 | S-11 frontal lobe | | | | SK− |
| L0367 | NCI_CGAP_Sch1 | Schwannoma tumor | | | | Bluescript |
| | | | | | | SK− |
| L0368 | NCI_CGAP_SS1 | synovial sarcoma | | | | Bluescript |
| | | | | | | SK− |
| L0369 | NCI_CGAP_AA1 | adrenal adenoma | adrenal gland | | | Bluescript |
| | | | | | | SK |
| L0370 | Johnston frontal cortex | pooled frontal lobe | brain | | | Bluescript |
| | | | | | | SK− |
| L0371 | NCI_CGAP_Br3 | breast tumor | breast | | | Bluescript |
| | | | | | | SK |
| L0372 | NCI_CGAP_Col2 | colon tumor | colon | | | Bluescript |
| | | | | | | SK− |
| L0373 | NCI_CGAP_Col1 | tumor | colon | | | Bluescript |
| | | | | | | SK− |
| L0374 | NCI_CGAP_Co2 | tumor | colon | | | Bluescript |
| | | | | | | SK |
| L0375 | NCI_CGAP_Kid6 | kidney tumor | kidney | | | Bluescript |
| | | | | | | SK− |
| L0376 | NCI_CGAP_Lar1 | larynx | larynx | | | Bluescript |
| | | | | | | SK− |
| L0378 | NCI_CGAP_Lu1 | lung tumor | lung | | | Bluescript |
| | | | | | | SK− |
| L0379 | NCI_CGAP_Lym3 | lymphoma | lymph node | | | Bluescript |
| | | | | | | SK− |
| L0381 | NCI_CGAP_HN4 | squamous cell | pharynx | | | Bluescript |
| | | carcinoma | | | | SK− |
| L0382 | NCI_CGAP_Pr25 | epithelium (cell line) | prostate | | | Bluescript |
| | | | | | | SK− |
| L0383 | NCI_CGAP_Pr24 | invasive tumor (cell | prostate | | | Bluescript |
| | | line) | | | | SK− |
| L0384 | NCI_CGAP_Pr23 | prostate tumor | prostate | | | Bluescript |
| | | | | | | SK− |
| L0386 | NCI_CGAP_HN3 | squamous cell | tongue | | | Bluescript |
| | | carcinoma from base | | | | SK− |
| | | of tongue | | | | |
| L0387 | NCI_CGAP_GCB0 | germinal center B- | tonsil | | | Bluescript |
| | | cells | | | | SK− |
| L0388 | NCI_CGAP_HN6 | normal gingiva (cell | | | | Bluescript |
| | | line from | | | | SK− |
| | | immortalized kerati | | | | |
| L0394 | H, Human adult Brain | | | | | gtl1 |
| | Cortex tissue | | | | | |
| L0415 | b4HB3MA Cot8-HAP-Ft | | | | | Lafmid BA |
| L0435 | Infant brain, LLNL array | | | | | lafmid BA |
| | of Dr. M. Soares 1NIB | | | | | |
| L0438 | normalized infant brain | total brain | brain | | | lafmid BA |
| | cDNA | | | | | |
| L0439 | Soares infant brain 1NIB | | whole brain | | | Lafmid BA |
| L0455 | Human retina cDNA | retina | eye | | | lambda gt10 |
| | randomly primed | | | | | |
| | sublibrary | | | | | |
| L0456 | Human retina cDNA | retina | eye | | | lambda gt10 |
| | Tsp509I-cleaved | | | | | |
| | sublibrary | | | | | |
| L0465 | TEST1, Human adult | | | | | lambda |
| | Testis tissue | | | | | nml149 |
| L0468 | HE6W | | | | | lambda zap |
| L0470 | BL29 Burkitt's | | | | | lambda ZAP |
| | lymphoma, Pascalis | | | | | 2 |
| | Sideras | | | | | |
| L0471 | Human fetal heart, | | | | | Lambda |
| | Lambda ZAP Express | | | | | ZAP Express |
| L0475 | KG1-a Lambda Zap | | | KG1-a | | Lambda Zap |
| | Express cDNA library | | | | | Express |
| | | | | | | (Stratagene) |
| L0480 | Stratagene cat#937212 | | | | | Lambda |
| | (1992) | | | | | ZAP, |
| | | | | | | pBluescript |
| | | | | | | SK(−) |
| L0481 | CD34 + DIRECTIONAL | | | | | Lambda |
| | | | | | | ZAPII |
| L0483 | Human pancreatic islet | | | | | Lambda |
| | | | | | | ZAPII |
| L0485 | STRATAGENE Human | skeletal muscle | leg muscle | | | Lambda |
| | skeletal muscle cDNA | | | | | ZAPII |
| | library, cat. #936215. | | | | | |
| L0493 | NCI_CGAP_Ov26 | papillary serous | ovary | | | pAMP1 |
| | | carcinoma | | | | |
| L0499 | NCI_CGAP_HSC2 | stem cell 34+/38+ | bone marrow | | | pAMP1 |
| L0500 | NCI_CGAP_Brn20 | oligodendroglioma | brain | | | pAMP1 |
| L0502 | NCI_CGAP_Br15 | adenocarcinoma | breast | | | pAMP1 |
| L0509 | NCI_CGAP_Lu26 | invasive | lung | | | pAMP1 |
| | | adenocarcinoma | | | | |
| L0512 | NCI_CGAP_Ov36 | borderline ovarian | ovary | | | pAMP1 |
| | | carcinoma | | | | |
| L0515 | NCI_CGAP_Ov32 | papillary serous | ovary | | | pAMP1 |
| | | carcinoma | | | | |
| L0517 | NCI_CGAP_Pr1 | | | | | pAMP10 |
| L0518 | NCI_CGAP_Pr2 | | | | | pAMP10 |
| L0519 | NCI_CGAP_Pr3 | | | | | pAMP10 |
| L0520 | NCI_CGAP_Alv1 | alveolar | | | | pAMP10 |
| | | rhabdomyosarcoma | | | | |
| L0521 | NCI_CGAP_Ew1 | Ewing's sarcoma | | | | pAMP10 |
| L0522 | NCI_CGAP_Kid1 | kidney | | | | pAMP10 |
| L0523 | NCI_CGAP_Lip2 | liposarcoma | | | | pAMP10 |
| L0526 | NCI_CGAP_Pr12 | metastatic prostate | | | | pAMP10 |
| | | bone lesion | | | | |
| L0527 | NCI_CGAP_0v2 | ovary | | | | pAMP10 |
| L0528 | NCI_CGAP_Pr5 | prostate | | | | pAMP10 |
| L0529 | NCI_CGAP_Pr6 | prostate | | | | pAMP10 |
| L0530 | NCI_CGAP_Pr8 | prostate | | | | pAMP10 |
| L0532 | NCI_CGAP_Thy1 | thyroid | | | | pAMP10 |
| L0533 | NCI_CGAP_HSC1 | stem cells | bone marrow | | | pAMP10 |
| L0534 | Chromosome 7 Fetal | brain | brain | | | pAMP10 |
| | Brain cDNA Library | | | | | |
| L0536 | NCI_CGAP_Br4 | normal ductal tissue | breast | | | pAMP10 |
| L0537 | NCI_CGAP_Ov6 | normal cortical | ovary | | | pAMP10 |
| | | stroma | | | | |
| L0540 | NCI_CGAP_Pr10 | invasive prostate | prostate | | | pAMP10 |
| | | tumor | | | | |
| L0541 | NCI_CGAP_Pr7 | low-grade prostatic | prostate | | | pAMP10 |
| | | neoplasia | | | | |
| L0542 | NCI_CGAP_Pr11 | normal prostatic | prostate | | | pAMP10 |
| | | epithelial cells | | | | |
| L0543 | NCI_CGAP_Pr9 | normal prostatic | prostate | | | pAMP10 |
| | | epithelial cells | | | | |
| L0544 | NCI_CGAP_Pr4 | prostatic | prostate | | | pAMP10 |
| | | intraepithelial | | | | |
| | | neoplasia - high | | | | |
| | | grade | | | | |
| L0545 | NCI_CGAP_Pr4.1 | prostatic | prostate | | | pAMP10 |
| | | intraepithelial | | | | |
| | | neoplasia - high | | | | |
| | | grade | | | | |
| L0555 | NCI_CGAP_Lu34 | large cell carcinoma | lung | | | pAMP10 |
| L0558 | NCI_CGAP_Ov40 | endometrioid | ovary | | | pAMP10 |
| | | ovarian metastasis | | | | |
| L0559 | NCI_CGAP_Ov39 | papillary serous | ovary | | | pAMP10 |
| | | ovarian metastasis | | | | |
| L0562 | Chromosome 7 HeLa | | | HeLa cell | | pAMP10 |
| | cDNA Library | | | line; | | |
| | | | | ATCC | | |
| L0564 | Jia bone marrow stroma | bone marrow stroma | | | | pBluescript |
| L0565 | Normal Human | Bone | Hip | | | pBluescript |
| | Trabecular Bone Cells | | | | | |
| L0579 | Human fetal brain | cerebrum and | | | | pBluescript |
| | QBoqin2 | cerebellum | | | | SK |
| L0581 | Stratagene liver (#937224) | | liver | | | pBluescript |
| | | | | | | SK |
| L0584 | Stratagene cDNA library | | | | | pBluescript |
| | Human heart, cat#936208 | | | | | SK(+) |
| L0588 | Stratagene endothelial cell | | | | | pBluescript |
| | 937223 | | | | | SK− |
| L0589 | Stratagene fetal retina | | | | | pBluescript |
| | 937202 | | | | | SK− |
| L0590 | Stratagene fibroblast | | | | | pBluescript |
| | (#937212) | | | | | SK− |
| L0591 | Stratagene HeLa cell s3 | | | | | pBluescript |
| | 937216 | | | | | SK− |
| L0592 | Stratagene hNT neuron | | | | | pBluescript |
| | (#937233) | | | | | SK− |
| L0593 | Stratagene | | | | | pBluescript |
| | neuroepithelium | | | | | SK− |
| | (#937231) | | | | | |
| L0594 | Stratagene | | | | | pBluescript |
| | neuroepithelium | | | | | SK− |
| | NT2RAMI 937234 | | | | | |
| L0595 | Stratagene NT2 neuronal | neuroepithehal cells | brain | | | pBluescript |
| | precursor 937230 | | | | | SK− |
| L0596 | Stratagene colon | | colon | | | pBluescript |
| | (#937204) | | | | | SK− |
| L0597 | Stratagene corneal stroma | | cornea | | | pBluescript |
| | (#937222) | | | | | SK− |
| L0598 | Morton Fetal Cochlea | cochlea | ear | | | pBluescript |
| | | | | | | SK− |
| L0599 | Stratagene lung (#937210) | | lung | | | pBluescript |
| | | | | | | SK− |
| L0600 | Weizmann Olfactory | olfactory epithelium | nose | | | pBluescript |
| | Epithelium | | | | | SK− |
| L0601 | Stratagene pancreas | | pancreas | | | pBluescript |
| | (#937208) | | | | | SK− |
| L0602 | Pancreatic Islet | pancreatic islet | pancreas | | | pBluescript |
| | | | | | | SK− |
| L0603 | Stratagene placenta | | placenta | | | pBluescript |
| | (#937225) | | | | | SK− |
| L0604 | Stratagene muscle 937209 | muscle | skeletal | | | pBluescript |
| | | | muscle | | | SK− |
| L0605 | Stratagene fetal spleen | fetal spleen | spleen | | | pBluescript |
| | (#937205) | | | | | SK− |
| L0606 | NCI_CGAP_Lym5 | follicular lymphoma | lymph node | | | pBluescript |
| | | | | | | SK− |
| L0607 | NCI_CGAP_Lym6 | mantle cell | lymph node | | | pBluescript |
| | | lymphoma | | | | SK− |
| L0608 | Stratagene lung carcinoma | lung carcinoma | lung | NCI-H69 | | pBluescript |
| | 937218 | | | | | SK− |
| L0609 | Schiller astrocytoma | astrocytoma | brain | | | pBluescript |
| | | | | | | SK− |
| | | | | | | (Stratagene) |
| L0611 | Schiller meningioma | meningioma | brain | | | pBluescript |
| | | | | | | SK− |
| | | | | | | (Stratagen |
| L0612 | Schiller | oligodendroglioma | brain | | | pBluescript |
| | oligodendroglioma | | | | | SK− |
| L0617 | Chromosome 22 exon | | | | | pBluescriptII |
| | | | | | | KS+ (stratagene) |
| L0618 | Chromosome 9 exon | | | | | pBluescriptII |
| | | | | | | KS+ |
| L0622 | HMI | | | | | pcDNAII |
| | | | | | | (Invitrogen) |
| L0623 | HM3 | pectoral muscle | | | | pcDNAII |
| | | (after mastectomy) | | | | (Invitrogen) |
| L0625 | NCI_CGAP_AR1 | bulk alveolar tumor | | | | pCMV- |
| | | | | | | SPORT2 |
| L0626 | NCI_CGAP_GC1 | bulk germ cell | | | | pCMV- |
| | | seminoma | | | | SPORT2 |
| L0627 | NCI_CGAP_Co1 | bulk tumor | colon | | | pCMV- |
| | | | | | | SPORT2 |
| L0629 | NCI_CGAP_Me13 | metastatic | bowel (skin | | | pCMV- |
| | | melanoma to bowel | primary) | | | SPORT4 |
| L0630 | NCI_CGAP_CNS1 | substantia nigra | brain | | | pCMV- |
| | | | | | | SPORT4 |
| L0631 | NCI_CGAP_Br7 | | breast | | | pCMV- |
| | | | | | | SPORT4 |
| L0634 | NCI_CGAP_Ov8 | serous | ovary | | | pCMV- |
| | | adenocarcinoma | | | | SPORT4 |
| L0635 | NCI_CGAP_PNS1 | dorsal root ganglion | peripheral | | | pCMV- |
| | | | nervous | | | SPORT4 |
| | | | system | | | |
| L0636 | NCI_CGAP_Pit1 | four pooled pituitary | brain | | | pCMV- |
| | | adenomas | | | | SPORT6 |
| L0637 | NCI_CGAP_Brn53 | three pooled | brain | | | pCMV- |
| | | meningiomas | | | | SPORT6 |
| L0638 | NCI_CGAP_Brn35 | tumor, 5 pooled (see | brain | | | pCMV- |
| | | description) | | | | SPORT6 |
| L0639 | NCI_CGAP_Brn52 | tumor, 5 pooled (see | brain | | | pCMV- |
| | | description) | | | | SPORT6 |
| L0640 | NCI_CGAP_Br18 | four pooled high- | breast | | | pCMV- |
| | | grade tumors, | | | | SPORT6 |
| | | including two prima | | | | |
| L0641 | NCI_CGAP_Co17 | juvenile granulosa | colon | | | pCMV- |
| | | tumor | | | | SPORT6 |
| L0642 | NCI_CGAP_Co18 | moderately | colon | | | pCMV- |
| | | differentiated | | | | SPORT6 |
| | | adenocarcinoma | | | | |
| L0643 | NCI_CGAP_Co19 | moderately | colon | | | pCMV- |
| | | differentiated | | | | SPORT6 |
| | | adenocarcinoma | | | | |
| L0644 | NCI_CGAP_Co20 | moderately | colon | | | pCMV- |
| | | differentiated | | | | SPORT6 |
| | | adenocarcinoma | | | | |
| L0645 | NCI_CGAP_Co21 | moderately | colon | | | pCMV- |
| | | differentiated | | | | SPORT6 |
| | | adenocarcinoma | | | | |
| L0646 | NCI_CGAP_Co14 | moderately- | colon | | | pCMV- |
| | | differentiated | | | | SPORT6 |
| | | adenocarcinoma | | | | |
| L0647 | NCI_CGAP_Sar4 | five pooled | connective | | | pCMV- |
| | | sarcomas, including | tissue | | | SPORT6 |
| | | myxoid liposarcoma | | | | |
| L0648 | NCI_CGAP_Eso2 | squamous cell | esophagus | | | pCMV- |
| | | carcinoma | | | | SPORT6 |
| L0649 | NCI_CGAP_GU1 | 2 pooled high-grade | genitourinary | | | pCMV- |
| | | transitional cell | tract | | | SPORT6 |
| | | tumors | | | | |
| L0650 | NCI_CGAP_Kid13 | 2 pooled Wilms″ | kidney | | | pCMV- |
| | | tumors, one primary | | | | SPORT6 |
| | | and one metast | | | | |
| L0651 | NCI_CGAP_Kid8 | renal cell tumor | kidney | | | pCMV- |
| | | | | | | SPORT6 |
| L0652 | NCI_CGAP_Lu27 | four pooled poorly- | lung | | | pCMV- |
| | | differentiated | | | | SPORT6 |
| | | adenocarcinomas | | | | |
| L0653 | NCI_CGAP_Lu28 | two pooled | lung | | | pCMV- |
| | | squamous cell | | | | SPORT6 |
| | | carcinomas | | | | |
| L0654 | NCI_CGAP_Lu31 | | lung, cell line | | | pCMV |
| | | | | | | SPORT6 |
| L0655 | NCI_CGAP_Lym12 | lymphoma, | lymph node | | | pCMV- |
| | | follicular mixed | | | | SPORT6 |
| | | small and large cell | | | | |
| L0656 | NCI_CGAP_Ov38 | normal epithelium | ovary | | | pCMV- |
| | | | | | | SPORT6 |
| L0657 | NCI_CGAP_Ov23 | tumor, 5 pooled (see | ovary | | | pCMV- |
| | | description) | | | | SPORT6 |
| L0658 | NCI_CGAP_Ov35 | tumor, 5 pooled (see | ovary | | | pCMV- |
| | | description) | | | | SPORT6 |
| L0659 | NCI_CGAP_Pan1 | adenocarcinoma | pancreas | | | pCMV- |
| | | | | | | SPORT6 |
| L0661 | NCI_CGAP_Mel15 | malignant | skin | | | pCMV- |
| | | melanoma, | | | | SPORT6 |
| | | metastatic to lymph | | | | |
| | | node | | | | |
| L0662 | NCI_CGAP_Gas4 | poorly differentiated | stomach | | | pCMV- |
| | | adenocarcinoma | | | | SPORT6 |
| | | with signet r | | | | |
| L0663 | NCI_CGAP_Ut2 | moderately- | uterus | | | pCMV- |
| | | differentiated | | | | SPORT6 |
| | | endometrial | | | | |
| | | adenocarcino | | | | |
| L0664 | NCI_CGAP_Ut3 | poorly-differentiated | uterus | | | pCMV- |
| | | endometrial | | | | SPORT6 |
| | | adenocarcinoma, | | | | |
| L0665 | NCI_CGAP_Ut4 | serous papillary | uterus | | | pCMV- |
| | | carcinoma, high | | | | SPORT6 |
| | | grade, 2 pooled t | | | | |
| L0666 | NCI_CGAP_Ut1 | well-differentiated | uterus | | | pCMV- |
| | | endometrial | | | | SPORT6 |
| | | adenocarcinoma, 7 | | | | |
| L0667 | NCI_CGAP_CML1 | myeloid cells, 18 | whole blood | | | pGMV- |
| | | pooled CML cases, | | | | SPORT6 |
| | | BCR/ABL rearra | | | | |
| L0681 | Stanley Frontal SN | frontal lobe (see | brain | | | pCR2.1 |
| | individual | description) | | | | (Invitrogen) |
| L0686 | Stanley Frontal SN pool 2 | frontal lobe (see | brain | | | pCR2.1 |
| | | description) | | | | TOPO |
| | | | | | | (Invitrogen) |
| L0697 | Testis 1 | | | | | PGEM |
| | | | | | | 5zf(+) |
| L0698 | Testis 2 | | | | | PGEM |
| | | | | | | 5zf(+) |
| L0717 | Gessler Wilms tumor | | | | | pSPORT1 |
| L0720 | PN001-Normal Human | | prostate | | | pSport1 |
| | Prostate | | | | | |
| L0731 | Soares_pregnant_uterus_{—} | | uterus | | | pT7T3-Pac |
| | NbHPU | | | | | |
| L0738 | Human colorectal cancer | | | | | pT7T3D |
| L0740 | Soares melanocyte | melanocyte | | | | pT7T3D |
| | 2NbHM | | | | | (Pharmacia) |
| | | | | | | with a |
| | | | | | | modified |
| | | | | | | polylinker |
| L0741 | Soares adult brain | | brain | | | pT7T3D |
| | N2b4HB55Y | | | | | (Pharmacia) |
| | | | | | | with a |
| | | | | | | modified |
| | | | | | | polylinker |
| L0742 | Soares adult brain | | brain | | | pT7T3D |
| | N2b5HB55Y | | | | | (Pharmacia) |
| | | | | | | with a |
| | | | | | | modified |
| | | | | | | polylinker |
| L0743 | Soares breast 2NbHBst | | breast | | | pT7T3D |
| | | | | | | (Pharmacia) |
| | | | | | | with a |
| | | | | | | modified |
| | | | | | | polylinker |
| L0744 | Soares breast 3NbHBst | | breast | | | pT7T3D |
| | | | | | | (Pharmacia) |
| | | | | | | with a |
| | | | | | | modified |
| | | | | | | polylinker |
| L0745 | Soares retina N2b4HR | retina | eye | | | pT7T3D |
| | | | | | | (Pharmacia) |
| | | | | | | with a |
| | | | | | | modified |
| | | | | | | polylinker |
| L0746 | Soares retina N2b5HR | retina | eye | | | pT7T3D |
| | | | | | | (Pharmacia) |
| | | | | | | with a |
| | | | | | | modified |
| | | | | | | polylinker |
| L0747 | Soares_fetal_heart_NbHH | | heart | | | pT7T3D |
| | 19W | | | | | (Pharmacia) |
| | | | | | | with a |
| | | | | | | modified |
| | | | | | | polylinker |
| L0748 | Soares fetal liver spleen | | Liver and | | | pT7T3D |
| | 1NFLS | | Spleen | | | (Pharmacia) |
| | | | | | | with a |
| | | | | | | modified |
| | | | | | | polylinker |
| L0749 | Soares_fetal_liver_spleen | | Liver and | | | pT7T3D |
| | _INFLS_SI | | Spleen | | | (Pharmacia) |
| | | | | | | with a |
| | | | | | | modified |
| | | | | | | polylinker |
| L0750 | Soares_fetal_lung_NbHL1 | | lung | | | pT7T3D |
| | 9W | | | | | (Pharmacia) |
| | | | | | | with a |
| | | | | | | modified |
| | | | | | | polylinker |
| L0751 | Soares ovary tumor | ovarian tumor | ovary | | | pT7T3D |
| | NbHOT | | | | | (Pharmacia) |
| | | | | | | with a |
| | | | | | | modified |
| | | | | | | polylinker |
| L0752 | Soares_parathyroid _tumor | parathyroid tumor | parathyroid | | | pT7T3D |
| | NbHPA | | gland | | | (Pharmacia) |
| | | | | | | with a |
| | | | | | | modified |
| | | | | | | polylinker |
| L0753 | Soares_pineal_gland_N3H | | pineal gland | | | pT7T3D |
| | PG | | | | | (Pharmacia) |
| | | | | | | with a |
| | | | | | | modified |
| | | | | | | polylinker |
| L0754 | Soares placenta Nb2HP | | placenta | | | pT7T3D |
| | | | | | | (Pharmacia) |
| | | | | | | with a |
| | | | | | | modified |
| | | | | | | polylinker |
| L0755 | Soares_placenta_Sto9wee | | placenta | | | pT7T3D |
| | ks_2NbHP8to9W | | | | | (Pharmacia) |
| | | | | | | with a |
| | | | | | | modified |
| | | | | | | polylinker |
| L0756 | Soares_multiple_sclerosis | multiple sclerosis | | | | pT7T3D |
| | _2NbHMSP | lesions | | | | (Pharmacia) |
| | | | | | | with a |
| | | | | | | modified |
| | | | | | | polylinker |
| | | | | | | V_TYPE |
| L0757 | Soares_senescent_fibrobla | senescent fibroblast | | | | pT7T3D |
| | sts_NbHSF | | | | | (Pharmacia) |
| | | | | | | with a |
| | | | | | | modified |
| | | | | | | polylinker |
| | | | | | | V_TYPE |
| L0758 | Soares_testis_NHT | | | | | pT7T3D-Pac |
| | | | | | | (Pharmacia) |
| | | | | | | with a |
| | | | | | | modified |
| | | | | | | polylinker |
| L0759 | Soares_total_fetus_Nb2H | | | | | pT7T3D-Pac |
| | F8_9w | | | | | (Pharmacia) |
| | | | | | | with a |
| | | | | | | modified |
| | | | | | | polylinker |
| L0761 | NCI_CGAP_CLL1 | B-cell, chronic | | | | pT7T3D-Pac |
| | | lymphotic leukemia | | | | (Pharmacia) |
| | | | | | | with a |
| | | | | | | modified |
| | | | | | | polylinker |
| L0762 | NCI_CGAP_Br1.1 | breast | | | | pT7T3D-Pac |
| | | | | | | (Pharmacia) |
| | | | | | | with a |
| | | | | | | modified |
| | | | | | | polylinker |
| L0763 | NCI_CGAP_Br2 | breast | | | | pT7T3D-Pac |
| | | | | | | (Pharmacia) |
| | | | | | | with a |
| | | | | | | modified |
| | | | | | | polylinker |
| L0764 | NCI_CGAP_Co3 | colon | | | | pT7T3D-Pac |
| | | | | | | (Pharmacia) |
| | | | | | | with a |
| | | | | | | modified |
| | | | | | | polylinker |
| L0765 | NCI_{—CGAP}_Co4 | colon | | | | pT7T3D-Pac |
| | | | | | | (Pharmacia) |
| | | | | | | with a |
| | | | | | | modified |
| | | | | | | polylinker |
| L0766 | NCI_CGAP_GCB1 | germinal center B | | | | pT7T3D-Pac |
| | | cell | | | | (Pharmacia) |
| | | | | | | with a |
| | | | | | | modified |
| | | | | | | polylinker |
| L0767 | NCI_CGAP_GC3 | pooled germ cell | | | | pT7T3D-Pac |
| | | tumors | | | | (Pharmacia) |
| | | | | | | with a |
| | | | | | | modified |
| | | | | | | polylinker |
| L0768 | NCI_CGAP_GC4 | pooled germ cell | | | | pT7T3D-Pac |
| | | tumors | | | | (Pharmacia) |
| | | | | | | with a |
| | | | | | | modified |
| | | | | | | polylinker |
| L0769 | NCI_CGAP_Brn25 | anaplastic | brain | | | pT7T3D-Pac |
| | | oligodendroglioma | | | | (Pharmacia) |
| | | | | | | with a |
| | | | | | | modified |
| | | | | | | polylinker |
| L0770 | NCI_CGAP_Brn23 | glioblastoma | brain | | | pT7T3D-Pac |
| | | (pooled) | | | | (Pharmacia) |
| | | | | | | with a |
| | | | | | | modified |
| | | | | | | polylinker |
| L0771 | NCI_CGAP_Co8 | adenocarcinoma | colon | | | pT7T3D-Pac |
| | | | | | | (Pharmacia) |
| | | | | | | with a |
| | | | | | | modified |
| | | | | | | polylinker |
| L0772 | NCI_CGAP_Co10 | colon tumor RER+ | colon | | | pT7T3D-Pac |
| | | | | | | (Pharmacia) |
| | | | | | | with a |
| | | | | | | modified |
| | | | | | | polylinker |
| L0773 | NCI_CGAP_Co9 | colon tumor RER+ | colon | | | pT7T3D-Pac |
| | | | | | | (Pharmacia) |
| | | | | | | with a |
| | | | | | | modified |
| | | | | | | polylinker |
| L0774 | NCI_CGAP_Kid3 | | kidney | | | pT7T3D-Pac |
| | | | | | | (Pharmacia) |
| | | | | | | with a |
| | | | | | | modified |
| | | | | | | polylinker |
| L0775 | NCI_CGAP_Kid5 | 2 pooled tumors | kidney | | | pT7T3D-Pac |
| | | (clear cell type) | | | | (Pharmacia) |
| | | | | | | with a |
| | | | | | | modified |
| | | | | | | polylinker |
| L0776 | NCI_CGAP_Lu5 | carcinoid | lung | | | pT7T3D-Pac |
| | | | | | | (Pharmacia) |
| | | | | | | with a |
| | | | | | | modified |
| | | | | | | polylinker |
| L0777 | Soares_NhHMPu_S1 | Pooled human | mixed (see | | | pT7T3D-Pac |
| | | melanocyte, fetal | below) | | | (Pharmacia) |
| | | heart, and pregnant | | | | with a |
| | | | | | | modified |
| | | | | | | polylinker |
| L0778 | Barstead pancreas | | pancreas | | | pT7T3D-Pac |
| | HPLRB1 | | | | | (Pharmacia) |
| | | | | | | with a |
| | | | | | | modified |
| | | | | | | polylinker |
| L0779 | Soares_NFL_T_GBC_S1 | | pooled | | | pT7T3D-Pac |
| | | | | | | (Pharmacia) |
| | | | | | | with a |
| | | | | | | modified |
| | | | | | | polylinker |
| L0780 | Soares_NSF_F8_9W_OT | | pooled | | | pT7T3D-Pac |
| | _PA_P_S1 | | | | | (Pharmacia) |
| | | | | | | with a |
| | | | | | | modified |
| | | | | | | polylinker |
| L0782 | NCI_CGAP_Pr21 | normal prostate | prostate | | | pT7T3D-Pac |
| | | | | | | (Pharmacia) |
| | | | | | | with a |
| | | | | | | modified |
| | | | | | | polylinker |
| L0783 | NCI_CGAP_Pr22 | normal prostate | prostate | | | pT7T3D-Pac |
| | | | | | | (Pharmacia) |
| | | | | | | with a |
| | | | | | | modified |
| | | | | | | polylinker |
| L0784 | NCI_CGAP_Lei2 | leiomyosarcoma | soft tissue | | | pT7T3D-Pac |
| | | | | | | (Pharmacia) |
| | | | | | | with a |
| | | | | | | modified |
| | | | | | | polylinker |
| L0785 | Barstead spleen HPLRB2 | | spleen | | | pT7T3D-Pac |
| | | | | | | (Pharmacia) |
| | | | | | | with a |
| | | | | | | modified |
| | | | | | | polylinker |
| L0786 | Soares_NbHFB | | whole brain | | | pT7T3D-Pac |
| | | | | | | (Pharmacia) |
| | | | | | | with a |
| | | | | | | modified |
| | | | | | | polylinker |
| L0787 | NCI_CGAP_Sub1 | | | | | pT7T3D-Pac |
| | | | | | | (Pharmacia) |
| | | | | | | with a |
| | | | | | | modified |
| | | | | | | polylinker |
| L0788 | NCI_CGAP_Sub2 | | | | | pT7T3D-Pac |
| | | | | | | (Pharmacia) |
| | | | | | | with a |
| | | | | | | modified |
| | | | | | | polylinker |
| L0789 | NCI_CGAP_Sub3 | | | | | pT7T3D-Pac |
| | | | | | | (Pharmacia) |
| | | | | | | with a |
| | | | | | | modified |
| | | | | | | polylinker |
| L0790 | NCI_GGAP_Sub4 | | | | | pT7T3D-Pac |
| | | | | | | (Pharmacia) |
| | | | | | | with a |
| | | | | | | modified |
| | | | | | | polylinker |
| L0791 | NCI_CGAP_Sub5 | | | | | pT7T3D-Pac |
| | | | | | | (Pharmacia) |
| | | | | | | with a |
| | | | | | | modified |
| | | | | | | polylinker |
| L0792 | NCI_CGAP_Sub6 | | | | | pT7T3D-Pac |
| | | | | | | (Pharmacia) |
| | | | | | | with a |
| | | | | | | modified |
| | | | | | | polylinker |
| L0793 | NCI_CGAP_Sub7 | | | | | pT7T3D-Pac |
| | | | | | | (Pharmacia) |
| | | | | | | with a |
| | | | | | | modified |
| | | | | | | polylinker |
| L0794 | NCI_CGAP_GC6 | pooled germ cell | | | | pT7T3D-Pac |
| | | tumors | | | | (Pharmacia) |
| | | | | | | with a |
| | | | | | | modified |
| | | | | | | polylinker |
| L0796 | NCI_CGAP_Brn50 | medulloblastoma | brain | | | pT7T3D-Pac |
| | | | | | | (Pharmacia) |
| | | | | | | with a |
| | | | | | | modified |
| | | | | | | polylinker |
| L0800 | NCI_CGAP_Co16 | colon tumor, RER+ | colon | | | pT7T3D-Pac |
| | | | | | | (Pharmacia) |
| | | | | | | with a |
| | | | | | | modified |
| | | | | | | polylinker |
| L0803 | NCI_CGAP_Kid11 | | kidney | | | pT7T3D-Pac |
| | | | | | | (Pharmacia) |
| | | | | | | with a |
| | | | | | | modified |
| | | | | | | polylinker |
| L0804 | NCI_CGAP_Kid 12 | 2 pooled tumors | kidney | | | pT7T3D-Pac |
| | | (clear cell type) | | | | (Pharmacia) |
| | | | | | | with a |
| | | | | | | modified |
| | | | | | | polylinker |
| L0805 | NCI_CGAP_Lu24 | carcinoid | lung | | | pT7T3D-Pac |
| | | | | | | (Pharmacia) |
| | | | | | | with a |
| | | | | | | modified |
| | | | | | | polylinker |
| L0806 | NCI_CGAP_Lu 19 | squamous cell | lung | | | pT7T3D-Pac |
| | | carcinoma, poorly | | | | (Pharmacia) |
| | | differentiated (4 | | | | with a |
| | | | | | | modified |
| | | | | | | polylinker |
| L0807 | NCI_CGAP_Ov18 | fibrotheoma | ovary | | | pT7T3D-Pac |
| | | | | | | (Pharmacia) |
| | | | | | | with a |
| | | | | | | modified |
| | | | | | | polylinker |
| L0808 | Barstead prostate BPH | | prostate | | | pT7T3D-Pac |
| | HPLRB4 1 | | | | | (Pharmacia) |
| | | | | | | with a |
| | | | | | | modified |
| | | | | | | polylinker |
| L0809 | NCI_CGAP_Pr28 | | prostate | | | pT7T3D-Pac |
| | | | | | | (Pharmacia) |
| | | | | | | with a |
| | | | | | | modified |
| | | | | | | polylinker |
| L2251 | Human fetal lung | Fetal lung | | | | |

[0090] TABLE 5

| OMIM | |
|---|---|
| Reference | Description |
| 100730 | Myasthenia gravis, neonatal transient |
| 106300 | Ankylosing spondylitis |
| 108800 | Atrial septal defect, secundum type |
| 118800 | Choreoathetosis, familial paroxysmal |
| 120110 | Metaphyseal chondrodysplasia, Schmid type |
| 120290 | OSMED syndrome, 215150 |
| 120290 | Stickler syndrome, type II, 184840 |
| 120810 | C4 deficiency |
| 120820 | C4 deficiency |
| 121014 | Heterotaxia, visceroatrial, autosomal recessive |
| 123660 | Cataract, Coppock-like |
| 125660 | Myopathy, desminopathic |
| 125660 | Cardiomyopathy |
| 126650 | Chloride diarrhea, congenital, Finnish type, 214700 |
| 126650 | Colon cancer |
| 135600 | Ehlers-Danlos syndrome, type X |
| 142470 | [Hereditary persistence of fetal hemoglobin, heterocellular] |
| 142857 | Pemphigoid, susceptibility to |
| 142858 | Beryllium disease, chronic, susceptibility to |
| 147450 | Amytrophic lateral sclerosis, due to SOD1 deficiency, 105400 |
| 150270 | Laryngeal adductor paralysis |
| 154276 | Malignant hyperthermia susceptibility 3 |
| 156225 | Muscular dystrophy, congenital merosin-deficient |
| 157655 | Lactic acidosis due to defect in iron-sulfur cluster of |
| | complex I |
| 164200 | Oculodentodigital dysplasia |
| 164200 | Syndactyly, type III, 186100 |
| 167250 | Paget disease of bone |
| 170261 | Bare lymphocyte syndrome, type I, due to TAP2 deficiency |
| 173360 | Thrombophilia due to excessive plasminogen activator |
| | inhibitor |
| 173360 | Hemorrhagic diathesis due to PAIl deficiency |
| 176261 | Jervell and Lange-Nielsen syndrome, 220400 |
| 177900 | Psoriasis susceptibility-1 |
| 179450 | Ragweed sensitivity |
| 186860 | Leukemia/lymphoma, T-cell |
| 193500 | Rhabdomyosarcoma, alveolar, 268220 |
| 193500 | Waardenburg syndrome, type I |
| 193500 | Waardenburg syndrome, type III, 148820 |
| 193500 | Craniofacial-deafness-hand syndrome, 122880 |
| 201460 | Acyl-CoA dehydrogenase, long chain, deficiency of |
| 201910 | Adrenal hyperplasia, congenital, due to 21-hydroxylase |
| | deficiency |
| 205100 | Amyotrophic lateral sclerosis, juvenile |
| 217000 | C2 deficiency |
| 222100 | Diabetes mellitus, insulin-dependent-1 |
| 233100 | [Renal glucosuria] |
| 235200 | Hemochromatosis |
| 237300 | Carbamoylphosphate synthetase I deficiency |
| 248611 | Maple syrup urine disease, type Ib |
| 253270 | Multiple carboxylase deficiency, biotin-responsive |
| 256550 | Sialidosis, type I |
| 256550 | Sialidosis, type II |
| 262000 | Bjornstad syndrome |
| 305450 | FG syndrome |
| 309600 | Allan-Herndon syndrome |
| 309605 | Mental retardation, X-linked, syndromic-4, with congenital |
| | contractures and low fingertip arches |
| 311360 | Ovarian failure, premature |
| 314580 | Wieacker-Wolff syndrome |
| 600202 | Dyslexia, specific, 2 |
| 600261 | Ehlers-Danlos-like syndrome |
| 600266 | Resistance/susceptibility to TB, etc. |
| 601277 | Ichthyosis, lamellar, type 2 |
| 601316 | Deafness, autosomal dominant 10 |
| 601318 | Diabetes mellitus, insulin-dependent, 13 |
| 601399 | Platelet disorder, familial, with associated |
| | myeloid malignancy |
| 601410 | Diabetes mellitus, transient neonatal |
| 601757 | Rhizomelic chondrodysplasia punctata, type 1, 215100 |
| 601868 | Deafness, autosomal dominant 13 |
| 602136 | Refsum disease, infantile, 266510 |
| 602136 | Zellweger syndrome-1,214100 |
| 602136 | Adrenoleukodystrophy, neonatal, 202370 |
| 602280 | Retinitis pigmentosa-14,600132 |
| 602447 | Coronary artery disease, susceptibility to |
| 602475 | Ossification of posterior longitudinal ligament of spine |

[0091] Polynucleotide and Polypeptide Variants

[0092] The present invention is directed to variants of the polynucleotide sequence disclosed in SEQ ID NO:X or the complementary strand thereto, nucleotide sequences encoding the polypeptide of SEQ ID NO:Y, the nucleotide sequence of SEQ ID NO:X encoding the polypeptide sequence as defined in column 7 of Table 1A, nucleotide sequences encoding the polypeptide as defined in column 7 of Table 1A, the nucleotide sequence as defined in columns 8 and 9 of Table 2, nucleotide sequences encoding the polypeptide encoded by the nucleotide sequence as defined in columns 8 and 9 of Table 2, the nucleotide sequence as defined in column 6 of Table 1B, nucleotide sequences encoding the polypeptide encoded by the nucleotide sequence as defined in column 6 of Table 1B, the cDNA sequence contained in Clone ID NO:Z, and/or nucleotide sequences encoding the polypeptide encoded by the cDNA sequence contained in Clone ID NO:Z.

[0093] The present invention also encompasses variants of the polypeptide sequence disclosed in SEQ ID NO:Y, the polypeptide sequence as defined in column 7 of Table 1A, a polypeptide sequence encoded by the polynucleotide sequence in SEQ ID NO:X, a polypeptide sequence encoded by the nucleotide sequence as defined in columns 8 and 9 of Table 2, a polypeptide sequence encoded by the nucleotide sequence as defined in column 6 of Table 1B, a polypeptide sequence encoded by the complement of the polynucleotide sequence in SEQ ID NO:X, and/or a polypeptide sequence encoded by the cDNA sequence contained in Clone ID NO:Z.

[0094] “Variant” refers to a polynucleotide or polypeptide differing from the polynucleotide or polypeptide of the present invention, but retaining essential properties thereof. Generally, variants are overall closely similar, and, in many regions, identical to the polynucleotide or polypeptide of the present invention.

[0095] Thus, one aspect of the invention provides an isolated nucleic acid molecule comprising, or alternatively consisting of, a polynucleotide having a nucleotide sequence selected from the group consisting of: (a) a nucleotide sequence described in SEQ ID NO:X or contained in the cDNA sequence of Clone ID NO:Z; (b) a nucleotide sequence in SEQ ID NO:X or the cDNA in Clone ID NO:Z which encodes the complete amino acid sequence of SEQ ID NO:Y or the complete amino acid sequence encoded by the cDNA in Clone ID NO:Z; (c) a nucleotide sequence in SEQ ID NO:X or the cDNA in Clone ID NO:Z which encodes a mature polypeptide; (d) a nucleotide sequence in SEQ ID NO:X or the cDNA sequence of Clone ID NO:Z, which encodes a biologically active fragment of a polypeptide; (e) a nucleotide sequence in SEQ ID NO:X or the cDNA sequence of Clone ID NO:Z, which encodes an antigenic fragment of a polypeptide; (f) a nucleotide sequence encoding a polypeptide comprising the complete amino acid sequence of SEQ ID NO:Y or the complete amino acid sequence encoded by the cDNA in Clone ID NO:Z; (g) a nucleotide sequence encoding a mature polypeptide of the amino acid sequence of SEQ ID NO:Y or the amino acid sequence encoded by the cDNA in Clone ID NO:Z; (h) a nucleotide sequence encoding a biologically active fragment of a polypeptide having the complete amino acid sequence of SEQ ID NO:Y or the complete amino acid sequence encoded by the cDNA in Clone ID NO:Z; (i) a nucleotide sequence encoding an antigenic fragment of a polypeptide having the complete amino acid sequence of SEQ ID NO:Y or the complete amino acid sequence encoded by the cDNA in Clone ID NO:Z; and (j) a nucleotide sequence complementary to any of the nucleotide sequences in (a), (b), (c), (d), (e), (f), (g), (h), or (i) above.

[0096] The present invention is also directed to nucleic acid molecules which comprise, or alternatively consist of, a nucleotide sequence which is at least 80%, 85%, 90%, 95%, 96%, 97%, 98%, 99% or 100%, identical to, for example, any of the nucleotide sequences in (a), (b), (c), (d), (e), (f), (g), (h), (i), or (j) above, the nucleotide coding sequence in SEQ ID NO:X or the complementary strand thereto, the nucleotide coding sequence of the cDNA contained in Clone ID NO:Z or the complementary strand thereto, a nucleotide sequence encoding the polypeptide of SEQ ID NO:Y, a nucleotide sequence encoding a polypeptide sequence encoded by the nucleotide sequence in SEQ ID NO:X, a polypeptide sequence encoded by the complement of the polynucleotide sequence in SEQ ID NO:X, a nucleotide sequence encoding the polypeptide encoded by the cDNA contained in Clone ID NO:Z, the nucleotide coding sequence in SEQ ID NO:X as defined in columns 8 and 9 of Table 2 or the complementary strand thereto, a nucleotide sequence encoding the polypeptide encoded by the nucleotide sequence in SEQ ID NO:X as defined in columns 8 and 9 of Table 2 or the complementary strand thereto, the nucleotide coding sequence in SEQ ID NO:B as defined in column 6 of Table 1B or the complementary strand thereto, a nucleotide sequence encoding the polypeptide encoded by the nucleotide sequence in SEQ ID NO:B as defined in column 6 of Table 1B or the complementary strand thereto, the nucleotide sequence in SEQ ID NO:X encoding the polypeptide sequence as defined in column 7 of Table 1A or the complementary strand thereto, nucleotide sequences encoding the polypeptide as defined in column 7 of Table 1A or the complementary strand thereto, and/or polynucleotide fragments of any of these nucleic acid molecules (e.g., those fragments described herein). Polynucleotides which hybridize to the complement of these nucleic acid molecules under stringent hybridization conditions or alternatively, under lower stringency conditions, are also encompassed by the invention, as are polypeptides encoded by these polynucleotides and nucleic acids.

[0097] In a preferred embodiment, the invention encompasses nucleic acid molecules which comprise, or alternatively, consist of a polynucleotide which hybridizes under stringent hybridization conditions, or alternatively, under lower stringency conditions, to a polynucleotide in (a), (b), (c), (d), (e), (f), (g), (h), or (i), above, as are polypeptides encoded by these polynucleotides. In another preferred embodiment, polynucleotides which hybridize to the complement of these nucleic acid molecules under stringent hybridization conditions, or alternatively, under lower stringency conditions, are also encompassed by the invention, as are polypeptides encoded by these polynucleotides.

[0098] In another embodiment, the invention provides a purified protein comprising, or alternatively consisting of, a polypeptide having an amino acid sequence selected from the group consisting of: (a) the complete amino acid sequence of SEQ ID NO:Y or the complete amino acid sequence encoded by the cDNA in Clone ID NO:Z; (b) the amino acid sequence of a mature form of a polypeptide having the amino acid sequence of SEQ ID NO:Y or the amino acid sequence encoded by the cDNA in Clone ID NO:Z; (c) the amino acid sequence of a biologically active fragment of a polypeptide having the complete amino acid sequence of SEQ ID NO:Y or the complete amino acid sequence encoded by the cDNA in Clone ID NO:Z; and (d) the amino acid sequence of an antigenic fragment of a polypeptide having the complete amino acid sequence of SEQ ID NO:Y or the complete amino acid sequence encoded by the cDNA in Clone ID NO:Z.

[0099] The present invention is also directed to proteins which comprise, or alternatively consist of, an amino acid sequence which is at least 80%, 85%, 90%, 95%, 96%, 97%, 98%, 99% or 100%, identical to, for example, any of the amino acid sequences in (a), (b), (c), or (d), above, the amino acid sequence shown in SEQ ID NO:Y, the amino acid sequence encoded by the cDNA contained in Clone ID NO:Z, the amino acid sequence of the polypeptide encoded by the nucleotide sequence in SEQ ID NO:X as defined in columns 8 and 9 of Table 2, the amino acid sequence of the polypeptide encoded by the nucleotide sequence in SEQ ID NO:B as defined in column 6 of Table 1B, the amino acid sequence as defined in column 7 of Table 1A, an amino acid sequence encoded by the nucleotide sequence in SEQ ID NO:X, and an amino acid sequence encoded by the complement of the polynucleotide sequence in SEQ ID NO:X. Fragments of these polypeptides are also provided (e.g., those fragments described herein). Further proteins encoded by polynucleotides which hybridize to the complement of the nucleic acid molecules encoding these amino acid sequences under stringent hybridization conditions or alternatively, under lower stringency conditions, are also encompassed by the invention, as are the polynucleotides encoding these proteins.

[0100] By a nucleic acid having a nucleotide sequence at least, for example, 95% “identical” to a reference nucleotide sequence of the present invention, it is intended that the nucleotide sequence of the nucleic acid is identical to the reference sequence except that the nucleotide sequence may include up to five point mutations per each 100 nucleotides of the reference nucleotide sequence encoding the polypeptide. In other words, to obtain a nucleic acid having a nucleotide sequence at least 95% identical to a reference nucleotide sequence, up to 5% of the nucleotides in the reference sequence may be deleted or substituted with another nucleotide, or a number of nucleotides up to 5% of the total nucleotides in the reference sequence may be inserted into the reference sequence. The query sequence may be an entire sequence referred to in Table 1A or 2 as the ORF (open reading frame), or any fragment specified as described herein.

[0101] As a practical matter, whether any particular nucleic acid molecule or polypeptide is at least 80%, 85%, 90%, 95%, 96%, 97%, 98% or 99% identical to a nucleotide sequence of the present invention can be determined conventionally using known computer programs. A preferred method for determining the best overall match between a query sequence (a sequence of the present invention) and a subject sequence, also referred to as a global sequence alignment, can be determined using the FASTDB computer program based on the algorithm of Brutlag et al. (Comp. App. Biosci. 6:237-245 (1990)). In a sequence alignment the query and subject sequences are both DNA sequences. An RNA sequence can be compared by converting U's to T's. The result of said global sequence alignment is expressed as percent identity. Preferred parameters used in a FASTDB alignment of DNA sequences to calculate percent identity are: Matrix=Unitary, k-tuple=4, Mismatch Penalty=1, Joining Penalty=30, Randomization Group Length=0, Cutoff Score=1, Gap Penalty=5, Gap Size Penalty 0.05, Window Size=500 or the length of the subject nucleotide sequence, whichever is shorter.

[0102] If the subject sequence is shorter than the query sequence because of 5′ or 3′ deletions, not because of internal deletions, a manual correction must be made to the results. This is because the FASTDB program does not account for 5′ and 3′ truncations of the subject sequence when calculating percent identity. For subject sequences truncated at the 5′ or 3′ ends, relative to the query sequence, the percent identity is corrected by calculating the number of bases of the query sequence that are 5′ and 3′ of the subject sequence, which are not matched/aligned, as a percent of the total bases of the query sequence. Whether a nucleotide is matched/aligned is determined by results of the FASTDB sequence alignment. This percentage is then subtracted from the percent identity, calculated by the above FASTDB program using the specified parameters, to arrive at a final percent identity score. This corrected score is what is used for the purposes of the present invention. Only bases outside the 5′ and 3′ bases of the subject sequence, as displayed by the FASTDB alignment, which are not matched/aligned with the query sequence, are calculated for the purposes of manually adjusting the percent identity score.

[0103] For example, a 90 base subject sequence is aligned to a 100 base query sequence to determine percent identity. The deletions occur at the 5′ end of the subject sequence and therefore, the FASTDB alignment does not show a matched/alignment of the first 10 bases at 5′ end. The 10 unpaired bases represent 10% of the sequence (number of bases at the 5′ and 3′ ends not matched/total number of bases in the query sequence) so 10% is subtracted from the percent identity score calculated by the FASTDB program. If the remaining 90 bases were perfectly matched the final percent identity would be 90%. In another example, a 90 base subject sequence is compared with a 100 base query sequence. This time the deletions are internal deletions so that there are no bases on the 5′ or 3′ of the subject sequence which are not matched/aligned with the query. In this case the percent identity calculated by FASTDB is not manually corrected. Once again, only bases 5′ and 3′ of the subject sequence which are not matched/aligned with the query sequence are manually corrected for. No other manual corrections are to be made for the purposes of the present invention.

[0104] By a polypeptide having an amino acid sequence at least, for example, 95% “identical” to a query amino acid sequence of the present invention, it is intended that the amino acid sequence of the subject polypeptide is identical to the query sequence except that the subject polypeptide sequence may include up to five amino acid alterations per each 100 amino acids of the query amino acid sequence. In other words, to obtain a polypeptide having an amino acid sequence at least 95% identical to a query amino acid sequence, up to 5% of the amino acid residues in the subject sequence may be inserted, deleted, (indels) or substituted with another amino acid. These alterations of the reference sequence may occur at the amino or carboxy terminal positions of the reference amino acid sequence or anywhere between those terminal positions, interspersed either individually among residues in the reference sequence or in one or more contiguous groups within the reference sequence.

[0105] As a practical matter, whether any particular polypeptide is at least 80%, 85%, 90%, 95%, 96%, 97%, 98% or 99% identical to, for instance, the amino acid sequence of a polypeptide referred to in Table 1A (e.g., the amino acid sequence identified in column 6) or Table 2 (e.g., the amino acid sequence of the polypeptide encoded by the polynucleotide sequence defined in columns 8 and 9 of Table 2) or a fragment thereof, the amino acid sequence of the polypeptide encoded by the polynucleotide sequence in SEQ ID NO:B as defined in column 6 of Table 1B or a fragment thereof, the amino acid sequence of the polypeptide encoded by the nucleotide sequence in SEQ ID NO:X or a fragment thereof, or the amino acid sequence of the polypeptide encoded by cDNA contained in Clone ID NO:Z, or a fragment thereof, can be determined conventionally using known computer programs. A preferred method for determining the best overall match between a query sequence (a sequence of the present invention) and a subject sequence, also referred to as a global sequence alignment, can be determined using the FASTDB computer program based on the algorithm of Brutlag et al. (Comp. App. Biosci.6:237-245 (1990)). In a sequence alignment the query and subject sequences are either both nucleotide sequences or both amino acid sequences. The result of said global sequence alignment is expressed as percent identity. Preferred parameters used in a FASTDB amino acid alignment are: Matrix=PAM 0, k-tuple=2, Mismatch Penalty=1, Joining Penalty=20, Randomization Group Length=0, Cutoff Score=1, Window Size=sequence length, Gap Penalty=5, Gap Size Penalty=0.05, Window Size=500 or the length of the subject amino acid sequence, whichever is shorter.

[0106] If the subject sequence is shorter than the query sequence due to N- or C-terminal deletions, not because of internal deletions, a manual correction must be made to the results. This is because the FASTDB program does not account for N- and C-terminal truncations of the subject sequence when calculating global percent identity. For subject sequences truncated at the N- and C-termini, relative to the query sequence, the percent identity is corrected by calculating the number of residues of the query sequence that are N- and C-terminal of the subject sequence, which are not matched/aligned with a corresponding subject residue, as a percent of the total bases of the query sequence. Whether a residue is matched/aligned is determined by results of the FASTDB sequence alignment. This percentage is then subtracted from the percent identity, calculated by the above FASTDB program using the specified parameters, to arrive at a final percent identity score. This final percent identity score is what is used for the purposes of the present invention. Only residues to the N- and C-termini of the subject sequence, which are not matched/aligned with the query sequence, are considered for the purposes of manually adjusting the percent identity score. That is, only query residue positions outside the farthest N- and C- terminal residues of the subject sequence.

[0107] For example, a 90 amino acid residue subject sequence is aligned with a 100 residue query sequence to determine percent identity. The deletion occurs at the N-terminus of the subject sequence and therefore, the FASTDB alignment does not show a matching/alignment of the first 10 residues at the N-terminus. The 10 unpaired residues represent 10% of the sequence (number of residues at the N- and C- termini not matched/total number of residues in the query sequence) so 10% is subtracted from the percent identity score calculated by the FASTDB program. If the remaining 90 residues were perfectly matched the final percent identity would be 90%. In another example, a 90 residue subject sequence is compared with a 100 residue query sequence. This time the deletions are internal deletions so there are no residues at the N- or C-termini of the subject sequence which are not matched/aligned with the query. In this case the percent identity calculated by FASTDB is not manually corrected. Once again, only residue positions outside the N- and C-terminal ends of the subject sequence, as displayed in the FASTDB alignment, which are not matched/aligned with the query sequence are manually corrected for. No other manual corrections are to made for the purposes of the present invention.

[0108] The polynucleotide variants of the invention may contain alterations in the coding regions, non-coding regions, or both. Especially preferred are polynucleotide variants containing alterations which produce silent substitutions, additions, or deletions, but do not alter the properties or activities of the encoded polypeptide. Nucleotide variants produced by silent substitutions due to the degeneracy of the genetic code are preferred. Moreover, polypeptide variants in which less than 50, less than 40, less than 30, less than 20, less than 10, or 5-50, 5-25, 5-10, 1-5, or 1-2 amino acids are substituted, deleted, added in any combination are also preferred. Polynucleotide variants can be produced for a variety of reasons, e.g., to optimize codon expression for a particular host (change codons in the human mRNA to those preferred by a bacterial host such as E. coli).

[0109] Naturally occurring variants are called “allelic variants,” and refer to one of several alternate forms of a gene occupying a given locus on a chromosome of an organism. (Genes II, Lewin, B., ed., John Wiley & Sons, New York (1985)). These allelic variants can vary at either the polynucleotide and/or polypeptide level and are included in the present invention. Alternatively, non-naturally occurring variants may be produced by mutagenesis techniques or by direct synthesis.

[0110] Using known methods of protein engineering and recombinant DNA technology, variants may be generated to improve or alter the characteristics of the polypeptides of the present invention. For instance, one or more amino acids can be deleted from the N-terminus or C-terminus of the polypeptide of the present invention without substantial loss of biological function. As an example, Ron et al. (J. Biol. Chem. 268: 2984-2988 (1993)) reported variant KGF proteins having heparin binding activity even after deleting 3, 8, or 27 amino-terminal amino acid residues. Similarly, Interferon gamma exhibited up to ten times higher activity after deleting 8-10 amino acid residues from the carboxy terminus of this protein. (Dobeli et al., J. Biotechnology 7:199-216 (1988).)

[0111] Moreover, ample evidence demonstrates that variants often retain a biological activity similar to that of the naturally occurring protein. For example, Gayle and coworkers (J. Biol. Chem. 268:22105-22111 (1993)) conducted extensive mutational analysis of human cytokine IL-1a. They used random mutagenesis to generate over 3,500 individual IL-1a mutants that averaged 2.5 amino acid changes per variant over the entire length of the molecule. Multiple mutations were examined at every possible amino acid position. The investigators found that “[m]ost of the molecule could be altered with little effect on either [binding or biological activity].” In fact, only 23 unique amino acid sequences, out of more than 3,500 nucleotide sequences examined, produced a protein that significantly differed in activity from wild-type.

[0112] Furthermore, even if deleting one or more amino acids from the N-terminus or C-terminus of a polypeptide results in modification or loss of one or more biological functions, other biological activities may still be retained. For example, the ability of a deletion variant to induce and/or to bind antibodies which recognize the secreted form will likely be retained when less than the majority of the residues of the secreted form are removed from the N-terminus or C-terminus. Whether a particular polypeptide lacking N- or C-terminal residues of a protein retains such immunogenic activities can readily be determined by routine methods described herein and otherwise known in the art.

[0113] Thus, the invention further includes polypeptide variants which show a functional activity (e.g., biological activity) of the polypeptides of the invention. Such variants include deletions, insertions, inversions, repeats, and substitutions selected according to general rules known in the art so as have little effect on activity.

[0114] The present application is directed to nucleic acid molecules at least 80%, 85%, 90%, 95%, 96%, 97%, 98%, 99% or 100% identical to the nucleic acid sequences disclosed herein, (e.g., encoding a polypeptide having the amino acid sequence of an N and/or C terminal deletion), irrespective of whether they encode a polypeptide having functional activity. This is because even where a particular nucleic acid molecule does not encode a polypeptide having functional activity, one of skill in the art would still know how to use the nucleic acid molecule, for instance, as a hybridization probe or a polymerase chain reaction (PCR) primer. Uses of the nucleic acid molecules of the present invention that do not encode a polypeptide having functional activity include, inter alia, (1) isolating a gene or allelic or splice variants thereof in a cDNA library; (2) in situ hybridization (e.g., “FISH”) to metaphase chromosomal spreads to provide precise chromosomal location of the gene, as described in Verma et al., Human Chromosomes: A Manual of Basic Techniques, Pergamon Press, New York (1988); (3) Northern Blot analysis for detecting mRNA expression in specific tissues (e.g., normal or diseased tissues); and (4) in situ hybridization (e.g., histochemistry) for detecting mRNA expression in specific tissues (e.g., normal or diseased tissues).

[0115] Preferred, however, are nucleic acid molecules having sequences at least 80%, 85%, 90%, 95%, 96%, 97%, 98%, 99% or 100% identical to the nucleic acid sequences disclosed herein, which do, in fact, encode a polypeptide having functional activity. By a polypeptide having “functional activity” is meant, a polypeptide capable of displaying one or more known functional activities associated with a full-length (complete) protein of the invention. Such functional activities include, but are not limited to, biological activity, antigenicity [ability to bind (or compete with a polypeptide of the invention for binding) to an anti-polypeptide of the invention antibody], immunogenicity (ability to generate antibody which binds to a specific polypeptide of the invention), ability to form multimers with polypeptides of the invention, and ability to bind to a receptor or ligand for a polypeptide of the invention.

[0116] The functional activity of the polypeptides, and fragments, variants and derivatives of the invention, can be assayed by various methods.

[0117] For example, in one embodiment where one is assaying for the ability to bind or compete with a full-length polypeptide of the present invention for binding to an anti-polypetide antibody, various immunoassays known in the art can be used, including but not limited to, competitive and non-competitive assay systems using techniques such as radioimmunoassays, ELISA (enzyme linked immunosorbent assay), “sandwich” immunoassays, immunoradiometric assays, gel diffusion precipitation reactions, immunodiffusion assays, in situ immunoassays (using colloidal gold, enzyme or radioisotope labels, for example), western blots, precipitation reactions, agglutination assays (e.g., gel agglutination assays, hemagglutination assays), complement fixation assays, immunofluorescence assays, protein A assays, and immunoelectrophoresis assays, etc. In one embodiment, antibody binding is detected by detecting a label on the primary antibody. In another embodiment, the primary antibody is detected by detecting binding of a secondary antibody or reagent to the primary antibody. In a further embodiment, the secondary antibody is labeled. Many means are known in the art for detecting binding in an immunoassay and are within the scope of the present invention.

[0118] In another embodiment, where a ligand is identified, or the ability of a polypeptide fragment, variant or derivative of the invention to multimerize is being evaluated, binding can be assayed, e.g., by means well-known in the art, such as, for example, reducing and non-reducing gel chromatography, protein affinity chromatography, and affinity blotting. See generally, Phizicky et al., Microbiol. Rev. 59:94-123 (1995). In another embodiment, the ability of physiological correlates of a polypeptide of the present invention to bind to a substrate(s) of the polypeptide of the invention can be routinely assayed using techniques known in the art.

[0119] In addition, assays described herein (see Examples) and otherwise known in the art may routinely be applied to measure the ability of polypeptides of the present invention and fragments, variants and derivatives thereof to elicit polypeptide related biological activity (either in vitro or in vivo). Other methods will be known to the skilled artisan and are within the scope of the invention.

[0120] Of course, due to the degeneracy of the genetic code, one of ordinary skill in the art will immediately recognize that a large number of the nucleic acid molecules having a sequence at least 80%, 85%, 90%, 95%, 96%, 97%, 98%, 99%, or 100% identical to, for example, the nucleic acid sequence of the cDNA contained in Clone ID NO:Z, the nucleic acid sequence referred to in Table 1A (SEQ ID NO:X), the nucleic acid sequence disclosed in Table 2 (e.g., the nucleic acid sequence delineated in columns 8 and 9) or fragments thereof, will encode polypeptides “having functional activity.” In fact, since degenerate variants of any of these nucleotide sequences all encode the same polypeptide, in many instances, this will be clear to the skilled artisan even without performing the above described comparison assay. It will be further recognized in the art that, for such nucleic acid molecules that are not degenerate variants, a reasonable number will also encode a polypeptide having functional activity. This is because the skilled artisan is fully aware of amino acid substitutions that are either less likely or not likely to significantly effect protein function (e.g., replacing one aliphatic amino acid with a second aliphatic amino acid), as further described below.

[0121] For example, guidance concerning how to make phenotypically silent amino acid substitutions is provided in Bowie et al., “Deciphering the Message in Protein Sequences: Tolerance to Amino Acid Substitutions,” Science 247:1306-1310 (1990), wherein the authors indicate that there are two main strategies for studying the tolerance of an amino acid sequence to change.

[0122] The first strategy exploits the tolerance of amino acid substitutions by natural selection during the process of evolution. By comparing amino acid sequences in different species, conserved amino acids can be identified. These conserved amino acids are likely important for protein function. In contrast, the amino acid positions where substitutions have been tolerated by natural selection indicates that these positions are not critical for protein function. Thus, positions tolerating amino acid substitution could be modified while still maintaining biological activity of the protein.

[0123] The second strategy uses genetic engineering to introduce amino acid changes at specific positions of a cloned gene to identify regions critical for protein function. For example, site directed mutagenesis or alanine-scanning mutagenesis (introduction of single alanine mutations at every residue in the molecule) can be used. See Cunningham and Wells, Science 244:1081-1085 (1989). The resulting mutant molecules can then be tested for biological activity.

[0124] As the authors state, these two strategies have revealed that proteins are surprisingly tolerant of amino acid substitutions. The authors further indicate which amino acid changes are likely to be permissive at certain amino acid positions in the protein. For example, most buried (within the tertiary structure of the protein) amino acid residues require nonpolar side chains, whereas few features of surface side chains are generally conserved. Moreover, tolerated conservative amino acid substitutions involve replacement of the aliphatic or hydrophobic amino acids Ala, Val, Leu and Ile; replacement of the hydroxyl residues Ser and Thr; replacement of the acidic residues Asp and Glu; replacement of the amide residues Asn and Gln, replacement of the basic residues Lys, Arg, and His; replacement of the aromatic residues Phe, Tyr, and Trp, and replacement of the small-sized amino acids Ala, Ser, Thr, Met, and Gly. Besides conservative amino acid substitution, variants of the present invention include (i) substitutions with one or more of the non-conserved amino acid residues, where the substituted amino acid residues may or may not be one encoded by the genetic code, or (ii) substitutions with one or more of the amino acid residues having a substituent group, or (iii) fusion of the mature polypeptide with another compound, such as a compound to increase the stability and/or solubility of the polypeptide (for example, polyethylene glycol), (iv) fusion of the polypeptide with additional amino acids, such as, for example, an IgG Fc fusion region peptide, serum albumin (preferably human serum albumin) or a fragment thereof, or leader or secretory sequence, or a sequence facilitating purification, or (v) fusion of the polypeptide with another compound, such as albumin (including but not limited to recombinant albumin (see, e.g., U.S. Pat. No. 5,876,969, issued Mar. 2, 1999, EP Patent 0 413 622, and U.S. Pat. No. 5,766,883, issued Jun. 16, 1998, herein incorporated by reference in their entirety)). Such variant polypeptides are deemed to be within the scope of those skilled in the art from the teachings herein.

[0125] For example, polypeptide variants containing amino acid substitutions of charged amino acids with other charged or neutral amino acids may produce proteins with improved characteristics, such as less aggregation. Aggregation of pharmaceutical formulations both reduces activity and increases clearance due to the aggregate's immunogenic activity. See Pinckard et al., Clin. Exp. Immunol. 2:331-340 (1967); Robbins et al., Diabetes 36: 838-845 (1987); Cleland et al., Crit. Rev. Therapeutic Drug Carrier Systems 10:307-377 (1993).

[0126] A further embodiment of the invention relates to polypeptides which comprise the amino acid sequence of a polypeptide having an amino acid sequence which contains at least one amino acid substitution, but not more than 50 amino acid substitutions, even more preferably, not more than 40 amino acid substitutions, still more preferably, not more than 30 amino acid substitutions, and still even more preferably, not more than 20 amino acid substitutions from a polypeptide sequence disclosed herein. Of course it is highly preferable for a polypeptide to have an amino acid sequence which comprises the amino acid sequence of a polypeptide of SEQ ID NO:Y, an amino acid sequence encoded by SEQ ID NO:X, an amino acid sequence encoded by the portion of SEQ ID NO:X as defined in columns 8 and 9 of Table 2, an amino acid sequence encoded by the complement of SEQ ID NO:X, and/or an amino acid sequence encoded by cDNA contained in Clone ID NO:Z which contains, in order of ever-increasing preference, at least one, but not more than 10, 9, 8, 7, 6, 5, 4, 3, 2 or 1 amino acid substitutions.

[0127] In specific embodiments, the polypeptides of the invention comprise, or alternatively, consist of, fragments or variants of a reference amino acid sequence selected from: (a) the amino acid sequence of SEQ ID NO:Y or fragments thereof (e.g., the mature form and/or other fragments described herein); (b) the amino acid sequence encoded by SEQ ID NO:X or fragments thereof; (c) the amino acid sequence encoded by the complement of SEQ ID NO:X or fragments thereof; (d) the amino acid sequence encoded by the portion of SEQ ID NO:X as defined in columns 8 and 9 of Table 2 or fragments thereof; and (e) the amino acid sequence encoded by cDNA contained in Clone ID NO:Z or fragments thereof; wherein the fragments or variants have 1-5, 5-10, 5-25, 5-50, 10-50 or 50-150, amino acid residue additions, substitutions, and/or deletions when compared to the reference amino acid sequence. In preferred embodiments, the amino acid substitutions are conservative. Polynucleotides encoding these polypeptides are also encompassed by the invention.

[0128] Polynucleotide and Polypeptide Fragments

[0129] The present invention is also directed to polynucleotide fragments of the polynucleotides (nucleic acids) of the invention. In the present invention, a “polynucleotide fragment” refers to a polynucleotide having a nucleic acid sequence which, for example: is a portion of the cDNA contained in Clone ID NO:Z or the complementary strand thereto; is a portion of the polynucleotide sequence encoding the polypeptide encoded by the cDNA contained in Clone ID NO:Z or the complementary strand thereto; is a portion of a polynucleotide sequence encoding the amino acid sequence encoded by the region of SEQ ID NO:X as defined in columns 8 and 9 of Table 2 or the complementary strand thereto; is a portion of the polynucleotide sequence of SEQ ID NO:X as defined in columns 8 and 9 of Table 2 or the complementary strand thereto; is a portion of the polynucleotide sequence in SEQ ID NO:X or the complementary strand thereto; is a polynucleotide sequence encoding a portion of the polypeptide of SEQ ID NO:Y; is a polynucleotide sequence encoding a portion of a polypeptide encoded by SEQ ID NO:X; is a polynucleotide sequence encoding a portion of a polypeptide encoded by the complement of the polynucleotide sequence in SEQ ID NO:X; is a portion of a polynucleotide sequence encoding the amino acid sequence encoded by the region of SEQ ID NO:B as defined in column 6 of Table 1B or the complementary strand thereto; or is a portion of the polynucleotide sequence of SEQ ID NO:B as defined in column 6 of Table 1B or the complementary strand thereto.

[0130] The polynucleotide fragments of the invention are preferably at least about 15 nt, and more preferably at least about 20 nt, still more preferably at least about 30 nt, and even more preferably, at least about 40 nt, at least about 50 nt, at least about 75 nt, or at least about 150 nt in length. A fragment “at least 20 nt in length,” for example, is intended to include 20 or more contiguous bases from the cDNA sequence contained in Clone ID NO:Z, or the nucleotide sequence shown in SEQ ID NO:X or the complementary stand thereto. In this context “about” includes the particularly recited value or a value larger or smaller by several (5, 4, 3, 2, or 1) nucleotides, at either terminus or at both termini. These nucleotide fragments have uses that include, but are not limited to, as diagnostic probes and primers as discussed herein. Of course, larger fragments (e.g., at least 160, 170, 180, 190, 200, 250, 500, 600, 1000, or 2000 nucleotides in length ) are also encompassed by the invention.

[0131] Moreover, representative examples of polynucleotide fragments of the invention comprise, or alternatively consist of, a sequence from about nucleotide number 1-50, 51-100, 101-150, 151-200, 201-250, 251-300, 301-350, 351-400, 401-450, 451-500, 501-550, 551-600, 601-650, 651-700, 701-750, 751-800, 801-850, 851-900, 901-950, 951-1000, 1001-1050, 1051-1100, 1101-1150, 1151-1200, 1201-1250, 1251-1300, 1301-1350, 1351-1400, 1401-1450, 1451-1500, 1501-1550, 1551-1600, 1601-1650, 1651-1700, 1701-1750, 1751-1800, 1801-1850, 1851-1900, 1901-1950, 1951-2000, 2001-2050, 2051-2100, 2101-2150, 2151-2200, 2201-2250, 2251-2300, 2301-2350, 2351-2400, 2401-2450, 2451-2500, 2501-2550, 2551-2600, 2601-2650, 2651-2700, 2701-2750, 2751-2800, 2801-2850, 2851-2900, 2901-2950, 2951-3000, 3001-3050, 3051-3100, 3101-3150, 3151-3200, 3201-3250, 3251-3300, 3301-3350, 3351-3400, 3401-3450, 3451-3500, 3501-3550, 3551-3600, 3601-3650, 3651-3700, 3701-3750, 3751-3800, 3801-3850, 3851-3900, 3901-3950, 3951-4000, 4001-4050, 4051-4100, 4101-4150, 4151-4200, 4201-4250, 4251-4300, 4301-4350, 4351-4400, 4401-4450, 4451-4500, 4501-4550, 4551-4600, 4601-4650, 4651-4700, 4701-4750, 4751-4800, 4801-4850, 4851-4900, 4901-4950, 4951-5000, 5001-5050, 5051-5100, 5101-5150, 5151-5200, 5201-5250, 5251-5300, 5301-5350, 5351-5400, 5401-5450, 5451-5500, 5501-5550, 5551-5600, 5601-5650, 5651-5700, 5701-5750, 5751-5800, 5801-5850, 5851-5900, 5901-5950, 5951-6000, 6001-6050, 6051-6100, 6101-6150, 6151-6200, 6201-6250, 6251-6300, 6301-6350, 6351-6400, 6401-6450, 6451-6500, 6501-6550, 6551-6600, 6601-6650, 6651-6700, 6701-6750, 6751-6800, 6801-6850, 6851-6900, 6901-6950, 6951-7000, 7001-7050, 7051-7100, 7101-7150, 7151-7200, 7201-7250, 7251-7300 or 7301 to the end of SEQ ID NO:X, or the complementary strand thereto. In this context “about” includes the particularly recited range or a range larger or smaller by several (5, 4, 3, 2, or 1) nucleotides, at either terminus or at both termini. Preferably, these fragments encode a polypeptide which has a functional activity (e.g., biological activity). More preferably, these polynucleotides can be used as probes or primers as discussed herein. Polynucleotides which hybridize to one or more of these polynucleotides under stringent hybridization conditions or alternatively, under lower stringency conditions are also encompassed by the invention, as are polypeptides encoded by these polynucleotides.

[0132] Further representative examples of polynucleotide fragments of the invention comprise, or alternatively consist of, a sequence from about nucleotide number 1-50, 51-100, 101-150, 151-200, 201-250, 251-300, 301-350, 351-400, 401-450, 451-500, 501-550, 551-600, 601-650, 651-700, 701-750, 751-800, 801-850, 851-900, 901-950, 951-1000, 1001-1050, 1051-1100, 1101-1150, 1151-1200, 1201-1250, 1251-1300, 1301-1350, 1351-1400, 1401-1450, 1451-1500, 1501-1550, 1551-1600, 1601-1650, 1651-1700, 1701-1750, 1751-1800, 1801-1850, 1851-1900, 1901-1950, 1951-2000, 2001-2050, 2051-2100, 2101-2150, 2151-2200, 2201-2250, 2251-2300, 2301-2350, 2351-2400, 2401-2450, 2451-2500, 2501-2550, 2551-2600, 2601-2650, 2651-2700, 2701-2750, 2751-2800, 2801-2850, 2851-2900, 2901-2950, 2951-3000, 3001-3050, 3051-3100, 3101-3150, 3151-3200, 3201-3250, 3251-3300, 3301-3350, 3351-3400, 3401-3450, 3451-3500, 3501-3550, 3551-3600, 3601-3650, 3651-3700, 3701-3750, 3751-3800, 3801-3850, 3851-3900, 3901-3950, 3951-4000, 4001-4050, 4051-4100, 4101-4150, 4151-4200, 4201-4250, 4251-4300, 4301-4350, 4351-4400, 4401-4450, 4451-4500, 4501-4550, 4551-4600, 4601-4650, 4651-4700, 4701-4750, 4751-4800, 4801-4850, 4851-4900, 4901-4950, 4951-5000, 5001-5050, 5051-5100, 5101-5150, 5151-5200, 5201-5250, 5251-5300, 5301-5350, 5351-5400, 5401-5450, 5451-5500, 5501-5550, 5551-5600, 5601-5650, 5651-5700, 5701-5750, 5751-5800, 5801-5850, 5851-5900, 5901-5950, 5951-6000, 6001-6050, 6051-6100, 6101-6150, 6151-6200, 6201-6250, 6251-6300, 6301-6350, 6351-6400, 6401-6450, 6451-6500, 6501-6550, 6551-6600, 6601-6650, 6651-6700, 6701-6750, 6751-6800, 6801-6850, 6851-6900, 6901-6950, 6951-7000, 7001-7050, 7051-7100, 7101-7150, 7151-7200, 7201-7250, 7251-7300 or 7301 to the end of the cDNA sequence contained in Clone ID NO:Z, or the complementary strand thereto. In this context “about” includes the particularly recited range or a range larger or smaller by several (5, 4, 3, 2, or 1) nucleotides, at either terminus or at both termini. Preferably, these fragments encode a polypeptide which has a functional activity (e.g., biological activity). More preferably, these polynucleotides can be used as probes or primers as discussed herein. Polynucleotides which hybridize to one or more of these polynucleotides under stringent hybridization conditions or alternatively, under lower stringency conditions are also encompassed by the invention, as are polypeptides encoded by these polynucleotides.

[0133] Moreover, representative examples of polynucleotide fragments of the invention comprise, or alternatively consist of, a nucleic acid sequence comprising one, two, three, four, five, six, seven, eight, nine, ten, or more of the above described polynucleotide fragments of the invention in combination with a polynucleotide sequence delineated in Table 1B column 6. Additional, representative examples of polynucleotide fragments of the invention comprise, or alternatively consist of, a nucleic acid sequence comprising one, two, three, four, five, six, seven, eight, nine, ten, or more of the above described polynucleotide fragments of the invention in combination with a polynucleotide sequence that is the complementary strand of a sequence delineated in column 6 of Table 1B. In further embodiments, the above-described polynucleotide fragments of the invention comprise, or alternatively consist of, sequences delineated in Table 1B, column 6, and have a nucleic acid sequence which is different from that of the BAC fragment having the sequence disclosed in SEQ ID NO:B (see Table 1B, column 5). In additional embodiments, the above-described polynucleotide fragments of the invention comprise, or alternatively consist of, sequences delineated in Table 1B, column 6, and have a nucleic acid sequence which is different from that published for the BAC clone identified as BAC ID NO:A (see Table 1B, column 4). In additional embodiments, the above-described polynucleotides of the invention comprise, or alternatively consist of, sequences delineated Table 1B, column 6, and have a nucleic acid sequence which is different from that contained in the BAC clone identified as BAC ID NO:A (see Table 1B, column 4). Polypeptides encoded by these polynucleotides, other polynucleotides that encode these polypeptides, and antibodies that bind these polypeptides are also encompassed by the invention. Additionally, fragments and variants of the above-described polynucleotides and polypeptides are also encompassed by the invention.

[0134] In additional specific embodiments, polynucleotides of the invention comprise, or alternatively consist of, one, two, three, four, five, six, seven, eight, nine, ten, or more fragments of the sequences delineated in column 6 of Table 1B, and the polynucleotide sequence of SEQ ID NO:X (e.g., as defined in Table 1B, column 2) or fragments or variants thereof. Polypeptides encoded by these polynucleotides, other polynucleotides that encode these polypeptides, and antibodies that bind these polypeptides are also encompassed by the invention.

[0135] In additional specific embodiments, polynucleotides of the invention comprise, or alternatively consist of, one, two, three, four, five, six, seven, eight, nine, ten, or more fragments of the sequences delineated in column 6 of Table 1B which correspond to the same Clone ID NO:Z (see Table 1B, column 1), and the polynucleotide sequence of SEQ ID NO:X (e.g., as defined in Table 1A or 1B) or fragments or variants thereof. Polypeptides encoded by these polynucleotides, other polynucleotides that encode these polypeptides, and antibodies that bind these polypeptides are also encompassed by the invention.

[0136] In further specific embodiments, polynucleotides of the invention comprise, or alternatively consist of, one, two, three, four, five, six, seven, eight, nine, ten, or more fragments of the sequences delineated in the same row of column 6 of Table 1B, and the polynucleotide sequence of SEQ ID NO:X (e.g., as defined in Table 1A or 1B) or fragments or variants thereof. Polypeptides encoded by these polynucleotides, other polynucleotides that encode these polypeptides, and antibodies that bind these polypeptides are also encompassed by the invention.

[0137] In additional specific embodiments, polynucleotides of the invention comprise, or alternatively consist of a polynucleotide sequence in which the 3′ 10 polynucleotides of one of the sequences delineated in column 6 of Table 1B and the 5′ 10 polynucleotides of the sequence of SEQ ID NO:X are directly contiguous. Nucleic acids which hybridize to the complement of these 20 contiguous polynucleotides under stringent hybridization conditions or alternatively, under lower stringency conditions, are also encompassed by the invention. Polypeptides encoded by these polynucleotides and/or nucleic acids, other polynucleotides and/or nucleic acids that encode these polypeptides, and antibodies that bind these polypeptides are also encompassed by the invention. Additionally, fragments and variants of the above-described polynucleotides, nucleic acids, and polypeptides are also encompassed by the invention.

[0138] In additional specific embodiments, polynucleotides of the invention comprise, or alternatively consist of a polynucleotide sequence in which the 3′ 10 polynucleotides of one of the sequences delineated in column 6 of Table 1B and the 5′ 10 polynucleotides of a fragment or variant of the sequence of SEQ ID NO:X (e.g., as described herein) are directly contiguous Nucleic acids which hybridize to the complement of these 20 contiguous polynucleotides under stringent hybridization conditions or alternatively, under lower stringency conditions, are also encompassed by the invention. Polypeptides encoded by these polynucleotides and/or nucleic acids, other polynucleotides and/or nucleic acids encoding these polypeptides, and antibodies that bind these polypeptides are also encompassed by the invention. Additionally, fragments and variants of the above-described polynucleotides, nucleic acids, and polypeptides are also encompassed by the invention.

[0139] In further specific embodiments, polynucleotides of the invention comprise, or alternatively consist of a polynucleotide sequence in which the 3′ 10 polynucleotides of a fragment or variant of the sequence of SEQ ID NO:X and the 5′ 10 polynucleotides of the sequence of one of the sequences delineated in column 6 of Table 1B are directly contiguous. Nucleic acids which hybridize to the complement of these 20 contiguous polynucleotides under stringent hybridization conditions or alternatively, under lower stringency conditions, are also encompassed by the invention. Polypeptides encoded by these polynucleotides and/or nucleic acids, other polynucleotides and/or nucleic acids encoding these polypeptides, and antibodies that bind these polypeptides are also encompassed by the invention. Additionally, fragments and variants of the above-described polynucleotides, nucleic acids, and polypeptides are also encompassed by the invention.

[0140] In specific embodiments, polynucleotides of the invention comprise, or alternatively consist of a polynucleotide sequence in which the 3′ 10 polynucleotides of one of the sequences delineated in column 6 of Table 1B and the 5′ 10 polynucleotides of another sequence in column 6 are directly contiguous. In preferred embodiments, the 3′ 10 polynucleotides of one of the sequences delineated in column 6 of Table 1B is directly contiguous with the 5′ 10 polynucleotides of the next sequential exon delineated in Table 1B, column 6. Nucleic acids which hybridize to the complement of these 20 contiguous polynucleotides under stringent hybridization conditions or alternatively, under lower stringency conditions, are also encompassed by the invention. Polypeptides encoded by these polynucleotides and/or nucleic acids, other polynucleotides and/or nucleic acids encoding these polypeptides, and antibodies that bind these polypeptides are also encompassed by the invention. Additionally, fragments and variants of the above-described polynucleotides, nucleic acids, and polypeptides are also encompassed by the invention.

[0141] In the present invention, a “polypeptide fragment” refers to an amino acid sequence which is a portion of that contained in SEQ ID NO:Y, a portion of an amino acid sequence encoded by the portion of SEQ ID NO:X as defined in columns 8 and 9 of Table 2, a portion of an amino acid sequence encoded by the polynucleotide sequence of SEQ ID NO:X, a portion of an amino acid sequence encoded by the complement of the polynucleotide sequence in SEQ ID NO:X, and/or a portion of an amino acid sequence encoded by the cDNA contained in Clone ID NO:Z. Protein (polypeptide) fragments may be “free-standing,” or comprised within a larger polypeptide of which the fragment forms a part or region, most preferably as a single continuous region. Representative examples of polypeptide fragments of the invention, include, for example, fragments comprising, or alternatively consisting of, from about amino acid number 1-20, 21-40, 41-60, 61-80, 81-100, 101-120, 121-140, 141-160, 161-180, 181-200, 201-220, 221-240, 241-260, 261-280, 281-300, 301-320, 321-340, 341-360, 361-380, 381-400, 401-420, 421-440, 441-460, 461-480, 481-500, 501-520, 521-540, 541-560, 561-580, 581-600, 601-620, 621-640, 641-660, 661-680, 681-700, 701-720, 721-740, 741-760, 761-780, 781-800, 801-820, 821-840, 841-860, 861-880, 881-900, 901-920, 921-940, 941-960, 961-980, 981-1000, 1001-1020, 1021-1040, 1041-1060, 1061-1080, 1081-1100, 1101-1120, 1121-1140, 1141-1160, 1161-1180, 1181-1200, 1201-1220, 1221-1240, 1241-1260, 1261-1280, 1281-1300, 1301-1320, 1321-1340, 1341-1360, 1361-1380, 1381-1400, 1401-1420, 1421-1440, or 1441 to the end of the coding region of cDNA and SEQ ID NO: Y. In a preferred embodiment, polypeptide fragments of the invention include, for example, fragments comprising, or alternatively consisting of, from about amino acid number 1-20, 21-40, 41-60, 61-80, 81-100, 101-120, 121-140, 141-160, 161-180, 181-200, 201-220, 221-240, 241-260, 261-280, 281-300, 301-320, 321-340, 341-360, 361-380, 381-400, 401-420, 421-440, 441-460, 461-480, 481-500, 501-520, 521-540, 541-560, 561-580, 581-600, 601-620, 621-640, 641-660, 661-680, 681-700, 701-720, 721-740, 741-760, 761-780, 781-800, 801-820, 821-840, 841-860, 861-880, 881-900, 901-920, 921-940, 941-960, 961-980, 981-1000, 1001-1020, 1021-1040, 1041-1060, 1061-1080, 1081-1100, 1101-1120, 1121-1140, 1141-1160, 1161-1180, 1181-1200, 1201-1220, 1221-1240, 1241-1260, 1261-1280, 1281-1300, 1301-1320, 1321-1340, 1341-1360, 1361-1380, 1381-1400, 1401-1420, 1421-1440, or 1441 to the end of the coding region of SEQ ID NO:Y. Moreover, polypeptide fragments of the invention may be at least about 10, 15, 20, 25, 30, 35, 40, 45, 50, 55, 60, 65, 70, 75, 80, 85, 90, 100, 110, 120, 130, 140, or 150 amino acids in length. In this context “about” includes the particularly recited ranges or values, or ranges or values larger or smaller by several (5, 4, 3, 2, or 1) amino acids, at either extreme or at both extremes. Polynucleotides encoding these polypeptide fragments are also encompassed by the invention.

[0142] Even if deletion of one or more amino acids from the N-terminus of a protein results in modification of loss of one or more biological functions of the protein, other functional activities (e.g., biological activities, ability to multimerize, ability to bind a ligand) may still be retained. For example, the ability of shortened muteins to induce and/or bind to antibodies which recognize the complete or mature forms of the polypeptides generally will be retained when less than the majority of the residues of the complete or mature polypeptide are removed from the N-terminus. Whether a particular polypeptide lacking N-terminal residues of a complete polypeptide retains such immunologic activities can readily be determined by routine methods described herein and otherwise known in the art. It is not unlikely that a mutein with a large number of deleted N-terminal amino acid residues may retain some biological or immunogenic activities. In fact, peptides composed of as few as six amino acid residues may often evoke an immune response.

[0143] Accordingly, polypeptide fragments include the secreted protein as well as the mature form. Further preferred polypeptide fragments include the secreted protein or the mature form having a continuous series of deleted residues from the amino or the carboxy terminus, or both. For example, any number of amino acids, ranging from 1-60, can be deleted from the amino terminus of either the secreted polypeptide or the mature form. Similarly, any number of amino acids, ranging from 1-30, can be deleted from the carboxy terminus of the secreted protein or mature form. Furthermore, any combination of the above amino and carboxy terminus deletions are preferred. Similarly, polynucleotides encoding these polypeptide fragments are also preferred.

[0144] The present invention further provides polypeptides having one or more residues deleted from the amino terminus of the amino acid sequence of a polypeptide disclosed herein (e.g., a polypeptide of SEQ ID NO:Y, a polypeptide encoded by the polynucleotide sequence contained in SEQ ID NO:X or the complement thereof, a polypeptide encoded by the portion of SEQ ID NO:X as defined in columns 8 and 9 of Table 2, a polypeptide encoded by the portion of SEQ ID NO:B as defined in column 6 of Table 1B, and/or a polypeptide encoded by the cDNA contained in Clone ID NO:Z). In particular, N-terminal deletions may be described by the general formula m−q, where q is a whole integer representing the total number of amino acid residues in a polypeptide of the invention (e.g., the polypeptide disclosed in SEQ ID NO:Y, or the polypeptide encoded by the portion of SEQ ID NO:X as defined in columns 8 and 9 of Table 2), and m is defined as any integer ranging from 2 to q−6. Polynucleotides encoding these polypeptides are also encompassed by the invention.

[0145] The present invention further provides polypeptides having one or more residues from the carboxy terminus of the amino acid sequence of a polypeptide disclosed herein (e.g., a polypeptide of SEQ ID NO:Y, a polypeptide encoded by the polynucleotide sequence contained in SEQ ID NO:X, a polypeptide encoded by the portion of SEQ ID NO:X as defined in columns 8 and 9 of Table 2, and/or a polypeptide encoded by the cDNA contained in Clone ID NO:Z). In particular, C-terminal deletions may be described by the general formula 1−n, where n is any whole integer ranging from 6 to q−1, and where n corresponds to the position of amino acid residue in a polypeptide of the invention. Polynucleotides encoding these polypeptides are also encompassed by the invention.

[0146] In addition, any of the above described N- or C-terminal deletions can be combined to produce a N- and C-terminal deleted polypeptide. The invention also provides polypeptides having one or more amino acids deleted from both the amino and the carboxyl termini, which may be described generally as having residues m−n of a polypeptide encoded by SEQ ID NO:X (e.g., including, but not limited to, the preferred polypeptide disclosed as SEQ ID NO:Y and the polypeptide encoded by the portion of SEQ ID NO:X as defined in columns 8 and 9 of Table 2), the cDNA contained in Clone ID NO:Z, and/or the complement thereof, where n and m are integers as described above. Polynucleotides encoding these polypeptides are also encompassed by the invention.

[0147] Also as mentioned above, even if deletion of one or more amino acids from the C-terminus of a protein results in modification of loss of one or more biological functions of the protein, other functional activities (e.g., biological activities, ability to multimerize, ability to bind a ligand) may still be retained. For example the ability of the shortened mutein to induce and/or bind to antibodies which recognize the complete or mature forms of the polypeptide generally will be retained when less than the majority of the residues of the complete or mature polypeptide are removed from the C-terminus. Whether a particular polypeptide lacking C-terminal residues of a complete polypeptide retains such immunologic activities can readily be determined by routine methods described herein and otherwise known in the art. It is not unlikely that a mutein with a large number of deleted C-terminal amino acid residues may retain some biological or immunogenic activities. In fact, peptides composed of as few as six amino acid residues may often evoke an immune response.

[0148] The present application is also directed to proteins containing polypeptides at least 80%, 85%, 90%, 95%, 96%, 97%, 98% or 99% identical to a polypeptide sequence set forth herein. In preferred embodiments, the application is directed to proteins containing polypeptides at least 80%, 85%, 90%, 95%, 96%, 97%, 98% or 99% identical to polypeptides having the amino acid sequence of the specific N- and C-terminal deletions. Polynucleotides encoding these polypeptides are also encompassed by the invention.

[0149] Any polypeptide sequence encoded by, for example, the polynucleotide sequences set forth as SEQ ID NO:X or the complement thereof, (presented, for example, in Tables 1A and 2), the cDNA contained in Clone ID NO:Z, or the polynucleotide sequence as defined in column 6 of Table 1B, may be analyzed to determine certain preferred regions of the polypeptide. For example, the amino acid sequence of a polypeptide encoded by a polynucleotide sequence of SEQ ID NO:X (e.g., the polypeptide of SEQ ID NO:Y and the polypeptide encoded by the portion of SEQ ID NO:X as defined in columnns 8 and 9 of Table 2) or the cDNA contained in Clone ID NO:Z may be analyzed using the default parameters of the DNASTAR computer algorithm (DNASTAR, Inc., 1228 S. Park St., Madison, Wis. 53715 USA; http://www.dnastar.com/).

[0150] Polypeptide regions that may be routinely obtained using the DNASTAR computer algorithm include, but are not limited to, Garnier-Robson alpha-regions, beta-regions, turn-regions, and coil-regions; Chou-Fasman alpha-regions, beta-regions, and turn-regions; Kyte-Doolittle hydrophilic regions and hydrophobic regions; Eisenberg alpha- and beta-amphipathic regions; Karplus-Schulz flexible regions; Emini surface-forming regions; and Jameson-Wolf regions of high antigenic index. Among highly preferred polynucleotides of the invention in this regard are those that encode polypeptides comprising regions that combine several structural features, such as several (e.g., 1, 2, 3 or 4) of the features set out above.

[0151] Additionally, Kyte-Doolittle hydrophilic regions and hydrophobic regions, Emini surface-forming regions, and Jameson-Wolf regions of high antigenic index (i.e., containing four or more contiguous amino acids having an antigenic index of greater than or equal to 1.5, as identified using the default parameters of the Jameson-Wolf program) can routinely be used to determine polypeptide regions that exhibit a high degree of potential for antigenicity. Regions of high antigenicity are determined from data by DNASTAR analysis by choosing values which represent regions of the polypeptide which are likely to be exposed on the surface of the polypeptide in an environment in which antigen recognition may occur in the process of initiation of an immune response.

[0152] Preferred polypeptide fragments of the invention are fragments comprising, or alternatively, consisting of, an amino acid sequence that displays a functional activity (e.g. biological activity) of the polypeptide sequence of which the amino acid sequence is a fragment. By a polypeptide displaying a “functional activity” is meant a polypeptide capable of one or more known functional activities associated with a full-length protein, such as, for example, biological activity, antigenicity, immunogenicity, and/or multimerization, as described herein.

[0153] Other preferred polypeptide fragments are biologically active fragments. Biologically active fragments are those exhibiting activity similar, but not necessarily identical, to an activity of the polypeptide of the present invention. The biological activity of the fragments may include an improved desired activity, or a decreased undesirable activity.

[0154] In preferred embodiments, polypeptides of the invention comprise, or alternatively consist of, one, two, three, four, five or more of the antigenic fragments of the polypeptide of SEQ ID NO:Y, or portions thereof. Polynucleotides encoding these polypeptides are also encompassed by the invention.

[0155] The present invention encompasses polypeptides comprising, or alternatively consisting of, an epitope of: the polypeptide sequence shown in SEQ ID NO:Y; a polypeptide sequence encoded by SEQ ID NO:X or the complementary strand thereto; the polypeptide sequence encoded by the portion of SEQ ID NO:X as defined in columns 8 and 9 of Table 2; the polypeptide sequence encoded by the portion of SEQ ID NO:B as defined in column 6 of Table 1B or the complement thereto; the polypeptide sequence encoded by the cDNA contained in Clone ID NO:Z; or the polypeptide sequence encoded by a polynucleotide that hybridizes to the sequence of SEQ ID NO:X, the complement of the sequence of SEQ ID NO:X, the complement of a portion of SEQ ID NO:X as defined in columns 8 and 9 of Table 2, or the cDNA sequence contained in Clone ID NO:Z under stringent hybridization conditions or alternatively, under lower stringency hybridization as defined supra. The present invention further encompasses polynucleotide sequences encoding an epitope of a polypeptide sequence of the invention (such as, for example, the sequence disclosed in SEQ ID NO:X, or a fragment thereof), polynucleotide sequences of the complementary strand of a polynucleotide sequence encoding an epitope of the invention, and polynucleotide sequences which hybridize to the complementary strand under stringent hybridization conditions or alternatively, under lower stringency hybridization conditions defined supra. The term “epitopes,” as used herein, refers to portions of a polypeptide having antigenic or immunogenic activity in an animal, preferably a mammal, and most preferably in a human. In a preferred embodiment, the present invention encompasses a polypeptide comprising an epitope, as well as the polynucleotide encoding this polypeptide. An “immunogenic epitope,” as used herein, is defined as a portion of a protein that elicits an antibody response in an animal, as determined by any method known in the art, for example, by the methods for generating antibodies described infra. (See, for example, Geysen et al., Proc. Natl. Acad. Sci. USA 81:3998-4002 (1983)). The term “antigenic epitope,” as used herein, is defined as a portion of a protein to which an antibody can immunospecifically bind its antigen as determined by any method well known in the art, for example, by the immunoassays described herein. Immunospecific binding excludes non-specific binding but does not necessarily exclude cross-reactivity with other antigens. Antigenic epitopes need not necessarily be immunogenic.

[0156] Fragments which function as epitopes may be produced by any conventional means. (See, e.g., Houghten, R. A., Proc. Natl. Acad. Sci. USA 82:5131-5135 (1985) further described in U.S. Pat. No. 4,631,211.)

[0157] In the present invention, antigenic epitopes preferably contain a sequence of at least 4, at least 5, at least 6, at least 7, more preferably at least 8, at least 9, at least 10, at least 11, at least 12, at least 13, at least 14, at least 15, at least 20, at least 25, at least 30, at least 40, at least 50, and, most preferably, between about 15 to about 30 amino acids. Preferred polypeptides comprising immunogenic or antigenic epitopes are at least 10, 15, 20, 25, 30, 35, 40, 45, 50, 55, 60, 65, 70, 75, 80, 85, 90, 95, or 100 amino acid residues in length. Additional non-exclusive preferred antigenic epitopes include the antigenic epitopes disclosed herein, as well as portions thereof. Antigenic epitopes are useful, for example, to raise antibodies, including monoclonal antibodies, that specifically bind the epitope. Preferred antigenic epitopes include the antigenic epitopes disclosed herein, as well as any combination of two, three, four, five or more of these antigenic epitopes. Antigenic epitopes can be used as the target molecules in immunoassays. (See, for instance, Wilson et al., Cell 37:767-778 (1984); Sutcliffe et al., Science 219:660-666 (1983)).

[0158] Non-limiting examples of epitopes of polypeptides that can be used to generate antibodies of the invention include a polypeptide comprising, or alternatively consisting of, at least one, two, three, four, five, six or more of the portion(s) of SEQ ID NO:Y specified in column 7 of Table 1A. These polypeptide fragments have been determined to bear antigenic epitopes of the proteins of the invention by the analysis of the Jameson-Wolf antigenic index which is included in the DNAStar suite of computer programs. By “comprise” it is intended that a polypeptide contains at least one, two, three, four, five, six or more of the portion(s) of SEQ ID NO:Y shown in column 7 of Table 1A, but it may contain additional flanking residues on either the amino or carboxyl termini of the recited portion. Such additional flanking sequences are preferably sequences naturally found adjacent to the portion; i.e., contiguous sequence shown in SEQ ID NO:Y. The flanking sequence may, however, be sequences from a heterolgous polypeptide, such as from another protein described herein or from a heterologous polypeptide not described herein. In particular embodiments, epitope portions of a polypeptide of the invention comprise one, two, three, or more of the portions of SEQ ID NO:Y shown in column 7 of Table 1 A.

[0159] Similarly, immunogenic epitopes can be used, for example, to induce antibodies according to methods well known in the art. See, for instance, Sutcliffe et al., supra; Wilson et al., supra; Chow et al., Proc. Natl. Acad. Sci. USA 82:910-914; and Bittle et al., J. Gen. Virol. 66:2347-2354 (1985). Preferred immunogenic epitopes include the immunogenic epitopes disclosed herein, as well as any combination of two, three, four, five or more of these immunogenic epitopes. The polypeptides comprising one or more immunogenic epitopes may be presented for eliciting an antibody response together with a carrier protein, such as an albumin, to an animal system (such as rabbit or mouse), or, if the polypeptide is of sufficient length (at least about 25 amino acids), the polypeptide may be presented without a carrier. However, immunogenic epitopes comprising as few as 8 to 10 amino acids have been shown to be sufficient to raise antibodies capable of binding to, at the very least, linear epitopes in a denatured polypeptide (e.g., in Western blotting).

[0160] Epitope-bearing polypeptides of the present invention may be used to induce antibodies according to methods well known in the art including, but not limited to, in vivo immunization, in vitro immunization, and phage display methods. See, e.g., Sutcliffe et al., supra; Wilson et al., supra, and Bittle et al., J. Gen. Virol., 66:2347-2354 (1985). If in vivo immunization is used, animals may be immunized with free peptide; however, anti-peptide antibody titer may be boosted by coupling the peptide to a macromolecular carrier, such as keyhole limpet hemacyanin (KLH) or tetanus toxoid. For instance, peptides containing cysteine residues may be coupled to a carrier using a linker such as maleimidobenzoyl-N-hydroxysuccinimide ester (MBS), while other peptides may be coupled to carriers using a more general linking agent such as glutaraldehyde. Animals such as rabbits, rats and mice are immunized with either free or carrier-coupled peptides, for instance, by intraperitoneal and/or intradermal injection of emulsions containing about 100 μg of peptide or carrier protein and Freund's adjuvant or any other adjuvant known for stimulating an immune response. Several booster injections may be needed, for instance, at intervals of about two weeks, to provide a useful titer of anti-peptide antibody which can be detected, for example, by ELISA assay using free peptide adsorbed to a solid surface. The titer of anti-peptide antibodies in serum from an immunized animal may be increased by selection of anti-peptide antibodies, for instance, by adsorption to the peptide on a solid support and elution of the selected antibodies according to methods well known in the art.

[0161] As one of skill in the art will appreciate, and as discussed above, the polypeptides of the present invention (e.g., those comprising an immunogenic or antigenic epitope) can be fused to heterologous polypeptide sequences. For example, polypeptides of the present invention (including fragments or variants thereof), may be fused with the constant domain of immunoglobulins (IgA, IgE, IgG, IgM), or portions thereof (CH1, CH2, CH3, or any combination thereof and portions thereof, resulting in chimeric polypeptides. By way of another non-limiting example, polypeptides and/or antibodies of the present invention (including fragments or variants thereof) may be fused with albumin (including but not limited to recombinant human serum albumin or fragments or variants thereof (see, e.g., U.S. Pat. No. 5,876,969, issued Mar. 2, 1999, EP Patent 0 413 622, and U.S. Pat. No. 5,766,883, issued Jun. 16, 1998, herein incorporated by reference in their entirety)). In a preferred embodiment, polypeptides and/or antibodies of the present invention (including fragments or variants thereof) are fused with the mature form of human serum albumin (i.e., amino acids 1-585 of human serum albumin as shown in FIGS. 1 and 2 of EP Patent 0 322 094) which is herein incorporated by reference in its entirety. In another preferred embodiment, polypeptides and/or antibodies of the present invention (including fragments or variants thereof) are fused with polypeptide fragments comprising, or alternatively consisting of, amino acid residues 1−z of human serum albumin, where z is an integer from 369 to 419, as described in U.S. Pat. No. 5,766,883 herein incorporated by reference in its entirety. Polypeptides and/or antibodies of the present invention (including fragments or variants thereof) may be fused to either the N- or C-terminal end of the heterologous protein (e.g., immunoglobulin Fc polypeptide or human serum albumin polypeptide). Polynucleotides encoding fusion proteins of the invention are also encompassed by the invention.

[0162] Such fusion proteins as those described above may facilitate purification and may increase half-life in vivo. This has been shown for chimeric proteins consisting of the first two domains of the human CD4-polypeptide and various domains of the constant regions of the heavy or light chains of mammalian immunoglobulins. See, e.g., EP 394,827; Traunecker et al., Nature, 331:84-86 (1988). Enhanced delivery of an antigen across the epithelial barrier to the immune system has been demonstrated for antigens (e.g., insulin) conjugated to an FcRn binding partner such as IgG or Fc fragments (see, e.g., PCT Publications WO 96/22024 and WO 99/04813). IgG fusion proteins that have a disulfide-linked dimeric structure due to the IgG portion desulfide bonds have also been found to be more efficient in binding and neutralizing other molecules than monomeric polypeptides or fragments thereof alone. See, e.g., Fountoulakis et al., J. Biochem., 270:3958-3964 (1995). Nucleic acids encoding the above epitopes can also be recombined with a gene of interest as an epitope tag (e.g., the hemagglutinin (HA) tag or flag tag) to aid in detection and purification of the expressed polypeptide. For example, a system described by Janknecht et al. allows for the ready purification of non-denatured fusion proteins expressed in human cell lines (Janknecht et al., 1991, Proc. Natl. Acad. Sci. USA 88:8972-897). In this system, the gene of interest is subcloned into a vaccinia recombination plasmid such that the open reading frame of the gene is translationally fused to an amino-terminal tag consisting of six histidine residues. The tag serves as a matrix binding domain for the fusion protein. Extracts from cells infected with the recombinant vaccinia virus are loaded onto Ni2+ nitriloacetic acid-agarose column and histidine-tagged proteins can be selectively eluted with imidazole-containing buffers.

[0163] Fusion Proteins

[0164] Any polypeptide of the present invention can be used to generate fusion proteins. For example, the polypeptide of the present invention, when fused to a second protein, can be used as an antigenic tag. Antibodies raised against the polypeptide of the present invention can be used to indirectly detect the second protein by binding to the polypeptide. Moreover, because secreted proteins target cellular locations based on trafficking signals, polypeptides of the present invention which are shown to be secreted can be used as targeting molecules once fused to other proteins.

[0165] Examples of domains that can be fused to polypeptides of the present invention include not only heterologous signal sequences, but also other heterologous functional regions. The fusion does not necessarily need to be direct, but may occur through linker sequences.

[0166] In certain preferred embodiments, proteins of the invention are fusion proteins comprising an amino acid sequence that is an N and/or C-terminal deletion of a polypeptide of the invention. In preferred embodiments, the invention is directed to a fusion protein comprising an amino acid sequence that is at least 90%, 95%, 96%, 97%, 98% or 99% identical to a polypeptide sequence of the invention. Polynucleotides encoding these proteins are also encompassed by the invention.

[0167] Moreover, fusion proteins may also be engineered to improve characteristics of the polypeptide of the present invention. For instance, a region of additional amino acids, particularly charged amino acids, may be added to the N-terminus of the polypeptide to improve stability and persistence during purification from the host cell or subsequent handling and storage. Also, peptide moieties may be added to the polypeptide to facilitate purification. Such regions may be removed prior to final preparation of the polypeptide. The addition of peptide moieties to facilitate handling of polypeptides are familiar and routine techniques in the art.

[0168] As one of skill in the art will appreciate that, as discussed above, polypeptides of the present invention, and epitope-bearing fragments thereof, can be combined with heterologous polypeptide sequences. For example, the polypeptides of the present invention may be fused with heterologous polypeptide sequences, for example, the polypeptides of the present invention may be fused with the constant domain of immunoglobulins (IgA, IgE, IgG, IgM) or portions thereof (CH1, CH2, CH3, and any combination thereof, including both entire domains and portions thereof), or albumin (including, but not limited to, native or recombinant human albumin or fragments or variants thereof (see, e.g., U.S. Pat. No. 5,876,969, issued Mar. 2, 1999, EP Patent 0 413 622, and U.S. Pat. No. 5,766,883, issued Jun. 16, 1998, herein incorporated by reference in their entirety)), resulting in chimeric polypeptides. For example, EP-A-O 464 533 (Canadian counterpart 2045869) discloses fusion proteins comprising various portions of constant region of immunoglobulin molecules together with another human protein or part thereof. In many cases, the Fc part in a fusion protein is beneficial in therapy and diagnosis, and thus can result in, for example, improved pharmacokinetic properties (EP-A 0232 262). Alternatively, deleting the Fc part after the fusion protein has been expressed, detected, and purified, would be desired. For example, the Fc portion may hinder therapy and diagnosis if the fusion protein is used as an antigen for immunizations. In drug discovery, for example, human proteins, such as hIL-5, have been fused with Fc portions for the purpose of high-throughput screening assays to identify antagonists of hIL-5. See, D. Bennett et al., J. Molecular Recognition 8:52-58 (1995); K. Johanson et al., J. Biol. Chem. 270:9459-9471 (1995).

[0169] Moreover, the polypeptides of the present invention can be fused to marker sequences, such as a polypeptide which facilitates purification of the fused polypeptide. In preferred embodiments, the marker amino acid sequence is a hexa-histidine peptide, such as the tag provided in a pQE vector (QIAGEN, Inc., 9259 Eton Avenue, Chatsworth, Calif., 91311), among others, many of which are commercially available. As described in Gentz et al., Proc. Natl. Acad. Sci. USA 86:821-824 (1989), for instance, hexa-histidine provides for convenient purification of the fusion protein. Another peptide tag useful for purification, the “HA” tag, corresponds to an epitope derived from the influenza hemagglutinin protein (Wilson et al., Cell 37:767 (1984)).

[0170] Additional fusion proteins of the invention may be generated through the techniques of gene-shuffling, motif-shuffling, exon-shuffling, and/or codon-shuffling (collectively referred to as “DNA shuffling”). DNA shuffling may be employed to modulate the activities of polypeptides of the invention, such methods can be used to generate polypeptides with altered activity, as well as agonists and antagonists of the polypeptides. See, generally, U.S. Pat. Nos. 5,605,793; 5,811,238; 5,830,721; 5,834,252; and 5,837,458, and Patten et al., Curr. Opinion Biotechnol. 8:724-33 (1997); Harayama, Trends Biotechnol. 16(2):76-82 (1998); Hansson, et al., J. Mol. Biol. 287:265-76 (1999); and Lorenzo and Blasco, Biotechniques 24(2):308-13 (1998) (each of these patents and publications are hereby incorporated by reference in its entirety). In one embodiment, alteration of polynucleotides corresponding to SEQ ID NO:X and the polypeptides encoded by these polynucleotides may be achieved by DNA shuffling. DNA shuffling involves the assembly of two or more DNA segments by homologous or site-specific recombination to generate variation in the polynucleotide sequence. In another embodiment, polynucleotides of the invention, or the encoded polypeptides, may be altered by being subjected to random mutagenesis by error-prone PCR, random nucleotide insertion or other methods prior to recombination. In another embodiment, one or more components, motifs, sections, parts, domains, fragments, etc., of a polynucleotide encoding a polypeptide of the invention may be recombined with one or more components, motifs, sections, parts, domains, fragments, etc. of one or more heterologous molecules.

[0171] Thus, any of these above fusions can be engineered using the polynucleotides or the polypeptides of the present invention.

[0172] Recombinant and Synthetic Production of Polypeptides of the Invention

[0173] The present invention also relates to vectors containing the polynucleotide of the present invention, host cells, and the production of polypeptides by synthetic and recombinant techniques. The vector may be, for example, a phage, plasmid, viral, or retroviral vector. Retroviral vectors may be replication competent or replication defective. In the latter case, viral propagation generally will occur only in complementing host cells.

[0174] The polynucleotides of the invention may be joined to a vector containing a selectable marker for propagation in a host. Generally, a plasmid vector is introduced in a precipitate, such as a calcium phosphate precipitate, or in a complex with a charged lipid. If the vector is a virus, it may be packaged in vitro using an appropriate packaging cell line and then transduced into host cells.

[0175] The polynucleotide insert should be operatively linked to an appropriate promoter, such as the phage lambda PL promoter, the E. coli lac, trp, phoA and tac promoters, the SV40 early and late promoters and promoters of retroviral LTRs, to name a few. Other suitable promoters will be known to the skilled artisan. The expression constructs will further contain sites for transcription initiation, termination, and, in the transcribed region, a ribosome binding site for translation. The coding portion of the transcripts expressed by the constructs will preferably include a translation initiating codon at the beginning and a termination codon (UAA, UGA or UAG) appropriately positioned at the end of the polypeptide to be translated.

[0176] As indicated, the expression vectors will preferably include at least one selectable marker. Such markers include dihydrofolate reductase, G418, glutamine synthase, or neomycin resistance for eukaryotic cell culture, and tetracycline, kanamycin or ampicillin resistance genes for culturing in E. coli and other bacteria. Representative examples of appropriate hosts include, but are not limited to, bacterial cells, such as E. coli, Streptomyces and Salmonella typhimurium cells; fungal cells, such as yeast cells (e.g., Saccharomyces cerevisiae or Pichia pastoris (ATCC Accession No. 201178)); insect cells such as Drosophila S2 and Spodoptera Sf9 cells; animal cells such as CHO, COS, 293, and Bowes melanoma cells; and plant cells. Appropriate culture mediums and conditions for the above-described host cells are known in the art.

[0177] Among vectors preferred for use in bacteria include pQE70, pQE60 and pQE-9, available from QIAGEN, Inc.; pBluescript vectors, Phagescript vectors, pNH8A, pNH16a, pNH18A, pNH46A, available from Stratagene Cloning Systems, Inc.; and ptrc99a, pKK223-3, pKK233-3, pDR540, pRIT5 available from Pharmacia Biotech, Inc. Among preferred eukaryotic vectors are pWLNEO, pSV2CAT, pOG44, pXT1 and pSG available from Stratagene; and pSVK3, pBPV, pMSG and pSVL available from Pharmacia. Preferred expression vectors for use in yeast systems include, but are not limited to pYES2, pYD 1, pTEF1/Zeo, pYES2/GS, pPICZ, pGAPZ, pGAPZalph, pPIC9, pPIC3.5, pHIL-D2, pHIL-S1, pPIC3.5K, pPIC9K, and PAO815 (all available from Invitrogen, Carlbad, Calif.). Other suitable vectors will be readily apparent to the skilled artisan.

[0178] Vectors which use glutamine synthase (GS) or DHFR as the selectable markers can be amplified in the presence of the drugs methionine sulphoximine or methotrexate, respectively. An advantage of glutamine synthase based vectors are the availabilty of cell lines (e.g., the murine myeloma cell line, NS0) which are glutamine synthase negative. Glutamine synthase expression systems can also function in glutamine synthase expressing cells (e.g., Chinese Hamster Ovary (CHO) cells) by providing additional inhibitor to prevent the functioning of the endogenous gene. A glutamine synthase expression system and components thereof are detailed in PCT publications: WO87/04462; WO86/05807; WO89/01036; WO89/10404; and WO91/06657, which are hereby incorporated in their entireties by reference herein. Additionally, glutamine synthase expression vectors can be obtained from Lonza Biologics, Inc. (Portsmouth, N.H.). Expression and production of monoclonal antibodies using a GS expression system in murine myeloma cells is described in Bebbington et al., Bio/technology 10:169(1992) and in Biblia and Robinson Biotechnol. Prog. 11:1 (1995) which are herein incorporated by reference.

[0179] The present invention also relates to host cells containing the above-described vector constructs described herein, and additionally encompasses host cells containing nucleotide sequences of the invention that are operably associated with one or more heterologous control regions (e.g., promoter and/or enhancer) using techniques known of in the art. The host cell can be a higher eukaryotic cell, such as a mammalian cell (e.g., a human derived cell), or a lower eukaryotic cell, such as a yeast cell, or the host cell can be a prokaryotic cell, such as a bacterial cell. A host strain may be chosen which modulates the expression of the inserted gene sequences, or modifies and processes the gene product in the specific fashion desired. Expression from certain promoters can be elevated in the presence of certain inducers; thus expression of the genetically engineered polypeptide may be controlled. Furthermore, different host cells have characteristics and specific mechanisms for the translational and post-translational processing and modification (e.g., phosphorylation, cleavage) of proteins. Appropriate cell lines can be chosen to ensure the desired modifications and processing of the foreign protein expressed.

[0180] Introduction of the nucleic acids and nucleic acid constructs of the invention into the host cell can be effected by calcium phosphate transfection, DEAE-dextran mediated transfection, cationic lipid-mediated transfection, electroporation, transduction, infection, or other methods. Such methods are described in many standard laboratory manuals, such as Davis et al., Basic Methods In Molecular Biology (1986). It is specifically contemplated that the polypeptides of the present invention may in fact be expressed by a host cell lacking a recombinant vector.

[0181] In addition to encompassing host cells containing the vector constructs discussed herein, the invention also encompasses primary, secondary, and immortalized host cells of vertebrate origin, particularly mammalian origin, that have been engineered to delete or replace endogenous genetic material (e.g., the coding sequence), and/or to include genetic material (e.g., heterologous polynucleotide sequences) that is operably associated with polynucleotides of the invention, and which activates, alters, and/or amplifies endogenous polynucleotides. For example, techniques known in the art may be used to operably associate heterologous control regions (e.g., promoter and/or enhancer) and endogenous polynucleotide sequences via homologous recombination (see, e.g., U.S. Pat. No. 5,641,670, issued Jun. 24, 1997; International Publication No. WO 96/29411; International Publication No. WO 94/12650; Koller et al., Proc. Natl. Acad. Sci. USA 86:8932-8935 (1989); and Zijlstra et al., Nature 342:435-438 (1989), the disclosures of each of which are incorporated by reference in their entireties).

[0182] Polypeptides of the invention can be recovered and purified from recombinant cell cultures by well-known methods including ammonium sulfate or ethanol precipitation, acid extraction, anion or cation exchange chromatography, phosphocellulose chromatography, hydrophobic interaction chromatography, affinity chromatography, hydroxylapatite chromatography and lectin chromatography. Most preferably, high performance liquid chromatography (“HPLC”) is employed for purification.

[0183] Polypeptides of the present invention can also be recovered from: products purified from natural sources, including bodily fluids, tissues and cells, whether directly isolated or cultured; products of chemical synthetic procedures; and products produced by recombinant techniques from a prokaryotic or eukaryotic host, including, for example, bacterial, yeast, higher plant, insect, and mammalian cells. Depending upon the host employed in a recombinant production procedure, the polypeptides of the present invention may be glycosylated or may be non-glycosylated. In addition, polypeptides of the invention may also include an initial modified methionine residue, in some cases as a result of host-mediated processes. Thus, it is well known in the art that the N-terminal methionine encoded by the translation initiation codon generally is removed with high efficiency from any protein after translation in all eukaryotic cells. While the N-terminal methionine on most proteins also is efficiently removed in most prokaryotes, for some proteins, this prokaryotic removal process is inefficient, depending on the nature of the amino acid to which the N-terminal methionine is covalently linked.

[0184] In one embodiment, the yeast Pichia pastoris is used to express polypeptides of the invention in a eukaryotic system. Pichia pastoris is a methylotrophic yeast which can metabolize methanol as its sole carbon source. A main step in the methanol metabolization pathway is the oxidation of methanol to formaldehyde using O₂. This reaction is catalyzed by the enzyme alcohol oxidase. In order to metabolize methanol as its sole carbon source, Pichia pastoris must generate high levels of alcohol oxidase due, in part, to the relatively low affinity of alcohol oxidase for O₂. Consequently, in a growth medium depending on methanol as a main carbon source, the promoter region of one of the two alcohol oxidase genes (AOX1) is highly active. In the presence of methanol, alcohol oxidase produced from the AOXI gene comprises up to approximately 30% of the total soluble protein in Pichia pastoris. See Ellis, S. B., et al., Mol. Cell. Biol. 5:1111-21 (1985); Koutz, P. J, et al., Yeast 5:167-77 (1989); Tschopp, J. F., et al., Nucl. Acids Res. 15:3859-76 (1987). Thus, a heterologous coding sequence, such as, for example, a polynucleotide of the present invention, under the transcriptional regulation of all or part of the AOX1 regulatory sequence is expressed at exceptionally high levels in Pichia yeast grown in the presence of methanol.

[0185] In one example, the plasmid vector pPIC9K is used to express DNA encoding a polypeptide of the invention, as set forth herein, in a Pichea yeast system essentially as described in “Pichia Protocols: Methods in Molecular Biology,” D. R. Higgins and J. Cregg, eds. The Humana Press, Totowa, N.J., 1998. This expression vector allows expression and secretion of a polypeptide of the invention by virtue of the strong AOX1 promoter linked to the Pichia pastoris alkaline phosphatase (PHO) secretory signal peptide (i.e., leader) located upstream of a multiple cloning site.

[0186] Many other yeast vectors could be used in place of pPIC9K, such as, pYES2, pYD1, pTEF1/Zeo, pYES2/GS, pPICZ, pGAPZ, pGAPZalpha, pPIC9, pPIC3.5, pHIL-D2, pHIL-S1, pPIC3.5K, and PAO815, as one skilled in the art would readily appreciate, as long as the proposed expression construct provides appropriately located signals for transcription, translation, secretion (if desired), and the like, including an in-frame AUG as required.

[0187] In another embodiment, high-level expression of a heterologous coding sequence, such as, for example, a polynucleotide of the present invention, may be achieved by cloning the heterologous polynucleotide of the invention into an expression vector such as, for example, pGAPZ or pGAPZalpha, and growing the yeast culture in the absence of methanol.

[0188] In addition to encompassing host cells containing the vector constructs discussed herein, the invention also encompasses primary, secondary, and immortalized host cells of vertebrate origin, particularly mammalian origin, that have been engineered to delete or replace endogenous genetic material (e.g., coding sequence), and/or to include genetic material (e.g., heterologous polynucleotide sequences) that is operably associated with polynucleotides of the invention, and which activates, alters, and/or amplifies endogenous polynucleotides. For example, techniques known in the art may be used to operably associate heterologous control regions (e.g., promoter and/or enhancer) and endogenous polynucleotide sequences via homologous recombination (see, e.g., U.S. Pat. No. 5,641,670, issued Jun. 24, 1997; International Publication No. WO96/29411, published Sep. 26, 1996; International Publication No. WO94/12650, published Aug. 4, 1994; Koller et al., Proc. Natl. Acad. Sci. USA 86:8932-8935 (1989); and Zijlstra et al., Nature 342:435-438 (1989), the disclosures of each of which are incorporated by reference in their entireties).

[0189] In addition, polypeptides of the invention can be chemically synthesized using techniques known in the art (e.g., see Creighton, 1983, Proteins: Structures and Molecular Principles, W. H. Freeman & Co., N.Y., and Hunkapiller et al., Nature, 310:105-111 (1984)). For example, a polypeptide corresponding to a fragment of a polypeptide can be synthesized by use of a peptide synthesizer. Furthermore, if desired, nonclassical amino acids or chemical amino acid analogs can be introduced as a substitution or addition into the polypeptide sequence. Non-classical amino acids include, but are not limited to, to the D-isomers of the common amino acids, 2,4-diaminobutyric acid, a-amino isobutyric acid, 4-aminobutyric acid, Abu, 2-amino butyric acid, g-Abu, e-Ahx, 6-amino hexanoic acid, Aib, 2-amino isobutyric acid, 3-amino propionic acid, ornithine, norleucine, norvaline, hydroxyproline, sarcosine, citrulline, homocitrulline, cysteic acid, t-butylglycine, t-butylalanine, phenylglycine, cyclohexylalanine, b-alanine, fluoro-amino acids, designer amino acids such as b-methyl amino acids, Ca-methyl amino acids, Na-methyl amino acids, and amino acid analogs in general. Furthermore, the amino acid can be D (dextrorotary) or L (levorotary).

[0190] The invention encompasses polypeptides of the present invention which are differentially modified during or after translation, e.g., by glycosylation, acetylation, phosphorylation, amidation, derivatization by known protecting/blocking groups, proteolytic cleavage, linkage to an antibody molecule or other cellular ligand, etc. Any of numerous chemical modifications may be carried out by known techniques, including but not limited, to specific chemical cleavage by cyanogen bromide, trypsin, chymotrypsin, papain, V8 protease, NaBH₄; acetylation, formylation, oxidation, reduction; metabolic synthesis in the presence of tunicamycin; etc.

[0191] Additional post-translational modifications encompassed by the invention include, for example, e.g., N-linked or O-linked carbohydrate chains, processing of N-terminal or C-terminal ends), attachment of chemical moieties to the amino acid backbone, chemical modifications of N-linked or O-linked carbohydrate chains, and addition or deletion of an N-terminal methionine residue as a result of procaryotic host cell expression. The polypeptides may also be modified with a detectable label, such as an enzymatic, fluorescent, isotopic or affinity label to allow for detection and isolation of the protein.

[0192] Examples of suitable enzymes include horseradish peroxidase, alkaline phosphatase, beta-galactosidase, or acetylcholinesterase; examples of suitable prosthetic group complexes include streptavidin/biotin and avidin/biotin; examples of suitable fluorescent materials include umbelliferone, fluorescein, fluorescein isothiocyanate, rhodamine, dichlorotriazinylamine fluorescein, dansyl chloride or phycoerythrin; an example of a luminescent material includes luminol; examples of bioluminescent materials include luciferase, luciferin, and aequorin; and examples of suitable radioactive material include iodine (¹²¹I, ¹²³I, ¹²⁵I, ¹³¹I), carbon (¹⁴C), sulfur (³⁵S), tritium (³H), indium (¹¹¹In, ¹¹²In, ^{113m}In, ^{115m}In), technetium (⁹⁹Tc, ^{99m}Tc), thallium (²⁰¹Ti), gallium (⁶⁸Ga, ⁶⁷Ga), palladium (¹⁰³Pd), molybdenum (⁹⁹Mo), xenon (¹³³Xe), fluorine (¹⁸F), ¹⁵³Sm, ¹⁷⁷Lu, ¹⁵⁹Gd, ¹⁴⁹Pm, ¹⁴⁰La, ¹⁷⁵Yb, ¹⁶⁶Ho ⁹⁰Y, ⁴⁷Sc, ¹⁸⁶Re, ¹⁸⁸Re, ¹⁴²pr, ¹⁰⁵Rh, and ⁹⁷Ru.

[0193] In specific embodiments, a polypeptide of the present invention or fragment or variant thereof is attached to macrocyclic chelators that associate with radiometal ions, including but not limited to, ¹⁷⁷Lu, ⁹⁰Y, ¹⁶⁶Ho, and ¹⁵³Sm, to polypeptides. In a preferred embodiment, the radiometal ion associated with the macrocyclic chelators is ¹¹¹In. In another preferred embodiment, the radiometal ion associated with the macrocyclic chelator is ⁹⁰Y. In specific embodiments, the macrocyclic chelator is 1,4,7,10-tetraazacyclododecane-N,N′,N″,N′″-tetraacetic acid (DOTA). In other specific embodiments, DOTA is attached to an antibody of the invention or fragment thereof via a linker molecule. Examples of linker molecules useful for conjugating DOTA to a polypeptide are commonly known in the art-see, for example, DeNardo et al., Clin Cancer Res. 4(10):2483-90 (1998); Peterson et al., Bioconjug. Chem. 10(4):553-7 (1999); an Zimmerman et al, Nucl. Med. Biol. 26(8):943-50 (1999); which are hereby incorporated by reference in their entirety.

[0194] As mentioned, the proteins of the invention may be modified by either natural processes, such as posttranslational processing, or by chemical modification techniques which are well known in the art. It will be appreciated that the same type of modification may be present in the same or varying degrees at several sites in a given polypeptide. Polypeptides of the invention may be branched, for example, as a result of ubiquitination, and they may be cyclic, with or without branching. Cyclic, branched, and branched cyclic polypeptides may result from posttranslation natural processes or may be made by synthetic methods. Modifications include acetylation, acylation, ADP-ribosylation, amidation, covalent attachment of flavin, covalent attachment of a heme moiety, covalent attachment of a nucleotide or nucleotide derivative, covalent attachment of a lipid or lipid derivative, covalent attachment of phosphotidylinositol, cross-linking, cyclization, disulfide bond formation, demethylation, formation of covalent cross-links, formation of cysteine, formation of pyroglutamate, formylation, gamma-carboxylation, glycosylation, GPI anchor formation, hydroxylation, iodination, methylation, myristoylation, oxidation, pegylation, proteolytic processing, phosphorylation, prenylation, racemization, selenoylation, sulfation, transfer-RNA mediated addition of amino acids to proteins such as arginylation, and ubiquitination. (See, for instance, PROTEINS—STRUCTURE AND MOLECULAR PROPERTIES, 2nd Ed., T. E. Creighton, W. H. Freeman and Company, New York (1993); POSTTRANSLATIONAL COVALENT MODIFICATION OF PROTEINS, B. C. Johnson, Ed., Academic Press, New York, pgs. 1-12 (1983); Seifter et al., Meth. Enzymol. 182:626-646 (1990); Rattan et al., Ann. N.Y. Acad. Sci. 663:48-62 (1992)).

[0195] Also provided by the invention are chemically modified derivatives of the polypeptides of the invention which may provide additional advantages such as increased solubility, stability and circulating time of the polypeptide, or decreased immunogenicity (see U.S. Pat. No. 4,179,337). The chemical moieties for derivitization may be selected from water soluble polymers such as polyethylene glycol, ethylene glycol/propylene glycol copolymers, carboxymethylcellulose, dextran, polyvinyl alcohol and the like. The polypeptides may be modified at random positions within the molecule, or at predetermined positions within the molecule and may include one, two, three or more attached chemical moieties.

[0196] The polymer may be of any molecular weight, and may be branched or unbranched. For polyethylene glycol, the preferred molecular weight is between about 1 kDa and about 100 kDa (the term “about” indicating that in preparations of polyethylene glycol, some molecules will weigh more, some less, than the stated molecular weight) for ease in handling and manufacturing. Other sizes may be used, depending on the desired therapeutic profile (e.g., the duration of sustained release desired, the effects, if any on biological activity, the ease in handling, the degree or lack of antigenicity and other known effects of the polyethylene glycol to a therapeutic protein or analog). For example, the polyethylene glycol may have an average molecular weight of about 200, 500, 1000, 1500, 2000, 2500, 3000, 3500, 4000, 4500, 5000, 5500, 6000, 6500, 7000, 7500, 8000, 8500, 9000, 9500, 10,000, 10,500, 11,000, 11,500, 12,000, 12,500, 13,000, 13,500, 14,000, 14,500, 15,000, 15,500, 16,000, 16,500, 17,000, 17,500, 18,000, 18,500, 19,000, 19,500, 20,000, 25,000, 30,000, 35,000, 40,000, 45,000, 50,000, 55,000, 60,000, 65,000, 70,000, 75,000, 80,000, 85,000, 90,000, 95,000, or 100,000 kDa.

[0197] As noted above, the polyethylene glycol may have a branched structure. Branched polyethylene glycols are described, for example, in U.S. Pat. No. 5,643,575; Morpurgo et al, Appl. Biochem. Biotechnol. 56:59-72 (1996); Vorobjev et al., Nucleosides Nucleotides 18:2745-2750 (1999); and Caliceti et al, Bioconjug. Chem. 10:638-646 (1999), the disclosures of each of which are incorporated herein by reference.

[0198] The polyethylene glycol molecules (or other chemical moieties) should be attached to the protein with consideration of effects on functional or antigenic domains of the protein. There are a number of attachment methods available to those skilled in the art, such as, for example, the method disclosed in EP 0 401 384 (coupling PEG to G-CSF), herein incorporated by reference; see also Malik et al., Exp. Hematol. 20:1028-1035 (1992), reporting pegylation of GM-CSF using tresyl chloride. For example, polyethylene glycol may be covalently bound through amino acid residues via a reactive group, such as a free amino or carboxyl group. Reactive groups are those to which an activated polyethylene glycol molecule may be bound. The amino acid residues having a free amino group may include lysine residues and the N-terminal amino acid residues; those having a free carboxyl group may include aspartic acid residues glutamic acid residues and the C-terminal amino acid residue. Sulfhydryl groups may also be used as a reactive group for attaching the polyethylene glycol molecules. Preferred for therapeutic purposes is attachment at an amino group, such as attachment at the N-terminus or lysine group.

[0199] As suggested above, polyethylene glycol may be attached to proteins via linkage to any of a number of amino acid residues. For example, polyethylene glycol can be linked to proteins via covalent bonds to lysine, histidine, aspartic acid, glutamic acid, or cysteine residues. One or more reaction chemistries may be employed to attach polyethylene glycol to specific amino acid residues (e.g., lysine, histidine, aspartic acid, glutamic acid, or cysteine) of the protein or to more than one type of amino acid residue (e.g., lysine, histidine, aspartic acid, glutamic acid, cysteine and combinations thereof) of the protein.

[0200] One may specifically desire proteins chemically modified at the N-terminus. Using polyethylene glycol as an illustration of the present composition, one may select from a variety of polyethylene glycol molecules (by molecular weight, branching, etc.), the proportion of polyethylene glycol molecules to protein (polypeptide) molecules in the reaction mix, the type of pegylation reaction to be performed, and the method of obtaining the selected N-terminally pegylated protein. The method of obtaining the N-terminally pegylated preparation (i.e., separating this moiety from other monopegylated moieties if necessary) may be by purification of the N-terminally pegylated material from a population of pegylated protein molecules. Selective proteins chemically modified at the N-terminus modification may be accomplished by reductive alkylation which exploits differential reactivity of different types of primary amino groups (lysine versus the N-terminal) available for derivatization in a particular protein. Under the appropriate reaction conditions, substantially selective derivatization of the protein at the N-terminus with a carbonyl group containing polymer is achieved.

[0201] As indicated above, pegylation of the proteins of the invention may be accomplished by any number of means. For example, polyethylene glycol may be attached to the protein either directly or by an intervening linker. Linkerless systems for attaching polyethylene glycol to proteins are described in Delgado et al., Crit. Rev. Thera. Drug Carrier Sys. 9:249-304 (1992); Francis et al., Intern. J. of Hematol. 68:1-18 (1998); U.S. Pat. No. 4,002,531; U.S. Pat. No. 5,349,052; WO 95/06058; and WO 98/32466, the disclosures of each of which are incorporated herein by reference.

[0202] One system for attaching polyethylene glycol directly to amino acid residues of proteins without an intervening linker employs tresylated MPEG, which is produced by the modification of monmethoxy polyethylene glycol (MPEG) using tresylchloride (ClSO₂CH₂CF₃). Upon reaction of protein with tresylated MPEG, polyethylene glycol is directly attached to amine groups of the protein. Thus, the invention includes protein-polyethylene glycol conjugates produced by reacting proteins of the invention with a polyethylene glycol molecule having a 2,2,2-trifluoreothane sulphonyl group.

[0203] Polyethylene glycol can also be attached to proteins using a number of different intervening linkers. For example, U.S. Pat. No. 5,612,460, the entire disclosure of which is incorporated herein by reference, discloses urethane linkers for connecting polyethylene glycol to proteins. Protein-polyethylene glycol conjugates wherein the polyethylene glycol is attached to the protein by a linker can also be produced by reaction of proteins with compounds such as MPEG-succinimidylsuccinate, MPEG activated with 1,1′-carbonyldiimidazole, MPEG-2,4,5-trichloropenylcarbonate, MPEG-p-nitrophenolcarbonate, and various MPEG-succinate derivatives. A number of additional polyethylene glycol derivatives and reaction chemistries for attaching polyethylene glycol to proteins are described in International Publication No. WO 98/32466, the entire disclosure of which is incorporated herein by reference. Pegylated protein products produced using the reaction chemistries set out herein are included within the scope of the invention.

[0204] The number of polyethylene glycol moieties attached to each protein of the invention (i.e., the degree of substitution) may also vary. For example, the pegylated proteins of the invention may be linked, on average, to 1, 2, 3, 4, 5, 6, 7, 8, 9, 10, 12, 15, 17, 20, or more polyethylene glycol molecules. Similarly, the average degree of substitution within ranges such as 1-3, 2-4, 3-5, 4-6, 5-7, 6-8, 7-9, 8-10, 9-11, 10-12, 11-13, 12-14 13-15, 14-16, 15-17, 16-18, 17-19, or 18-20 polyethylene glycol moieties per protein molecule. Methods for determining the degree of substitution are discussed, for example, in Delgado et al., Crit. Rev. Thera. Drug Carrier Sys. 9:249-304 (1992).

[0205] The polypeptides of the invention can be recovered and purified from chemical synthesis and recombinant cell cultures by standard methods which include, but are not limited to, ammonium sulfate or ethanol precipitation, acid extraction, anion or cation exchange chromatography, phosphocellulose chromatography, hydrophobic interaction chromatography, affinity chromatography, hydroxylapatite chromatography and lectin chromatography. Most preferably, high performance liquid chromatography (“HPLC”) is employed for purification. Well known techniques for refolding protein may be employed to regenerate active conformation when the polypeptide is denatured during isolation and/or purification.

[0206] The polypeptides of the invention may be in monomers or multimers (i.e., dimers, trimers, tetramers and higher multimers). Accordingly, the present invention relates to monomers and multimers of the polypeptides of the invention, their preparation, and compositions (preferably, Therapeutics) containing them. In specific embodiments, the polypeptides of the invention are monomers, dimers, trimers or tetramers. In additional embodiments, the multimers of the invention are at least dimers, at least trimers, or at least tetramers.

[0207] Multimers encompassed by the invention may be homomers or heteromers. As used herein, the term homomer refers to a multimer containing only polypeptides corresponding to a protein of the invention (e.g., the amino acid sequence of SEQ ID NO:Y, an amino acid sequence encoded by SEQ ID NO:X or the complement of SEQ ID NO:X, the amino acid sequence encoded by the portion of SEQ ID NO:X as defined in columns 8 and 9 of Table 2, and/or an amino acid sequence encoded by cDNA contained in Clone ID NO:Z (including fragments, variants, splice variants, and fusion proteins, corresponding to these as described herein)). These homomers may contain polypeptides having identical or different amino acid sequences. In a specific embodiment, a homomer of the invention is a multimer containing only polypeptides having an identical amino acid sequence. In another specific embodiment, a homomer of the invention is a multimer containing polypeptides having different amino acid sequences. In specific embodiments, the multimer of the invention is a homodimer (e.g., containing two polypeptides having identical or different amino acid sequences) or a homotrimer (e.g., containing three polypeptides having identical and/or different amino acid sequences). In additional embodiments, the homomeric multimer of the invention is at least a homodimer, at least a homotrimer, or at least a homotetramer.

[0208] As used herein, the term heteromer refers to a multimer containing one or more heterologous polypeptides (i.e., polypeptides of different proteins) in addition to the polypeptides of the invention. In a specific embodiment, the multimer of the invention is a heterodimer, a heterotrimer, or a heterotetramer. In additional embodiments, the heteromeric multimer of the invention is at least a heterodimer, at least a heterotrimer, or at least a heterotetramer.

[0209] Multimers of the invention may be the result of hydrophobic, hydrophilic, ionic and/or covalent associations and/or may be indirectly linked by, for example, liposome formation. Thus, in one embodiment, multimers of the invention, such as, for example, homodimers or homotrimers, are formed when polypeptides of the invention contact one another in solution. In another embodiment, heteromultimers of the invention, such as, for example, heterotrimers or heterotetramers, are formed when polypeptides of the invention contact antibodies to the polypeptides of the invention (including antibodies to the heterologous polypeptide sequence in a fusion protein of the invention) in solution. In other embodiments, multimers of the invention are formed by covalent associations with and/or between the polypeptides of the invention. Such covalent associations may involve one or more amino acid residues contained in the polypeptide sequence (e.g., that recited in SEQ ID NO:Y, encoded by the portion of SEQ ID NO:X as defined in columns 8 and 9 of Table 2, and/or encoded by the cDNA contained in Clone ID NO:Z). In one instance, the covalent associations are cross-linking between cysteine residues located within the polypeptide sequences which interact in the native (i.e., naturally occurring) polypeptide. In another instance, the covalent associations are the consequence of chemical or recombinant manipulation. Alternatively, such covalent associations may involve one or more amino acid residues contained in the heterologous polypeptide sequence in a fusion protein. In one example, covalent associations are between the heterologous sequence contained in a fusion protein of the invention (see, e.g., U.S. Pat. No. 5,478,925). In a specific example, the covalent associations are between the heterologous sequence contained in a Fc fusion protein of the invention (as described herein). In another specific example, covalent associations of fusion proteins of the invention are between heterologous polypeptide sequence from another protein that is capable of forming covalently associated multimers, such as for example, osteoprotegerin (see, e.g., International Publication NO: WO 98/49305, the contents of which are herein incorporated by reference in its entirety). In another embodiment, two or more polypeptides of the invention are joined through peptide linkers. Examples include those peptide linkers described in U.S. Pat. No. 5,073,627 (hereby incorporated by reference). Proteins comprising multiple polypeptides of the invention separated by peptide linkers may be produced using conventional recombinant DNA technology.

[0210] Another method for preparing multimer polypeptides of the invention involves use of polypeptides of the invention fused to a leucine zipper or isoleucine zipper polypeptide sequence. Leucine zipper and isoleucine zipper domains are polypeptides that promote multimerization of the proteins in which they are found. Leucine zippers were originally identified in several DNA-binding proteins (Landschulz et al., Science 240:1759, (1988)), and have since been found in a variety of different proteins. Among the known leucine zippers are naturally occurring peptides and derivatives thereof that dimerize or trimerize. Examples of leucine zipper domains suitable for producing soluble multimeric proteins of the invention are those described in PCT application WO94/10308, hereby incorporated by reference. Recombinant fusion proteins comprising a polypeptide of the invention fused to a polypeptide sequence that dimerizes or trimerizes in solution are expressed in suitable host cells, and the resulting soluble multimeric fusion protein is recovered from the culture supernatant using techniques known in the art.

[0211] Trimeric polypeptides of the invention may offer the advantage of enhanced biological activity. Preferred leucine zipper moieties and isoleucine moieties are those that preferentially form trimers. One example is a leucine zipper derived from lung surfactant protein D (SPD), as described in Hoppe et al. (FEBS Letters 344:191, (1994)) and in U.S. patent application Ser. No. 08/446,922, hereby incorporated by reference. Other peptides derived from naturally occurring trimeric proteins may be employed in preparing trimeric polypeptides of the invention.

[0212] In another example, proteins of the invention are associated by interactions between Flag® polypeptide sequence contained in fusion proteins of the invention containing Flag® polypeptide sequence. In a further embodiment, proteins of the invention are associated by interactions between heterologous polypeptide sequence contained in Flag® fusion proteins of the invention and anti-Flag® antibody.

[0213] The multimers of the invention may be generated using chemical techniques known in the art. For example, polypeptides desired to be contained in the multimers of the invention may be chemically cross-linked using linker molecules and linker molecule length optimization techniques known in the art (see, e.g., U.S. Pat. No. 5,478,925, which is herein incorporated by reference in its entirety). Additionally, multimers of the invention may be generated using techniques known in the art to form one or more inter-molecule cross-links between the cysteine residues located within the sequence of the polypeptides desired to be contained in the multimer (see, e.g., U.S. Pat. No. 5,478,925, which is herein incorporated by reference in its entirety). Further, polypeptides of the invention may be routinely modified by the addition of cysteine or biotin to the C-terminus or N-terminus of the polypeptide and techniques known in the art may be applied to generate multimers containing one or more of these modified polypeptides (see, e.g., U.S. Pat. No. 5,478,925, which is herein incorporated by reference in its entirety). Additionally, techniques known in the art may be applied to generate liposomes containing the polypeptide components desired to be contained in the multimer of the invention (see, e.g., U.S. Pat. No. 5,478,925, which is herein incorporated by reference in its entirety).

[0214] Alternatively, multimers of the invention may be generated using genetic engineering techniques known in the art. In one embodiment, polypeptides contained in multimers of the invention are produced recombinantly using fusion protein technology described herein or otherwise known in the art (see, e.g., U.S. Pat. No. 5,478,925, which is herein incorporated by reference in its entirety). In a specific embodiment, polynucleotides coding for a homodimer of the invention are generated by ligating a polynucleotide sequence encoding a polypeptide of the invention to a sequence encoding a linker polypeptide and then further to a synthetic polynucleotide encoding the translated product of the polypeptide in the reverse orientation from the original C-terminus to the N-terminus (lacking the leader sequence) (see, e.g., U.S. Pat. No. 5,478,925, which is herein incorporated by reference in its entirety). In another embodiment, recombinant techniques described herein or otherwise known in the art are applied to generate recombinant polypeptides of the invention which contain a transmembrane domain (or hydrophobic or signal peptide) and which can be incorporated by membrane reconstitution techniques into liposomes (see, e.g., U.S. Pat. No. 5,478,925, which is herein incorporated by reference in its entirety).

[0215] Antibodies

[0216] Further polypeptides of the invention relate to antibodies and T-cell antigen receptors (TCR) which immunospecifically bind a polypeptide, polypeptide fragment, or variant of the invention (e.g., a polypeptide or fragment or variant of the amino acid sequence of SEQ ID NO:Y or a polypeptide encoded by the cDNA contained in Clone ID No:Z, and/or an epitope, of the present invention) as determined by immunoassays well known in the art for assaying specific antibody-antigen binding. Antibodies of the invention include, but are not limited to, polyclonal, monoclonal, multispecific, human, humanized or chimeric antibodies, single chain antibodies, Fab fragments, F(ab′) fragments, fragments produced by a Fab expression library, anti-idiotypic (anti-Id) antibodies (including, e.g., anti-Id antibodies to antibodies of the invention), intracellularly-made antibodies (i.e., intrabodies), and epitope-binding fragments of any of the above. The term “antibody,” as used herein, refers to immunoglobulin molecules and immunologically active portions of immunoglobulin molecules, i.e., molecules that contain an antigen binding site that immunospecifically binds an antigen. The immunoglobulin molecules of the invention can be of any type (e.g., IgG, IgE, IgM, IgD, IgA and IgY), class (e.g., IgG1, IgG2, IgG3, IgG4, IgA1 and IgA2) or subclass of immunoglobulin molecule. In preferred embodiments, the immunoglobulin molecules of the invention are IgG1. In other preferred embodiments, the immunoglobulin molecules of the invention are IgG4.

[0217] Most preferably the antibodies are human antigen-binding antibody fragments of the present invention and include, but are not limited to, Fab, Fab′ and F(ab′)2, Fd, single-chain Fvs (scFv), single-chain antibodies, disulfide-linked Fvs (sdFv) and fragments comprising either a VL or VH domain. Antigen-binding antibody fragments, including single-chain antibodies, may comprise the variable region(s) alone or in combination with the entirety or a portion of the following: hinge region, CH1, CH2, and CH3 domains. Also included in the invention are antigen-binding fragments also comprising any combination of variable region(s) with a hinge region, CH1, CH2, and CH3 domains. The antibodies of the invention may be from any animal origin including birds and mammals. Preferably, the antibodies are human, murine (e.g., mouse and rat), donkey, ship rabbit, goat, guinea pig, camel, horse, or chicken. As used herein, “human” antibodies include antibodies having the amino acid sequence of a human immunoglobulin and include antibodies isolated from human immunoglobulin libraries or from animals transgenic for one or more human immunoglobulin and that do not express endogenous immunoglobulins, as described infra and, for example in, U.S. Pat. No. 5,939,598 by Kucherlapati et al.

[0218] The antibodies of the present invention may be monospecific, bispecific, trispecific or of greater multispecificity. Multispecific antibodies may be specific for different epitopes of a polypeptide of the present invention or may be specific for both a polypeptide of the present invention as well as for a heterologous epitope, such as a heterologous polypeptide or solid support material. See, e.g., PCT publications WO 93/17715; WO 92/08802; WO 91/00360; WO 92/05793; Tutt, et al., J. Immunol. 147:60-69 (1991); U.S. Pat. Nos. 4,474,893; 4,714,681; 4,925,648; 5,573,920; 5,601,819; Kostelny et al., J. Immunol. 148:1547-1553 (1992).

[0219] Antibodies of the present invention may be described or specified in terms of the epitope(s) or portion(s) of a polypeptide of the present invention which they recognize or specifically bind. The epitope(s) or polypeptide portion(s) may be specified as described herein, e.g., by N-terminal and C-terminal positions, or by size in contiguous amino acid residues, or listed in the Tables and Figures. Preferred epitopes of the invention include the predicted epitopes shown in column 7 of Table 1A, as well as polynucleotides that encode these epitopes. Antibodies which specifically bind any epitope or polypeptide of the present invention may also be excluded. Therefore, the present invention includes antibodies that specifically bind polypeptides of the present invention, and allows for the exclusion of the same.

[0220] Antibodies of the present invention may also be described or specified in terms of their cross-reactivity. Antibodies that do not bind any other analog, ortholog, or homolog of a polypeptide of the present invention are included. Antibodies that bind polypeptides with at least 95%, at least 90%, at least 85%, at least 80%, at least 75%, at least 70%, at least 65%, at least 60%, at least 55%, and at least 50% identity (as calculated using methods known in the art and described herein) to a polypeptide of the present invention are also included in the present invention. In specific embodiments, antibodies of the present invention cross-react with murine, rat and/or rabbit homologs of human proteins and the corresponding epitopes thereof. Antibodies that do not bind polypeptides with less than 95%, less than 90%, less than 85%, less than 80%, less than 75%, less than 70%, less than 65%, less than 60%, less than 55%, and less than 50% identity (as calculated using methods known in the art and described herein) to a polypeptide of the present invention are also included in the present invention. In a specific embodiment, the above-described cross-reactivity is with respect to any single specific antigenic or immunogenic polypeptide, or combination(s) of 2, 3, 4, 5, or more of the specific antigenic and/or immunogenic polypeptides disclosed herein. Further included in the present invention are antibodies which bind polypeptides encoded by polynucleotides which hybridize to a polynucleotide of the present invention under stringent hybridization conditions (as described herein). Antibodies of the present invention may also be described or specified in terms of their binding affinity to a polypeptide of the invention. Preferred binding affinities include those with a dissociation constant or Kd less than 5×10⁻²M, 10⁻²M, 5×10⁻³M, 10⁻³M, 5×10⁻⁴M, 10⁻⁴M, 5×10⁻⁵M, 10⁻⁵M, 5×10⁻⁶M, 10⁻⁶M, 5×10⁻⁷M, 10⁷M, 5×10⁻⁸M, 10⁻⁸M, 5×10⁻⁹M, 10⁻⁹M, 5×10⁻¹⁰M, 10⁻¹⁰M, 5×10⁻¹¹M, 10⁻¹¹M, 5×10⁻¹²M, 10⁻¹²M, 5×10⁻¹³M, 10⁻¹³M, 5×10⁻¹⁴M, 10⁻¹⁴M, 5×10⁻¹⁵M, 10⁻¹⁵M.

[0221] The invention also provides antibodies that competitively inhibit binding of an antibody to an epitope of the invention as determined by any method known in the art for determining competitive binding, for example, the immunoassays described herein. In preferred embodiments, the antibody competitively inhibits binding to the epitope by at least 95%, at least 90%, at least 85%, at least 80%, at least 75%, at least 70%, at least 60%, or at least 50%.

[0222] Antibodies of the present invention may act as agonists or antagonists of the polypeptides of the present invention. For example, the present invention includes antibodies which disrupt the receptor/ligand interactions with the polypeptides of the invention either partially or fully. Preferably, antibodies of the present invention bind an antigenic epitope disclosed herein, or a portion thereof. The invention features both receptor-specific antibodies and ligand-specific antibodies. The invention also features receptor-specific antibodies which do not prevent ligand binding but prevent receptor activation. Receptor activation (i.e., signaling) may be determined by techniques described herein or otherwise known in the art. For example, receptor activation can be determined by detecting the phosphorylation (e.g., tyrosine or serine/threonine) of the receptor or its substrate by immunoprecipitation followed by western blot analysis (for example, as described supra). In specific embodiments, antibodies are provided that inhibit ligand activity or receptor activity by at least 95%, at least 90%, at least 85%, at least 80%, at least 75%, at least 70%, at least 60%, or at least 50% of the activity in absence of the antibody.

[0223] The invention also features receptor-specific antibodies which both prevent ligand binding and receptor activation as well as antibodies that recognize the receptor-ligand complex, and, preferably, do not specifically recognize the unbound receptor or the unbound ligand. Likewise, included in the invention are neutralizing antibodies which bind the ligand and prevent binding of the ligand to the receptor, as well as antibodies which bind the ligand, thereby preventing receptor activation, but do not prevent the ligand from binding the receptor. Further included in the invention are antibodies which activate the receptor. These antibodies may act as receptor agonists, i.e., potentiate or activate either all or a subset of the biological activities of the ligand-mediated receptor activation, for example, by inducing dimerization of the receptor. The antibodies may be specified as agonists, antagonists or inverse agonists for biological activities comprising the specific biological activities of the peptides of the invention disclosed herein. The above antibody agonists can be made using methods known in the art. See, e.g., PCT publication WO 96/40281; U.S. Pat. No. 5,811,097; Deng et al., Blood 92(6):1981-1988 (1998); Chen et al., Cancer Res. 58(16):3668-3678 (1998); Harrop et al., J. Immunol. 161(4):1786-1794 (1998); Zhu et al., Cancer Res. 58(15):3209-3214 (1998); Yoon et al., J. Immunol. 160(7):3170-3179 (1998); Prat et al., J. Cell. Sci. 111(Pt2):237-247 (1998); Pitard et al., J. Immunol. Methods 205(2):177-190 (1997); Liautard et al., Cytokine 9(4):233-241 (1997Carlson et al., J. Biol. Chem. 272(17):11295-11301 (1997); Taryman et al., Neuron 14(4):755-762 (1995); Muller et al., Structure 6(9):1153-1167 (1998); Bartunek et a Cytokine 8(1):14-20 (1996) (which are all incorporated by reference herein in their entireties).

[0224] Antibodies of the present invention may be used, for example, to purify, detect, and target the polypeptides of the present invention, including both in vitro and in vivo diagnostic and therapeutic methods. For example, the antibodies have utility in immunoassays for qualitatively and quantitatively measuring levels of the polypeptides of the present invention in biological samples. See, e.g., Harlow et al., Antibodies: A Laboratory Manual, (Cold Spring Harbor Laboratory Press, 2nd ed. 1988); incorporated by reference herein in its entirety.

[0225] As discussed in more detail below, the antibodies of the present invention may be used either alone or in combination with other compositions. The antibodies may further be recombinantly fused to a heterologous polypeptide at the N- or C-terminus or chemically conjugated (including covalent and non-covalent conjugations) to polypeptides or other compositions. For example, antibodies of the present invention may be recombinantly fused or conjugated to molecules useful as labels in detection assays and effector molecules such as heterologous polypeptides, drugs, radionuclides, or toxins. See, e.g., PCT publications WO 92/08495; WO 91/14438; WO 89/12624; U.S. Pat. No. 5,314,995; and EP 396,387; the disclosures of which are incorporated herein by reference in their entireties.

[0226] The antibodies of the invention include derivatives that are modified, i.e, by the covalent attachment of any type of molecule to the antibody such that covalent attachment does not prevent the antibody from generating an anti-idiotypic response. For example, but not by way of limitation, the antibody derivatives include antibodies that have been modified, e.g., by glycosylation, acetylation, pegylation, phosphylation, amidation, derivatization by known protecting/blocking groups, proteolytic cleavage, linkage to a cellular ligand or other protein, etc. Any of numerous chemical modifications may be carried out by known techniques, including, but not limited to specific chemical cleavage, acetylation, formylation, metabolic synthesis of tunicamycin, etc. Additionally, the derivative may contain one or more non-classical amino acids.

[0227] The antibodies of the present invention may be generated by any suitable method known in the art. Polyclonal antibodies to an antigen-of- interest can be produced by various procedures well known in the art. For example, a polypeptide of the invention can be administered to various host animals including, but not limited to, rabbits, mice, rats, etc. to induce the production of sera containing polyclonal antibodies specific for the antigen. Various adjuvants may be used to increase the immunological response, depending on the host species, and include but are not limited to, Freund's (complete and incomplete), mineral gels such as aluminum hydroxide, surface active substances such as lysolecithin, pluronic polyols, polyanions, peptides, oil emulsions, keyhole limpet hemocyanins, dinitrophenol, and potentially useful human adjuvants such as BCG (bacille Calmette-Guerin) and corynebacterium parvum. Such adjuvants are also well known in the art.

[0228] Monoclonal antibodies can be prepared using a wide variety of techniques known in the art including the use of hybridoma, recombinant, and phage display technologies, or a combination thereof. For example, monoclonal antibodies can be produced using hybridoma techniques including those known in the art and taught, for example, in Harlow et al., Antibodies: A Laboratory Manual, (Cold Spring Harbor Laboratory Press, 2nd ed. 1988); Hammerling, et al., in: Monoclonal Antibodies and T-Cell Hybridomas 563-681 (Elsevier, N.Y., 1981) (said references incorporated by reference in their entireties). The term “monoclonal antibody” as used herein is not limited to antibodies produced through hybridoma technology. The term “monoclonal antibody” refers to an antibody that is derived from a single clone, including any eukaryotic, prokaryotic, or phage clone, and not the method by which it is produced.

[0229] Methods for producing and screening for specific antibodies using hybridoma technology are routine and well known in the art and are discussed in detail in the Examples. In a non-limiting example, mice can be immunized with a polypeptide of the invention or a cell expressing such peptide. Once an immune response is detected, e.g., antibodies specific for the antigen are detected in the mouse serum, the mouse spleen is harvested and splenocytes isolated. The splenocytes are then fused by well known techniques to any suitable myeloma cells, for example cells from cell line SP20 available from the ATCC. Hybridomas are selected and cloned by limited dilution. The hybridoma clones are then assayed by methods known in the art for cells that secrete antibodies capable of binding a polypeptide of the invention. Ascites fluid, which generally contains high levels of antibodies, can be generated by immunizing mice with positive hybridoma clones.

[0230] Accordingly, the present invention provides methods of generating monoclonal antibodies as well as antibodies produced by the method comprising culturing a hybridoma cell secreting an antibody of the invention wherein, preferably, the hybridoma is generated by fusing splenocytes isolated from a mouse immunized with an antigen of the invention with myeloma cells and then screening the hybridomas resulting from the fusion for hybridoma clones that secrete an antibody able to bind a polypeptide of the invention.

[0231] Another well known method for producing both polyclonal and monoclonal human B cell lines is transformation using Epstein Barr Virus (EBV). Protocols for generating EBV-transformed B cell lines are commonly known in the art, such as, for example, the protocol outlined in Chapter 7.22 of Current Protocols in Immunology, Coligan et al., Eds., 1994, John Wiley & Sons, N.Y., which is hereby incorporated in its entirety by reference. The source of B cells for transformation is commonly human peripheral blood, but B cells for transformation may also be derived from other sources including, but not limited to, lymph nodes, tonsil, spleen, tumor tissue, and infected tissues. Tissues are generally made into single cell suspensions prior to EBV transformation. Additionally, steps may be taken to either physically remove or inactivate T cells (e.g., by treatment with cyclosporin A) in B cell-containing samples, because T cells from individuals seropositive for anti-EBV antibodies can suppress B cell immortalization by EBV.

[0232] In general, the sample containing human B cells is innoculated with EBV, and cultured for 3-4 weeks. A typical source of EBV is the culture supernatant of the B95-8 cell line (ATCC #VR-1492). Physical signs of EBV transformation can generally be seen towards the end of the 3-4 week culture period. By phase-contrast microscopy, transformed cells may appear large, clear, hairy and tend to aggregate in tight clusters of cells. Initially, EBV lines are generally polyclonal. However, over prolonged periods of cell cultures, EBV lines may become monoclonal or polyclonal as a result of the selective outgrowth of particular B cell clones. Alternatively, polyclonal EBV transformed lines may be subcloned (e.g., by limiting dilution culture) or fused with a suitable fusion partner and plated at limiting dilution to obtain monoclonal B cell lines. Suitable fusion partners for EBV transformed cell lines include mouse myeloma cell lines (e.g., SP2/0, X63-Ag8.653), heteromyeloma cell lines (human x mouse; e.g, SPAM-8, SBC-H20, and CB-F7), and human cell lines (e.g., GM 1500, SKO-007, RPMJ 8226, and KR-4). Thus, the present invention also provides a method of generating polyclonal or monoclonal human antibodies against polypeptides of the invention or fragments thereof, comprising EBV-transformation of human B cells.

[0233] Antibody fragments which recognize specific epitopes may be generated by known techniques. For example, Fab and F(ab′)2 fragments of the invention may be produced by proteolytic cleavage of immunoglobulin molecules, using enzymes such as papain (to produce Fab fragments) or pepsin (to produce F(ab′)2 fragments). F(ab′)2 fragments contain the variable region, the light chain constant region and the CH1 domain of the heavy chain.

[0234] For example, the antibodies of the present invention can also be generated using various phage display methods known in the art. In phage display methods, functional antibody domains are displayed on the surface of phage particles which carry the polynucleotide sequences encoding them. In a particular embodiment, such phage can be utilized to display antigen binding domains expressed from a repertoire or combinatorial antibody library (e.g., human or murine). Phage expressing an antigen binding domain that binds the antigen of interest can be selected or identified with antigen, e.g., using labeled antigen or antigen bound or captured to a solid surface or bead. Phage used in these methods are typically filamentous phage including fd and M13 binding domains expressed from phage with Fab, Fv or disulfide stabilized Fv antibody domains recombinantly fused to either the phage gene III or gene VIII protein. Examples of phage display methods that can be used to make the antibodies of the present invention include those disclosed in Brinkman et al., J. Immunol. Methods 182:41-50 (1995); Ames et al., J. Immunol. Methods 184:177-186 (1995); Kettleborough et al., Eur. J. Immunol. 24:952-958 (1994); Persic et al., Gene 187 9-18 (1997); Burton et al., Advances in Immunology 57:191-280 (1994); PCT application No. PCT/GB91/01134; PCT publications WO 90/02809; WO 91/10737; WO 92/01047; WO 92/18619; WO 93/11236; WO 95/15982; WO 95/20401; and U.S. Pat. Nos. 5,698,426; 5,223,409; 5,403,484; 5,580,717; 5,427,908; 5,750,753; 5,821,047; 5,571,698; 5,427,908; 5,516,637; 5,780,225; 5,658,727; 5,733,743 and 5,969,108; each of which is incorporated herein by reference in its entirety.

[0235] As described in the above references, after phage selection, the antibody coding regions from the phage can be isolated and used to generate whole antibodies, including human antibodies, or any other desired antigen binding fragment, and expressed in any desired host, including mammalian cells, insect cells, plant cells, yeast, and bacteria, e.g., as described in detail below. For example, techniques to recombinantly produce Fab, Fab′ and F(ab′)2 fragments can also be employed using methods known in the art such as those disclosed in PCT publication WO 92/22324; Mullinax et al., BioTechniques 12(6):864-869 (1992); and Sawai et al., AJRI 34:26-34 (1995); and Better et al., Science 240:1041-1043 (1988) (said references incorporated by reference in their entireties).

[0236] Examples of techniques which can be used to produce single-chain Fvs and antibodies include those described in U.S. Pat. Nos. 4,946,778 and 5,258,498; Huston et al., Methods in Enzymology 203:46-88 (1991); Shu et al., PNAS 90:7995-7999 (1993); and Skerra et al., Science 240:1038-1040 (1988). For some uses, including in vivo use of antibodies in humans and in vitro detection assays, it may be preferable to use chimeric, humanized, or human antibodies. A chimeric antibody is a molecule in which different portions of the antibody are derived from different animal species, such as antibodies having a variable region derived from a murine monoclonal antibody and a human immunoglobulin constant region. Methods for producing chimeric antibodies are known in the art. See e.g., Morrison, Science 229:1202 (1985); Oi et al., BioTechniques 4:214 (1986); Gillies et al., (1989) J. Immunol. Methods 125:191-202; U.S. Pat. Nos. 5,807,715; 4,816,567; and 4,816397, which are incorporated herein by reference in their entirety. Humanized antibodies are antibody molecules from non-human species antibody that binds the desired antigen having one or more complementarity determining regions (CDRs) from the non-human species and a framework regions from a human immunoglobulin molecule. Often, framework residues in the human framework regions will be substituted with the corresponding residue from the CDR donor antibody to alter, preferably improve, antigen binding. These framework substitutions are identified by methods well known in the art, e.g., by modeling of the interactions of the CDR and framework residues to identify framework residues important for antigen binding and sequence comparison to identify unusual framework residues at particular positions. (See, e.g., Queen et al., U.S. Pat. No. 5,585,089; Riechmann et al., Nature 332:323 (1988), which are incorporated herein by reference in their entireties.) Antibodies can be humanized using a variety of techniques known in the art including, for example, CDR-grafting (EP 239,400; PCT publication WO 91/09967; U.S. Pat. Nos. 5,225,539; 5,530,101; and 5,585,089), veneering or resurfacing (EP 592,106; EP 519,596; Padlan, Molecular Immunology 28(4/5):489-498 (1991); Studnicka et al., Protein Engineering 7(6):805-814 (1994); Roguska. et al., PNAS 91:969-973 (1994)), and chain shuffling (U.S. Pat. No. 5,565,332).

[0237] Completely human antibodies are particularly desirable for therapeutic treatment of human patients. Human antibodies can be made by a variety of methods known in the art including phage display methods described above using antibody libraries derived from human immunoglobulin sequences. See also, U.S. Pat. Nos. 4,444,887 and 4,716,111; and PCT publications WO 98/46645, WO 98/50433, WO 98/24893, WO 98/16654, WO 96/34096, WO 96/33735, and WO 91/10741; each of which is incorporated herein by reference in its entirety.

[0238] Human antibodies can also be produced using transgenic mice which are incapable of expressing functional endogenous immunoglobulins, but which can express human immunoglobulin genes. For example, the human heavy and light chain immunoglobulin gene complexes may be introduced randomly or by homologous recombination into mouse embryonic stem cells. Alternatively, the human variable region, constant region, and diversity region may be introduced into mouse embryonic stem cells in addition to the human heavy and light chain genes. The mouse heavy and light chain immunoglobulin genes may be rendered non-functional separately or simultaneously with the introduction of human immunoglobulin loci by homologous recombination. In particular, homozygous deletion of the JH region prevents endogenous antibody production. The modified embryonic stem cells are expanded and microinjected into blastocysts to produce chimeric mice. The chimeric mice are then bred to produce homozygous offspring which express human antibodies. The transgenic mice are immunized in the normal fashion with a selected antigen, e.g., all or a portion of a polypeptide of the invention. Monoclonal antibodies directed against the antigen can be obtained from the immunized, transgenic mice using conventional hybridoma technology. The human immunoglobulin transgenes harbored by the transgenic mice rearrange during B cell differentiation, and subsequently undergo class switching and somatic mutation. Thus, using such a technique, it is possible to produce therapeutically useful IgG, IgA, IgM and IgE antibodies. For an overview of this technology for producing human antibodies, see Lonberg and Huszar, Int. Rev. Immunol. 13:65-93 (1995). For a detailed discussion of this technology for producing human antibodies and human monoclonal antibodies and protocols for producing such antibodies, see, e.g., PCT publications WO98/24893; WO 92/01047; WO 96/34096; WO 96/33735; European Patent No. 0 598 877; U.S. Pat. Nos. 5,413,923; 5,625,126; 5,633,425; 5,569,825; 5,661,016; 5,545,806; 5,814,318; 5,885,793; 5,916,771; 5,939,598; 6,075,181; and 6,114,598, which are incorporated by reference herein in their entirety. In addition, companies such as Abgenix, Inc. (Freemont, Calif. ) and Genpharm (San Jose, Calif. ) can be engaged to provide human antibodies directed against a selected antigen using technology similar to that described above.

[0239] Completely human antibodies which recognize a selected epitope can be generated using a technique referred to as “guided selection.” In this approach a selected non-human monoclonal antibody, e.g., a mouse antibody, is used to guide the selection of a completely human antibody recognizing the same epitope. (Jespers et al., Bio/technology 12:899-903 (1988)).

[0240] Further, antibodies to the polypeptides of the invention can, in turn, be utilized to generate anti-idiotype antibodies that “mimic” polypeptides of the invention using techniques well known to those skilled in the art. (See, e.g., Greenspan & Bona, FASEB J. 7(5):437-444; (1989) and Nissinoff, J. Immunol. 147(8):2429-2438 (1991)). For example antibodies which bind to and competitively inhibit polypeptide multimerization and/or binding of a polypeptide of the invention to a ligand can be used to generate anti-idiotypes that “mimic” the polypeptide multimerization and/or binding domain and, as a consequence, bind to and neutralize polypeptide and/or its ligand. Such neutralizing anti-idiotypes or Fab fragments of such anti-idiotypes can be used in therapeutic regimens to neutralize polypeptide ligand(s)/receptor(s). For example, such anti-idiotypic antibodies can be used to bind a polypeptide of the invention and/or to bind its ligand(s)/receptor(s), and thereby block its biological activity. Alternatively, antibodies which bind to and enhance polypeptide multimerization and/or binding, and/or receptor/ligand multimerization, binding and/or signaling can be used to generate anti-idiotypes that function as agonists of a polypeptide of the invention and/or its ligand/receptor. Such agonistic anti-idiotypes or Fab fragments of such anti-idiotypes can be used in therapeutic regimens as agonists of the polypeptides of the invention or its ligand(s)/receptor(s). For example, such anti-idiotypic antibodies can be used to bind a polypeptide of the invention and/or to bind its ligand(s)/receptor(s), and thereby promote or enhance its biological activity.

[0241] Intrabodies of the invention can be produced using methods known in the art, such as those disclosed and reviewed in Chen et al., Hum. Gene Ther. 5:595-601 (1994); Marasco, W. A., Gene Ther. 4:11-15 (1997); Rondon and Marasco, Annu. Rev. Microbiol. 51:257-283 (1997); Proba et al., J. Mol. Biol. 275:245-253 (1998); Cohen et al., Oncogene 17:2445-2456 (1998); Ohage and Steipe, J. Mol. Biol. 291:1119-1128 (1999); Ohage et al., J. Mol. Biol. 291:1129-1134 (1999); Wirtz and Steipe, Protein Sci. 8:2245-2250 (1999); Zhu et al., J. Immunol. Methods 231:207-222 (1999); and references cited therein.

[0242] Polynucleotides Encoding Antibodies

[0243] The invention further provides polynucleotides comprising a nucleotide sequence encoding an antibody of the invention and fragments thereof. The invention also encompasses polynucleotides that hybridize under stringent or alternatively, under lower stringency hybridization conditions, e.g., as defined supra, to polynucleotides that encode an antibody, preferably, that specifically binds to a polypeptide of the invention, preferably, an antibody that binds to a polypeptide having the amino acid sequence of SEQ ID NO:Y, to a polypeptide encoded by a portion of SEQ ID NO:X as defined in columns 8 and 9 of Table 2, and/or to a polypeptide encoded by the cDNA contained in Clone ID NO:Z.

[0244] The polynucleotides may be obtained, and the nucleotide sequence of the polynucleotides determined, by any method known in the art. For example, if the nucleotide sequence of the antibody is known, a polynucleotide encoding the antibody may be assembled from chemically synthesized oligonucleotides (e.g., as described in Kutmeier et al., BioTechniques 17:242 (1994)), which, briefly, involves the synthesis of overlapping oligonucleotides containing portions of the sequence encoding the antibody, annealing and ligating of those oligonucleotides, and then amplification of the ligated oligonucleotides by PCR.

[0245] Alternatively, a polynucleotide encoding an antibody may be generated from nucleic acid from a suitable source. If a clone containing a nucleic acid encoding a particular antibody is not available, but the sequence of the antibody molecule is known, a nucleic acid encoding the immunoglobulin may be chemically synthesized or obtained from a suitable source (e.g., an antibody cDNA library, or a cDNA library generated from, or nucleic acid, preferably poly A+ RNA, isolated from, any tissue or cells expressing the antibody, such as hybridoma cells selected to express an antibody of the invention) by PCR amplification using synthetic primers hybridizable to the 3′ and 5′ ends of the sequence or by cloning using an oligonucleotide probe specific for the particular gene sequence to identify, e.g., a cDNA clone from a cDNA library that encodes the antibody. Amplified nucleic acids generated by PCR may then be cloned into replicable cloning vectors using any method well known in the art.

[0246] Once the nucleotide sequence and corresponding amino acid sequence of the antibody is determined, the nucleotide sequence of the antibody may be manipulated using methods well known in the art for the manipulation of nucleotide sequences, e.g., recombinant DNA techniques, site directed mutagenesis, PCR, etc. (see, for example, the techniques described in Sambrook et al., 1990, Molecular Cloning, A Laboratory Manual, 2d Ed., Cold Spring Harbor Laboratory, Cold Spring Harbor, N.Y. and Ausubel et al., eds., 1998, Current Protocols in Molecular Biology, John Wiley & Sons, NY, which are both incorporated by reference herein in their entireties ), to generate antibodies having a different amino acid sequence, for example to create amino acid substitutions, deletions, and/or insertions.

[0247] In a specific embodiment, the amino acid sequence of the heavy and/or light chain variable domains may be inspected to identify the sequences of the complementarity determining regions (CDRs) by methods that are well know in the art, e.g., by comparison to known amino acid sequences of other heavy and light chain variable regions to determine the regions of sequence hypervariability. Using routine recombinant DNA techniques, one or more of the CDRs may be inserted within framework regions, e.g., into human framework regions to humanize a non-human antibody, as described supra. The framework regions may be naturally occurring or consensus framework regions, and preferably human framework regions (see, e.g., Chothia et al., J. Mol. Biol. 278: 457-479 (1998) for a listing of human framework regions). Preferably, the polynucleotide generated by the combination of the framework regions and CDRs encodes an antibody that specifically binds a polypeptide of the invention. Preferably, as discussed supra, one or more amino acid substitutions may be made within the framework regions, and, preferably, the amino acid substitutions improve binding of the antibody to its antigen. Additionally, such methods may be used to make amino acid substitutions or deletions of one or more variable region cysteine residues participating in an intrachain disulfide bond to generate antibody molecules lacking one or more intrachain disulfide bonds. Other alterations to the polynucleotide are encompassed by the present invention and within the skill of the art.

[0248] In addition, techniques developed for the production of “chimeric antibodies” (Morrison et al., Proc. Natl. Acad. Sci. 81:851-855 (1984); Neuberger et al., Nature 312:604-608 (1984); Takeda et al., Nature 314:452-454 (1985)) by splicing genes from a mouse antibody molecule of appropriate antigen specificity together with genes from a human antibody molecule of appropriate biological activity can be used. As described supra, a chimeric antibody is a molecule in which different portions are derived from different animal species, such as those having a variable region derived from a murine mAb and a human immunoglobulin constant region, e.g., humanized antibodies.

[0249] Alternatively, techniques described for the production of single chain antibodies (U.S. Pat. No. 4,946,778; Bird, Science 242:423-42 (1988); Huston et al., Proc. Natl. Acad. Sci. USA 85:5879-5883 (1988); and Ward et al., Nature 334:544-54 (1989)) can be adapted to produce single chain antibodies. Single chain antibodies are formed by linking the heavy and light chain fragments of the Fv region via an amino acid bridge, resulting in a single chain polypeptide. Techniques for the assembly of functional Fv fragments in E. coli may also be used (Skerra et al., Science 242:1038-1041 (1988)).

[0250] Methods of Producing Antibodies

[0251] The antibodies of the invention can be produced by any method known in the art for the synthesis of antibodies, in particular, by chemical synthesis or preferably, by recombinant expression techniques. Methods of producing antibodies include, but are not limited to, hybridoma technology, EBV transformation, and other methods discussed herein as well as through the use recombinant DNA technology, as discussed below.

[0252] Recombinant expression of an antibody of the invention, or fragment, derivative or analog thereof, (e.g., a heavy or light chain of an antibody of the invention or a single chain antibody of the invention), requires construction of an expression vector containing a polynucleotide that encodes the antibody. Once a polynucleotide encoding an antibody molecule or a heavy or light chain of an antibody, or portion thereof (preferably containing the heavy or light chain variable domain), of the invention has been obtained, the vector for the production of the antibody molecule may be produced by recombinant DNA technology using techniques well known in the art. Thus, methods for preparing a protein by expressing a polynucleotide containing an antibody encoding nucleotide sequence are described herein. Methods which are well known to those skilled in the art can be used to construct expression vectors containing antibody coding sequences and appropriate transcriptional and translational control signals. These methods include, for example, in vitro recombinant DNA techniques, synthetic techniques, and in vivo genetic recombination. The invention, thus, provides replicable vectors comprising a nucleotide sequence encoding an antibody molecule of the invention, or a heavy or light chain thereof, or a heavy or light chain variable domain, operably linked to a promoter. Such vectors may include the nucleotide sequence encoding the constant region of the antibody molecule (see, e.g., PCT Publication WO 86/05807; PCT Publication WO 89/01036; and U.S. Pat. No. 5,122,464) and the variable domain of the antibody may be cloned into such a vector for expression of the entire heavy or light chain.

[0253] The expression vector is transferred to a host cell by conventional techniques and the transfected cells are then cultured by conventional techniques to produce an antibody of the invention. Thus, the invention includes host cells containing a polynucleotide encoding an antibody of the invention, or a heavy or light chain thereof, or a single chain antibody of the invention, operably linked to a heterologous promoter. In preferred embodiments for the expression of double-chained antibodies, vectors encoding both the heavy and light chains may be co-expressed in the host cell for expression of the entire immunoglobulin molecule, as detailed below.

[0254] A variety of host-expression vector systems may be utilized to express the antibody molecules of the invention. Such host-expression systems represent vehicles by which the coding sequences of interest may be produced and subsequently purified, but also represent cells which may, when transformed or transfected with the appropriate nucleotide coding sequences, express an antibody molecule of the invention in situ. These include but are not limited to microorganisms such as bacteria (e.g., E. coli, B. subtilis) transformed with recombinant bacteriophage DNA, plasmid DNA or cosmid DNA expression vectors containing antibody coding sequences; yeast (e.g., Saccharomyces, Pichia) transformed with recombinant yeast expression vectors containing antibody coding sequences; insect cell systems infected with recombinant virus expression vectors (e.g., baculovirus) containing antibody coding sequences; plant cell systems infected with recombinant virus expression vectors (e.g., cauliflower mosaic virus, CaMV; tobacco mosaic virus, TMV) or transformed with recombinant plasmid expression vectors (e.g., Ti plasmid) containing antibody coding sequences; or mammalian cell systems (e.g., COS, CHO, BHK, 293, 3T3 cells) harboring recombinant expression constructs containing promoters derived from the genome of mammalian cells (e.g., metallothionein promoter) or from mammalian viruses (e.g., the adenovirus late promoter; the vaccinia virus 7.5K promoter). Preferably, bacterial cells such as Escherichia coli, and more preferably, eukaryotic cells, especially for the expression of whole recombinant antibody molecule, are used for the expression of a recombinant antibody molecule. For example, mammalian cells such as Chinese hamster ovary cells (CHO), in conjunction with a vector such as the major intermediate early gene promoter element from human cytomegalovirus is an effective expression system for antibodies (Foecking et al., Gene 45:101 (1986); Cockett et al., Bio/Technology 8:2 (1990)).

[0255] In bacterial systems, a number of expression vectors may be advantageously selected depending upon the use intended for the antibody molecule being expressed. For example, when a large quantity of such a protein is to be produced, for the generation of pharmaceutical compositions of an antibody molecule, vectors which direct the expression of high levels of fusion protein products that are readily purified may be desirable. Such vectors include, but are not limited, to the E. coli expression vector pUR278 (Ruther et al., EMBO J. 2:1791 (1983)), in which the antibody coding sequence may be ligated individually into the vector in frame with the lac Z coding region so that a fusion protein is produced; pIN vectors (Inouye & Inouye, Nucleic Acids Res. 13:3101-3109 (1985); Van Heeke & Schuster, J. Biol. Chem. 24:5503-5509 (1989)); and the like. pGEX vectors may also be used to express foreign polypeptides as fusion proteins with glutathione S-transferase (GST). In general, such fusion proteins are soluble and can easily be purified from lysed cells by adsorption and binding to matrix glutathione-agarose beads followed by elution in the presence of free glutathione. The pGEX vectors are designed to include thrombin or factor Xa protease cleavage sites so that the cloned target gene product can be released from the GST moiety.

[0256] In an insect system, Autographa califomica nuclear polyhedrosis virus (AcNPV) is used as a vector to express foreign genes. The virus grows in Spodoptera frugiperda cells. The antibody coding sequence may be cloned individually into non-essential regions (for example the polyhedrin gene) of the virus and placed under control of an AcNPV promoter (for example the polyhedrin promoter).

[0257] In mammalian host cells, a number of viral-based expression systems may be utilized. In cases where an adenovirus is used as an expression vector, the antibody coding sequence of interest may be ligated to an adenovirus transcription/translation control complex, e.g., the late promoter and tripartite leader sequence. This chimeric gene may then be inserted in the adenovirus genome by in vitro or in vivo recombination. Insertion in a non- essential region of the viral genome (e.g., region E1 or E3) will result in a recombinant virus that is viable and capable of expressing the antibody molecule in infected hosts. (e.g., see Logan & Shenk, Proc. Natl. Acad. Sci. USA 81:355-359 (1984)). Specific initiation signals may also be required for efficient translation of inserted antibody coding sequences. These signals include the ATG initiation codon and adjacent sequences. Furthermore, the initiation codon must be in phase with the reading frame of the desired coding sequence to ensure translation of the entire insert. These exogenous translational control signals and initiation codons can be of a variety of origins, both natural and synthetic. The efficiency of expression may be enhanced by the inclusion of appropriate transcription enhancer elements, transcription terminators, etc. (see Bittner et al., Methods in Enzymol. 153:51-544 (1987)).

[0258] In addition, a host cell strain may be chosen which modulates the expression of the inserted sequences, or modifies and processes the gene product in the specific fashion desired. Such modifications (e.g., glycosylation) and processing (e.g., cleavage) of protein products may be important for the function of the protein. Different host cells have characteristic and specific mechanisms for the post-translational processing and modification of proteins and gene products. Appropriate cell lines or host systems can be chosen to ensure the correct modification and processing of the foreign protein expressed. To this end, eukaryotic host cells which possess the cellular machinery for proper processing of the primary transcript, glycosylation, and phosphorylation of the gene product may be used. Such mammalian host cells include but are not limited to CHO, VERY, BHK, Hela, COS, MDCK, 293, 3T3, WI38, and in particular, breast cancer cell lines such as, for example, BT483, Hs578T, HTB2, BT20 and T47D, and normal mammary gland cell line such as, for example, CRL7030 and Hs578Bst.

[0259] For long-term, high-yield production of recombinant proteins, stable expression is preferred. For example, cell lines which stably express the antibody molecule may be engineered. Rather than using expression vectors which contain viral origins of replication, host cells can be transformed with DNA controlled by appropriate expression control elements (e.g., promoter, enhancer, sequences, transcription terminators, polyadenylation sites, etc.), and a selectable marker. Following the introduction of the foreign DNA, engineered cells may be allowed to grow for 1-2 days in an enriched media, and then are switched to a selective media. The selectable marker in the recombinant plasmid confers resistance to the selection and allows cells to stably integrate the plasmid into their chromosomes and grow to form foci which in turn can be cloned and expanded into cell lines. This method may advantageously be used to engineer cell lines which express the antibody molecule. Such engineered cell lines may be particularly useful in screening and evaluation of compounds that interact directly or indirectly with the antibody molecule.

[0260] A number of selection systems may be used, including but not limited to the herpes simplex virus thymidine kinase (Wigler et al., Cell 11:223 (1977)), hypoxanthine-guanine phosphoribosyltransferase (Szybalska & Szybalski, Proc. Natl. Acad. Sci. USA 48:202 (1992)), and adenine phosphoribosyltransferase (Lowy et al., Cell 22:817 (1980)) genes can be employed in tk-, hgprt- or aprt- cells, respectively. Also, antimetabolite resistance can be used as the basis of selection for the following genes: dhfr, which confers resistance to methotrexate (Wigler et al., Natl. Acad. Sci. USA 77:357 (1980); O'Hare et al., Proc. Natl. Acad. Sci. USA 78:1527 (1981)); gpt, which confers resistance to mycophenolic acid (Mulligan & Berg, Proc. Natl. Acad. Sci. USA 78:2072 (1981)); neo, which confers resistance to the aminoglycoside G-418 Clinical Pharmacy 12:488-505; Wu and Wu, Biotherapy 3:87-95 (1991); Tolstoshev, Ann. Rev. Pharmacol. Toxicol. 32:573-596 (1993); Mulligan, Science 260:926-932 (1993); and Morgan and Anderson, Ann. Rev. Biochem. 62:191-217 (1993); May, 1993, TIB TECH 11(5):155-215 (1993)); and hygro, which confers resistance to hygromycin (Santerre et al., Gene 30:147 (1984)). Methods commonly known in the art of recombinant DNA technology may be routinely applied to select the desired recombinant clone, and such methods are described, for example, in Ausubel et al. (eds.), Current Protocols in Molecular Biology, John Wiley & Sons, N.Y. (1993); Kriegler, Gene Transfer and Expression, A Laboratory Manual, Stockton Press, N.Y. (1990); and in Chapters 12 and 13, Dracopoli et al. (eds), Current Protocols in Human Genetics, John Wiley & Sons, N.Y. (1994); Colberre-Garapin et al., J. Mol. Biol. 150:1 (1981), which are incorporated by reference herein in their entireties.

[0261] The expression levels of an antibody molecule can be increased by vector amplification (for a review, see Bebbington and Hentschel, The use of vectors based on gene amplification for the expression of cloned genes in mammalian cells in DNA cloning, Vol.3. (Academic Press, New York, 1987)). When a marker in the vector system expressing antibody is amplifiable, increase in the level of inhibitor present in culture of host cell will increase the number of copies of the marker gene. Since the amplified region is associated with the antibody gene, production of the antibody will also increase (Crouse et al., Mol. Cell. Biol. 3:257 (1983)).

[0262] Vectors which use glutamine synthase (GS) or DHFR as the selectable markers can be amplified in the presence of the drugs methionine sulphoximine or methotrexate, respectively. An advantage of glutamine synthase based vectors are the availabilty of cell lines (e.g., the murine myeloma cell line, NSO) which are glutamine synthase negative. Glutamine synthase expression systems can also function in glutamine synthase expressing cells (e.g. Chinese Hamster Ovary (CHO) cells) by providing additional inhibitor to prevent the functioning of the endogenous gene. A glutamine synthase expression system and components thereof are detailed in PCT publications: WO87/04462; WO86/05807; WO89/01036; WO89/10404; and WO91/06657 which are incorporated in their entireties by reference herein. Additionally, glutamine synthase expression vectors that may be used according to the present invention are commercially available from suppliers, including, for example Lonza Biologics, Inc. (Portsmouth, N.H.). Expression and production of monoclonal antibodies using a GS expression system in murine myeloma cells is described in Bebbington et al., Bio/technology 10:169(1992) and in Biblia and Robinson Biotechnol. Prog. 11:1 (1995) which are incorporated in their entirities by reference herein.

[0263] The host cell may be co-transfected with two expression vectors of the invention, the first vector encoding a heavy chain derived polypeptide and the second vector encoding a light chain derived polypeptide. The two vectors may contain identical selectable markers which enable equal expression of heavy and light chain polypeptides. Alternatively, a single vector may be used which encodes, and is capable of expressing, both heavy and light chain polypeptides. In such situations, the light chain should be placed before the heavy chain to avoid an excess of toxic free heavy chain (Proudfoot, Nature 322:52 (1986); Kohler, Proc. Natl. Acad. Sci. USA 77:2197 (1980)). The coding sequences for the heavy and light chains may comprise cDNA or genomic DNA.

[0264] Once an antibody molecule of the invention has been produced by an animal, chemically synthesized, or recombinantly expressed, it may be purified by any method known in the art for purification of an immunoglobulin molecule, for example, by chromatography (e.g., ion exchange, affinity, particularly by affinity for the specific antigen after Protein A, and sizing column chromatography), centrifugation, differential solubility, or by any other standard technique for the purification of proteins. In addition, the antibodies of the present invention or fragments thereof can be fused to heterologous polypeptide sequences described herein or otherwise known in the art, to facilitate purification.

[0265] The present invention encompasses antibodies recombinantly fused or chemically conjugated (including both covalently and non-covalently conjugations) to a polypeptide (or portion thereof, preferably at least 10, 20, 30, 40, 50, 60, 70, 80, 90 or 100 amino acids of the polypeptide) of the present invention to generate fusion proteins. The fusion does not necessarily need to be direct, but may occur through linker sequences. The antibodies may be specific for antigens other than polypeptides (or portion thereof, preferably at least 10, 20, 30, 40, 50, 60, 70, 80, 90 or 100 amino acids of the polypeptide) of the present invention. For example, antibodies may be used to target the polypeptides of the present invention to particular cell types, either in vitro or in vivo, by fusing or conjugating the polypeptides of the present invention to antibodies specific for particular cell surface receptors. Antibodies fused or conjugated to the polypeptides of the present invention may also be used in in vitro immunoassays and purification methods using methods known in the art. See e.g., Harbor et al., supra, and PCT publication WO 93/21232; EP 439,095; Naramura et al., Immunol. Lett. 39:91-99 (1994); U.S. Pat. No. 5,474,981; Gillies et al., PNAS 89:1428-1432 (1992); Fell et al., J. Immunol. 146:2446-2452 (1991), which are incorporated by reference in their entireties.

[0266] The present invention further includes compositions comprising the polypeptides of the present invention fused or conjugated to antibody domains other than the variable regions. For example, the polypeptides of the present invention may be fused or conjugated to an antibody Fc region, or portion thereof. The antibody portion fused to a polypeptide of the present invention may comprise the constant region, hinge region, CH1 domain, CH2 domain, and CH3 domain or any combination of whole domains or portions thereof. The polypeptides may also be fused or conjugated to the above antibody portions to form multimers. For example, Fc portions fused to the polypeptides of the present invention can form dimers through disulfide bonding between the Fc portions. Higher multimeric forms can be made by fusing the polypeptides to portions of IgA and IgM. Methods for fusing or conjugating the polypeptides of the present invention to antibody portions are known in the art. See, e.g., U.S. Pat. Nos. 5,336,603; 5,622,929; 5,359,046; 5,349,053; 5,447,851; 5,112,946; EP 307,434; EP 367,166; PCT publications WO 96/04388; WO 91/06570; Ashkenazi et al., Proc. Natl. Acad. Sci. USA 88:10535-10539 (1991); Zheng et al., J. Immunol. 154:5590-5600 (1995); and Vil et al., Proc. Natl. Acad. Sci. USA 89:11337-11341 (1992) (said references incorporated by reference in their entireties).

[0267] As discussed, supra, the polypeptides corresponding to a polypeptide, polypeptide fragment, or a variant of SEQ ID NO:Y may be fused or conjugated to the above antibody portions to increase the in vivo half life of the polypeptides or for use in immunoassays using methods known in the art. Further, the polypeptides corresponding to SEQ ID NO:Y may be fused or conjugated to the above antibody portions to facilitate purification. One reported example describes chimeric proteins consisting of the first two domains of the human CD4-polypeptide and various domains of the constant regions of the heavy or light chains of mammalian immunoglobulins. See EP 394,827; and Traunecker et al., Nature 331:84-86 (1988). The polypeptides of the present invention fused or conjugated to an antibody having disulfide- linked dimeric structures (due to the IgG) may also be more efficient in binding and neutralizing other molecules, than the monomeric secreted protein or protein fragment alone. See, for example, Fountoulakis et al., J. Biochem. 270:3958-3964 (1995). In many cases, the Fc part in a fusion protein is beneficial in therapy and diagnosis, and thus can result in, for example, improved pharmacokinetic properties. See, for example, EP A 232,262. Alternatively, deleting the Fc part after the fusion protein has been expressed, detected, and purified, would be desired. For example, the Fc portion may hinder therapy and diagnosis if the fusion protein is used as an antigen for immunizations. In drug discovery, for example, human proteins, such as hIL-5, have been fused with Fc portions for the purpose of high-throughput screening assays to identify antagonists of hIL-5. (See, Bennett et al., J. Molecular Recognition 8:52-58 (1995); Johanson et al., J. Biol. Chem. 270:9459-9471 (1995)).

[0268] Moreover, the antibodies or fragments thereof of the present invention can be fused to marker sequences, such as a peptide to facilitate purification. In preferred embodiments, the marker amino acid sequence is a hexa-histidine peptide, such as the tag provided in a pQE vector (QIAGEN, Inc., 9259 Eton Avenue, Chatsworth, Calif., 91311), among others, many of which are commercially available. As described in Gentz et al., Proc. Natl. Acad. Sci. USA 86:821-824 (1989), for instance, hexa-histidine provides for convenient purification of the fusion protein. Other peptide tags useful for purification include, but are not limited to, the “HA” tag, which corresponds to an epitope derived from the influenza hemagglutinin protein (Wilson et al., Cell 37:767 (1984)) and the “flag” tag.

[0269] The present invention further encompasses antibodies or fragments thereof conjugated to a diagnostic or therapeutic agent. The antibodies can be used diagnostically to, for example, monitor the development or progression of a tumor as part of a clinical testing procedure to, e.g., determine the efficacy of a given treatment regimen. Detection can be facilitated by coupling the antibody to a detectable substance. Examples of detectable substances include various enzymes, prosthetic groups, fluorescent materials, luminescent materials, bioluminescent materials, radioactive materials, positron emitting metals using various positron emission tomographies, and nonradioactive paramagnetic metal ions. The detectable substance may be coupled or conjugated either directly to the antibody (or fragment thereof) or indirectly, through an intermediate (such as, for example, a linker known in the art) using techniques known in the art. See, for example, U.S. Pat. No. 4,741,900 for metal ions which can be conjugated to antibodies for use as diagnostics according to the present invention. Examples of suitable enzymes include horseradish peroxidase, alkaline phosphatase, beta-galactosidase, or acetylcholinesterase; examples of suitable prosthetic group complexes include streptavidin/biotin and avidin/biotin; examples of suitable fluorescent materials include umbelliferone, fluorescein, fluorescein isothiocyanate, rhodamine, dichlorotriazinylamine fluorescein, dansyl chloride or phycoerythrin; an example of a luminescent material includes luminol; examples of bioluminescent materials include luciferase, luciferin, and aequorin; and examples of suitable radioactive material include 125I, 131I, 111In or 99Tc.

[0270] Further, an antibody or fragment thereof may be conjugated to a therapeutic moiety such as a cytotoxin, e.g., a cytostatic or cytocidal agent, a therapeutic agent or a radioactive metal ion, e.g., alpha-emitters such as, for example, 213Bi. A cytotoxin or cytotoxic agent includes any agent that is detrimental to cells. Examples include paclitaxol, cytochalasin B, gramicidin D, ethidium bromide, emetine, mitomycin, etoposide, tenoposide, vincristine, vinblastine, colchicin, doxorubicin, daunorubicin, dihydroxy anthracin dione, mitoxantrone, mithramycin, actinomycin D, 1-dehydrotestosterone, glucocorticoids, procaine, tetracaine, lidocaine, propranolol, and puromycin and analogs or homologs thereof. Therapeutic agents include, but are not limited to, antimetabolites (e.g., methotrexate, 6-mercaptopurine, 6-thioguanine, cytarabine, 5-fluorouracil decarbazine), alkylating agents (e.g., mechlorethamine, thioepa chlorambucil, melphalan, carmustine (BSNU) and lomustine (CCNU), cyclothosphamide, busulfan, dibromomannitol, streptozotocin, mitomycin C, and cis- dichlorodiamine platinum (II) (DDP) cisplatin), anthracyclines (e.g., daunorubicin (formerly daunomycin) and doxorubicin), antibiotics (e.g., dactinomycin (formerly actinomycin), bleomycin, mithramycin, and anthramycin (AMC)), and anti-mitotic agents (e.g., vincristine and vinblastine).

[0271] The conjugates of the invention can be used for modifying a given biological response, the therapeutic agent or drug moiety is not to be construed as limited to classical chemical therapeutic agents. For example, the drug moiety may be a protein or polypeptide possessing a desired biological activity. Such proteins may include, for example, a toxin such as abrin, ricin A, pseudomonas exotoxin, or diphtheria toxin; a protein such as tumor necrosis factor, a-interferon, β-interferon, nerve growth factor, platelet derived growth factor, tissue plasminogen activator, an apoptotic agent, e.g., TNF-alpha, TNF-beta, AIM I (See, International Publication No. WO 97/33899), AIM II (See, International Publication No. WO 97/34911), Fas Ligand (Takahashi et al., Int. Immunol., 6:1567-1574 (1994)), VEGI (See, International Publication No. WO 99/23105), a thrombotic agent or an anti-angiogenic agent, e.g., angiostatin or endostatin; or, biological response modifiers such as, for example, lymphokines, interleukin-1 (“IL-1”), interleukin-2 (“IL-2”), interleukin-6 (“IL-6”), granulocyte macrophage colony stimulating factor (“GM-CSF”), granulocyte colony stimulating factor (“G-CSF”), or other growth factors.

[0272] Antibodies may also be attached to solid supports, which are particularly useful for immunoassays or purification of the target antigen. Such solid supports include, but are not limited to, glass, cellulose, polyacrylamide, nylon, polystyrene, polyvinyl chloride or polypropylene.

[0273] Techniques for conjugating such therapeutic moiety to antibodies are well known. See, for example, Arnon et al., “Monoclonal Antibodies For Immunotargeting Of Drugs In Cancer Therapy”, in Monoclonal Antibodies And Cancer Therapy, Reisfeld et al. (eds.), pp. 243-56 (Alan R. Liss, Inc. 1985); Hellstrom et al., “Antibodies For Drug Delivery”, in Controlled Drug Delivery (2nd Ed.), Robinson et al. (eds.), pp. 623-53 (Marcel Dekker, Inc. 1987); Thorpe, “Antibody Carriers Of Cytotoxic Agents In Cancer Therapy: A Review”, in Monoclonal Antibodies '84: Biological And Clinical Applications, Pinchera et al. (eds.), pp. 475-506 (1985); “Analysis, Results, And Future Prospective Of The Therapeutic Use Of Radiolabeled Antibody In Cancer Therapy”, in Monoclonal Antibodies For Cancer Detection And Therapy, Baldwin et al. (eds.), pp. 303-16 (Academic Press 1985), and Thorpe et al., “The Preparation And Cytotoxic Properties Of Antibody-Toxin Conjugates”, Immunol. Rev. 62:119-58 (1982).

[0274] Alternatively, an antibody can be conjugated to a second antibody to form an antibody heteroconjugate as described by Segal in U.S. Pat. No. 4,676,980, which is incorporated herein by reference in its entirety.

[0275] An antibody, with or without a therapeutic moiety conjugated to it, administered alone or in combination with cytotoxic factor(s) and/or cytokine(s) can be used as a therapeutic.

[0276] Immunophenotyping

[0277] The antibodies of the invention may be utilized for immunophenotyping of cell lines and biological samples. Translation products of the gene of the present invention may be useful as cell-specific markers, or more specifically as cellular markers that are differentially expressed at various stages of differentiation and/or maturation of particular cell types. Monoclonal antibodies directed against a specific epitope, or combination of epitopes, will allow for the screening of cellular populations expressing the marker. Various techniques can be utilized using monoclonal antibodies to screen for cellular populations expressing the marker(s), and include magnetic separation using antibody-coated magnetic beads, “panning” with antibody attached to a solid matrix (i.e., plate), and flow cytometry (See, e.g., U.S. Pat. No. 5,985,660; and Morrison et al., Cell, 96:737-49 (1999)).

[0278] These techniques allow for the screening of particular populations of cells, such as might be found with hematological malignancies (i.e. minimal residual disease (MRD) in acute leukemic patients) and “non-self” cells in transplantations to prevent Graft-versus-Host Disease (GVHD). Alternatively, these techniques allow for the screening of hematopoietic stem and progenitor cells capable of undergoing proliferation and/or differentiation, as might be found in human umbilical cord blood.

[0279] Assays For Antibody Binding

[0280] The antibodies of the invention may be assayed for immunospecific binding by any method known in the art. The immunoassays which can be used include but are not limited to competitive and non-competitive assay systems using techniques such as western blots, radioimmunoassays, ELISA (enzyme linked immunosorbent assay), “sandwich” immunoassays, immunoprecipitation assays, precipitin reactions, gel diffusion precipitin reactions, immunodiffusion assays, agglutination assays, complement-fixation assays, immunoradiometric assays, fluorescent immunoassays, and protein A immunoassays, to name but a few. Such assays are routine and well known in the art (see, e.g., Ausubel et al, eds, 1994, Current Protocols in Molecular Biology, Vol. 1, John Wiley & Sons, Inc., New York, which is incorporated by reference herein in its entirety). Exemplary immunoassays are described briefly below (but are not intended by way of limitation).

[0281] Immunoprecipitation protocols generally comprise lysing a population of cells in a lysis buffer such as RIPA buffer (1% NP-40 or Triton X-100, 1% sodium deoxycholate, 0.1% SDS, 0.15 M NaCl, 0.01 M sodium phosphate at pH 7.2, 1% Trasylol) supplemented with protein phosphatase and/or protease inhibitors (e.g., EDTA, PMSF, aprotinin, sodium vanadate), adding the antibody of interest to the cell lysate, incubating for a period of time (e.g., 1-4 hours) at 4° C., adding protein A and/or protein G sepharose beads to the cell lysate, incubating for about an hour or more at 4° C., washing the beads in lysis buffer and resuspending the beads in SDS/sample buffer. The ability of the antibody of interest to immunoprecipitate a particular antigen can be assessed by, e.g., western blot analysis. One of skill in the art would be knowledgeable as to the parameters that can be modified to increase the binding of the antibody to an antigen and decrease the background (e.g., pre-clearing the cell lysate with sepharose beads). For further discussion regarding immunoprecipitation protocols see, e.g., Ausubel et al., eds., (1994), Current Protocols in Molecular Biology, Vol. 1, John Wiley & Sons, Inc., New York, section 10. 16.1.

[0282] Western blot analysis generally comprises preparing protein samples, electrophoresis of the protein samples in a polyacrylamide gel (e.g., 8%-20% SDS-PAGE depending on the molecular weight of the antigen), transferring the protein sample from the polyacrylamide gel to a membrane such as nitrocellulose, PVDF or nylon, blocking the membrane in blocking solution (e.g., PBS with 3% BSA or non-fat milk), washing the membrane in washing buffer (e.g., PBS-Tween 20), blocking the membrane with primary antibody (the antibody of interest) diluted in blocking buffer, washing the membrane in washing buffer, blocking the membrane with a secondary antibody (which recognizes the primary antibody, e.g., an anti-human antibody) conjugated to an enzymatic substrate (e.g., horseradish peroxidase or alkaline phosphatase) or radioactive molecule (e.g., 32P or 125I) diluted in blocking buffer, washing the membrane in wash buffer, and detecting the presence of the antigen. One of skill in the art would be knowledgeable as to the parameters that can be modified to increase the signal detected and to reduce the background noise. For further discussion regarding western blot protocols see, e.g., Ausubel et al, eds, (1994), Current Protocols in Molecular Biology, Vol. 1, John Wiley & Sons, Inc., New York, section 10.8.1.

[0283] ELISAs comprise preparing antigen, coating the well of a 96 well microtiter plate with the antigen, adding the antibody of interest conjugated to a detectable compound such as an enzymatic substrate (e.g., horseradish peroxidase or alkaline phosphatase) to the well and incubating for a period of time, and detecting the presence of the antigen. In ELISAs the antibody of interest does not have to be conjugated to a detectable compound; instead, a second antibody (which recognizes the antibody of interest) conjugated to a detectable compound may be added to the well. Further, instead of coating the well with the antigen, the antibody may be coated to the well. In this case, a second antibody conjugated to a detectable compound may be added following the addition of the antigen of interest to the coated well. One of skill in the art would be knowledgeable as to the parameters that can be modified to increase the signal detected as well as other variations of ELISAs known in the art. For further discussion regarding ELISAs see, e.g., Ausubel et al, eds, (1994), Current Protocols in Molecular Biology, Vol. 1, John Wiley & Sons, Inc., New York, section 11.2.1.

[0284] The binding affinity of an antibody to an antigen and the off-rate of an antibody-antigen interaction can be determined by competitive binding assays. One example of a competitive binding assay is a radioimmunoassay comprising the incubation of labeled antigen (e.g., 3H or 125I) with the antibody of interest in the presence of increasing amounts of unlabeled antigen, and the detection of the antibody bound to the labeled antigen. The affinity of the antibody of interest for a particular antigen and the binding off-rates can be determined from the data by scatchard plot analysis. Competition with a second antibody can also be determined using radioimmunoassays. In this case, the antigen is incubated with antibody of interest conjugated to a labeled compound (e.g., 3H or 125I) in the presence of increasing amounts of an unlabeled second antibody.

[0285] Antibodies of the invention may be characterized using immunocytochemisty methods on cells (e.g., mammalian cells, such as CHO cells) transfected with a vector enabling the expression of an antigen or with vector alone using techniques commonly known in the art. Antibodies that bind antigen transfected cells, but not vector-only transfected cells, are antigen specific.

[0286] Therapeutic Uses

[0287] The present invention is further directed to antibody-based therapies which involve administering antibodies of the invention to an animal, preferably a mammal, and most preferably a human, patient for treating one or more of the disclosed diseases, disorders, or conditions. Therapeutic compounds of the invention include, but are not limited to, antibodies of the invention (including fragments, analogs and derivatives thereof as described herein) and nucleic acids encoding antibodies of the invention (including fragments, analogs and derivatives thereof and anti-idiotypic antibodies as described herein). The antibodies of the invention can be used to treat, inhibit or prevent diseases, disorders or conditions associated with aberrant expression and/or activity of a polypeptide of the invention, including, but not limited to, any one or more of the diseases, disorders, or conditions described herein. The treatment and/or prevention of diseases, disorders, or conditions associated with aberrant expression and/or activity of a polypeptide of the invention includes, but is not limited to, alleviating symptoms associated with those diseases, disorders or conditions. Antibodies of the invention may be provided in pharmaceutically acceptable compositions as known in the art or as described herein.

[0288] In a specific and preferred embodiment, the present invention is directed to antibody-based therapies which involve administering antibodies of the invention to an animal, preferably a mammal, and most preferably a human, patient for treating one or more diseases, disorders, or conditions, including but not limited to: neural disorders, immune system disorders, muscular disorders, reproductive disorders, gastrointestinal disorders, pulmonary disorders, cardiovascular disorders, renal disorders, proliferative disorders, and/or cancerous diseases and conditions., and/or as described elsewhere herein. Therapeutic compounds of the invention include, but are not limited to, antibodies of the invention (e.g., antibodies directed to the full length protein expressed on the cell surface of a mammalian cell; antibodies directed to an epitope of a polypeptide of the invention (such as, for example, a predicted linear epitope shown in column 7 of Table 1A; or a conformational epitope, including fragments, analogs and derivatives thereof as described herein) and nucleic acids encoding antibodies of the invention (including fragments, analogs and derivatives thereof and anti-idiotypic antibodies as described herein). The antibodies of the invention can be used to treat, inhibit or prevent diseases, disorders or conditions associated with aberrant expression and/or activity of a polypeptide of the invention, including, but not limited to, any one or more of the diseases, disorders, or conditions described herein. The treatment and/or prevention of diseases, disorders, or conditions associated with aberrant expression and/or activity of a polypeptide of the invention includes, but is not limited to, alleviating symptoms associated with those diseases, disorders or conditions. Antibodies of the invention may be provided in pharmaceutically acceptable compositions as known in the art or as described herein.

[0289] A summary of the ways in which the antibodies of the present invention may be used therapeutically includes binding polynucleotides or polypeptides of the present invention locally or systemically in the body or by direct cytotoxicity of the antibody, e.g. as mediated by complement (CDC) or by effector cells (ADCC). Some of these approaches are described in more detail below. Armed with the teachings provided herein, one of ordinary skill in the art will know how to use the antibodies of the present invention for diagnostic, monitoring or therapeutic purposes without undue experimentation.

[0290] The antibodies of this invention may be advantageously utilized in combination with other monoclonal or chimeric antibodies, or with lymphokines or hematopoietic growth factors (such as, e.g., IL-2, IL-3 and IL-7), for example, which serve to increase the number or activity of effector cells which interact with the antibodies.

[0291] The antibodies of the invention may be administered alone or in combination with other types of treatments (e.g., radiation therapy, chemotherapy, hormonal therapy, immunotherapy and anti-tumor agents). Generally, administration of products of a species origin or species reactivity (in the case of antibodies) that is the same species as that of the patient is preferred. Thus, in a preferred embodiment, human antibodies, fragments derivatives, analogs, or nucleic acids, are administered to a human patient for therapy or prophylaxis.

[0292] It is preferred to use high affinity and/or potent in vivo inhibiting and/or neutralizing antibodies against polypeptides or polynucleotides of the present invention, fragments or regions thereof, for both immunoassays directed to and therapy of disorders related to polynucleotides or polypeptides, including fragments thereof, of the present invention. Such antibodies, fragments, or regions, will preferably have an affinity for polynucleotides or polypeptides of the invention, including fragments thereof. Preferred binding affinities include those with a dissociation constant or Kd less than 5×10⁻²M, 10⁻²M, 5×10⁻³M, 10⁻³M, 5×10⁻⁴M, 10⁻⁴M, 5×10⁻⁵M, 10⁻⁵M, 5×10⁻⁶M, 10⁻⁶M, 5×10⁻⁷M, 10⁻⁷M, 5×10⁻⁸M, 10⁻⁸M, 5×10⁻⁹M, 10⁻⁹M, 5×10⁻¹⁰M, 10⁻¹⁰M, 5×10⁻¹¹M, 10⁻¹¹M, 5×10⁻¹²M, 10⁻¹²M, 5×10⁻¹³M, 10⁻¹³M, 5×10⁻¹⁴M, 10⁻¹⁴M, 5×10⁻¹⁵M, and 10⁻¹⁵M.

[0293] Gene Therapy

[0294] In a specific embodiment, nucleic acids comprising sequences encoding antibodies or functional derivatives thereof, are administered to treat, inhibit or prevent a disease or disorder associated with aberrant expression and/or activity of a polypeptide of the invention, by way of gene therapy. Gene therapy refers to therapy performed by the administration to a subject of an expressed or expressible nucleic acid. hi this embodiment of the invention, the nucleic acids produce their encoded protein that mediates a therapeutic effect.

[0295] Any of the methods for gene therapy available in the art can be used according to the present invention. Exemplary methods are described below.

[0296] For general reviews of the methods of gene therapy, see Goldspiel et al., Clinical Pharmacy 12:488-505 (1993); Wu and Wu, Biotherapy 3:87-95 (1991); Tolstoshev, Ann. Rev. Pharmacol. Toxicol. 32:573-596 (1993); Mulligan, Science 260:926-932 (1993); and Morgan and Anderson, Ann. Rev. Biochem. 62:191-217 (1993); May, TIBTECH 11(5):155-215 (1993). Methods commonly known in the art of recombinant DNA technology which can be used are described in Ausubel et al. (eds.), Current Protocols in Molecular Biology, John Wiley & Sons, NY (1993); and Kriegler, Gene Transfer and Expression, A Laboratory Manual, Stockton Press, NY (1990).

[0297] In a preferred embodiment, the compound comprises nucleic acid sequences encoding an antibody, said nucleic acid sequences being part of expression vectors that express the antibody or fragments or chimeric proteins or heavy or light chains thereof in a suitable host. In particular, such nucleic acid sequences have promoters operably linked to the antibody coding region, said promoter being inducible or constitutive, and, optionally, tissue-specific. In another particular embodiment, nucleic acid molecules are used in which the antibody coding sequences and any other desired sequences are flanked by regions that promote homologous recombination at a desired site in the genome, thus providing for intrachromosomal expression of the antibody encoding nucleic acids (Koller and Smithies, Proc. Natl. Acad. Sci. USA 86:8932-8935 (1989); Zijlstra et al., Nature 342:435-438 (1989). In specific embodiments, the expressed antibody molecule is a single chain antibody; alternatively, the nucleic acid sequences include sequences encoding both the heavy and light chains, or fragments thereof, of the antibody.

[0298] Delivery of the nucleic acids into a patient may be either direct, in which case the patient is directly exposed to the nucleic acid or nucleic acid- carrying vectors, or indirect, in which case, cells are first transformed with the nucleic acids in vitro, then transplanted into the patient. These two approaches are known, respectively, as in vivo or ex vivo gene therapy.

[0299] In a specific embodiment, the nucleic acid sequences are directly administered in vivo, where it is expressed to produce the encoded product. This can be accomplished by any of numerous methods known in the art, e.g., by constructing them as part of an appropriate nucleic acid expression vector and administering it so that they become intracellular, e.g., by infection using defective or attenuated retrovirals or other viral vectors (see U.S. Pat. No. 4,980,286), or by direct injection of naked DNA, or by use of microparticle bombardment (e.g., a gene gun; Biolistic, Dupont), or coating with lipids or cell-surface receptors or transfecting agents, encapsulation in liposomes, microparticles, or microcapsules, or by administering them in linkage to a peptide which is known to enter the nucleus, by administering it in linkage to a ligand subject to receptor-mediated endocytosis (see, e.g., Wu and Wu, J. Biol. Chem. 262:4429-4432 (1987)) (which can be used to target cell types specifically expressing the receptors), etc. In another embodiment, nucleic acid-ligand complexes can be formed in which the ligand comprises a fusogenic viral peptide to disrupt endosomes, allowing the nucleic acid to avoid lysosomal degradation. In yet another embodiment, the nucleic acid can be targeted in vivo for cell specific uptake and expression, by targeting a specific receptor (see, e.g., PCT Publications WO 92/06180; WO 92/22635; WO 92/20316; WO 93/14188, WO 93/20221). Alternatively, the nucleic acid can be introduced intracellularly and incorporated within host cell DNA for expression, by homologous recombination (Koller and Smithies, Proc. Natl. Acad. Sci. USA 86:8932-8935 (1989); Zijlstra et al., Nature 342:435-438 (1989)).

[0300] In a specific embodiment, viral vectors that contains nucleic acid sequences encoding an antibody of the invention are used. For example, a retroviral vector can be used (see Miller et al., Meth. Enzymol. 217:581-599 (1993)). These retroviral vectors contain the components necessary for the correct packaging of the viral genome and integration into the host cell DNA. The nucleic acid sequences encoding the antibody to be used in gene therapy are cloned into one or more vectors, which facilitates delivery of the gene into a patient. More detail about retroviral vectors can be found in Boesen et al., Biotherapy 6:291-302 (1994), which describes the use of a retroviral vector to deliver the mdrl gene to hematopoietic stem cells in order to make the stem cells more resistant to chemotherapy. Other references illustrating the use of retroviral vectors in gene therapy are: Clowes et al., J. Clin. Invest. 93:644-651 (1994); Kiem et al., Blood 83:1467-1473 (1994); Salmons and Gunzberg, Human Gene Therapy 4:129-141 (1993); and Grossman and Wilson, Curr. Opin. in Genetics and Devel. 3:110-114 (1993).

[0301] Adenoviruses are other viral vectors that can be used in gene therapy. Adenoviruses are especially attractive vehicles for delivering genes to respiratory epithelia. Adenoviruses naturally infect respiratory epithelia where they cause a mild disease. Other targets for adenovirus-based delivery systems are liver, the central nervous system, endothelial cells, and muscle. Adenoviruses have the advantage of being capable of infecting non-dividing cells. Kozarsky and Wilson, Current Opinion in Genetics and Development 3:499-503 (1993) present a review of adenovirus-based gene therapy. Bout et al., Human Gene Therapy 5:3-10 (1994) demonstrated the use of adenovirus vectors to transfer genes to the respiratory epithelia of rhesus monkeys. Other instances of the use of adenoviruses in gene therapy can be found in Rosenfeld et al., Science 252:431-434 (1991); Rosenfeld et al., Cell 68:143-155 (1992); Mastrangeli et al., J. Clin. Invest. 91:225-234 (1993); PCT Publication WO 94/12649; and Wang, et al., Gene Therapy 2:775-783 (1995). In a preferred embodiment, adenovirus vectors are used.

[0302] Adeno-associated virus (AAV) has also been proposed for use in gene therapy (Walsh et al., Proc. Soc. Exp. Biol. Med. 204:289-300 (1993); U.S. Pat. No. 5,436,146).

[0303] Another approach to gene therapy involves transferring a gene to cells in tissue culture by such methods as electroporation, lipofection, calcium phosphate mediated transfection, or viral infection. Usually, the method of transfer includes the transfer of a selectable marker to the cells. The cells are then placed under selection to isolate those cells that have taken up and are expressing the transferred gene. Those cells are then delivered to a patient.

[0304] In this embodiment, the nucleic acid is introduced into a cell prior to administration in vivo of the resulting recombinant cell. Such introduction can be carried out by any method known in the art, including but not limited to transfection, electroporation, microinjection, infection with a viral or bacteriophage vector containing the nucleic acid sequences, cell fusion, chromosome-mediated gene transfer, microcell-mediated gene transfer, spheroplast fusion, etc. Numerous techniques are known in the art for the introduction of foreign genes into cells (see, e.g., Loeffler and Behr, Meth. Enzymol. 217:599-618 (1993); Cohen et al., Meth. Enzymol. 217:618-644 (1993); Cline, Pharmac. Ther. 29:69-92m (1985) and may be used in accordance with the present invention, provided that the necessary developmental and physiological functions of the recipient cells are not disrupted. The technique should provide for the stable transfer of the nucleic acid to the cell, so that the nucleic acid is expressible by the cell and preferably heritable and expressible by its cell progeny.

[0305] The resulting recombinant cells can be delivered to a patient by various methods known in the art. Recombinant blood cells (e.g., hematopoietic stem or progenitor cells) are preferably administered intravenously. The amount of cells envisioned for use depends on the desired effect, patient state, etc., and can be determined by one skilled in the art.

[0306] Cells into which a nucleic acid can be introduced for purposes of gene therapy encompass any desired, available cell type, and include but are not limited to epithelial cells, endothelial cells, keratinocytes, fibroblasts, muscle cells, hepatocytes; blood cells such as T lymphocytes, B lymphocytes, monocytes, macrophages, neutrophils, eosinophils, megakaryocytes, granulocytes; various stem or progenitor cells, in particular hematopoietic stem or progenitor cells, e.g., as obtained from bone marrow, umbilical cord blood, peripheral blood, fetal liver, etc.

[0307] In a preferred embodiment, the cell used for gene therapy is autologous to the patient.

[0308] In an embodiment in which recombinant cells are used in gene therapy, nucleic acid sequences encoding an antibody are introduced into the cells such that they are expressible by the cells or their progeny, and the recombinant cells are then administered in vivo for therapeutic effect. In a specific embodiment, stem or progenitor cells are used. Any stem and/or progenitor cells which can be isolated and maintained in vitro can potentially be used in accordance with this embodiment of the present invention (see e.g. PCT Publication WO 94/08598; Stemple and Anderson, Cell 71:973-985 (1992); Rheinwald, Meth. Cell Bio. 21A:229 (1980); and Pittelkow and Scott, Mayo Clinic Proc. 61:771 (1986)).

[0309] In a specific embodiment, the nucleic acid to be introduced for purposes of gene therapy comprises an inducible promoter operably linked to the coding region, such that expression of the nucleic acid is controllable by the presence or absence of an appropriate inducer of transcription.

[0310] Demonstration of Therapeutic or Prophylactic Activity

[0311] The compounds or pharmaceutical compositions of the invention are preferably tested in vitro, and then in vivo for the desired therapeutic or prophylactic activity, prior to use in humans. For example, in vitro assays to demonstrate the therapeutic or prophylactic utility of a compound or pharmaceutical composition include, the effect of a compound on a cell line or a patient tissue sample. The effect of the compound or composition on the cell line and/or tissue sample can be determined utilizing techniques known to those of skill in the art including, but not limited to, rosette formation assays and cell lysis assays. In accordance with the invention, in vitro assays which can be used to determine whether administration of a specific compound is indicated, include in vitro cell culture assays in which a patient tissue sample is grown in culture, and exposed to or otherwise administered a compound, and the effect of such compound upon the tissue sample is observed.

[0312] Therapeutic/Prophylactic Administration and Composition

[0313] The invention provides methods of treatment, inhibition and prophylaxis by administration to a subject of an effective amount of a compound or pharmaceutical composition of the invention, preferably a polypeptide or antibody of the invention. In a preferred embodiment, the compound is substantially purified (e.g., substantially free from substances that limit its effect or produce undesired side-effects). The subject is preferably an animal, including but not limited to animals such as cows, pigs, horses, chickens, cats, dogs, etc., and is preferably a mammal, and most preferably human.

[0314] Formulations and methods of administration that can be employed when the compound comprises a nucleic acid or an immunoglobulin are described above; additional appropriate formulations and routes of administration can be selected from among those described herein below.

[0315] Various delivery systems are known and can be used to administer a compound of the invention, e.g., encapsulation in liposomes, microparticles, microcapsules, recombinant cells capable of expressing the compound, receptor-mediated endocytosis (see, e.g., Wu and Wu, J. Biol. Chem. 262:4429-4432 (1987)), construction of a nucleic acid as part of a retroviral or other vector, etc. Methods of introduction include but are not limited to intradermal, intramuscular, intraperitoneal, intravenous, subcutaneous, intranasal, epidural, and oral routes. The compounds or compositions may be administered by any convenient route, for example by infusion or bolus injection, by absorption through epithelial or mucocutaneous linings (e.g., oral mucosa, rectal and intestinal mucosa, etc.) and may be administered together with other biologically active agents. Administration can be systemic or local. In addition, it may be desirable to introduce the pharmaceutical compounds or compositions of the invention into the central nervous system by any suitable route, including intraventricular and intrathecal injection; intraventricular injection may be facilitated by an intraventricular catheter, for example, attached to a reservoir, such as an Ommaya reservoir. Pulmonary administration can also be employed, e.g., by use of an inhaler or nebulizer, and formulation with an aerosolizing agent.

[0316] In a specific embodiment, it may be desirable to administer the pharmaceutical compounds or compositions of the invention locally to the area in need of treatment; this may be achieved by, for example, and not by way of limitation, local infusion during surgery, topical application, e.g., in conjunction with a wound dressing after surgery, by injection, by means of a catheter, by means of a suppository, or by means of an implant, said implant being of a porous, non-porous, or gelatinous material, including membranes, such as sialastic membranes, or fibers. Preferably, when administering a protein, including an antibody, of the invention, care must be taken to use materials to which the protein does not absorb.

[0317] In another embodiment, the compound or composition can be delivered in a vesicle, in particular a liposome (see Langer, Science 249:1527-1533 (1990); Treat et al., in Liposomes in the Therapy of Infectious Disease and Cancer, Lopez-Berestein and Fidler (eds.), Liss, New York, pp. 353-365 (1989); Lopez-Berestein, ibid., pp. 317-327; see generally ibid.)

[0318] In yet another embodiment, the compound or composition can be delivered in a controlled release system. In one embodiment, a pump may be used (see Langer, supra; Sefton, CRC Crit. Ref. Biomed. Eng. 14:201 (1987); Buchwald et al., Surgery 88:507 (1980); Saudek et al., N. Engl. J. Med. 321:574 (1989)). In another embodiment, polymeric materials can be used (see Medical Applications of Controlled Release, Langer and Wise (eds.), CRC Pres., Boca Raton, Fla. (1974); Controlled Drug Bioavailability, Drug Product Design and Performance, Smolen and Ball (eds.), Wiley, New York (1984); Ranger and Peppas, J., Macromol. Sci. Rev. Macromol. Chem. 23:61 (1983); see also Levy et al., Science 228:190 (1985); During et al., Ann. Neurol. 25:351 (1989); Howard et al., J. Neurosurg. 71:105 (1989)). In yet another embodiment, a controlled release system can be placed in proximity of the therapeutic target, e.g., the brain, thus requiring only a fraction of the systemic dose (see, e.g., Goodson, in Medical Applications of Controlled Release, supra, vol. 2, pp. 115-138 (1984)).

[0319] Other controlled release systems are discussed in the review by Langer (Science 249:1527-1533 (1990)).

[0320] In a specific embodiment where the compound of the invention is a nucleic acid encoding a protein, the nucleic acid can be administered in vivo to promote expression of its encoded protein, by constructing it as part of an appropriate nucleic acid expression vector and administering it so that it becomes intracellular, e.g., by use of a retroviral vector (see U.S. Pat. No. 4,980,286), or by direct injection, or by use of microparticle bombardment (e.g., a gene gun; Biolistic, Dupont), or coating with lipids or cell-surface receptors or transfecting agents, or by administering it in linkage to a homeobox- like peptide which is known to enter the nucleus (see e.g., Joliot et al., Proc. Natl. Acad. Sci. USA 88:1864-1868 (1991)), etc. Alternatively, a nucleic acid can be introduced intracellularly and incorporated within host cell DNA for expression, by homologous recombination.

[0321] The present invention also provides pharmaceutical compositions. Such compositions comprise a therapeutically effective amount of a compound, and a pharmaceutically acceptable carrier. In a specific embodiment, the term “pharmaceutically acceptable” means approved by a regulatory agency of the Federal or a state government or listed in the U.S. Pharmacopeia or other generally recognized pharmacopeia for use in animals, and more particularly in humans. The term “carrier” refers to a diluent, adjuvant, excipient, or vehicle with which the therapeutic is administered. Such pharmaceutical carriers can be sterile liquids, such as water and oils, including those of petroleum, animal, vegetable or synthetic origin, such as peanut oil, soybean oil, mineral oil, sesame oil and the like. Water is a preferred carrier when the pharmaceutical composition is administered intravenously. Saline solutions and aqueous dextrose and glycerol solutions can also be employed as liquid carriers, particularly for injectable solutions. Suitable pharmaceutical excipients include starch, glucose, lactose, sucrose, gelatin, malt, rice, flour, chalk, silica gel, sodium stearate, glycerol monostearate, talc, sodium chloride, dried skim milk, glycerol, propylene, glycol, water, ethanol and the like. The composition, if desired, can also contain minor amounts of wetting or emulsifying agents, or pH buffering agents. These compositions can take the form of solutions, suspensions, emulsion, tablets, pills, capsules, powders, sustained-release formulations and the like. The composition can be formulated as a suppository, with traditional binders and carriers such as triglycerides. Oral formulation can include standard carriers such as pharmaceutical grades of mannitol, lactose, starch, magnesium stearate, sodium saccharine, cellulose, magnesium carbonate, etc. Examples of suitable pharmaceutical carriers are described in “Remington's Pharmaceutical Sciences” by E. W. Martin. Such compositions will contain a therapeutically effective amount of the compound, preferably in purified form, together with a suitable amount of carrier so as to provide the form for proper administration to the patient. The formulation should suit the mode of administration.

[0322] In a preferred embodiment, the composition is formulated in accordance with routine procedures as a pharmaceutical composition adapted for intravenous administration to human beings. Typically, compositions for intravenous administration are solutions in sterile isotonic aqueous buffer. Where necessary, the composition may also include a solubilizing agent and a local anesthetic such as lignocaine to ease pain at the site of the injection. Generally, the ingredients are supplied either separately or mixed together in unit dosage form, for example, as a dry lyophilized powder or water free concentrate in a hermetically sealed container such as an ampoule or sachette indicating the quantity of active agent. Where the composition is to be administered by infusion, it can be dispensed with an infusion bottle containing sterile pharmaceutical grade water or saline. Where the composition is administered by injection, an ampoule of sterile water for injection or saline can be provided so that the ingredients may be mixed prior to administration.

[0323] The compounds of the invention can be formulated as neutral or salt forms. Pharmaceutically acceptable salts include those formed with anions such as those derived from hydrochloric, phosphoric, acetic, oxalic, tartaric acids, etc., and those formed with cations such as those derived from sodium, potassium, ammonium, calcium, ferric hydroxides, isopropylamine, triethylamine, 2-ethylamino ethanol, histidine, procaine, etc.

[0324] The amount of the compound of the invention which will be effective in the treatment, inhibition and prevention of a disease or disorder associated with aberrant expression and/or activity of a polypeptide of the invention can be determined by standard clinical techniques. In addition, in vitro assays may optionally be employed to help identify optimal dosage ranges. The precise dose to be employed in the formulation will also depend on the route of administration, and the seriousness of the disease or disorder, and should be decided according to the judgment of the practitioner and each patient's circumstances. Effective doses may be extrapolated from dose-response curves derived from in vitro or animal model test systems.

[0325] For antibodies, the dosage administered to a patient is typically 0.1 mg/kg to 100 mg/kg of the patient's body weight. Preferably, the dosage administered to a patient is between 0. 1 mg/kg and 20 mg/kg of the patient's body weight, more preferably 1 mg/kg to 10 mg/kg of the patient's body weight. Generally, human antibodies have a longer half-life within the human body than antibodies from other species due to the immune response to the foreign polypeptides. Thus, lower dosages of human antibodies and less frequent administration is often possible. Further, the dosage and frequency of administration of antibodies of the invention may be reduced by enhancing uptake and tissue penetration (e.g., into the brain) of the antibodies by modifications such as, for example, lipidation.

[0326] The invention also provides a pharmaceutical pack or kit comprising one or more containers filled with one or more of the ingredients of the pharmaceutical compositions of the invention. Optionally associated with such container(s) can be a notice in the form prescribed by a governmental agency regulating the manufacture, use or sale of pharmaceuticals or biological products, which notice reflects approval by the agency of manufacture, use or sale for human administration.

[0327] Diagnosis and Imaging

[0328] Labeled antibodies, and derivatives and analogs thereof, which specifically bind to a polypeptide of interest can be used for diagnostic purposes to detect, diagnose, or monitor diseases, disorders, and/or conditions associated with the aberrant expression and/or activity of a polypeptide of the invention. The invention provides for the detection of aberrant expression of a polypeptide of interest, comprising (a) assaying the expression of the polypeptide of interest in cells or body fluid of an individual using one or more antibodies specific to the polypeptide interest and (b) comparing the level of gene expression with a standard gene expression level, whereby an increase or decrease in the assayed polypeptide gene expression level compared to the standard expression level is indicative of aberrant expression.

[0329] The invention provides a diagnostic assay for diagnosing a disorder, comprising (a) assaying the expression of the polypeptide of interest in cells or body fluid of an individual using one or more antibodies specific to the polypeptide interest and (b) comparing the level of gene expression with a standard gene expression level, whereby an increase or decrease in the assayed polypeptide gene expression level compared to the standard expression level is indicative of a particular disorder. With respect to cancer, the presence of a relatively high amount of transcript in biopsied tissue from an individual may indicate a predisposition for the development of the disease, or may provide a means for detecting the disease prior to the appearance of actual clinical symptoms. A more definitive diagnosis of this type may allow health professionals to employ preventative measures or aggressive treatment earlier thereby preventing the development or further progression of the cancer.

[0330] Antibodies of the invention can be used to assay protein levels in a biological sample using classical immunohistological methods known to those of skill in the art (e.g., see Jalkanen et al., J. Cell. Biol. 101:976-985 (1985); Jalkanen et al., J. Cell . Biol. 105:3087-3096 (1987)). Other antibody-based methods useful for detecting protein gene expression include immunoassays, such as the enzyme linked immunosorbent assay (ELISA) and the radioimmunoassay (RIA). Suitable antibody assay labels are known in the art and include enzyme labels, such as, glucose oxidase; radioisotopes, such as iodine (125I, 121I), carbon (14C), sulfur (35S), tritium (3H), indium (112In), and technetium (99Tc); luminescent labels, such as luminol; and fluorescent labels, such as fluorescein and rhodamine, and biotin.

[0331] One facet of the invention is the detection and diagnosis of a disease or disorder associated with aberrant expression of a polypeptide of interest in an animal, preferably a mammal and most preferably a human. In one embodiment, diagnosis comprises: a) administering (for example, parenterally, subcutaneously, or intraperitoneally) to a subject an effective amount of a labeled molecule which specifically binds to the polypeptide of interest; b) waiting for a time interval following the administering for permitting the labeled molecule to preferentially concentrate at sites in the subject where the polypeptide is expressed (and for unbound labeled molecule to be cleared to background level); c) determining background level; and d) detecting the labeled molecule in the subject, such that detection of labeled molecule above the background level indicates that the subject has a particular disease or disorder associated with aberrant expression of the polypeptide of interest. Background level can be determined by various methods including, comparing the amount of labeled molecule detected to a standard value previously determined for a particular system.

[0332] It will be understood in the art that the size of the subject and the imaging system used will determine the quantity of imaging moiety needed to produce diagnostic images. In the case of a radioisotope moiety, for a human subject, the quantity of radioactivity injected will normally range from about 5 to 20 millicuries of 99mTc. The labeled antibody or antibody fragment will then preferentially accumulate at the location of cells which contain the specific protein. In vivo tumor imaging is described in S. W. Burchiel et al., “Immunopharmacokinetics of Radiolabeled Antibodies and Their Fragments.” (Chapter 13 in Tumor Imaging: The Radiochemical Detection of Cancer, S. W. Burchiel and B. A. Rhodes, eds., Masson Publishing Inc. (1982)).

[0333] Depending on several variables, including the type of label used and the mode of administration, the time interval following the administration for permitting the labeled molecule to preferentially concentrate at sites in the subject and for unbound labeled molecule to be cleared to background level is 6 to 48 hours or 6 to 24 hours or 6 to 12 hours. In another embodiment the time interval following administration is 5 to 20 days or 5 to 10 days.

[0334] In an embodiment, monitoring of the disease or disorder is carried out by repeating the method for diagnosing the disease or disease, for example, one month after initial diagnosis, six months after initial diagnosis, one year after initial diagnosis, etc.

[0335] Presence of the labeled molecule can be detected in the patient using methods known in the art for in vivo scanning. These methods depend upon the type of label used. Skilled artisans will be able to determine the appropriate method for detecting a particular label. Methods and devices that may be used in the diagnostic methods of the invention include, but are not limited to, computed tomography (CT), whole body scan such as position emission tomography (PET), magnetic resonance imaging (MRI), and sonography.

[0336] In a specific embodiment, the molecule is labeled with a radioisotope and is detected in the patient using a radiation responsive surgical instrument (Thurston et al., U.S. Pat. No. 5,441,050). In another embodiment, the molecule is labeled with a fluorescent compound and is detected in the patient using a fluorescence responsive scanning instrument. In another embodiment, the molecule is labeled with a positron emitting metal and is detected in the patent using positron emission-tomography. In yet another embodiment, the molecule is labeled with a paramagnetic label and is detected in a patient using magnetic resonance imaging (MRI).

[0337] Kits

[0338] The present invention provides kits that can be used in the above methods. In one embodiment, a kit comprises an antibody of the invention, preferably a purified antibody, in one or more containers. In a specific embodiment, the kits of the present invention contain a substantially isolated polypeptide comprising an epitope which is specifically immunoreactive with an antibody included in the kit. Preferably, the kits of the present invention further comprise a control antibody which does not react with the polypeptide of interest. In another specific embodiment, the kits of the present invention contain a means for detecting the binding of an antibody to a polypeptide of interest (e.g., the antibody may be conjugated to a detectable substrate such as a fluorescent compound, an enzymatic substrate, a radioactive compound or a luminescent compound, or a second antibody which recognizes the first antibody may be conjugated to a detectable substrate).

[0339] In another specific embodiment of the present invention, the kit is a diagnostic kit for use in screening serum containing antibodies specific against proliferative and/or cancerous polynucleotides and polypeptides. Such a kit may include a control antibody that does not react with the polypeptide of interest. Such a kit may include a substantially isolated polypeptide antigen comprising an epitope which is specifically immunoreactive with at least one anti-polypeptide antigen antibody. Further, such a kit includes means for detecting the binding of said antibody to the antigen (e.g., the antibody may be conjugated to a fluorescent compound such as fluorescein or rhodamine which can be detected by flow cytometry). In specific embodiments, the kit may include a recombinantly produced or chemically synthesized polypeptide antigen. The polypeptide antigen of the kit may also be attached to a solid support.

[0340] In a more specific embodiment the detecting means of the above-described kit includes a solid support to which said polypeptide antigen is attached. Such a kit may also include a non-attached reporter-labeled anti-human antibody. In this embodiment, binding of the antibody to the polypeptide antigen can be detected by binding of the said reporter-labeled antibody.

[0341] In an additional embodiment, the invention includes a diagnostic kit for use in screening serum containing antigens of the polypeptide of the invention. The diagnostic kit includes a substantially isolated antibody specifically immunoreactive with polypeptide or polynucleotide antigens, and means for detecting the binding of the polynucleotide or polypeptide antigen to the antibody. In one embodiment, the antibody is attached to a solid support. In a specific embodiment, the antibody may be a monoclonal antibody. The detecting means of the kit may include a second, labeled monoclonal antibody. Alternatively, or in addition, the detecting means may include a labeled, competing antigen.

[0342] In one diagnostic configuration, test serum is reacted with a solid phase reagent having a surface-bound antigen obtained by the methods of the present invention. After binding with specific antigen antibody to the reagent and removing unbound serum components by washing, the reagent is reacted with reporter-labeled anti-human antibody to bind reporter to the reagent in proportion to the amount of bound anti-antigen antibody on the solid support. The reagent is again washed to remove unbound labeled antibody, and the amount of reporter associated with the reagent is determined. Typically, the reporter is an enzyme which is detected by incubating the solid phase in the presence of a suitable fluorometric, luminescent or colorimetric substrate (Sigma, St. Louis, Mo.).

[0343] The solid surface reagent in the above assay is prepared by known techniques for attaching protein material to solid support material, such as polymeric beads, dip sticks, 96-well plate or filter material. These attachment methods generally include non-specific adsorption of the protein to the support or covalent attachment of the protein, typically through a free amine group, to a chemically reactive group on the solid support, such as an activated carboxyl, hydroxyl, or aldehyde group. Alternatively, streptavidin coated plates can be used in conjunction with biotinylated antigen(s).

[0344] Thus, the invention provides an assay system or kit for carrying out this diagnostic method. The kit generally includes a support with surface- bound recombinant antigens, and a reporter-labeled anti-human antibody for detecting surface-bound anti-antigen antibody.

[0345] Uses of the Polynucleotides

[0346] Each of the polynucleotides identified herein can be used in numerous ways as reagents. The following description should be considered exemplary and utilizes known techniques.

[0347] The polynucleotides of the present invention are useful for chromosome identification. There exists an ongoing need to identify new chromosome markers, since few chromosome marking reagents, based on actual sequence data (repeat polymorphisms), are presently available. Each sequence is specifically targeted to and can hybridize with a particular location on an individual human chromosome, thus each polynucleotide of the present invention can routinely be used as a chromosome marker using techniques known in the art. Table 1A, column 9 provides the chromosome location of some of the polynucleotides of the invention.

[0348] Briefly, sequences can be mapped to chromosomes by preparing PCR primers (preferably at least 15 bp (e.g., 15-25 bp) from the sequences shown in SEQ ID NO:X. Primers can optionally be selected using computer analysis so that primers do not span more than one predicted exon in the genomic DNA. These primers are then used for PCR screening of somatic cell hybrids containing individual human chromosomes. Only those hybrids containing the human gene corresponding to SEQ ID NO:X will yield an amplified fragment.

[0349] Similarly, somatic hybrids provide a rapid method of PCR mapping the polynucleotides to particular chromosomes. Three or more clones can be assigned per day using a single thermal cycler. Moreover, sublocalization of the polynucleotides can be achieved with panels of specific chromosome fragments. Other gene mapping strategies that can be used include in situ hybridization, prescreening with labeled flow-sorted chromosomes, preselection by hybridization to construct chromosome specific-cDNA libraries, and computer mapping techniques (See, e.g., Shuler, Trends Biotechnol 16:456-459 (1998) which is hereby incorporated by reference in its entirety).

[0350] Precise chromosomal location of the polynucleotides can also be achieved using fluorescence in situ hybridization (FISH) of a metaphase chromosomal spread. This technique uses polynucleotides as short as 500 or 600 bases; however, polynucleotides 2,000-4,000 bp are preferred. For a review of this technique, see Verma et al., “Human Chromosomes: a Manual of Basic Techniques,” Pergamon Press, New York (1988).

[0351] For chromosome mapping, the polynucleotides can be used individually (to mark a single chromosome or a single site on that chromosome) or in panels (for marking multiple sites and/or multiple chromosomes).

[0352] Thus, the present invention also provides a method for chromosomal localization which involves (a) preparing PCR primers from the polynucleotide sequences in Table 1A and/or Table 2 and SEQ ID NO:X and (b) screening somatic cell hybrids containing individual chromosomes.

[0353] The polynucleotides of the present invention would likewise be useful for radiation hybrid mapping, HAPPY mapping, and long range restriction mapping. For a review of these techniques and others known in the art, see, e.g. Dear, “Genome Mapping: A Practical Approach,” IRL Press at Oxford University Press, London (1997); Aydin, J. Mol. Med. 77:691-694 (1999); Hacia et al., Mol. Psychiatry 3:483-492 (1998); Herrick et al., Chromosome Res. 7:409-423 (1999); Hamilton et al., Methods Cell Biol. 62:265-280 (2000); and/or Ott, J. Hered. 90:68-70 (1999) each of which is hereby incorporated by reference in its entirety.

[0354] Once a polynucleotide has been mapped to a precise chromosomal location, the physical position of the polynucleotide can be used in linkage analysis. Linkage analysis establishes coinheritance between a chromosomal location and presentation of a particular disease. (Disease mapping data are found, for example, in V. McKusick, Mendelian Inheritance in Man (available on line through Johns Hopkins University Welch Medical Library)). Column 10 of Table 1A provides an OMIM reference identification number of diseases associated with the cytologic band disclosed in column 9 of Table 1A, as determined using techniques described herein and by reference to Table 5. Assuming 1 megabase mapping resolution and one gene per 20 kb, a cDNA precisely localized to a chromosomal region associated with the disease could be one of 50-500 potential causative genes.

[0355] Thus, once coinheritance is established, differences in a polynucleotide of the invention and the corresponding gene between affected and unaffected individuals can be examined. First, visible structural alterations in the chromosomes, such as deletions or translocations, are examined in chromosome spreads or by PCR. If no structural alterations exist, the presence of point mutations are ascertained. Mutations observed in some or all affected individuals, but not in normal individuals, indicates that the mutation may cause the disease. However, complete sequencing of the polypeptide and the corresponding gene from several normal individuals is required to distinguish the mutation from a polymorphism. If a new polymorphism is identified, this polymorphic polypeptide can be used for further linkage analysis.

[0356] Furthermore, increased or decreased expression of the gene in affected individuals as compared to unaffected individuals can be assessed using the polynucleotides of the invention. Any of these alterations (altered expression, chromosomal rearrangement, or mutation) can be used as a diagnostic or prognostic marker. Diagnostic and prognostic methods, kits and reagents encompassed by the present invention are briefly described below and more thoroughly elsewhere herein (see e.g., the sections labeled “Antibodies”, “Diagnostic Assays”, and “Methods for Detecting Diseases”).

[0357] Thus, the invention also provides a diagnostic method useful during diagnosis of a disorder, involving measuring the expression level of polynucleotides of the present invention in cells or body fluid from an individual and comparing the measured gene expression level with a standard level of polynucleotide expression level, whereby an increase or decrease in the gene expression level compared to the standard is indicative of a disorder. Additional non-limiting examples of diagnostic methods encompassed by the present invention are more thoroughly described elsewhere herein (see, e.g., Example 12).

[0358] In still another embodiment, the invention includes a kit for analyzing samples for the presence of proliferative and/or cancerous polynucleotides derived from a test subject. In a general embodiment, the kit includes at least one polynucleotide probe containing a nucleotide sequence that will specifically hybridize with a polynucleotide of the invention and a suitable container. In a specific embodiment, the kit includes two polynucleotide probes defining an internal region of the polynucleotide of the invention, where each probe has one strand containing a 31′ mer-end internal to the region. In a further embodiment, the probes may be useful as primers for polymerase chain reaction amplification.

[0359] Where a diagnosis of a related disorder, including, for example, diagnosis of a tumor, has already been made according to conventional methods, the present invention is useful as a prognostic indicator, whereby patients exhibiting enhanced or depressed polynucleotide of the invention expression will experience a worse clinical outcome relative to patients expressing the gene at a level nearer the standard level.

[0360] By “measuring the expression level of polynucleotides of the invention” is intended qualitatively or quantitatively measuring or estimating the level of the polypeptide of the invention or the level of the mRNA encoding the polypeptide of the invention in a first biological sample either directly (e.g., by determining or estimating absolute protein level or mRNA level) or relatively (e.g., by comparing to the polypeptide level or mRNA level in a second biological sample). Preferably, the polypeptide level or mRNA level in the first biological sample is measured or estimated and compared to a standard polypeptide level or mRNA level, the standard being taken from a second biological sample obtained from an individual not having the related disorder or being determined by averaging levels from a population of individuals not having a related disorder. As will be appreciated in the art, once a standard polypeptide level or mRNA level is known, it can be used repeatedly as a standard for comparison.

[0361] By “biological sample” is intended any biological sample obtained from an individual, body fluid, cell line, tissue culture, or other source which contains polypeptide of the present invention or the corresponding mRNA. As indicated, biological samples include body fluids (such as semen, lymph, vaginal pool, sera, plasma, urine, synovial fluid and spinal fluid) which contain the polypeptide of the present invention, and tissue sources found to express the polypeptide of the present invention. Methods for obtaining tissue biopsies and body fluids from mammals are well known in the art. Where the biological sample is to include mRNA, a tissue biopsy is the preferred source.

[0362] The method(s) provided above may preferably be applied in a diagnostic method and/or kits in which polynucleotides and/or polypeptides of the invention are attached to a solid support. In one exemplary method, the support may be a “gene chip” or a “biological chip” as described in U.S. Pat. Nos. 5,837,832, 5,874,219, and 5,856,174. Further, such a gene chip with polynucleotides of the invention attached may be used to identify polymorphisms between the isolated polynucleotide sequences of the invention, with polynucleotides isolated from a test subject. The knowledge of such polymorphisms (i.e. their location, as well as, their existence) would be beneficial in identifying disease loci for many disorders, such as for example, in neural disorders, immune system disorders, muscular disorders, reproductive disorders, gastrointestinal disorders, pulmonary disorders, digestive disorders, metabolic disorders, cardiovascular disorders, renal disorders, proliferative disorders, and/or cancerous diseases and conditions. Such a method is described in U.S. Pat. Nos. 5,858,659 and 5,856,104. The US Patents referenced supra are hereby incorporated by reference in their entirety herein.

[0363] The present invention encompasses polynucleotides of the present invention that are chemically synthesized, or reproduced as peptide nucleic acids (PNA), or according to other methods known in the art. The use of PNAs would serve as the preferred form if the polynucleotides of the invention are incorporated onto a solid support, or gene chip. For the purposes of the present invention, a peptide nucleic acid (PNA) is a polyamide type of DNA analog and the monomeric units for adenine, guanine, thymine and cytosine are available commercially (Perceptive Biosystems). Certain components of DNA, such as phosphorus, phosphorus oxides, or deoxyribose derivatives, are not present in PNAs. As disclosed by Nielsen et al., Science 254, 1497 (1991); and Egholm et al., Nature 365, 666 (1993), PNAs bind specifically and tightly to complementary DNA strands and are not degraded by nucleases. In fact, PNA binds more strongly to DNA than DNA itself does. This is probably because there is no electrostatic repulsion between the two strands, and also the polyamide backbone is more flexible. Because of this, PNA/DNA duplexes bind under a wider range of stringency conditions than DNA/DNA duplexes, making it easier to perform multiplex hybridization. Smaller probes can be used than with DNA due to the strong binding. In addition, it is more likely that single base mismatches can be determined with PNA/DNA hybridization because a single mismatch in a PNA/DNA 15-mer lowers the melting point (T.sub.m) by 8°-20° C., vs. 4°-16° C. for the DNA/DNA 15-mer duplex. Also, the absence of charge groups in PNA means that hybridization can be done at low ionic strengths and reduce possible interference by salt during the analysis.

[0364] The compounds of the present invention have uses which include, but are not limited to, detecting cancer in mammals. In particular the invention is useful during diagnosis of pathological cell proliferative neoplasias which include, but are not limited to: acute myelogenous leukemias including acute monocytic leukemia, acute myeloblastic leukemia, acute promyelocytic leukemia, acute myelomonocytic leukemia, acute erythroleukemia, acute megakaryocytic leukemia, and acute undifferentiated leukemia, etc.; and chronic myelogenous leukemias including chronic myelomonocytic leukemia, chronic granulocytic leukemia, etc. Preferred mammals include monkeys, apes, cats, dogs, cows, pigs, horses, rabbits and humans. Particularly preferred are humans.

[0365] Pathological cell proliferative disorders are often associated with inappropriate activation of proto-oncogenes. (Gelmann, E. P. et al., “The Etiology of Acute Leukemia: Molecular Genetics and Viral Oncology,” in Neoplastic Diseases of the Blood, Vol 1., Wiernik, P. H. et al. eds., 161-182 (1985)). Neoplasias are now believed to result from the qualitative alteration of a normal cellular gene product, or from the quantitative modification of gene expression by insertion into the chromosome of a viral sequence, by chromosomal translocation of a gene to a more actively transcribed region, or by some other mechanism. (Gelmann et al., supra) It is likely that mutated or altered expression of specific genes is involved in the pathogenesis of some leukemias, among other tissues and cell types. (Gelmann et al., supra) Indeed, the human counterparts of the oncogenes involved in some animal neoplasias have been amplified or translocated in some cases of human leukemia and carcinoma. (Gelmann et al., supra)

[0366] For example, c-myc expression is highly amplified in the non-lymphocytic leukemia cell line HL-60. When HL-60 cells are chemically induced to stop proliferation, the level of c-myc is found to be downregulated. (International Publication No. WO 91/5580). However, it has been shown that exposure of HL-60 cells to a DNA construct that is complementary to the 5′ end of c-myc or c-myb blocks translation of the corresponding mRNAs which downregulates expression of the c-myc or c-myb proteins and causes arrest of cell proliferation and differentiation of the treated cells. (International Publication Number WO 91/15580; Wickstrom et al., Proc. Natl. Acad. Sci. 85:1028 (1988); Anfossi et al., Proc. Natl. Acad. Sci. 86:3379 (1989)). However, the skilled artisan would appreciate the present invention's usefulness is not be limited to treatment, prevention, and/or prognosis of proliferative disorders of cells and tissues of hematopoietic origin, in light of the numerous cells and cell types of varying origins which are known to exhibit proliferative phenotypes.

[0367] In addition to the foregoing, a polynucleotide of the present invention can be used to control gene expression through triple helix formation or through antisense DNA or RNA. Antisense techniques are discussed, for example, in Okano, J. Neurochem. 56: 560 (1991); “Oligodeoxynucleotides as Antisense Inhibitors of Gene Expression, CRC Press, Boca Raton, Fla. (1988). Triple helix formation is discussed in, for instance Lee et al., Nucleic Acids Research 6: 3073 (1979); Cooney et al., Science 241: 456 (1988); and Dervan et al., Science 251: 1360 (1991). Both methods rely on binding of the polynucleotide to a complementary DNA or RNA. For these techniques, preferred polynucleotides are usually oligonucleotides 20 to 40 bases in length and complementary to either the region of the gene involved in transcription (triple helix—see Lee et al., Nucl. Acids Res. 6:3073 (1979); Cooney et al., Science 241:456 (1988); and Dervan et al., Science 251:1360 (1991)) or to the mRNA itself (antisense—Okano, J. Neurochem. 56:560 (1991); Oligodeoxy-nucleotides as Antisense Inhibitors of Gene Expression, CRC Press, Boca Raton, Fla. (1988)). Triple helix formation optimally results in a shut-off of RNA transcription from DNA, while antisense RNA hybridization blocks translation of an mRNA molecule into polypeptide. The oligonucleotide described above can also be delivered to cells such that the antisense RNA or DNA may be expressed in vivo to inhibit production of polypeptide of the present invention antigens. Both techniques are effective in model systems, and the information disclosed herein can be used to design antisense or triple helix polynucleotides in an effort to treat disease, and in particular, for the treatment of proliferative diseases and/or conditions. Non-limiting antisense and triple helix methods encompassed by the present invention are more thoroughly described elsewhere herein (see, e.g., the section labeled “Antisense and Ribozyme (Antagonists)”).

[0368] Polynucleotides of the present invention are also useful in gene therapy. One goal of gene therapy is to insert a normal gene into an organism having a defective gene, in an effort to correct the genetic defect. The polynucleotides disclosed in the present invention offer a means of targeting such genetic defects in a highly accurate manner. Another goal is to insert a new gene that was not present in the host genome, thereby producing a new trait in the host cell. Additional non-limiting examples of gene therapy methods encompassed by the present invention are more thoroughly described elsewhere herein (see, e.g., the sections labeled “Gene Therapy Methods”, and Examples 16, 17 and 18).

[0369] The polynucleotides are also useful for identifying individuals from minute biological samples. The United States military, for example, is considering the use of restriction fragment length polymorphism (RFLP) for identification of its personnel. In this technique, an individual's genomic DNA is digested with one or more restriction enzymes, and probed on a Southern blot to yield unique bands for identifying personnel. This method does not suffer from the current limitations of “Dog Tags” which can be lost, switched, or stolen, making positive identification difficult. The polynucleotides of the present invention can be used as additional DNA markers for RFLP.

[0370] The polynucleotides of the present invention can also be used as an alternative to RFLP, by determining the actual base-by-base DNA sequence of selected portions of an individual's genome. These sequences can be used to prepare PCR primers for amplifying and isolating such selected DNA, which can then be sequenced. Using this technique, individuals can be identified because each individual will have a unique set of DNA sequences. Once an unique ID database is established for an individual, positive identification of that individual, living or dead, can be made from extremely small tissue samples.

[0371] Forensic biology also benefits from using DNA-based identification techniques as disclosed herein. DNA sequences taken from very small biological samples such as tissues, e.g., hair or skin, or body fluids, e.g., blood, saliva, semen, synovial fluid, amniotic fluid, breast milk, lymph, pulmonary sputum or surfactant, urine, fecal matter, etc., can be amplified using PCR. In one prior art technique, gene sequences amplified from polymorphic loci, such as DQa class II HLA gene, are used in forensic biology to identify individuals. (Erlich, H., PCR Technology, Freeman and Co. (1992)). Once these specific polymorphic loci are amplified, they are digested with one or more restriction enzymes, yielding an identifying set of bands on a Southern blot probed with DNA corresponding to the DQa class-II HLA gene. Similarly, polynucleotides of the present invention can be used as polymorphic markers for forensic purposes.

[0372] There is also a need for reagents capable of identifying the source of a particular tissue. Such need arises, for example, in forensics when presented with tissue of unknown origin. Appropriate reagents can comprise, for example, DNA probes or primers prepared from the sequences of the present invention, specific to tissues, including but not limited to those shown in Table 1A. Panels of such reagents can identify tissue by species and/or by organ type. In a similar fashion, these reagents can be used to screen tissue cultures for contamination. Additional non-limiting examples of such uses are further described herein.

[0373] The polynucleotides of the present invention are also useful as hybridization probes for differential identification of the tissue(s) or cell type(s) present in a biological sample. Similarly, polypeptides and antibodies directed to polypeptides of the present invention are useful to provide immunological probes for differential identification of the tissue(s) (e.g., immunohistochemistry assays) or cell type(s) (e.g., immunocytochemistry assays). In addition, for a number of disorders of the above tissues or cells, significantly higher or lower levels of gene expression of the polynucleotides/polypeptides of the present invention may be detected in certain tissues (e.g., tissues expressing polypeptides and/or polynucleotides of the present invention, for example, those disclosed in column 8 of Table 1A, and/or cancerous and/or wounded tissues) or bodily fluids (e.g., semen, lymph, vaginal pool, serum, plasma, urine, synovial fluid or spinal fluid) taken from an individual having such a disorder, relative to a “standard” gene expression level, i.e., the expression level in healthy tissue from an individual not having the disorder.

[0374] Thus, the invention provides a diagnostic method of a disorder, which involves: (a) assaying gene expression level in cells or body fluid of an individual; (b) comparing the gene expression level with a standard gene expression level, whereby an increase or decrease in the assayed gene expression level compared to the standard expression level is indicative of a disorder.

[0375] In the very least, the polynucleotides of the present invention can be used as molecular weight markers on Southern gels, as diagnostic probes for the presence of a specific mRNA in a particular cell type, as a probe to “subtract-out” known sequences in the process of discovering novel polynucleotides, for selecting and making oligomers for attachment to a “gene chip” or other support, to raise anti-DNA antibodies using DNA immunization techniques, and as an antigen to elicit an immune response.

[0376] Uses of the Polypeptides

[0377] Each of the polypeptides identified herein can be used in numerous ways. The following description should be considered exemplary and utilizes known techniques.

[0378] Polypeptides and antibodies directed to polypeptides of the present invention are useful to provide immunological probes for differential identification of the tissue(s) (e.g., immunohistochemistry assays such as, for example, ABC immunoperoxidase (Hsu et al., J. Histochem. Cytochem. 29:577-580 (1981)) or cell type(s) (e.g., immunocytochemistry assays).

[0379] Antibodies can be used to assay levels of polypeptides encoded by polynucleotides of the invention in a biological sample using classical immunohistological methods known to those of skill in the art (e.g., see Jalkanen, et al., J. Cell. Biol. 101:976-985 (1985); Jalkanen, et al., J. Cell. Biol. 105:3087-3096 (1987)). Other antibody-based methods useful for detecting protein gene expression include immunoassays, such as the enzyme linked immunosorbent assay (ELISA) and the radioimmunoassay (RIA). Suitable antibody assay labels are known in the art and include enzyme labels, such as, glucose oxidase; radioisotopes, such as iodine (¹³¹I, ¹²⁵I, ¹²³I, ¹²¹I), carbon (¹⁴C), sulfur (³⁵S), tritium (³H), indium (^{115m}In, ^{113m}In, ¹¹²In, ¹¹¹In), and technetium (⁹⁹Tc, ^{99m}Tc), thallium (²⁰¹Ti), gallium (⁶⁸Ga, ⁶⁷Ga), palladium (¹⁰³Pd), molybdenum (⁹⁹Mo), xenon (¹³³Xe), fluorine (¹⁸F), ¹⁵³Sm, ¹⁷⁷Lu, ¹⁵⁹Gd, ¹⁴⁹Pm, ¹⁴⁰La, ¹⁷⁵Yb, ¹⁶⁶Ho, ⁹⁰Y, ⁴⁷Sc, ¹⁸⁶Re, ¹⁸⁸Re, ¹⁴²Pr, ¹⁰⁵Rh, ⁹⁷Ru, luminescent labels, such as luminol; and fluorescent labels, such as fluorescein and rhodamine, and biotin.

[0380] In addition to assaying levels of polypeptide of the present invention in a biological sample, proteins can also be detected in vivo by imaging. Antibody labels or markers for in vivo imaging of protein include those detectable by X-radiography, NMR or ESR. For X-radiography, suitable labels include radioisotopes such as barium or cesium, which emit detectable radiation but are not overtly harmful to the subject. Suitable markers for NMR and ESR include those with a detectable characteristic spin, such as deuterium, which may be incorporated into the antibody by labeling of nutrients for the relevant hybridoma.

[0381] A protein-specific antibody or antibody fragment which has been labeled with an appropriate detectable imaging moiety, such as a radioisotope (for example, ¹³¹I, ¹¹²In, ^{99m}Tc, (¹³¹I, ¹²⁵I, ¹²³I, ¹²¹I), carbon (¹⁴C), sulfur (³⁵S), tritium (³H), indium (^{115m}In, ^{113m}In, ¹¹²In, ¹¹¹In), and technetium (⁹⁹Tc, ^{99m}Tc), thallium (²⁰¹Ti), gallium (⁶⁸Ga, ⁶⁷Ga), palladium (¹⁰³Pd), molybdenum (⁹⁹Mo), xenon (¹³³Xe), fluorine (¹⁸F, ¹⁵³Sm, ¹⁷⁷Lu, ¹⁵⁹Gd, ¹⁴⁹Pm, ¹⁴⁰La, ¹⁷⁵Yb, ¹⁶⁶Ho, ⁹⁰Y, ⁴⁷Sc, ¹⁸⁶Re, ¹⁸⁸Re, ¹⁴²Pr, ¹⁰⁵Rh, ⁹⁷Ru), a radio-opaque substance, or a material detectable by nuclear magnetic resonance, is introduced (for example, parenterally, subcutaneously or intraperitoneally) into the mammal to be examined for immune system disorder. It will be understood in the art that the size of the subject and the imaging system used will determine the quantity of imaging moiety needed to produce diagnostic images. In the case of a radioisotope moiety, for a human subject, the quantity of radioactivity injected will normally range from about 5 to 20 millicuries of ^{99m}Tc. The labeled antibody or antibody fragment will then preferentially accumulate at the location of cells which express the polypeptide encoded by a polynucleotide of the invention. In vivo tumor imaging is described in S. W. Burchiel et al., “Immunopharmacokinetics of Radiolabeled Antibodies and Their Fragments” (Chapter 13 in Tumor Imaging: The Radiochemical Detection of Cancer, S. W. Burchiel and B. A. Rhodes, eds., Masson Publishing Inc. (1982)).

[0382] In one embodiment, the invention provides a method for the specific delivery of compositions of the invention to cells by administering polypeptides of the invention (e.g., polypeptides encoded by polynucleotides of the invention and/or antibodies) that are associated with heterologous polypeptides or nucleic acids. In one example, the invention provides a method for delivering a therapeutic protein into the targeted cell. In another example, the invention provides a method for delivering a single stranded nucleic acid (e.g., antisense or ribozymes) or double stranded nucleic acid (e.g., DNA that can integrate into the cell's genome or replicate episomally and that can be transcribed) into the targeted cell.

[0383] In another embodiment, the invention provides a method for the specific destruction of cells (e.g., the destruction of tumor cells) by administering polypeptides of the invention in association with toxins or cytotoxic prodrugs.

[0384] By “toxin” is meant one or more compounds that bind and activate endogenous cytotoxic effector systems, radioisotopes, holotoxins, modified toxins, catalytic subunits of toxins, or any molecules or enzymes not normally present in or on the surface of a cell that under defined conditions cause the cell's death. Toxins that may be used according to the methods of the invention include, but are not limited to, radioisotopes known in the art, compounds such as, for example, antibodies (or complement fixing containing portions thereof) that bind an inherent or induced endogenous cytotoxic effector system, thymidine kinase, endonuclease, RNAse, alpha toxin, ricin, abrin, Pseudomonas exotoxin A, diphtheria toxin, saporin, momordin, gelonin, pokeweed antiviral protein, alpha-sarcin and cholera toxin. “Toxin” also includes a cytostatic or cytocidal agent, a therapeutic agent or a radioactive metal ion, e.g., alpha-emitters such as, for example, ²¹³Bi, or other radioisotopes such as, for example, ¹⁰³Pd, ¹³³Xe, ¹³¹I, ⁶⁸Ge, ⁵⁷Co, ⁶⁵Zn, ⁸⁵Sr, ³²p, 35S, ⁹⁰Y, ¹⁵³Sm, ¹⁵³Gd, ¹⁶⁹Yb, ⁵¹Cr, ⁵⁴Mn, ⁷⁵Se, ¹¹³Sn, ⁹⁰Yttrium, ¹¹⁷Tin, ¹⁸⁶Rhenium, ¹⁶⁶Holmium, and ¹⁸⁸Rhenium; luminescent labels, such as luminol; and fluorescent labels, such as fluorescein and rhodamine, and biotin. In a specific embodiment, the invention provides a method for the specific destruction of cells (e.g., the destruction of tumor cells) by administering polypeptides of the invention or antibodies of the invention in association with the radioisotope ⁹⁰Y. In another specific embodiment, the invention provides a method for the specific destruction of cells (e.g., the destruction of tumor cells) by administering polypeptides of the invention or antibodies of the invention in association with the radioisotope ¹¹¹In. In a further specific embodiment, the invention provides a method for the specific destruction of cells (e.g., the destruction of tumor cells) by administering polypeptides of the invention or antibodies of the invention in association with the radioisotope ¹³¹I.

[0385] Techniques known in the art may be applied to label polypeptides of the invention (including antibodies). Such techniques include, but are not limited to, the use of bifunctional conjugating agents (see e.g., U.S. Pat. Nos. 5,756,065; 5,714,631; 5,696,239; 5,652,361; 5,505,931; 5,489,425; 5,435,990; 5,428,139; 5,342,604; 5,274,119; 4,994,560; and 5,808,003; the contents of each of which are hereby incorporated by reference in its entirety).

[0386] Thus, the invention provides a diagnostic method of a disorder, which involves (a) assaying the expression level of a polypeptide of the present invention in cells or body fluid of an individual; and (b) comparing the assayed polypeptide expression level with a standard polypeptide expression level, whereby an increase or decrease in the assayed polypeptide expression level compared to the standard expression level is indicative of a disorder. With respect to cancer, the presence of a relatively high amount of transcript in biopsied tissue from an individual may indicate a predisposition for the development of the disease, or may provide a means for detecting the disease prior to the appearance of actual clinical symptoms. A more definitive diagnosis of this type may allow health professionals to employ preventative measures or aggressive treatment earlier thereby preventing the development or further progression of the cancer.

[0387] Moreover, polypeptides of the present invention can be used to treat or prevent diseases or conditions such as, for example, neural disorders, immune system disorders, muscular disorders, reproductive disorders, gastrointestinal disorders, pulmonary disorders, cardiovascular disorders, renal disorders, proliferative disorders, and/or cancerous diseases and conditions. For example, patients can be administered a polypeptide of the present invention in an effort to replace absent or decreased levels of the polypeptide (e.g., insulin), to supplement absent or decreased levels of a different polypeptide (e.g., hemoglobin S for hemoglobin B, SOD, catalase, DNA repair proteins), to inhibit the activity of a polypeptide (e.g., an oncogene or tumor supressor), to activate the activity of a polypeptide (e.g., by binding to a receptor), to reduce the activity of a membrane bound receptor by competing with it for free ligand (e.g., soluble TNF receptors used in reducing inflammation), or to bring about a desired response (e.g., blood vessel growth inhibition, enhancement of the immune response to proliferative cells or tissues).

[0388] Similarly, antibodies directed to a polypeptide of the present invention can also be used to treat disease (as described supra, and elsewhere herein). For example, administration of an antibody directed to a polypeptide of the present invention can bind, and/or neutralize the polypeptide, and/or reduce overproduction of the polypeptide. Similarly, administration of an antibody can activate the polypeptide, such as by binding to a polypeptide bound to a membrane (receptor).

[0389] At the very least, the polypeptides of the present invention can be used as molecular weight markers on SDS-PAGE gels or on molecular sieve gel filtration columns using methods well known to those of skill in the art. Polypeptides can also be used to raise antibodies, which in turn are used to measure protein expression from a recombinant cell, as a way of assessing transformation of the host cell. Moreover, the polypeptides of the present invention can be used to test the biological activities described herein.

[0390] Diagnostic Assays

[0391] The compounds of the present invention are useful for diagnosis, treatment, prevention and/or prognosis of various disorders in mammals, preferably humans. Such disorders include, but are not limited to, those described herein under the section heading “Biological Activities”.

[0392] For a number of disorders, substantially altered (increased or decreased) levels of gene expression can be detected in tissues, cells or bodily fluids (e.g., sera, plasma, urine, semen, synovial fluid or spinal fluid) taken from an individual having such a disorder, relative to a “standard” gene expression level, that is, the expression level in tissues or bodily fluids from an individual not having the disorder. Thus, the invention provides a diagnostic method useful during diagnosis of a disorder, which involves measuring the expression level of the gene encoding the polypeptide in tissues, cells or body fluid from an individual and comparing the measured gene expression level with a standard gene expression level, whereby an increase or decrease in the gene expression level(s) compared to the standard is indicative of a disorder. These diagnostic assays may be performed in vivo or in vitro, such as, for example, on blood samples, biopsy tissue or autopsy tissue.

[0393] The present invention is also useful as a prognostic indicator, whereby patients exhibiting enhanced or depressed gene expression will experience a worse clinical outcome relative to patients expressing the gene at a level nearer the standard level.

[0394] In certain embodiments, a polypeptide of the invention, or polynucleotides, antibodies, agonists, or antagonists corresponding to that polypeptide, may be used to diagnose and/or prognose diseases and/or disorders associated with the tissue(s) in which the polypeptide of the invention is expressed, including one, two, three, four, five, or more tissues disclosed in Table 1A, column 8 (Tissue Distribution Library Code).

[0395] By “assaying the expression level of the gene encoding the polypeptide” is intended qualitatively or quantitatively measuring or estimating the level of the polypeptide of the invention or the level of the mRNA encoding the polypeptide of the invention in a first biological sample either directly (e.g., by determining or estimating absolute protein level or mRNA level) or relatively (e.g., by comparing to the polypeptide level or mRNA level in a second biological sample). Preferably, the polypeptide expression level or mRNA level in the first biological sample is measured or estimated and compared to a standard polypeptide level or mRNA level, the standard being taken from a second biological sample obtained from an individual not having the disorder or being determined by averaging levels from a population of individuals not having the disorder. As will be appreciated in the art, once a standard polypeptide level or mRNA level is known, it can be used repeatedly as a standard for comparison.

[0396] By “biological sample” is intended any biological sample obtained from an individual, cell line, tissue culture, or other source containing polypeptides of the invention (including portions thereof) or mRNA. As indicated, biological samples include body fluids (such as sera, plasma, urine, synovial fluid and spinal fluid) and tissue sources found to express the full length or fragments thereof of a polypeptide or mRNA. Methods for obtaining tissue biopsies and body fluids from mammals are well known in the art. Where the biological sample is to include mRNA, a tissue biopsy is the preferred source.

[0397] Total cellular RNA can be isolated from a biological sample using any suitable technique such as the single-step guanidinium-thiocyanate-phenol-chloroform method described in Chomczynski and Sacchi, Anal. Biochem. 162:156-159 (1987). Levels of mRNA encoding the polypeptides of the invention are then assayed using any appropriate method. These include Northern blot analysis, S1 nuclease mapping, the polymerase chain reaction (PCR), reverse transcription in combination with the polymerase chain reaction (RT-PCR), and reverse transcription in combination with the ligase chain reaction (RT-LCR).

[0398] The present invention also relates to diagnostic assays such as quantitative and diagnostic assays for detecting levels of polypeptides of the invention, in a biological sample (e.g., cells and tissues), including determination of normal and abnormal levels of polypeptides. Thus, for instance, a diagnostic assay in accordance with the invention for detecting over-expression of polypeptides of the invention compared to normal control tissue samples may be used to detect the presence of tumors. Assay techniques that can be used to determine levels of a polypeptide, such as a polypeptide of the present invention in a sample derived from a host are well-known to those of skill in the art. Such assay methods include radioimmunoassays, competitive-binding assays, Western Blot analysis and ELISA assays. Assaying polypeptide levels in a biological sample can occur using any art-known method.

[0399] Assaying polypeptide levels in a biological sample can occur using antibody-based techniques. For example, polypeptide expression in tissues can be studied with classical immunohistological methods (Jalkanen et al., J. Cell. Biol. 101:976-985 (1985); Jalkanen, M., et al., J. Cell . Biol. 105:3087-3096 (1987)). Other antibody-based methods useful for detecting polypeptide gene expression include immunoassays, such as the enzyme linked immunosorbent assay (ELISA) and the radioimmunoassay (RIA). Suitable antibody assay labels are known in the art and include enzyme labels, such as, glucose oxidase, and radioisotopes, such as iodine (¹²⁵I, ¹²¹I), carbon (¹⁴C), sulfur (³⁵S), tritium (³H), indium (¹¹²In,), and technetium (^{99m}Tc), and fluorescent labels, such as fluorescein and rhodamine, and biotin.

[0400] The tissue or cell type to be analyzed will generally include those which are known, or suspected, to express the gene of inteest (such as, for example, cancer). The protein isolation methods employed herein may, for example, be such as those described in Harlow and Lane (Harlow, E. and Lane, D., 1988, “Antibodies: A Laboratory Manual”, Cold Spring Harbor Laboratory Press, Cold Spring Harbor, New York), which is incorporated herein by reference in its entirety. The isolated cells can be derived from cell culture or from a patient. The analysis of cells taken from culture may be a necessary step in the assessment of cells that could be used as part of a cell-based gene therapy technique or, alternatively, to test the effect of compounds on the expression of the gene.

[0401] For example, antibodies, or fragments of antibodies, such as those described herein, may be used to quantitatively or qualitatively detect the presence of gene products or conserved variants or peptide fragments thereof. This can be accomplished, for example, by immunofluorescence techniques employing a fluorescently labeled antibody coupled with light microscopic, flow cytometric, or fluorimetric detection.

[0402] In a preferred embodiment, antibodies, or fragments of antibodies directed to any one or all of the predicted epitope domains of the polypeptides of the invention (shown in column 7 of Table 1A) may be used to quantitatively or qualitatively detect the presence of gene products or conserved variants or peptide fragments thereof. This can be accomplished, for example, by immunofluorescence techniques employing a fluorescently labeled antibody coupled with light microscopic, flow cytometric, or fluorimetric detection.

[0403] In an additional preferred embodiment, antibodies, or fragments of antibodies directed to a conformational epitope of a polypeptide of the invention may be used to quantitatively or qualitatively detect the presence of gene products or conserved variants or peptide fragments thereof. This can be accomplished, for example, by immunofluorescence techniques employing a fluorescently labeled antibody coupled with light microscopic, flow cytometric, or fluorimetric detection.

[0404] The antibodies (or fragments thereof), and/or polypeptides of the present invention may, additionally, be employed histologically, as in immunofluorescence, immunoelectron microscopy or non-immunological assays, for in situ detection of gene products or conserved variants or peptide fragments thereof. In situ detection may be accomplished by removing a histological specimen from a patient, and applying thereto a labeled antibody or polypeptide of the present invention. The antibody (or fragment thereof) or polypeptide is preferably applied by overlaying the labeled antibody (or fragment) onto a biological sample. Through the use of such a procedure, it is possible to determine not only the presence of the gene product, or conserved variants or peptide fragments, or polypeptide binding, but also its distribution in the examined tissue. Using the present invention, those of ordinary skill will readily perceive that any of a wide variety of histological methods (such as staining procedures) can be modified in order to achieve such in situ detection.

[0405] Immunoassays and non-immunoassays for gene products or conserved variants or peptide fragments thereof will typically comprise incubating a sample, such as a biological fluid, a tissue extract, freshly harvested cells, or lysates of cells which have been incubated in cell culture, in the presence of a detectably labeled antibody capable of binding gene products or conserved variants or peptide fragments thereof, and detecting the bound antibody by any of a number of techniques well-known in the art.

[0406] The biological sample may be brought in contact with and immobilized onto a solid phase support or carrier such as nitrocellulose, or other solid support which is capable of immobilizing cells, cell particles or soluble proteins. The support may then be washed with suitable buffers followed by treatment with the detectably labeled antibody or detectable polypeptide of the invention. The solid phase support may then be washed with the buffer a second time to remove unbound antibody or polypeptide. Optionally the antibody is subsequently labeled. The amount of bound label on solid support may then be detected by conventional means.

[0407] By “solid phase support or carrier” is intended any support capable of binding an antigen or an antibody. Well-known supports or carriers include glass, polystyrene, polypropylene, polyethylene, dextran, nylon, amylases, natural and modified celluloses, polyacrylamides, gabbros, and magnetite. The nature of the carrier can be either soluble to some extent or insoluble for the purposes of the present invention. The support material may have virtually any possible structural configuration so long as the coupled molecule is capable of binding to an antigen or antibody. Thus, the support configuration may be spherical, as in a bead, or cylindrical, as in the inside surface of a test tube, or the external surface of a rod. Alternatively, the surface may be flat such as a sheet, test strip, etc. Preferred supports include polystyrene beads. Those skilled in the art will know many other suitable carriers for binding antibody or antigen, or will be able to ascertain the same by use of routine experimentation.

[0408] The binding activity of a given lot of antibody or antigen polypeptide may be determined according to well known methods. Those skilled in the art will be able to determine operative and optimal assay conditions for each determination by employing routine experimentation.

[0409] In addition to assaying polypeptide levels or polynucleotide levels in a biological sample obtained from an individual, polypeptide or polynucleotide can also be detected in vivo by imaging. For example, in one embodiment of the invention, polypeptides and/or antibodies of the invention are used to image diseased cells, such as neoplasms. In another embodiment, polynucleotides of the invention (e.g., polynucleotides complementary to all or a portion of an mRNA) and/or antibodies (e.g., antibodies directed to any one or a combination of the epitopes of a polypeptide of the invention, antibodies directed to a conformational epitope of a polypeptide of the invention, or antibodies directed to the full length polypeptide expressed on the cell surface of a mammalian cell) are used to image diseased or neoplastic cells.

[0410] Antibody labels or markers for in vivo imaging of polypeptides of the invention include those detectable by X-radiography, NMR, MRI, CAT-scans or ESR. For X-radiography, suitable labels include radioisotopes such as barium or cesium, which emit detectable radiation but are not overtly harmful to the subject. Suitable markers for NMR and ESR include those with a detectable characteristic spin, such as deuterium, which may be incorporated into the antibody by labeling of nutrients for the relevant hybridoma. Where in vivo imaging is used to detect enhanced levels of polypeptides for diagnosis in humans, it may be preferable to use human antibodies or “humanized” chimeric monoclonal antibodies. Such antibodies can be produced using techniques described herein or otherwise known in the art. For example methods for producing chimeric antibodies are known in the art. See, for review, Morrison, Science 229:1202 (1985); Oi et al., BioTechniques 4:214 (1986); Cabilly et al., U.S. Pat. No. 4,816,567; Taniguchi et al., EP 171496; Morrison et al., EP 173494; Neuberger et al., WO 8601533; Robinson et al., WO 8702671; Boulianne et al., Nature 312:643 (1984); Neuberger et al, Nature 314:268 (1985).

[0411] Additionally, any polypeptides of the invention whose presence can be detected, can be administered. For example, polypeptides of the invention labeled with a radio-opaque or other appropriate compound can be administered and visualized in vivo, as discussed, above for labeled antibodies. Further, such polypeptides can be utilized for in vitro diagnostic procedures.

[0412] A polypeptide-specific antibody or antibody fragment which has been labeled with an appropriate detectable imaging moiety, such as a radioisotope (for example, ¹³¹I, ¹¹²In, ^{99m}Tc), a radio-opaque substance, or a material detectable by nuclear magnetic resonance, is introduced (for example, parenterally, subcutaneously or intraperitoneally) into the mammal to be examined for a disorder. It will be understood in the art that the size of the subject and the imaging system used will determine the quantity of imaging moiety needed to produce diagnostic images. In the case of a radioisotope moiety, for a human subject, the quantity of radioactivity injected will normally range from about 5 to 20 millicuries of ^{99m}Tc. The labeled antibody or antibody fragment will then preferentially accumulate at the location of cells which contain the antigenic protein. In vivo tumor imaging is described in S. W. Burchiel et al., “Immunopharmacokinetics of Radiolabeled Antibodies and Their Fragments” (Chapter 13 in Tumor Imaging: The Radiochemical Detection of Cancer, S. W. Burchiel and B. A. Rhodes, eds., Masson Publishing Inc. (1982)).

[0413] With respect to antibodies, one of the ways in which an antibody of the present invention can be detectably labeled is by linking the same to a reporter enzyme and using the linked product in an enzyme immunoassay (EIA) (Voller, A., “The Enzyme Linked Immunosorbent Assay (ELISA)”, 1978, Diagnostic Horizons 2:1-7, Microbiological Associates Quarterly Publication, Walkersville, Md.); Voller et al., J. Clin. Pathol. 31:507-520 (1978); Butler, J. E., Meth. Enzymol. 73:482-523 (1981); Maggio, E. (ed.), 1980, Enzyme Immunoassay, CRC Press, Boca Raton, Fla.,; Ishikawa, E. et al., (eds.), 1981, Enzyme Immunoassay, Kgaku Shoin, Tokyo). The reporter enzyme which is bound to the antibody will react with an appropriate substrate, preferably a chromogenic substrate, in such a manner as to produce a chemical moiety which can be detected, for example, by spectrophotometric, fluorimetric or by visual means. Reporter enzymes which can be used to detectably label the antibody include, but are not limited to, malate dehydrogenase, staphylococcal nuclease, delta-5-steroid isomerase, yeast alcohol dehydrogenase, alpha-glycerophosphate, dehydrogenase, triose phosphate isomerase, horseradish peroxidase, alkaline phosphatase, asparaginase, glucose oxidase, beta-galactosidase, ribonuclease, urease, catalase, glucose-6-phosphate dehydrogenase, glucoamylase and acetylcholinesterase. Additionally, the detection can be accomplished by calorimetric methods which employ a chromogenic substrate for the reporter enzyme. Detection may also be accomplished by visual comparison of the extent of enzymatic reaction of a substrate in comparison with similarly prepared standards.

[0414] Detection may also be accomplished using any of a variety of other immunoassays. For example, by radioactively labeling the antibodies or antibody fragments, it is possible to detect polypeptides through the use of a radioimmunoassay (RIA) (see, for example, Weintraub, B., Principles of Radioimmunoassays, Seventh Training Course on Radioligand Assay Techniques, The Endocrine Society, March, 1986, which is incorporated by reference herein). The radioactive isotope can be detected by means including, but not limited to, a gamma counter, a scintillation counter, or autoradiography.

[0415] It is also possible to label the antibody with a fluorescent compound. When the fluorescently labeled antibody is exposed to light of the proper wave length, its presence can then be detected due to fluorescence. Among the most commonly used fluorescent labeling compounds are fluorescein isothiocyanate, rhodamine, phycoerythrin, phycocyanin, allophycocyanin, ophthaldehyde and fluorescamine.

[0416] The antibody can also be detectably labeled using fluorescence emitting metals such as ¹⁵²Eu, or others of the lanthanide series. These metals can be attached to the antibody using such metal chelating groups as diethylenetriaminepentacetic acid (DTPA) or ethylenediaminetetraacetic acid (EDTA).

[0417] The antibody also can be detectably labeled by coupling it to a chemiluminescent compound. The presence of the chemiluminescent-tagged antibody is then determined by detecting the presence of luminescence that arises during the course of a chemical reaction. Examples of particularly useful chemiluminescent labeling compounds are luminol, isoluminol, theromatic acridinium ester, imidazole, acridinium salt and oxalate ester.

[0418] Likewise, a bioluminescent compound may be used to label the antibody of the present invention. Bioluminescence is a type of chemiluminescence found in biological systems in, which a catalytic protein increases the efficiency of the chemiluminescent reaction. The presence of a bioluminescent protein is determined by detecting the presence of luminescence. Important bioluminescent compounds for purposes of labeling are luciferin, luciferase and aequorin.

[0419] Methods for Detecting Diseases

[0420] In general, a disease may be detected in a patient based on the presence of one or more proteins of the invention and/or polynucleotides encoding such proteins in a biological sample (for example, blood, sera, urine, and/or tumor biopsies) obtained from the patient. In other words, such proteins may be used as markers to indicate the presence or absence of a disease or disorder, including cancer and/or as described elsewhere herein. In addition, such proteins may be useful for the detection of other diseases and cancers. The binding agents provided herein generally permit detection of the level of antigen that binds to the agent in the biological sample. Polynucleotide primers and probes may be used to detect the level of mRNA encoding polypeptides of the invention, which is also indicative of the presence or absence of a disease or disorder, including cancer. In general, polypeptides of the invention should be present at a level that is at least three fold higher in diseased tissue than in normal tissue.

[0421] There are a variety of assay formats known to those of ordinary skill in the art for using a binding agent to detect polypeptide markers in a sample. See, e.g., Harlow and Lane, supra. In general, the presence or absence of a disease in a patient may be determined by (a) contacting a biological sample obtained from a patient with a binding agent; (b) detecting in the sample a level of polypeptide that binds to the binding agent; and (c) comparing the level of polypeptide with a predetermined cut-off value.

[0422] In a preferred embodiment, the assay involves the use of a binding agent(s) immobilized on a solid support to bind to and remove the polypeptide of the invention from the remainder of the sample. The bound polypeptide may then be detected using a detection reagent that contains a reporter group and specifically binds to the binding agent/polypeptide complex. Such detection reagents may comprise, for example, a binding agent that specifically binds to the polypeptide or an antibody or other agent that specifically binds to the binding agent, such as an anti-immunoglobulin, protein G, protein A or a lectin. Alternatively, a competitive assay may be utilized, in which a polypeptide is labeled with a reporter group and allowed to bind to the immobilized binding agent after incubation of the binding agent with the sample. The extent to which components of the sample inhibit the binding of the labeled polypeptide to the binding agent is indicative of the reactivity of the sample with the immobilized binding agent. Suitable polypeptides for use within such assays include polypeptides of the invention and portions thereof, or antibodies, to which the binding agent binds, as described above.

[0423] The solid support may be any material known to those of skill in the art to which polypeptides of the invention may be attached. For example, the solid support may be a test well in a microtiter plate or a nitrocellulose or other suitable membrane. Alternatively, the support may be a bead or disc, such as glass fiberglass, latex or a plastic material such as polystyrene or polyvinylchloride. The support may also be a magnetic particle or a fiber optic sensor, such as those disclosed, for example, in U.S. Pat. No. 5,359,681. The binding agent may be immobilized on the solid support using a variety of techniques known to those of skill in the art, which are amply described in the patent and scientific literature. In the context of the present invention, the term “immobilization” refers to both noncovalent association, such as adsorption, and covalent attachment (which may be a direct linkage between the agent and functional groups on the support or may be a linkage by way of a cross-linking agent). Immobilization by adsorption to a well in a microtiter plate or to a membrane is preferred. In such cases, adsorption may be achieved by contacting the binding agent, in a suitable buffer, with the solid support for the suitable amount of time. The contact time varies with temperature, but is typically between about 1 hour and about 1 day. In general, contacting a well of plastic microtiter plate (such as polystyrene or polyvinylchloride) with an amount of binding agent ranging from about 10 ng to about 10 ug, and preferably about 100 ng to about 1 ug, is sufficient to immobilize an adequate amount of binding agent.

[0424] Covalent attachment of binding agent to a solid support may generally be achieved by first reacting the support with a bifunctional reagent that will react with both the support and a functional group, such as a hydroxyl or amino group, on the binding agent. For example, the binding agent may be covalently attached to supports having an appropriate polymer coating using benzoquinone or by condensation of an aldehyde group on the support with an amine and an active hydrogen on the binding partner (see, e.g., Pierce Immunotechnology Catalog and Handbook, 1991, at A12-A13).

[0425] Gene Therapy Methods

[0426] Also encompassed by the invention are gene therapy methods for treating or preventing disorders, diseases and conditions. The gene therapy methods relate to the introduction of nucleic acid (DNA, RNA and antisense DNA or RNA) sequences into an animal to achieve expression of the polypeptide of the present invention. This method requires a polynucleotide which codes for a polypeptide of the present invention operatively linked to a promoter and any other genetic elements necessary for the expression of the polypeptide by the target tissue. Such gene therapy and delivery techniques are known in the art, see, for example, WO90/11092, which is herein incorporated by reference.

[0427] Thus, for example, cells from a patient may be engineered with a polynucleotide (DNA or RNA) comprising a promoter operably linked to a polynucleotide of the present invention ex vivo, with the engineered cells then being provided to a patient to be treated with the polypeptide of the present invention. Such methods are well-known in the art. For example, see Belldegrun, A., et al., J. Natl. Cancer Inst. 85: 207-216 (1993); Ferrantini, M. et al., Cancer Research 53: 1107-1112 (1993); Ferrantini, M. et al., J. Immunology 153: 4604-4615 (1994); Kaido, T., et al., Int. J. Cancer 60: 221-229 (1995); Ogura, H., et al., Cancer Research 50: 5102-5106 (1990); Santodonato, L., et al., Human Gene Therapy 7:1-10 (1996); Santodonato, L., et al., Gene Therapy 4:1246-1255 (1997); and Zhang, J. -F. et al., Cancer Gene Therapy 3: 31-38 (1996)), which are herein incorporated by reference. In one embodiment, the cells which are engineered are arterial cells. The arterial cells may be reintroduced into the patient through direct injection to the artery, the tissues surrounding the artery, or through catheter injection.

[0428] As discussed in more detail below, the polynucleotide constructs can be delivered by any method that delivers injectable materials to the cells of an animal, such as, injection into the interstitial space of tissues (heart, muscle, skin, lung, liver, and the like). The polynucleotide constructs may be delivered in a pharmaceutically acceptable liquid or aqueous carrier.

[0429] In one embodiment, the polynucleotide of the present invention is delivered as a naked polynucleotide. The term “naked” polynucleotide, DNA or RNA refers to sequences that are free from any delivery vehicle that acts to assist, promote or facilitate entry into the cell, including viral sequences, viral particles, liposome formulations, lipofectin or precipitating agents and the like. However, the polynucleotide of the present invention can also be delivered in liposome formulations and lipofectin formulations and the like can be prepared by methods well known to those skilled in the art. Such methods are described, for example, in U.S. Pat. Nos. 5,593,972, 5,589,466, and 5,580,859, which are herein incorporated by reference.

[0430] The polynucleotide vector constructs used in the gene therapy method are preferably constructs that will not integrate into the host genome nor will they contain sequences that allow for replication. Appropriate vectors include pWLNEO, pSV2CAT, pOG44, pXT1 and pSG available from Stratagene; pSVK3, pBPV, pMSG and pSVL available from Pharmacia; and pEF1/V5, pcDNA3.1, and pRc/CMV2 available from Invitrogen. Other suitable vectors will be readily apparent to the skilled artisan.

[0431] Any strong promoter known to those skilled in the art can be used for driving the expression of the polynucleotide sequence. Suitable promoters include adenoviral promoters, such as the adenoviral major late promoter; or heterologous promoters, such as the cytomegalovirus (CMV) promoter; the respiratory syncytial virus (RSV) promoter; inducible promoters, such as the MMT promoter, the metallothionein promoter; heat shock promoters; the albumin promoter; the ApoAI promoter; human globin promoters; viral thymidine kinase promoters, such as the Herpes Simplex thymidine kinase promoter; retroviral LTRs; the b-actin promoter; and human growth hormone promoters. The promoter also may be the native promoter for the polynucleotide of the present invention.

[0432] Unlike other gene therapy techniques, one major advantage of introducing naked nucleic acid sequences into target cells is the transitory nature of the polynucleotide synthesis in the cells. Studies have shown that non-replicating DNA sequences can be introduced into cells to provide production of the desired polypeptide for periods of up to six months.

[0433] The polynucleotide construct can be delivered to the interstitial space of tissues within the an animal, including of muscle, skin, brain, lung, liver, spleen, bone marrow, thymus, heart, lymph, blood, bone, cartilage, pancreas, kidney, gall bladder, stomach, intestine, testis, ovary, uterus, rectum, nervous system, eye, gland, and connective tissue. Interstitial space of the tissues comprises the intercellular, fluid, mucopolysaccharide matrix among the reticular fibers of organ tissues, elastic fibers in the walls of vessels or chambers, collagen fibers of fibrous tissues, or that same matrix within connective tissue ensheathing muscle cells or in the lacunae of bone. It is similarly the space occupied by the plasma of the circulation and the lymph fluid of the lymphatic channels. Delivery to the interstitial space of muscle tissue is preferred for the reasons discussed below. They may be conveniently delivered by injection into the tissues comprising these cells. They are preferably delivered to and expressed in persistent, non-dividing cells which are differentiated, although delivery and expression may be achieved in non-differentiated or less completely differentiated cells, such as, for example, stem cells of blood or skin fibroblasts. In vivo muscle cells are particularly competent in their ability to take up and express polynucleotides.

[0434] For the naked nucleic acid sequence injection, an effective dosage amount of DNA or RNA will be in the range of from about 0.05 mg/kg body weight to about 50 mg/kg body weight. Preferably the dosage will be from about 0.005 mg/kg to about 20 mg/kg and more preferably from about 0.05 mg/kg to about 5 mg/kg. Of course, as the artisan of ordinary skill will appreciate, this dosage will vary according to the tissue site of injection. The appropriate and effective dosage of nucleic acid sequence can readily be determined by those of ordinary skill in the art and may depend on the condition being treated and the route of administration.

[0435] The preferred route of administration is by the parenteral route of injection into the interstitial space of tissues. However, other parenteral routes may also be used, such as, inhalation of an aerosol formulation particularly for delivery to lungs or bronchial tissues, throat or mucous membranes of the nose. In addition, naked DNA constructs can be delivered to arteries during angioplasty by the catheter used in the procedure.

[0436] The naked polynucleotides are delivered by any method known in the art, including, but not limited to, direct needle injection at the delivery site, intravenous injection, topical administration, catheter infusion, and so-called “gene guns”. These delivery methods are known in the art.

[0437] The constructs may also be delivered with delivery vehicles such as viral sequences, viral particles, liposome formulations, lipofectin, precipitating agents, etc. Such methods of delivery are known in the art.

[0438] In certain embodiments, the polynucleotide constructs are complexed in a liposome preparation. Liposomal preparations for use in the instant invention include cationic (positively charged); anionic (negatively charged) and neutral preparations. However, cationic liposomes are particularly preferred because a tight charge complex can be formed between the cationic liposome and the polyanionic nucleic acid. Cationic liposomes have been shown to mediate intracellular delivery of plasmid DNA (Felgner et al., Proc. Natl. Acad. Sci. USA (1987) 84:7413-7416, which is herein incorporated by reference); mRNA (Malone et al., Proc. Natl. Acad. Sci. USA (1989) 86:6077-6081, which is herein incorporated by reference); and purified transcription factors (Debs et al., J. Biol. Chem. (1990) 265:10189-10192, which is herein incorporated by reference), in functional form.

[0439] Cationic liposomes are readily available. For example, N[1-2,3-dioleyloxy)propyl]-N,N,N-triethylammonium (DOTMA) liposomes are particularly useful and are available under the trademark Lipofectin, from GIBCO BRL, Grand Island, N.Y. (See, also, Felgner et al., Proc. Natl Acad. Sci. USA (1987) 84:7413-7416, which is herein incorporated by reference). Other commercially available liposomes include transfectace (DDAB/DOPE) and DOTAP/DOPE (Boehringer).

[0440] Other cationic liposomes can be prepared from readily available materials using techniques well known in the art. See, e.g. PCT Publication No. WO 90/11092 (which is herein incorporated by reference) for a description of the synthesis of DOTAP (1,2-bis(oleoyloxy)-3-(trimethylammonio)propane) liposomes. Preparation of DOTMA liposomes is explained in the literature, see, e.g., P. Felgner et al., Proc. Natl. Acad. Sci. USA 84:7413-7417, which is herein incorporated by reference. Similar methods can be used to prepare liposomes from other cationic lipid materials.

[0441] Similarly, anionic and neutral liposomes are readily available, such as from Avanti Polar Lipids (Birmingham, Ala.), or can be easily prepared using readily available materials. Such materials include phosphatidyl, choline, cholesterol, phosphatidyl ethanolamine, dioleoylphosphatidyl choline (DOPC), dioleoylphosphatidyl glycerol (DOPG), dioleoylphoshatidyl ethanolamine (DOPE), among others. These materials can also be mixed with the DOTMA and DOTAP starting materials in appropriate ratios. Methods for making liposomes using these materials are well known in the art.

[0442] For example, commercially dioleoylphosphatidyl choline (DOPC), dioleoylphosphatidyl glycerol (DOPG), and dioleoylphosphatidyl ethanolamine (DOPE) can be used in various combinations to make conventional liposomes, with or without the addition of cholesterol. Thus, for example, DOPG/DOPC vesicles can be prepared by drying 50 mg each of DOPG and DOPC under a stream of nitrogen gas into a sonication vial. The sample is placed under a vacuum pump overnight and is hydrated the following day with deionized water. The sample is then sonicated for 2 hours in a capped vial, using a Heat Systems model 350 sonicator equipped with an inverted cup (bath type) probe at the maximum setting while the bath is circulated at 15EC. Alternatively, negatively charged vesicles can be prepared without sonication to produce multilamellar vesicles or by extrusion through nucleopore membranes to produce unilamellar vesicles of discrete size. Other methods are known and available to those of skill in the art.

[0443] The liposomes can comprise multilamellar vesicles (MLVs), small unilamellar vesicles (SUVs), or large unilamellar vesicles (LUVs), with SUVs being preferred. The various liposome-nucleic acid complexes are prepared using methods well known in the art. See, e.g., Straubinger et al., Methods of Immunology (1983), 101:512-527, which is herein incorporated by reference. For example, MLVs containing nucleic acid can be prepared by depositing a thin film of phospholipid on the walls of a glass tube and subsequently hydrating with a solution of the material to be encapsulated. SUVs are prepared by extended sonication of MLVs to produce a homogeneous population of unilamellar liposomes. The material to be entrapped is added to a suspension of preformed MLVs and then sonicated. When using liposomes containing cationic lipids, the dried lipid film is resuspended in an appropriate solution such as sterile water or an isotonic buffer solution such as 10 mM Tris/NaCl, sonicated, and then the preformed liposomes are mixed directly with the DNA. The liposome and DNA form a very stable complex due to binding of the positively charged liposomes to the cationic DNA. SUVs find use with small nucleic acid fragments. LUVs are prepared by a number of methods, well known in the art. Commonly used methods include Ca²⁺-EDTA chelation (Papahadjopoulos et al., Biochim. Biophys. Acta (1975) 394:483; Wilson et al., Cell 17:77 (1979)); ether injection (Deamer, D. and Bangham, A., Biochim. Biophys. Acta 443:629 (1976); Ostro et al., Biochem. Biophys. Res. Commun. 76:836 (1977); Fraley et al., Proc. Natl. Acad. Sci. USA 76:3348 (1979)); detergent dialysis (Enoch, H. and Strittmatter, P., Proc. Natl. Acad. Sci. USA 76:145 (1979)); and reverse-phase evaporation (REV) (Fraley et al., J. Biol. Chem. 255:10431 (1980); Szoka, F. and Papahadjopoulos, D., Proc. Natl. Acad. Sci. USA 75:145 (1978); Schaefer-Ridder et al., Science 215:166 (1982)), which are herein incorporated by reference.

[0444] Generally, the ratio of DNA to liposomes will be from about 10:1 to about 1:10. Preferably, the ration will be from about 5:1 to about 1:5. More preferably, the ration will be about 3:1 to about 1:3. Still more preferably, the ratio will be about 1:1.

[0445] U.S. Pat. No. 5,676,954 (which is herein incorporated by reference) reports on the injection of genetic material, complexed with cationic liposomes carriers, into mice. U.S. Pat. Nos. 4,897,355, 4,946,787, 5,049,386, 5,459,127, 5,589,466, 5,693,622, 5,580,859, 5,703,055, and international publication no. WO 94/9469 (which are herein incorporated by reference) provide cationic lipids for use in transfecting DNA into cells and mammals. U.S. Pat. Nos. 5,589,466, 5,693,622, 5,580,859, 5,703,055, and international publication no. WO 94/9469 provide methods for delivering DNA-cationic lipid complexes to mammals.

[0446] In certain embodiments, cells are engineered, ex vivo or in vivo, using a retroviral particle containing RNA which comprises a sequence encoding a polypeptide of the present invention. Retroviruses from which the retroviral plasmid vectors may be derived include, but are not limited to, Moloney Murine Leukemia Virus, spleen necrosis virus, Rous sarcoma Virus, Harvey Sarcoma Virus, avian leukosis virus, gibbon ape leukemia virus, human immunodeficiency virus, Myeloproliferative Sarcoma Virus, and mammary tumor virus.

[0447] The retroviral plasmid vector is employed to transduce packaging cell lines to form producer cell lines. Examples of packaging cells which may be transfected include, but are not limited to, the PE501, PA317, R-2, R-AM, PA12, T19-14X, VT-19-17-H2, RCRE, RCRIP, GP+E-86, GP+envAm12, and DAN cell lines as described in Miller, Human Gene Therapy 1:5-14 (1990), which is incorporated herein by reference in its entirety. The vector may transduce the packaging cells through any means known in the art. Such means include, but are not limited to, electroporation, the use of liposomes, and CaPO₄ precipitation. In one alternative, the retroviral plasmid vector may be encapsulated into a liposome, or coupled to a lipid, and then administered to a host.

[0448] The producer cell line generates infectious retroviral vector particles which include polynucleotide encoding a polypeptide of the present invention. Such retroviral vector particles then may be employed, to transduce eukaryotic cells, either in vitro or in vivo. The transduced eukaryotic cells will express a polypeptide of the present invention.

[0449] In certain other embodiments, cells are engineered, ex vivo or in vivo, with polynucleotide contained in an adenovirus vector. Adenovirus can be manipulated such that it encodes and expresses a polypeptide of the present invention, and at the same time is inactivated in terms of its ability to replicate in a normal lytic viral life cycle. Adenovirus expression is achieved without integration of the viral DNA into the host cell chromosome, thereby alleviating concerns about insertional mutagenesis. Furthermore, adenoviruses have been used as live enteric vaccines for many years with an excellent safety profile (Schwartz et al. Am. Rev. Respir. Dis.109:233-238 (1974)). Finally, adenovirus mediated gene transfer has been demonstrated in a number of instances including transfer of alpha-1-antitrypsin and CFTR to the lungs of cotton rats (Rosenfeld, M. A. et al. (1991) Science 252:431-434; Rosenfeld et al., (1992) Cell 68:143-155). Furthermore, extensive studies to attempt to establish adenovirus as a causative agent in human cancer were uniformly negative (Green, M. et al. (1979) Proc. Natl. Acad. Sci. USA 76:6606).

[0450] Suitable adenoviral vectors useful in the present invention are described, for example, in Kozarsky and Wilson, Curr. Opin. Genet. Devel. 3:499-503 (1993); Rosenfeld et al., Cell 68:143-155 (1992); Engelhardt et al., Human Genet. Ther. 4:759-769 (1993); Yang et al., Nature Genet. 7:362-369 (1994); Wilson et al., Nature 365:691-692 (1993); and U.S. Pat. No. 5,652,224, which are herein incorporated by reference. For example, the adenovirus vector Ad2 is useful and can be grown in human 293 cells. These cells contain the E1 region of adenovirus and constitutively express E1a and E1b, which complement the defective adenoviruses by providing the products of the genes deleted from the vector. In addition to Ad2, other varieties of adenovirus (e.g., Ad3, Ad5, and Ad7) are also useful in the present invention.

[0451] Preferably, the adenoviruses used in the present invention are replication deficient. Replication deficient adenoviruses require the aid of a helper virus and/or packaging cell line to form infectious particles. The resulting virus is capable of infecting cells and can express a polynucleotide of interest which is operably linked to a promoter, but cannot replicate in most cells. Replication deficient adenoviruses may be deleted in one or more of all or a portion of the following genes: E1a, E1b, E3, E4, E2a, or L1 through L5.

[0452] In certain other embodiments, the cells are engineered, ex vivo or in vivo, using an adeno-associated virus (AAV). AAVs are naturally occurring defective viruses that require helper viruses to produce infectious particles (Muzyczka, N., Curr. Topics in Microbiol. immunol. 158:97 (1992)). It is also one of the few viruses that may integrate its DNA into non-dividing cells. Vectors containing as little as 300 base pairs of AAV can be packaged and can integrate, but space for exogenous DNA is limited to about 4.5 kb. Methods for producing and using such AAVs are known in the art. See, for example, U.S. Pat. Nos. 5,139,941, 5,173,414, 5,354,678, 5,436,146, 5,474,935, 5,478,745, and 5,589,377.

[0453] For example, an appropriate AAV vector for use in the present invention will include all the sequences necessary for DNA replication, encapsidation, and host-cell integration. The polynucleotide construct is inserted into the AAV vector using standard cloning methods, such as those found in Sambrook et al., Molecular Cloning: A Laboratory Manual, Cold Spring Harbor Press (1989). The recombinant AAV vector is then transfected into packaging cells which are infected with a helper virus, using any standard technique, including lipofection, electroporation, calcium phosphate precipitation, etc. Appropriate helper viruses include adenoviruses, cytomegaloviruses, vaccinia viruses, or herpes viruses. Once the packaging cells are transfected and infected, they will produce infectious AAV viral particles which contain the polynucleotide construct. These viral particles are then used to transduce eukaryotic cells, either ex vivo or in vivo. The transduced cells will contain the polynucleotide construct integrated into its genome, and will express a polypeptide of the invention.

[0454] Another method of gene therapy involves operably associating heterologous control regions and endogenous polynucleotide sequences (e.g. encoding a polypeptide of the present invention) via homologous recombination (see, e.g., U.S. Pat. No. 5,641,670, issued Jun. 24, 1997; International Publication No. WO 96/29411, published Sep. 26, 1996; International Publication No. WO 94/12650, published Aug. 4, 1994; Koller et al., Proc. Natl. Acad. Sci. USA 86:8932-8935 (1989); and Zijlstra et al., Nature 342:435-438 (1989), which are herein encorporated by reference. This method involves the activation of a gene which is present in the target cells, but which is not normally expressed in the cells, or is expressed at a lower level than desired.

[0455] Polynucleotide constructs are made, using standard techniques known in the art, which contain the promoter with targeting sequences flanking the promoter. Suitable promoters are described herein. The targeting sequence is sufficiently complementary to an endogenous sequence to permit homologous recombination of the promoter-targeting sequence with the endogenous sequence. The targeting sequence will be sufficiently near the 5′ end of the desired endogenous polynucleotide sequence so the promoter will be operably linked to the endogenous sequence upon homologous recombination.

[0456] The promoter and the targeting sequences can be amplified using PCR. Preferably, the amplified promoter contains distinct restriction enzyme sites on the 5′ and 3′ ends. Preferably, the 3′ end of the first targeting sequence contains the same restriction enzyme site as the 5′ end of the amplified promoter and the 5′ end of the second targeting sequence contains the same restriction site as the 3′ end of the amplified promoter. The amplified promoter and targeting sequences are digested and ligated together.

[0457] The promoter-targeting sequence construct is delivered to the cells, either as naked polynucleotide, or in conjunction with transfection-facilitating agents, such as liposomes, viral sequences, viral particles, whole viruses, lipofection, precipitating agents, etc., described in more detail above. The P promoter-targeting sequence can be delivered by any method, included direct needle injection, intravenous injection, topical administration, catheter infusion, particle accelerators, etc. The methods are described in more detail below.

[0458] The promoter-targeting sequence construct is taken up by cells. Homologous recombination between the construct and the endogenous sequence takes place, such that an endogenous sequence is placed under the control of the promoter. The promoter then drives the expression of the endogenous sequence.

[0459] The polynucleotide encoding a polypeptide of the present invention may contain a secretory signal sequence that facilitates secretion of the protein. Typically, the signal sequence is positioned in the coding region of the polynucleotide to be expressed towards or at the 5′ end of the coding region. The signal sequence may be homologous or heterologous to the polynucleotide of interest and may be homologous or heterologous to the cells to be transfected. Additionally, the signal sequence may be chemically synthesized using methods known in the art.

[0460] Any mode of administration of any of the above-described polynucleotides constructs can be used so long as the mode results in the expression of one or more molecules in an amount sufficient to provide a therapeutic effect. This includes direct needle injection, systemic injection, catheter infusion, biolistic injectors, particle accelerators (i.e., “gene guns”), gelfoam sponge depots, other commercially available depot materials, osmotic pumps (e.g., Alza minipumps), oral or suppositorial solid (tablet or pill) pharmaceutical formulations, and decanting or topical applications during surgery. For example, direct injection of naked calcium phosphate-precipitated plasmid into rat liver and rat spleen or a protein-coated plasmid into the portal vein has resulted in gene expression of the foreign gene in the rat livers (Kaneda et al., Science 243:375 (1989)).

[0461] A preferred method of local administration is by direct injection. Preferably, a recombinant molecule of the present invention complexed with a delivery vehicle is administered by direct injection into or locally within the area of arteries. Administration of a composition locally within the area of arteries refers to injecting the composition centimeters and preferably, millimeters within arteries.

[0462] Another method of local administration is to contact a polynucleotide construct of the present invention in or around a surgical wound. For example, a patient can undergo surgery and the polynucleotide construct can be coated on the surface of tissue inside the wound or the construct can be injected into areas of tissue inside the wound.

[0463] Therapeutic compositions useful in systemic administration, include recombinant molecules of the present invention complexed to a targeted delivery vehicle of the present invention. Suitable delivery vehicles for use with systemic administration comprise liposomes comprising ligands for targeting the vehicle to a particular site. In specific embodiments, suitable delivery vehicles for use with systemic administration comprise liposomes comprising polypeptides of the invention for targeting the vehicle to a particular site.

[0464] Preferred methods of systemic administration, include intravenous injection, aerosol, oral and percutaneous (topical) delivery. Intravenous injections can be performed using methods standard in the art. Aerosol delivery can also be performed using methods standard in the art (see, for example, Stribling et al., Proc. Natl. Acad. Sci. USA 189:11277-11281, 1992, which is incorporated herein by reference). Oral delivery can be performed by complexing a polynucleotide construct of the present invention to a carrier capable of withstanding degradation by digestive enzymes in the gut of an animal. Examples of such carriers, include plastic capsules or tablets, such as those known in the art. Topical delivery can be performed by mixing a polynucleotide construct of the present invention with a lipophilic reagent (e.g., DMSO) that is capable of passing into the skin.

[0465] Determining an effective amount of substance to be delivered can depend upon a number of factors including, for example, the chemical structure and biological activity of the substance, the age and weight of the animal, the precise condition requiring treatment and its severity, and the route of administration. The frequency of treatments depends upon a number of factors, such as the amount of polynucleotide constructs administered per dose, as well as the health and history of the subject. The precise amount, number of doses, and timing of doses will be determined by the attending physician or veterinarian.

[0466] Therapeutic compositions of the present invention can be administered to any animal, preferably to mammals and birds. Preferred mammals include humans, dogs, cats, mice, rats, rabbits sheep, cattle, horses and pigs, with humans being particularly preferred.

[0467] Biological Activities

[0468] Polynucleotides or polypeptides, or agonists or antagonists of the present invention, can be used in assays to test for one or more biological activities. If these polynucleotides or polypeptides, or agonists or antagonists of the present invention, do exhibit activity in a particular assay, it is likely that these molecules may be involved in the diseases associated with the biological activity. Thus, the polynucleotides and polypeptides, and agonists or antagonists could be used to diagnose, prognose, prevent and/or treat the associated disease.

[0469] Members of the transcription factor family of proteins are believed to be involved in biological activities associated with DNA binding and the control of gene expression. Accordingly, compositions of the invention (including polynucleotides, polypeptides and antibodies of the invention, and fragments and variants thereof) may be used in the diagnosis, prognosis, prevention and/or treatment of diseases and/or disorders associated with aberrant transcription factor activity.

[0470] In preferred embodiments, compositions of the invention (including polynucleotides, polypeptides and antibodies of the invention, and fragments and variants thereof) may be used in the diagnosis, prognosis, prevention and/or treatment of diseases and/or disorders relating to blood disorders (e.g., blood coagulation disorders, thalassemias, and/or as described under “Immune activity” and “Cardiovascular Disorders” below), neoplastic disorders (e.g., as described under “Hyperproliferative Disorders” below), and a wide range of developmental disorders, including but not limited to those described below under “Neural Activity and Neurological Diseases”.

[0471] In certain embodiments, a polypeptide of the invention, or polynucleotides, antibodies, agonists, or antagonists corresponding to that polypeptide, may be used to diagnose and/or prognose diseases and/or disorders associated with the tissue(s) in which the polypeptide of the invention is expressed, including one, two, three, four, five, or more tissues disclosed in Table 1A, column 8 (Tissue Distribution Library Code).

[0472] Thus, polynucleotides, translation products and antibodies of the invention are useful in the diagnosis, prognosis, prevention and/or treatment of diseases and/or disorders associated with activities that include, but are not limited to, blood coagulation, cancer, and developmental disorders. Transcription factor polypeptides of the invention are also involved in stem cell differentiation, and are therefore useful for directing stem cell differentiation into specified cell phenotypes.

[0473] More generally, polynucleotides, translation products and antibodies corresponding to this gene may be useful for the diagnosis, prognosis, prevention and/or treatment of diseases and/or disorders associated with the following systems.

[0474] Immune Activity

[0475] Polynucleotides, polypeptides, antibodies, and/or agonists or antagonists of the present invention may be useful in treating, preventing, diagnosing and/or prognosing diseases, disorders, and/or conditions of the immune system, by, for example, activating or inhibiting the proliferation, differentiation, or mobilization (chemotaxis) of immune cells. Immune cells develop through a process called hematopoiesis, producing myeloid (platelets, red blood cells, neutrophils, and macrophages) and lymphoid (B and T lymphocytes) cells from pluripotent stem cells. The etiology of these immune diseases, disorders, and/or conditions may be genetic, somatic, such as cancer and some autoimmune diseases, acquired (e.g., by chemotherapy or toxins), or infectious. Moreover, polynucleotides, polypeptides, antibodies, and/or agonists or antagonists of the present invention can be used as a marker or detector of a particular immune system disease or disorder.

[0476] In another embodiment, a polypeptide of the invention, or polynucleotides, antibodies, agonists, or antagonists corresponding to that polypeptide, may be used to treat diseases and disorders of the immune system and/or to inhibit or enhance an immune response generated by cells associated with the tissue(s) in which the polypeptide of the invention is expressed, including one, two, three, four, five, or more tissues disclosed in Table 1A, column 8 (Tissue Distribution Library Code).

[0477] Polynucleotides, polypeptides, antibodies, and/or agonists or antagonists of the present invention may be useful in treating, preventing, diagnosing, and/or prognosing immunodeficiencies, including both congenital and acquired immunodeficiencies. Examples of B cell immunodeficiencies in which immunoglobulin levels B cell function and/or B cell numbers are decreased include: X-linked agammaglobulinemia (Bruton's disease), X-linked infantile agammaglobulinemia, X-linked immunodeficiency with hyper IgM, non X-linked immunodeficiency with hyper IgM, X-linked lymphoproliferative syndrome (XLP), agammaglobulinemia including congenital and acquired agammaglobulinemia, adult onset agammaglobulinemia, late-onset agammaglobulinemia, dysgammaglobulinemia, hypogammaglobulinemia, unspecified hypogammaglobulinemia, recessive agammaglobulinemia (Swiss type), Selective IgM deficiency, selective IgA deficiency, selective IgG subclass deficiencies, IgG subclass deficiency (with or without IgA deficiency), Ig deficiency with increased IgM, IgG and IgA deficiency with increased IgM, antibody deficiency with normal or elevated Igs, Ig heavy chain deletions, kappa chain deficiency, B cell lymphoproliferative disorder (BLPD), common variable immunodeficiency (CVID), common variable immunodeficiency (CVI) (acquired), and transient hypogammaglobulinemia of infancy.

[0478] In specific embodiments, ataxia-telangiectasia or conditions associated with ataxia-telangiectasia are treated, prevented, diagnosed, and/or prognosing using the polypeptides or polynucleotides of the invention, and/or agonists or antagonists thereof.

[0479] Examples of congenital immunodeficiencies in which T cell and/or B cell function and/or number is decreased include, but are not limited to: DiGeorge anomaly, severe combined immunodeficiencies (SCID) (including, but not limited to, X-linked SCID, autosomal recessive SCID, adenosine deaminase deficiency, purine nucleoside phosphorylase (PNP) deficiency, Class II MHC deficiency (Bare lymphocyte syndrome), Wiskott-Aldrich syndrome, and ataxia telangiectasia), thymic hypoplasia, third and fourth pharyngeal pouch syndrome, 22q11.2 deletion, chronic mucocutaneous candidiasis, natural killer cell deficiency (NK), idiopathic CD4+T-lymphocytopenia, immunodeficiency with predominant T cell defect (unspecified), and unspecified immunodeficiency of cell mediated immunity.

[0480] In specific embodiments, DiGeorge anomaly or conditions associated with DiGeorge anomaly are treated, prevented, diagnosed, and/or prognosed using polypeptides or polynucleotides of the invention, or antagonists or agonists thereof.

[0481] Other immunodeficiencies that may be treated, prevented, diagnosed, and/or prognosed using polypeptides or polynucleotides of the invention, and/or agonists or antagonists thereof, include, but are not limited to, chronic granulomatous disease, Chédiak-Higashi syndrome, myeloperoxidase deficiency, leukocyte glucose-6-phosphate dehydrogenase deficiency, X-linked lymphoproliferative syndrome (XLP), leukocyte adhesion deficiency, complement component deficiencies (including C1, C2, C3, C4, C5, C6, C7, C8 and/or C9 deficiencies), reticular dysgenesis, thymic alymphoplasia-aplasia, immunodeficiency with thymoma, severe congenital leukopenia, dysplasia with immunodeficiency, neonatal neutropenia, short limbed dwarfism, and Nezelof syndrome-combined immunodeficiency with Igs.

[0482] In a preferred embodiment, the immunodeficiencies and/or conditions associated with the immunodeficiencies recited above are treated, prevented, diagnosed and/or prognosed using polynucleotides, polypeptides, antibodies, and/or agonists or antagonists of the present invention.

[0483] In a preferred embodiment polynucleotides, polypeptides, antibodies, and/or agonists or antagonists of the present invention could be used as an agent to boost immunoresponsiveness among immunodeficient individuals. In specific embodiments, polynucleotides, polypeptides, antibodies, and/or agonists or antagonists of the present invention could be used as an agent to boost immunoresponsiveness among B cell and/or T cell immunodeficient individuals.

[0484] The polynucleotides, polypeptides, antibodies, and/or agonists or antagonists of the present invention may be useful in treating, preventing, diagnosing and/or prognosing autoimmune disorders. Many autoimmune disorders result from inappropriate recognition of self as foreign material by immune cells. This inappropriate recognition results in an immune response leading to the destruction of the host tissue. Therefore, the administration of polynucleotides and polypeptides of the invention that can inhibit an immune response, particularly the proliferation, differentiation, or chemotaxis of T-cells, may be an effective therapy in preventing autoimmune disorders.

[0485] Autoimmune diseases or disorders that may be treated, prevented, diagnosed and/or prognosed by polynucleotides, polypeptides, antibodies, and/or agonists or antagonists of the present invention include, but are not limited to, one or more of the following: systemic lupus erythematosus, rheumatoid arthritis, ankylosing spondylitis, multiple sclerosis, autoimmune thyroiditis, Hashimoto's thyroiditis, autoimmune hemolytic anemia, hemolytic anemia, thrombocytopenia, autoimmune thrombocytopenia purpura, autoimmune neonatal thrombocytopenia, idiopathic thrombocytopenia purpura, purpura (e.g., Henloch-Scoenlein purpura), autoimmunocytopenia, Goodpasture's syndrome, Pemphigus vulgaris, myasthenia gravis, Grave's disease (hyperthyroidism), and insulin-resistant diabetes mellitus.

[0486] Additional disorders that are likely to have an autoimmune component that may be treated, prevented, and/or diagnosed with the compositions of the invention include, but are not limited to, type II collagen-induced arthritis, antiphospholipid syndrome, dermatitis, allergic encephalomyelitis, myocarditis, relapsing polychondritis, rheumatic heart disease, neuritis, uveitis ophthalmia, polyendocrinopathies, Reiter's Disease, Stiff-Man Syndrome, autoimmune pulmonary inflammation, autism, Guillain-Barre Syndrome, insulin dependent diabetes mellitus, and autoimmune inflammatory eye disorders.

[0487] Additional disorders that are likely to have an autoimmune component that may be treated, prevented, diagnosed and/or prognosed with the compositions of the invention include, but are not limited to, scleroderma with anti-collagen antibodies (often characterized, e.g., by nucleolar and other nuclear antibodies), mixed connective tissue disease (often characterized, e.g., by antibodies to extractable nuclear antigens (e.g., ribonucleoprotein)), polymyositis (often characterized, e.g., by nonhistone ANA), pernicious anemia (often characterized, e.g., by antiparietal cell, microsomes, and intrinsic factor antibodies), idiopathic Addison's disease (often characterized, e.g., by humoral and cell-mediated adrenal cytotoxicity, infertility (often characterized, e.g., by antispermatozoal antibodies), glomerulonephritis (often characterized, e.g., by glomerular basement membrane antibodies or immune complexes), bullous pemphigoid (often characterized, e.g., by IgG and complement in basement membrane), Sjogren's syndrome (often characterized, e.g., by multiple tissue antibodies, and/or a specific nonhistone ANA (SS-B)), diabetes mellitus (often characterized, e.g., by cell-mediated and humoral islet cell antibodies), and adrenergic drug resistance (including adrenergic drug resistance with asthma or cystic fibrosis) (often characterized, e.g., by beta-adrenergic receptor antibodies).

[0488] Additional disorders that may have an autoimmune component that may be treated, prevented, diagnosed and/or prognosed with the compositions of the invention include, but are not limited to, chronic active hepatitis (often characterized, e.g., by smooth muscle antibodies), primary biliary cirrhosis (often characterized, e.g., by mitochondria antibodies), other endocrine gland failure (often characterized, e.g., by specific tissue antibodies in some cases), vitiligo (often characterized, e.g., by melanocyte antibodies), vasculitis (often characterized, e.g., by Ig and complement in vessel walls and/or low serum complement), post-MI (often characterized, e.g., by myocardial antibodies), cardiotomy syndrome (often characterized, e.g., by myocardial antibodies), urticaria (often characterized, e.g., by IgG and IgM antibodies to IgE), atopic dermatitis (often characterized, e.g., by IgG and IgM antibodies to IgE), asthma (often characterized, e.g., by IgG and IgM antibodies to IgE), and many other inflammatory, granulomatous, degenerative, and atrophic disorders.

[0489] In a preferred embodiment, the autoimmune diseases and disorders and/or conditions associated with the diseases and disorders recited above are treated, prevented, diagnosed and/or prognosed using for example, antagonists or agonists, polypeptides or polynucleotides, or antibodies of the present invention. In a specific preferred embodiment, rheumatoid arthritis is treated, prevented, and/or diagnosed using polynucleotides, polypeptides, antibodies, and/or agonists or antagonists of the present invention.

[0490] In another specific preferred embodiment, systemic lupus erythematosus is treated, prevented, and/or diagnosed using polynucleotides, polypeptides, antibodies, and/or agonists or antagonists of the present invention. In another specific preferred embodiment, idiopathic thrombocytopenia purpura is treated, prevented, and/or diagnosed using polynucleotides, polypeptides, antibodies, and/or agonists or antagonists of the present invention.

[0491] In another specific preferred embodiment IgA nephropathy is treated, prevented, and/or diagnosed using polynucleotides, polypeptides, antibodies, and/or agonists or antagonists of the present invention.

[0492] In a preferred embodiment, the autoimmune diseases and disorders and/or conditions associated with the diseases and disorders recited above are treated, prevented, diagnosed and/or prognosed using polynucleotides, polypeptides, antibodies, and/or agonists or antagonists of the present invention

[0493] In preferred embodiments, polypeptides, antibodies, polynucleotides and/or agonists or antagonists of the present invention are used as a immunosuppressive agent(s).

[0494] Polynucleotides, polypeptides, antibodies, and/or agonists or antagonists of the present invention may be useful in treating, preventing, prognosing, and/or diagnosing diseases, disorders, and/or conditions of hematopoietic cells. Polynucleotides, polypeptides, antibodies, and/or agonists or antagonists of the present invention could be used to increase differentiation and proliferation of hematopoietic cells, including the pluripotent stem cells, in an effort to treat or prevent those diseases, disorders, and/or conditions associated with a decrease in certain (or many) types hematopoietic cells, including but not limited to, leukopenia, neutropenia, anemia, and thrombocytopenia. Alternatively, Polynucleotides, polypeptides, antibodies, and/or agonists or antagonists of the present invention could be used to increase differentiation and proliferation of hematopoietic cells, including the pluripotent stem cells, in an effort to treat or prevent those diseases, disorders, and/or conditions associated with an increase in certain (or many) types of hematopoietic cells, including but not limited to, histiocytosis.

[0495] Allergic reactions and conditions, such as asthma (particularly allergic asthma) or other respiratory problems, may also be treated, prevented, diagnosed and/or prognosed using polypeptides, antibodies, or polynucleotides of the invention, and/or agonists or antagonists thereof. Moreover, these molecules can be used to treat, prevent, prognose, and/or diagnose anaphylaxis, hypersensitivity to an antigenic molecule, or blood group incompatibility.

[0496] Additionally, polypeptides or polynucleotides of the invention, and/or agonists or antagonists thereof, may be used to treat, prevent, diagnose and/or prognose IgE-mediated allergic reactions. Such allergic reactions include, but are not limited to, asthma, rhinitis, and eczema. In specific embodiments, polynucleotides, polypeptides, antibodies, and/or agonists or antagonists of the present invention may be used to modulate IgE concentrations in vitro or in vivo.

[0497] Moreover, polynucleotides, polypeptides, antibodies, and/or agonists or antagonists of the present invention have uses in the diagnosis, prognosis, prevention, and/or treatment of inflammatory conditions. For example, since polypeptides, antibodies, or polynucleotides of the invention, and/or agonists or antagonists of the invention may inhibit the activation, proliferation and/or differentiation of cells involved in an inflammatory response, these molecules can be used to prevent and/or treat chronic and acute inflammatory conditions. Such inflammatory conditions include, but are not limited to, for example, inflammation associated with infection (e.g., septic shock, sepsis, or systemic inflammatory response syndrome), ischemia-reperfusion injury, endotoxin lethality, complement-mediated hyperacute rejection, nephritis, cytokine or chemokine induced lung injury, inflammatory bowel disease, Crohn's disease, over production of cytokines (e.g., TNF or IL-1.), respiratory disorders (e.g., asthma and allergy); gastrointestinal disorders (e.g., inflammatory bowel disease); cancers (e.g., gastric, ovarian, lung, bladder, liver, and breast); CNS disorders (e.g., multiple sclerosis; ischemic brain injury and/or stroke, traumatic brain injury, neurodegenerative disorders (e.g., Parkinson's disease and Alzheimer's disease); AIDS-related dementia; and prion disease); cardiovascular disorders (e.g., atherosclerosis, myocarditis, cardiovascular disease, and cardiopulmonary bypass complications); as well as many additional diseases, conditions, and disorders that are characterized by inflammation (e.g., hepatitis, rheumatoid arthritis, gout, trauma, pancreatitis, sarcoidosis, dermatitis, renal ischemia-reperfusion injury, Grave's disease, systemic lupus erythematosus, diabetes mellitus, and allogenic transplant rejection).

[0498] Because inflammation is a fundamental defense mechanism, inflammatory disorders can effect virtually any tissue of the body. Accordingly, polynucleotides, polypeptides, and antibodies of the invention, as well as agonists or antagonists thereof, have uses in the treatment of tissue-specific inflammatory disorders, including, but not limited to, adrenalitis, alveolitis, angiocholecystitis, appendicitis, balanitis, blepharitis, bronchitis, bursitis, carditis, cellulitis, cervicitis, cholecystitis, chorditis, cochlitis, colitis, conjunctivitis, cystitis, dermatitis, diverticulitis, encephalitis, endocarditis, esophagitis, eustachitis, fibrositis, folliculitis, gastritis, gastroenteritis, gingivitis, glossitis, hepatosplenitis, keratitis, labyrinthitis, laryngitis, lymphangitis, mastitis, media otitis, meningitis, metritis, mucitis, myocarditis, myosititis, myringitis, nephritis, neuritis, orchitis, osteochondritis, otitis, pericarditis, peritendonitis, peritonitis, pharyngitis, phlebitis, poliomyelitis, prostatitis, pulpitis, retinitis, rhinitis, salpingitis, scleritis, sclerochoroiditis, scrotitis, sinusitis, spondylitis, steatitis, stomatitis, synovitis, syringitis, tendonitis, tonsillitis, urethritis, and vaginitis.

[0499] In specific embodiments, polypeptides, antibodies, or polynucleotides of the invention, and/or agonists or antagonists thereof, are useful to diagnose, prognose, prevent, and/or treat organ transplant rejections and graft-versus-host disease. Organ rejection occurs by host immune cell destruction of the transplanted tissue through an immune response. Similarly, an immune response is also involved in GVHD, but, in this case, the foreign transplanted immune cells destroy the host tissues. Polypeptides, antibodies, or polynucleotides of the invention, and/or agonists or antagonists thereof, that inhibit an immune response, particularly the activation, proliferation, differentiation, or chemotaxis of T-cells, may be an effective therapy in preventing organ rejection or GVHD. In specific embodiments, polypeptides, antibodies, or polynucleotides of the invention, and/or agonists or antagonists thereof, that inhibit an immune response, particularly the activation, proliferation, differentiation, or chemotaxis of T-cells, may be an effective therapy in preventing experimental allergic and hyperacute xenograft rejection.

[0500] In other embodiments, polypeptides, antibodies, or polynucleotides of the invention, and/or agonists or antagonists thereof, are useful to diagnose, prognose, prevent, and/or treat immune complex diseases, including, but not limited to, serum sickness, post streptococcal glomerulonephritis, polyarteritis nodosa, and immune complex-induced vasculitis.

[0501] Polypeptides, antibodies, polynucleotides and/or agonists or antagonists of the invention can be used to treat, detect, and/or prevent infectious agents. For example, by increasing the immune response, particularly increasing the proliferation activation and/or differentiation of B and/or T cells, infectious diseases may be treated, detected, and/or prevented. The immune response may be increased by either enhancing an existing immune response, or by initiating a new immune response. Alternatively, polynucleotides, polypeptides, antibodies, and/or agonists or antagonists of the present invention may also directly inhibit the infectious agent (refer to section of application listing infectious agents, etc), without necessarily eliciting an immune response.

[0502] In another embodiment, polypeptides, antibodies, polynucleotides and/or agonists or antagonists of the present invention are used as a vaccine adjuvant that enhances immune responsiveness to an antigen. In a specific embodiment, polypeptides, antibodies, polynucleotides and/or agonists or antagonists of the present invention are used as an adjuvant to enhance tumor-specific immune responses.

[0503] In another specific embodiment, polypeptides, antibodies, polynucleotides and/or agonists or antagonists of the present invention are used as an adjuvant to enhance anti-viral immune responses. Anti-viral immune responses that may be enhanced using the compositions of the invention as an adjuvant, include virus and virus associated diseases or symptoms described herein or otherwise known in the art. In specific embodiments, the compositions of the invention are used as an adjuvant to enhance an immune response to a virus, disease, or symptom selected from the group consisting of: AIDS, meningitis, Dengue, EBV, and hepatitis (e.g., hepatitis B). In another specific embodiment, the compositions of the invention are used as an adjuvant to enhance an immune response to a virus, disease, or symptom selected from the group consisting of: HIV/AIDS, respiratory syncytial virus, Dengue, rotavirus, Japanese B encephalitis, influenza A and B, parainfluenza, measles, cytomegalovirus, rabies, Junin, Chikungunya, Rift Valley Fever, herpes simplex, and yellow fever.

[0504] In another specific embodiment, polypeptides, antibodies, polynucleotides and/or agonists or antagonists of the present invention are used as an adjuvant to enhance anti-bacterial or anti-fungal immune responses. Anti-bacterial or anti-fungal immune responses that may be enhanced using the compositions of the invention as an adjuvant, include bacteria or fungus and bacteria or fungus associated diseases or symptoms described herein or otherwise known in the art. In specific embodiments, the compositions of the invention are used as an adjuvant to enhance an immune response to a bacteria or fungus, disease, or symptom selected from the group consisting of: tetanus, Diphtheria, botulism, and meningitis type B.

[0505] In another specific embodiment, the compositions of the invention are used as an adjuvant to enhance an immune response to a bacteria or fungus, disease, or symptom selected from the group consisting of: Vibrio cholerae, Mycobacterium leprae, Salmonella typhi, Salmonella paratyphi, Meisseria men ingitidis, Streptococcus pneumoniae, Group B streptococcus, Shigella spp., Enterotoxigenic Escherichia coli, Enterohemorrhagic E. coli, and Borrelia burgdorferi.

[0506] In another specific embodiment, polypeptides, antibodies, polynucleotides and/or agonists or antagonists of the present invention are used as an adjuvant to enhance anti-parasitic immune responses. Anti-parasitic immune responses that may be enhanced using the compositions of the invention as an adjuvant, include parasite and parasite associated diseases or symptoms described herein or otherwise known in the art. In specific embodiments, the compositions of the invention are used as an adjuvant to enhance an immune response to a parasite. In another specific embodiment, the compositions of the invention are used as an adjuvant to enhance an immune response to Plasmodium (malaria) or Leishmania.

[0507] In another specific embodiment, polypeptides, antibodies, polynucleotides and/or agonists or antagonists of the present invention may also be employed to treat infectious diseases including silicosis, sarcoidosis, and idiopathic pulmonary fibrosis; for example, by preventing the recruitment and activation of mononuclear phagocytes.

[0508] In another specific embodiment, polypeptides, antibodies, polynucleotides and/or agonists or antagonists of the present invention are used as an antigen for the generation of antibodies to inhibit or enhance immune mediated responses against polypeptides of the invention.

[0509] In one embodiment, polypeptides, antibodies, polynucleotides and/or agonists or antagonists of the present invention are administered to an animal (e.g., mouse, rat, rabbit, hamster, guinea pig, pigs, micro-pig, chicken, camel, goat, horse, cow, sheep, dog, cat, non-human primate, and human, most preferably human) to boost the immune system to produce increased quantities of one or more antibodies (e.g., IgG, IgA, IgM, and IgE), to induce higher affinity antibody production and immunoglobulin class switching (e.g., IgG, IgA, IgM, and IgE), and/or to increase an immune response.

[0510] In another specific embodiment, polypeptides, antibodies, polynucleotides and/or agonists or antagonists of the present invention are used as a stimulator of B cell responsiveness to pathogens.

[0511] In another specific embodiment, polypeptides, antibodies, polynucleotides and/or agonists or antagonists of the present invention are used as an activator of T cells.

[0512] In another specific embodiment, polypeptides, antibodies, polynucleotides and/or agonists or antagonists of the present invention are used as an agent that elevates the immune status of an individual prior to their receipt of immunosuppressive therapies.

[0513] In another specific embodiment, polypeptides, antibodies, polynucleotides and/or agonists or antagonists of the present invention are used as an agent to induce higher affinity antibodies.

[0514] In another specific embodiment, polypeptides, antibodies, polynucleotides and/or agonists or antagonists of the present invention are used as an agent to increase serum immunoglobulin concentrations.

[0515] In another specific embodiment, polypeptides, antibodies, polynucleotides and/or agonists or antagonists of the present invention are used as an agent to accelerate recovery of immunocompromised individuals.

[0516] In another specific embodiment, polypeptides, antibodies, polynucleotides and/or agonists or antagonists of the present invention are used as an agent to boost immunoresponsiveness among aged populations and/or neonates.

[0517] In another specific embodiment, polypeptides, antibodies, polynucleotides and/or agonists or antagonists of the present invention are used as an immune system enhancer prior to, during, or after bone marrow transplant and/or other transplants (e.g., allogeneic or xenogeneic organ transplantation). With respect to transplantation, compositions of the invention may be administered prior to, concomitant with, and/or after transplantation. In a specific embodiment, compositions of the invention are administered after transplantation, prior to the beginning of recovery of T-cell populations. In another specific embodiment, compositions of the invention are first administered after transplantation after the beginning of recovery of T cell populations, but prior to full recovery of B cell populations.

[0518] In another specific embodiment, polypeptides, antibodies, polynucleotides and/or agonists or antagonists of the present invention are used as an agent to boost immunoresponsiveness among individuals having an acquired loss of B cell function. Conditions resulting in an acquired loss of B cell function that may be ameliorated or treated by administering the polypeptides, antibodies, polynucleotides and/or agonists or antagonists thereof, include, but are not limited to, HIV Infection, AIDS, bone marrow transplant, and B cell chronic lymphocytic leukemia (CLL).

[0519] In another specific embodiment, polypeptides, antibodies, polynucleotides and/or agonists or antagonists of the present invention are used as an agent to boost immunoresponsiveness among individuals having a temporary immune deficiency. Conditions resulting in a temporary immune deficiency that may be ameliorated or treated by administering the polypeptides, antibodies, polynucleotides and/or agonists or antagonists thereof, include, but are not limited to, recovery from viral infections (e.g., influenza), conditions associated with malnutrition, recovery from infectious mononucleosis, or conditions associated with stress, recovery from measles, recovery from blood transfusion, and recovery from surgery.

[0520] In another specific embodiment, polypeptides, antibodies, polynucleotides and/or agonists or antagonists of the present invention are used as a regulator of antigen presentation by monocytes, dendritic cells, and/or B-cells. In one embodiment, polynucleotides, polypeptides, antibodies, and/or agonists or antagonists of the present invention enhance antigen presentation or antagonizes antigen presentation in vitro or in vivo. Moreover, in related embodiments, said enhancement or antagonism of antigen presentation may be useful as an anti-tumor treatment or to modulate the immune system.

[0521] In another specific embodiment, polypeptides, antibodies, polynucleotides and/or agonists or antagonists of the present invention are used as an agent to direct an individual's immune system towards development of a humoral response (i.e. TH2) as opposed to a TH1 cellular response.

[0522] In another specific embodiment, polypeptides, antibodies, polynucleotides and/or agonists or antagonists of the present invention are used as a means to induce tumor proliferation and thus make it more susceptible to anti-neoplastic agents. For example, multiple myeloma is a slowly dividing disease and is thus refractory to virtually all anti-neoplastic regimens. If these cells were forced to proliferate more rapidly their susceptibility profile would likely change.

[0523] In another specific embodiment, polypeptides, antibodies, polynucleotides and/or agonists or antagonists of the present invention are used as a stimulator of B cell production in pathologies such as AIDS, chronic lymphocyte disorder and/or Common Variable Immunodificiency.

[0524] In another specific embodiment, polypeptides, antibodies, polynucleotides and/or agonists or antagonists of the present invention are used as a therapy for generation and/or regeneration of lymphoid tissues following surgery, trauma or genetic defect. In another specific embodiment, polypeptides, antibodies, polynucleotides and/or agonists or antagonists of the present invention are used in the pretreatment of bone marrow samples prior to transplant.

[0525] In another specific embodiment, polypeptides, antibodies, polynucleotides and/or agonists or antagonists of the present invention are used as a gene-based therapy for genetically inherited disorders resulting in immuno-incompetence/immunodeficiency such as observed among SCID patients.

[0526] In another specific embodiment, polypeptides, antibodies, polynucleotides and/or agonists or antagonists of the present invention are used as a means of activating monocytes/macrophages to defend against parasitic diseases that effect monocytes such as Leishmania.

[0527] In another specific embodiment, polypeptides, antibodies, polynucleotides and/or agonists or antagonists of the present invention are used as a means of regulating secreted cytokines that are elicited by polypeptides of the invention.

[0528] In another embodiment, polypeptides, antibodies, polynucleotides and/or agonists or antagonists of the present invention are used in one or more of the applications described herein, as they may apply to veterinary medicine.

[0529] In another specific embodiment, polypeptides, antibodies, polynucleotides and/or agonists or antagonists of the present invention are used as a means of blocking various aspects of immune responses to foreign agents or self. Examples of diseases or conditions in which blocking of certain aspects of immune responses may be desired include autoimmune disorders such as lupus, and arthritis, as well as immunoresponsiveness to skin allergies, inflammation, bowel disease, injury and diseases/disorders associated with pathogens.

[0530] In another specific embodiment, polypeptides, antibodies, polynucleotides and/or agonists or antagonists of the present invention are used as a therapy for preventing the B cell proliferation and Ig secretion associated with autoimmune diseases such as idiopathic thrombocytopenic purpura, systemic lupus erythematosus and multiple sclerosis.

[0531] In another specific embodiment, polypeptides, antibodies, polynucleotides and/or agonists or antagonists of the present invention are used as a inhibitor of B and/or T cell migration in endothelial cells. This activity disrupts tissue architecture or cognate responses and is useful, for example in disrupting immune responses, and blocking sepsis.

[0532] In another specific embodiment, polypeptides, antibodies, polynucleotides and/or agonists or antagonists of the present invention are used as a therapy for chronic hypergammaglobulinemia evident in such diseases as monoclonal gammopathy of undetermined significance (MGUS), Waldenstrom's disease, related idiopathic monoclonal gammopathies, and plasmacytomas.

[0533] In another specific embodiment, polypeptides, antibodies, polynucleotides and/or agonists or antagonists of the present invention may be employed for instance to inhibit polypeptide chemotaxis and activation of macrophages and their precursors, and of neutrophils, basophils, B lymphocytes and some T-cell subsets, e.g., activated and CD8 cytotoxic T cells and natural killer cells, in certain autoimmune and chronic inflammatory and infective diseases. Examples of autoimmune diseases are described herein and include multiple sclerosis, and insulin-dependent diabetes.

[0534] The polypeptides, antibodies, polynucleotides and/or agonists or antagonists of the present invention may also be employed to treat idiopathic hyper-eosinophilic syndrome by, for example, preventing eosinophil production and migration.

[0535] In another specific embodiment, polypeptides, antibodies, polynucleotides and/or agonists or antagonists of the present invention are used to enhance or inhibit complement mediated cell lysis.

[0536] In another specific embodiment, polypeptides, antibodies, polynucleotides and/or agonists or antagonists of the present invention are used to enhance or inhibit antibody dependent cellular cytotoxicity.

[0537] In another specific embodiment, polypeptides, antibodies, polynucleotides and/or agonists or antagonists of the present invention may also be employed for treating atherosclerosis, for example, by preventing monocyte infiltration in the artery wall.

[0538] In another specific embodiment, polypeptides, antibodies, polynucleotides and/or agonists or antagonists of the present invention may be employed to treat adult respiratory distress syndrome (ARDS).

[0539] In another specific embodiment, polypeptides, antibodies, polynucleotides and/or agonists or antagonists of the present invention may be useful for stimulating wound and tissue repair, stimulating angiogenesis, and/or stimulating the repair of vascular or lymphatic diseases or disorders. Additionally, agonists and antagonists of the invention may be used to stimulate the regeneration of mucosal surfaces.

[0540] In a specific embodiment, polynucleotides or polypeptides, and/or agonists thereof are used to diagnose, prognose, treat, and/or prevent a disorder characterized by primary or acquired immunodeficiency, deficient serum immunoglobulin production, recurrent infections, and/or immune system dysfunction. Moreover, polynucleotides or polypeptides, and/or agonists thereof may be used to treat or prevent infections of the joints, bones, skin, and/or parotid glands, blood-borne infections (e.g., sepsis, meningitis, septic arthritis, and/or osteomyelitis), autoimmune diseases (e.g., those disclosed herein), inflammatory disorders, and malignancies, and/or any disease or disorder or condition associated with these infections, diseases, disorders and/or malignancies) including, but not limited to, CVID, other primary immune deficiencies, HIV disease, CLL, recurrent bronchitis, sinusitis, otitis media, conjunctivitis, pneumonia, hepatitis, meningitis, herpes zoster (e.g., severe herpes zoster), and/or pneumocystis carnii. Other diseases and disorders that may be prevented, diagnosed, prognosed, and/or treated with polynucleotides or polypeptides, and/or agonists of the present invention include, but are not limited to, HIV infection, HTLV-BLV infection, lymphopenia, phagocyte bactericidal dysfunction anemia, thrombocytopenia, and hemoglobinuria.

[0541] In another embodiment, polynucleotides, polypeptides, antibodies, and/or agonists or antagonists of the present invention are used to treat, and/or diagnose an individual having common variable immunodeficiency disease (“CVID”; also known as “acquired agammaglobulinemia” and “acquired hypogammaglobulinemia”) or a subset of this disease.

[0542] In a specific embodiment, polynucleotides, polypeptides, antibodies, and/or agonists or antagonists of the present invention may be used to diagnose, prognose, prevent, and/or treat cancers or neoplasms including immune cell or immune tissue-related cancers or neoplasms. Examples of cancers or neoplasms that may be prevented, diagnosed, or treated by polynucleotides, polypeptides, antibodies, and/or agonists or antagonists of the present invention include, but are not limited to, acute myelogenous leukemia, chronic myelogenous leukemia, Hodgkin's disease, non-Hodgkin's lymphoma, acute lymphocytic anemia (ALL) Chronic lymphocyte leukemia, plasmacytomas, multiple myeloma, Burkitt's lymphoma, EBV-transformed diseases, and/or diseases and disorders described in the section entitled “Hyperproliferative Disorders” elsewhere herein.

[0543] In another specific embodiment, polypeptides, antibodies, polynucleotides and/or agonists or antagonists of the present invention are used as a therapy for decreasing cellular proliferation of Large B-cell Lymphomas.

[0544] In another specific embodiment, polypeptides, antibodies, polynucleotides and/or agonists or antagonists of the present invention are used as a means of decreasing the involvement of B cells and Ig associated with Chronic Myelogenous Leukemia.

[0545] In specific embodiments, the compositions of the invention are used as an agent to boost immunoresponsiveness among B cell immunodeficient individuals, such as, for example, an individual who has undergone a partial or complete splenectomy.

[0546] Antagonists of the invention include, for example, binding and/or inhibitory antibodies, antisense nucleic acids, ribozymes or soluble forms of the polypeptides of the present invention (e.g., Fc fusion protein; see, e.g., Example 9). Agonists of the invention include, for example, binding or stimulatory antibodies, and soluble forms of the polypeptides (e.g., Fc fusion proteins; see, e.g., Example 9). polypeptides, antibodies, polynucleotides and/or agonists or antagonists of the present invention may be employed in a composition with a pharmaceutically acceptable carrier, e.g., as described herein.

[0547] In another embodiment, polypeptides, antibodies, polynucleotides and/or agonists or antagonists of the present invention are administered to an animal (including, but not limited to, those listed above, and also including transgenic animals) incapable of producing functional endogenous antibody molecules or having an otherwise compromised endogenous immune system, but which is capable of producing human immunoglobulin molecules by means of a reconstituted or partially reconstituted immune system from another animal (see, e.g., published PCT Application Nos. WO98/24893, WO/9634096, WO/9633735, and WO/9110741). Administration of polypeptides, antibodies, polynucleotides and/or agonists or antagonists of the present invention to such animals is useful for the generation of monoclonal antibodies against the polypeptides, antibodies, polynucleotides and/or agonists or antagonists of the present invention.

[0548] Blood-Related Disorders

[0549] The polynucleotides, polypeptides, antibodies, and/or agonists or antagonists of the present invention may be used to modulate hemostatic (the stopping of bleeding) or thrombolytic (clot dissolving) activity. For example, by increasing hemostatic or thrombolytic activity, polynucleotides or polypeptides, and/or agonists or antagonists of the present invention could be used to treat or prevent blood coagulation diseases, disorders, and/or conditions (e.g., afibrinogenemia, factor deficiencies, hemophilia), blood platelet diseases, disorders, and/or conditions (e.g., thrombocytopenia), or wounds resulting from trauma, surgery, or other causes. Alternatively, polynucleotides, polypeptides, antibodies, and/or agonists or antagonists of the present invention that can decrease hemostatic or thrombolytic activity could be used to inhibit or dissolve clotting. These molecules could be important in the treatment or prevention of heart attacks (infarction), strokes, or scarring.

[0550] In specific embodiments, the polynucleotides, polypeptides, antibodies, and/or agonists or antagonists of the present invention may be used to prevent, diagnose, prognose, and/or treat thrombosis, arterial thrombosis, venous thrombosis, thromboembolism, pulmonary embolism, atherosclerosis, myocardial infarction, transient ischemic attack, unstable angina. In specific embodiments, the polynucleotides, polypeptides, antibodies, and/or agonists or antagonists of the present invention may be used for the prevention of occulsion of saphenous grafts, for reducing the risk of periprocedural thrombosis as might accompany angioplasty procedures, for reducing the risk of stroke in patients with atrial fibrillation including nonrheumatic atrial fibrillation, for reducing the risk of embolism associated with mechanical heart valves and or mitral valves disease. Other uses for the polynucleotides, polypeptides, antibodies, and/or agonists or antagonists of the present invention, include, but are not limited to, the prevention of occlusions in extrcorporeal devices (e.g., intravascular canulas, vascular access shunts in hemodialysis patients, hemodialysis machines, and cardiopulmonary bypass machines).

[0551] In another embodiment, a polypeptide of the invention, or polynucleotides, antibodies, agonists, or antagonists corresponding to that polypeptide, may be used to prevent, diagnose, prognose, and/or treat diseases and disorders of the blood and/or blood forming organs associated with the tissue(s) in which the polypeptide of the invention is expressed, including one, two, three, four, five, or more tissues disclosed in Table 1A, column 8 (Tissue Distribution Library Code).

[0552] The polynucleotides, polypeptides, antibodies, and/or agonists or antagonists of the present invention may be used to modulate hematopoietic activity (the formation of blood cells). For example, the polynucleotides, polypeptides, antibodies, and/or agonists or antagonists of the present invention may be used to increase the quantity of all or subsets of blood cells, such as, for example, erythrocytes, lymphocytes (B or T cells), myeloid cells (e.g., basophils, eosinophils, neutrophils, mast cells, macrophages) and platelets. The ability to decrease the quantity of blood cells or subsets of blood cells may be useful in the prevention, detection, diagnosis and/or treatment of anemias and leukopenias described below. Alternatively, the polynucleotides, polypeptides, antibodies, and/or agonists or antagonists of the present invention may be used to decrease the quantity of all or subsets of blood cells, such as, for example, erythrocytes, lymphocytes (B or T cells), myeloid cells (e.g., basophils, eosinophils, neutrophils, mast cells, macrophages) and platelets. The ability to decrease the quantity of blood cells or subsets of blood cells may be useful in the prevention, detection, diagnosis and/or treatment of leukocytoses, such as, for example eosinophilia.

[0553] The polynucleotides, polypeptides, antibodies, and/or agonists or antagonists of the present invention may be used to prevent, treat, or diagnose blood dyscrasia.

[0554] Anemias are conditions in which the number of red blood cells or amount of hemoglobin (the protein that carries oxygen) in them is below normal. Anemia may be caused by excessive bleeding, decreased red blood cell production, or increased red blood cell destruction (hemolysis). The polynucleotides, polypeptides, antibodies, and/or agonists or antagonists of the present invention may be useful in treating, preventing, and/or diagnosing anemias. Anemias that may be treated prevented or diagnosed by the polynucleotides, polypeptides, antibodies, and/or agonists or antagonists of the present invention include iron deficiency anemia, hypochromic anemia, microcytic anemia, chlorosis, hereditary siderob;astic anemia, idiopathic acquired sideroblastic anemia, red cell aplasia, megaloblastic anemia (e.g., pernicious anemia, (vitamin B12 deficiency) and folic acid deficiency anemia), aplastic anemia, hemolytic anemias (e.g., autoimmune helolytic anemia, microangiopathic hemolytic anemia, and paroxysmal nocturnal hemoglobinuria). The polynucleotides, polypeptides, antibodies, and/or agonists or antagonists of the present invention may be useful in treating, preventing, and/or diagnosing anemias associated with diseases including but not limited to, anemias associated with systemic lupus erythematosus, cancers, lymphomas, chronic renal disease, and enlarged spleens. The polynucleotides, polypeptides, antibodies, and/or agonists or antagonists of the present invention may be useful in treating, preventing, and/or diagnosing anemias arising from drug treatments such as anemias associated with methyldopa, dapsone, and/or sulfadrugs. Additionally, rhe polynucleotides, polypeptides, antibodies, and/or agonists or antagonists of the present invention may be useful in treating, preventing, and/or diagnosing anemias associated with abnormal red blood cell architecture including but not limited to, hereditary spherocytosis, hereditary elliptocytosis, glucose-6-phosphate dehydrogenase deficiency, and sickle cell anemia.

[0555] The polynucleotides, polypeptides, antibodies, and/or agonists or antagonists of the present invention may be useful in treating, preventing, and/or diagnosing hemoglobin abnormalities, (e.g., those associated with sickle cell anemia, hemoglobin C disease, hemoglobin S-C disease, and hemoglobin E disease). Additionally, the polynucleotides, polypeptides, antibodies, and/or agonists or antagonists of the present invention may be useful in diagnosing, prognosing, preventing, and/or treating thalassemias, including, but not limited to major and minor forms of alpha-thalassemia and beta-thalassemia.

[0556] In another embodiment, the polynucleotides, polypeptides, antibodies, and/or agonists or antagonists of the present invention may be useful in diagnosing, prognosing, preventing, and/or treating bleeding disorders including, but not limited to, thrombocytopenia (e.g., idiopathic thrombocytopenic purpura, and thrombotic thrombocytopenic purpura), Von Willebrand's disease, hereditary platelet disorders (e.g., storage pool disease such as Chediak-Higashi and Hermansky-Pudlak syndromes, thromboxane A2 dysfunction, thromboasthenia, and Bernard-Soulier syndrome), hemolytic-uremic syndrome, hemophelias such as hemophelia A or Factor VII deficiency and Christmas disease or Factor IX deficiency, Hereditary Hemorhhagic Telangiectsia, also known as Rendu-Osler-Weber syndrome, allergic purpura (Henoch Schonlein purpura) and disseminated intravascular coagulation.

[0557] The effect of the polynucleotides, polypeptides, antibodies, and/or agonists or antagonists of the present invention on the clotting time of blood may be monitored using any of the clotting tests known in the art including, but not limited to, whole blood partial thromboplastin time (PTT), the activated partial thromboplastin time (aPTT), the activated clotting time (ACT), the recalcified activated clotting time, or the Lee-White Clotting time.

[0558] Several diseases and a variety of drugs can cause platelet dysfunction. Thus, in a specific embodiment, the polynucleotides, polypeptides, antibodies, and/or agonists or antagonists of the present invention may be useful in diagnosing, prognosing, preventing, and/or treating acquired platelet dysfunction such as platelet dysfunction accompanying kidney failure, leukemia, multiple myeloma, cirrhosis of the liver, and systemic lupus erythematosus as well as platelet dysfunction associated with drug treatments, including treatment with aspirin, ticlopidine, nonsteroidal anti-inflammatory drugs (used for arthritis, pain, and sprains), and penicillin in high doses.

[0559] In another embodiment, the polynucleotides, polypeptides, antibodies, and/or agonists or antagonists of the present invention may be useful in diagnosing, prognosing, preventing, and/or treating diseases and disorders characterized by or associated with increased or decreased numbers of white blood cells. Leukopenia occurs when the number of white blood cells decreases below normal. Leukopenias include, but are not limited to, neutropenia and lymphocytopenia. An increase in the number of white blood cells compared to normal is known as leukocytosis. The body generates increased numbers of white blood cells during infection. Thus, leukocytosis may simply be a normal physiological parameter that reflects infection. Alternatively, leukocytosis may be an indicator of injury or other disease such as cancer. Leokocytoses, include but are not limited to, eosinophilia, and accumulations of macrophages. In specific embodiments, the polynucleotides, polypeptides, antibodies, and/or agonists or antagonists of the present invention may be useful in diagnosing, prognosing, preventing, and/or treating leukopenia. In other specific embodiments, the polynucleotides, polypeptides, antibodies, and/or agonists or antagonists of the present invention may be useful in diagnosing, prognosing, preventing, and/or treating leukocytosis.

[0560] Leukopenia may be a generalized decreased in all types of white blood cells, or may be a specific depletion of particular types of white blood cells. Thus, in specific embodiments, the polynucleotides, polypeptides, antibodies, and/or agonists or antagonists of the present invention may be useful in diagnosing, prognosing, preventing, and/or treating decreases in neutrophil numbers, known as neutropenia. Neutropenias that may be diagnosed, prognosed, prevented, and/or treated by the polynucleotides, polypeptides, antibodies, and/or agonists or antagonists of the present invention include, but are not limited to, infantile genetic agranulocytosis, familial neutropenia, cyclic neutropenia, neutropenias resulting from or associated with dietary deficiencies (e.g., vitamin B 12 deficiency or folic acid deficiency), neutropenias resulting from or associated with drug treatments (e.g., antibiotic regimens such as penicillin treatment, sulfonamide treatment, anticoagulant treatment, anticonvulsant drugs, anti-thyroid drugs, and cancer chemotherapy), and neutropenias resulting from increased neutrophil destruction that may occur in association with some bacterial or viral infections, allergic disorders, autoimmune diseases, conditions in which an individual has an enlarged spleen (e.g., Felty syndrome, malaria and sarcoidosis), and some drug treatment regimens.

[0561] The polynucleotides, polypeptides, antibodies, and/or agonists or antagonists of the present invention may be useful in diagnosing, prognosing, preventing, and/or treating lymphocytopenias (decreased numbers of B and/or T lymphocytes), including, but not limited lymphocytopenias resulting from or associated with stress, drug treatments (e.g., drug treatment with corticosteroids, cancer chemotherapies, and/or radiation therapies), AIDS infection and/or other diseases such as, for example, cancer, rheumatoid arthritis, systemic lupus erythematosus, chronic infections, some viral infections and/or hereditary disorders (e.g., DiGeorge syndrome, Wiskott-Aldrich Syndome, severe combined immunodeficiency, ataxia telangiectsia).

[0562] The polynucleotides, polypeptides, antibodies, and/or agonists or antagonists of the present invention may be useful in diagnosing, prognosing, preventing, and/or treating diseases and disorders associated with macrophage numbers and/or macrophage function including, but not limited to, Gaucher's disease, Niemann-Pick disease, Letterer-Siwe disease and Hand-Schuller-Christian disease.

[0563] In another embodiment, the polynucleotides, polypeptides, antibodies, and/or agonists or antagonists of the present invention may be useful in diagnosing, prognosing, preventing, and/or treating diseases and disorders associated with eosinophil numbers and/or eosinophil function including, but not limited to, idiopathic hypereosinophilic syndrome, eosinophilia-myalgia syndrome, and Hand-Schuller-Christian disease.

[0564] In yet another embodiment, the polynucleotides, polypeptides, antibodies, and/or agonists or antagonists of the present invention may be useful in diagnosing, prognosing, preventing, and/or treating leukemias and lymphomas including, but not limited to, acute lymphocytic (lymphpblastic) leukemia (ALL), acute myeloid (myelocytic, myelogenous, myeloblastic, or myelomonocytic) leukemia, chronic lymphocytic leukemia (e.g., B cell leukemias, T cell leukemias, Sezary syndrome, and Hairy cell leukenia), chronic myelocytic (myeloid, myelogenous, or granulocytic) leukemia, Hodgkin's lymphoma, non-hodgkin's lymphoma, Burkitt's lymphoma, and mycosis fungoides.

[0565] In other embodiments, the polynucleotides, polypeptides, antibodies, and/or agonists or antagonists of the present invention may be useful in diagnosing, prognosing, preventing, and/or treating diseases and disorders of plasma cells including, but not limited to, plasma cell dyscrasias, monoclonal gammaopathies, monoclonal gammopathies of undetermined significance, multiple myeloma, macroglobulinemia, Waldenstrom's macroglobulinemia, cryoglobulinemia, and Raynaud's phenomenon.

[0566] In other embodiments, the polynucleotides, polypeptides, antibodies, and/or agonists or antagonists of the present invention may be useful in treating, preventing, and/or diagnosing myeloproliferative disorders, including but not limited to, polycythemia vera, relative polycythemia, secondary polycythemia, myelofibrosis, acute myelofibrosis, agnogenic myelod metaplasia, thrombocythemia, (including both primary and seconday thrombocythemia) and chronic myelocytic leukemia.

[0567] In other embodiments, the polynucleotides, polypeptides, antibodies, and/or agonists or antagonists of the present invention may be useful as a treatment prior to surgery, to increase blood cell production.

[0568] In other embodiments, the polynucleotides, polypeptides, antibodies, and/or agonists or antagonists of the present invention may be useful as an agent to enhance the migration, phagocytosis, superoxide production, antibody dependent cellular cytotoxicity of neutrophils, eosionophils and macrophages.

[0569] In other embodiments, the polynucleotides, polypeptides, antibodies, and/or agonists or antagonists of the present invention may be useful as an agent to increase the number of stem cells in circulation prior to stem cells pheresis. In another specific embodiment, the polynucleotides, polypeptides, antibodies, and/or agonists or antagonists of the present invention may be useful as an agent to increase the number of stem cells in circulation prior to platelet pheresis.

[0570] In other embodiments, the polynucleotides, polypeptides, antibodies, and/or agonists or antagonists of the present invention may be useful as an agent to increase cytokine production.

[0571] In other embodiments, the polynucleotides, polypeptides, antibodies, and/or agonists or antagonists of the present invention may be useful in preventing, diagnosing, and/or treating primary hematopoietic disorders.

[0572] Hyperproliferative Disorders

[0573] In certain embodiments, polynucleotides or polypeptides, or agonists or antagonists of the present invention can be used to treat or detect hyperproliferative disorders, including neoplasms. Polynucleotides or polypeptides, or agonists or antagonists of the present invention may inhibit the proliferation of the disorder through direct or indirect interactions. Alternatively, Polynucleotides or polypeptides, or agonists or antagonists of the present invention may proliferate other cells which can inhibit the hyperproliferative disorder.

[0574] For example, by increasing an immune response, particularly increasing antigenic qualities of the hyperproliferative disorder or by proliferating, differentiating, or mobilizing T-cells, hyperproliferative disorders can be treated. This immune response may be increased by either enhancing an existing immune response, or by initiating a new immune response. Alternatively, decreasing an immune response may also be a method of treating hyperproliferative disorders, such as a chemotherapeutic agent.

[0575] Examples of hyperproliferative disorders that can be treated or detected by polynucleotides or polypeptides, or agonists or antagonists of the present invention include, but are not limited to neoplasms located in the: colon, abdomen, bone, breast, digestive system, liver, pancreas, peritoneum, endocrine glands (adrenal, parathyroid, pituitary, testicles, ovary, thymus, thyroid), eye, head and neck, nervous (central and peripheral), lymphatic system, pelvis, skin, soft tissue, spleen, thorax, and urogenital tract.

[0576] Similarly, other hyperproliferative disorders can also be treated or detected by polynucleotides or polypeptides, or agonists or antagonists of the present invention. Examples of such hyperproliferative disorders include, but are not limited to: Acute Childhood Lymphoblastic Leukemia, Acute Lymphoblastic Leukemia, Acute Lymphocytic Leukemia, Acute Myeloid Leukemia, Adrenocortical Carcinoma, Adult (Primary) Hepatocellular Cancer, Adult (Primary) Liver Cancer, Adult Acute Lymphocytic Leukemia, Adult Acute Myeloid Leukemia, Adult Hodgkin's Disease, Adult Hodgkin's Lymphoma, Adult Lymphocytic Leukemia, Adult Non-Hodgkin's Lymphoma, Adult Primary Liver Cancer, Adult Soft Tissue Sarcoma, AIDS-Related Lymphoma, AIDS-Related Malignancies, Anal Cancer, Astrocytoma, Bile Duct Cancer, Bladder Cancer, Bone Cancer, Brain Stem Glioma, Brain Tumors, Breast Cancer, Cancer of the Renal Pelvis and Ureter, Central Nervous System (Primary) Lymphoma, Central Nervous System Lymphoma, Cerebellar Astrocytoma, Cerebral Astrocytoma, Cervical Cancer, Childhood (Primary) Hepatocellular Cancer, Childhood (Primary) Liver Cancer, Childhood Acute Lymphoblastic Leukemia, Childhood Acute Myeloid Leukemia, Childhood Brain Stem Glioma, Childhood Cerebellar Astrocytoma, Childhood Cerebral Astrocytoma, Childhood Extracranial Germ Cell Tumors, Childhood Hodgkin's Disease, Childhood Hodgkin's Lymphoma, Childhood Hypothalamic and Visual Pathway Glioma, Childhood Lymphoblastic Leukemia, Childhood Medulloblastoma, Childhood Non-Hodgkin's Lymphoma, Childhood Pineal and Supratentorial Primitive Neuroectodermal Tumors, Childhood Primary Liver Cancer, Childhood Rhabdomyosarcoma, Childhood Soft Tissue Sarcoma, Childhood Visual Pathway and Hypothalamic Glioma, Chronic Lymphocytic Leukemia, Chronic Myelogenous Leukemia, Colon Cancer, Cutaneous T-Cell Lymphoma, Endocrine Pancreas Islet Cell Carcinoma, Endometrial Cancer, Ependymoma, Epithelial Cancer, Esophageal Cancer, Ewing's Sarcoma and Related Tumors, Exocrine Pancreatic Cancer, Extracranial Germ Cell Tumor, Extragonadal Germ Cell Tumor, Extrahepatic Bile Duct Cancer, Eye Cancer, Female Breast Cancer, Gaucher's Disease, Gallbladder Cancer, Gastric Cancer, Gastrointestinal Carcinoid Tumor, Gastrointestinal Tumors, Germ Cell Tumors, Gestational Trophoblastic Tumor, Hairy Cell Leukemia, Head and Neck Cancer, Hepatocellular Cancer, Hodgkin's Disease, Hodgkin's Lymphoma, Hypergammaglobulinemia, Hypopharyngeal Cancer, Intestinal Cancers, Intraocular Melanoma, Islet Cell Carcinoma, Islet Cell Pancreatic Cancer, Kaposi's Sarcoma, Kidney Cancer, Laryngeal Cancer, Lip and Oral Cavity Cancer, Liver Cancer, Lung Cancer, Lymphoproliferative Disorders, Macroglobulinemia, Male Breast Cancer, Malignant Mesothelioma, Malignant Thymoma, Medulloblastoma, Melanoma, Mesothelioma, Metastatic Occult Primary Squamous Neck Cancer, Metastatic Primary Squamous Neck Cancer, Metastatic Squamous Neck Cancer, Multiple Myeloma, Multiple Myeloma/Plasma Cell Neoplasm, Myelodysplastic Syndrome, Myelogenous Leukemia, Myeloid Leukemia, Myeloproliferative Disorders, Nasal Cavity and Paranasal Sinus Cancer, Nasopharyngeal Cancer, Neuroblastoma, Non-Hodgkin's Lymphoma During Pregnancy, Nonmelanoma Skin Cancer, Non-Small Cell Lung Cancer, Occult Primary Metastatic Squamous Neck Cancer, Oropharyngeal Cancer, Osteo-/Malignant Fibrous Sarcoma, Osteosarcoma/Malignant Fibrous Histiocytoma, Osteosarcoma/Malignant Fibrous Histiocytoma of Bone, Ovarian Epithelial Cancer, Ovarian Germ Cell Tumor, Ovarian Low Malignant Potential Tumor, Pancreatic Cancer, Paraproteinemias, Purpura, Parathyroid Cancer, Penile Cancer, Pheochromocytoma, Pituitary Tumor, Plasma Cell Neoplasm/Multiple Myeloma, Primary Central Nervous System Lymphoma, Primary Liver Cancer, Prostate Cancer, Rectal Cancer, Renal Cell Cancer, Renal Pelvis and Ureter Cancer, Retinoblastoma, Rhabdomyosarcoma, Salivary Gland Cancer, Sarcoidosis Sarcomas, Sezary Syndrome, Skin Cancer, Small Cell Lung Cancer, Small Intestine Cancer, Soft Tissue Sarcoma, Squamous Neck Cancer, Stomach Cancer, Supratentorial Primitive Neuroectodermal and Pineal Tumors, T-Cell Lymphoma, Testicular Cancer, Thymoma, Thyroid Cancer, Transitional Cell Cancer of the Renal Pelvis and Ureter, Transitional Renal Pelvis and Ureter Cancer, Trophoblastic Tumors, Ureter and Renal Pelvis Cell Cancer, Urethral Cancer, Uterine Cancer, Uterine Sarcoma, Vaginal Cancer, Visual Pathway and Hypothalamic Glioma, Vulvar Cancer, Waldenstrom's Macroglobulinemia, Wilms' Tumor, and any other hyperproliferative disease, besides neoplasia, located in an organ system listed above.

[0577] In another preferred embodiment, polynucleotides or polypeptides, or agonists or antagonists of the present invention are used to diagnose, prognose, prevent, and/or treat premalignant conditions and to prevent progression to a neoplastic or malignant state, including but not limited to those disorders described above. Such uses are indicated in conditions known or suspected of preceding progression to neoplasia or cancer, in particular, where non-neoplastic cell growth consisting of hyperplasia, metaplasia, or most particularly, dysplasia has occurred (for review of such abnormal growth conditions, see Robbins and Angell, 1976, Basic Pathology, 2d Ed., W. B. Saunders Co., Philadelphia, pp. 68-79.)

[0578] Hyperplasia is a form of controlled cell proliferation, involving an increase in cell number in a tissue or organ, without significant alteration in structure or function. Hyperplastic disorders which can be diagnosed, prognosed, prevented, and/or treated with compositions of the invention (including polynucleotides, polypeptides, agonists or antagonists) include, but are not limited to, angiofollicular mediastinal lymph node hyperplasia, angiolymphoid hyperplasia with eosinophilia, atypical melanocytic hyperplasia, basal cell hyperplasia, benign giant lymph node hyperplasia, cementum hyperplasia, congenital adrenal hyperplasia, congenital sebaceous hyperplasia, cystic hyperplasia, cystic hyperplasia of the breast, denture hyperplasia, ductal hyperplasia, endometrial hyperplasia, fibromuscular hyperplasia, focal epithelial hyperplasia, gingival hyperplasia, inflammatory fibrous hyperplasia, inflammatory papillary hyperplasia, intravascular papillary endothelial hyperplasia, nodular hyperplasia of prostate, nodular regenerative hyperplasia, pseudoepitheliomatous hyperplasia, senile sebaceous hyperplasia, and verrucous hyperplasia.

[0579] Metaplasia is a form of controlled cell growth in which one type of adult or fully differentiated cell substitutes for another type of adult cell. Metaplastic disorders which can be diagnosed, prognosed, prevented, and/or treated with compositions of the invention (including polynucleotides, polypeptides, agonists or antagonists) include, but are not limited to, agnogenic myeloid metaplasia, apocrine metaplasia, atypical metaplasia, autoparenchymatous metaplasia, connective tissue metaplasia, epithelial metaplasia, intestinal metaplasia, metaplastic anemia, metaplastic ossification, metaplastic polyps, myeloid metaplasia, primary myeloid metaplasia, secondary myeloid metaplasia, squamous metaplasia, squamous metaplasia of amnion, and symptomatic myeloid metaplasia.

[0580] Dysplasia is frequently a forerunner of cancer, and is found mainly in the epithelia; it is the most disorderly form of non-neoplastic cell growth, involving a loss in individual cell uniformity and in the architectural orientation of cells. Dysplastic cells often have abnormally large, deeply stained nuclei, and exhibit pleomorphism. Dysplasia characteristically occurs where there exists chronic irritation or inflammation. Dysplastic disorders which can be diagnosed, prognosed, prevented, and/or treated with compositions of the invention (including polynucleotides, polypeptides, agonists or antagonists) include, but are not limited to, anhidrotic ectodermal dysplasia, anterofacial dysplasia, asphyxiating thoracic dysplasia, atriodigital dysplasia, bronchopulmonary dysplasia, cerebral dysplasia, cervical dysplasia, chondroectodermal dysplasia, cleidocranial dysplasia, congenital ectodermal dysplasia, craniodiaphysial dysplasia, craniocarpotarsal dysplasia, craniometaphysial dysplasia, dentin dysplasia, diaphysial dysplasia, ectodermal dysplasia, enamel dysplasia, encephalo-ophthalmic dysplasia, dysplasia epiphysialis hemimelia, dysplasia epiphysialis multiplex, dysplasia epiphysialis punctata, epithelial dysplasia, faciodigitogenital dysplasia, familial fibrous dysplasia of jaws, familial white folded dysplasia, fibromuscular dysplasia, fibrous dysplasia of bone, florid osseous dysplasia, hereditary renal-retinal dysplasia, hidrotic ectodermal dysplasia, hypohidrotic ectodermal dysplasia, lymphopenic thymic dysplasia, mammary dysplasia, mandibulofacial dysplasia, metaphysial dysplasia, Mondini dysplasia, monostotic fibrous dysplasia, mucoepithelial dysplasia, multiple epiphysial dysplasia, oculoauriculovertebral dysplasia, oculodentodigital dysplasia, oculovertebral dysplasia, odontogenic dysplasia, ophthalmomandibulomelic dysplasia, periapical cemental dysplasia, polyostotic fibrous dysplasia, pseudoachondroplastic spondyloepiphysial dysplasia, retinal dysplasia, septo-optic dysplasia, spondyloepiphysial dysplasia, and ventriculoradial dysplasia.

[0581] Additional pre-neoplastic disorders which can be diagnosed, prognosed, prevented, and/or treated with compositions of the invention (including polynucleotides, polypeptides, agonists or antagonists) include, but are not limited to, benign dysproliferative disorders (e.g., benign tumors, fibrocystic conditions, tissue hypertrophy, intestinal polyps, colon polyps, and esophageal dysplasia), leukoplakia, keratoses, Bowen's disease, Farmer's Skin, solar cheilitis, and solar keratosis.

[0582] In another embodiment, a polypeptide of the invention, or polynucleotides, antibodies, agonists, or antagonists corresponding to that polypeptide, may be used to diagnose and/or prognose disorders associated with the tissue(s) in which the polypeptide of the invention is expressed, including one, two, three, four, five, or more tissues disclosed in Table 1A, column 8 (Tissue Distribution Library Code).

[0583] In another embodiment, polynucleotides, polypeptides, antibodies, and/or agonists or antagonists of the present invention conjugated to a toxin or a radioactive isotope, as described herein, may be used to treat cancers and neoplasms, including, but not limited to those described herein. In a further preferred embodiment, polynucleotides, polypeptides, antibodies, and/or agonists or antagonists of the present invention conjugated to a toxin or a radioactive isotope, as described herein, may be used to treat acute myelogenous leukemia.

[0584] Additionally, polynucleotides, polypeptides, and/or agonists or antagonists of the invention may affect apoptosis, and therefore, would be useful in treating a number of diseases associated with increased cell survival or the inhibition of apoptosis. For example, diseases associated with increased cell survival or the inhibition of apoptosis that could be diagnosed, prognosed, prevented, and/or treated by polynucleotides, polypeptides, and/or agonists or antagonists of the invention, include cancers (such as follicular lymphomas, carcinomas with p53 mutations, and hormone-dependent tumors, including, but not limited to colon cancer, cardiac tumors, pancreatic cancer, melanoma, retinoblastoma, glioblastoma, lung cancer, intestinal cancer, testicular cancer, stomach cancer, neuroblastoma, myxoma, myoma, lymphoma, endothelioma, osteoblastoma, osteoclastoma, osteosarcoma, chondrosarcoma, adenoma, breast cancer, prostate cancer, Kaposi's sarcoma and ovarian cancer); autoimmune disorders such as, multiple sclerosis, Sjogren's syndrome, Hashimoto's thyroiditis, biliary cirrhosis, Behcet's disease, Crohn's disease, polymyositis, systemic lupus erythematosus and immune-related glomerulonephritis and rheumatoid arthritis) and viral infections (such as herpes viruses, pox viruses and adenoviruses), inflammation, graft v. host disease, acute graft rejection, and chronic graft rejection.

[0585] In preferred embodiments, polynucleotides, polypeptides, and/or agonists or antagonists of the invention are used to inhibit growth, progression, and/or metastasis of cancers, in particular those listed above.

[0586] Additional diseases or conditions associated with increased cell survival that could be diagnosed, prognosed, prevented, and/or treated by polynucleotides, polypeptides, and/or agonists or antagonists of the invention, include, but are not limited to, progression, and/or metastases of malignancies and related disorders such as leukemia (including acute leukemias (e.g., acute lymphocytic leukemia, acute myelocytic leukemia (including myeloblastic, promyelocytic, myelomonocytic, monocytic, and erythroleukemia)) and chronic leukemias (e.g., chronic myelocytic (granulocytic) leukemia and chronic lymphocytic leukemia)), polycythemia vera, lymphomas (e.g., Hodgkin's disease and non-Hodgkin's disease), multiple myeloma, Waldenstrom's macroglobulinemia, heavy chain disease, and solid tumors including, but not limited to, sarcomas and carcinomas such as fibrosarcoma, myxosarcoma, liposarcoma, chondrosarcoma, osteogenic sarcoma, chordoma, angiosarcoma, endotheliosarcoma, lymphangiosarcoma, lymphangioendotheliosarcoma, synovioma, mesothelioma, Ewing's tumor, leiomyosarcoma, rhabdomyosarcoma, colon carcinoma, pancreatic cancer, breast cancer, ovarian cancer, prostate cancer, squamous cell carcinoma, basal cell carcinoma, adenocarcinoma, sweat gland carcinoma, sebaceous gland carcinoma, papillary carcinoma, papillary adenocarcinomas, cystadenocarcinoma, medullary carcinoma, bronchogenic carcinoma, renal cell carcinoma, hepatoma, bile duct carcinoma, choriocarcinoma, seminoma, embryonal carcinoma, Wilm's tumor, cervical cancer, testicular tumor, lung carcinoma, small cell lung carcinoma, bladder carcinoma, epithelial carcinoma, glioma, astrocytoma, medulloblastoma, craniopharyngioma, ependymoma, pinealoma, emangioblastoma, acoustic neuroma, oligodendroglioma, menangioma, melanoma, neuroblastoma, and retinoblastoma.

[0587] Diseases associated with increased apoptosis that could be diagnosed, prognosed, prevented, and/or treated by polynucleotides, polypeptides, and/or agonists or antagonists of the invention, include AIDS; neurodegenerative disorders (such as Alzheimer's disease, Parkinson's disease, amyotrophic lateral sclerosis, retinitis pigmentosa, cerebellar degeneration and brain tumor or prior associated disease); autoimmune disorders (such as, multiple sclerosis, Sjogren's syndrome, Hashimoto's thyroiditis, biliary cirrhosis, Behcet's disease, Crohn's disease, polymyositis, systemic lupus erythematosus and immune-related glomerulonephritis and rheumatoid arthritis) myelodysplastic syndromes (such as aplastic anemia), graft v. host disease, ischemic injury (such as that caused by myocardial infarction, stroke and reperfusion injury), liver injury (e.g., hepatitis related liver injury, ischemia/reperfusion injury, cholestosis (bile duct injury) and liver cancer); toxin-induced liver disease (such as that caused by alcohol), septic shock, cachexia and anorexia.

[0588] Hyperproliferative diseases and/or disorders that could be diagnosed, prognosed, prevented, and/or treated by polynucleotides, polypeptides, and/or agonists or antagonists of the invention, include, but are not limited to, neoplasms located in the liver, abdomen, bone, breast, digestive system, pancreas, peritoneum, endocrine glands (adrenal, parathyroid, pituitary, testicles, ovary, thymus, thyroid), eye, head and neck, nervous system (central and peripheral), lymphatic system, pelvis, skin, soft tissue, spleen, thorax, and urogenital tract.

[0589] Similarly, other hyperproliferative disorders can also be diagnosed, prognosed, prevented, and/or treated by polynucleotides, polypeptides, and/or agonists or antagonists of the invention. Examples of such hyperproliferative disorders include, but are not limited to: hypergammaglobulinemia, lymphoproliferative disorders, paraproteinemias, purpura, sarcoidosis, Sezary Syndrome, Waldenstron's macroglobulinemia, Gaucher's Disease, histiocytosis, and any other hyperproliferative disease, besides neoplasia, located in an organ system listed above.

[0590] Another preferred embodiment utilizes polynucleotides of the present invention to inhibit aberrant cellular division, by gene therapy using the present invention, and/or protein fusions or fragments thereof.

[0591] Thus, the present invention provides a method for treating cell proliferative disorders by inserting into an abnormally proliferating cell a polynucleotide of the present invention, wherein said polynucleotide represses said expression.

[0592] Another embodiment of the present invention provides a method of treating cell-proliferative disorders in individuals comprising administration of one or more active gene copies of the present invention to an abnormally proliferating cell or cells. In a preferred embodiment, polynucleotides of the present invention is a DNA construct comprising a recombinant expression vector effective in expressing a DNA sequence encoding said polynucleotides. In another preferred embodiment of the present invention, the DNA construct encoding the poynucleotides of the present invention is inserted into cells to be treated utilizing a retrovirus, or more preferably an adenoviral vector (See G J. Nabel, et. al., PNAS 1999 96: 324-326, which is hereby incorporated by reference). In a most preferred embodiment, the viral vector is defective and will not transform non-proliferating cells, only proliferating cells. Moreover, in a preferred embodiment, the polynucleotides of the present invention inserted into proliferating cells either alone, or in combination with or fused to other polynucleotides, can then be modulated via an external stimulus (i.e. magnetic, specific small molecule, chemical, or drug administration, etc.), which acts upon the promoter upstream of said polynucleotides to induce expression of the encoded protein product. As such the beneficial therapeutic affect of the present invention may be expressly modulated (i.e. to increase, decrease, or inhibit expression of the present invention) based upon said external stimulus.

[0593] Polynucleotides of the present invention may be useful in repressing expression of oncogenic genes or antigens. By “repressing expression of the oncogenic genes” is intended the suppression of the transcription of the gene, the degradation of the gene transcript (pre-message RNA), the inhibition of splicing, the destruction of the messenger RNA, the prevention of the post-translational modifications of the protein, the destruction of the protein, or the inhibition of the normal function of the protein.

[0594] For local administration to abnormally proliferating cells, polynucleotides of the present invention may be administered by any method known to those of skill in the art including, but not limited to transfection, electroporation, microinjection of cells, or in vehicles such as liposomes, lipofectin, or as naked polynucleotides, or any other method described throughout the specification. The polynucleotide of the present invention may be delivered by known gene delivery systems such as, but not limited to, retroviral vectors (Gilboa, J. Virology 44:845 (1982); Hocke, Nature 320:275 (1986); Wilson, et al., Proc. Natl. Acad. Sci. U.S.A. 85:3014), vaccinia virus system (Chakrabarty et al., Mol. Cell Biol. 5:3403 (1985) or other efficient DNA delivery systems (Yates et al., Nature 313:812 (1985)) known to those skilled in the art. These references are exemplary only and are hereby incorporated by reference. In order to specifically deliver or transfect cells which are abnormally proliferating and spare non-dividing cells, it is preferable to utilize a retrovirus, or adenoviral (as described in the art and elsewhere herein) delivery system known to those of skill in the art. Since host DNA replication is required for retroviral DNA to integrate and the retrovirus will be unable to self replicate due to the lack of the retrovirus genes needed for its life cycle. Utilizing such a retroviral delivery system for polynucleotides of the present invention will target said gene and constructs to abnormally proliferating cells and will spare the non-dividing normal cells.

[0595] The polynucleotides of the present invention may be delivered directly to cell proliferative disorder/disease sites in internal organs, body cavities and the like by use of imaging devices used to guide an injecting needle directly to the disease site. The polynucleotides of the present invention may also be administered to disease sites at the time of surgical intervention.

[0596] By “cell proliferative disease” is meant any human or animal disease or disorder, affecting any one or any combination of organs, cavities, or body parts, which is characterized by single or multiple local abnormal proliferations of cells, groups of cells, or tissues, whether benign or malignant.

[0597] Any amount of the polynucleotides of the present invention may be administered as long as it has a biologically inhibiting effect on the proliferation of the treated cells. Moreover, it is possible to administer more than one of the polynucleotide of the present invention simultaneously to the same site. By “biologically inhibiting” is meant partial or total growth inhibition as well as decreases in the rate of proliferation or growth of the cells. The biologically inhibitory dose may be determined by assessing the effects of the polynucleotides of the present invention on target malignant or abnormally proliferating cell growth in tissue culture, tumor growth in animals and cell cultures, or any other method known to one of ordinary skill in the art.

[0598] The present invention is further directed to antibody-based therapies which involve administering of anti-polypeptides and anti-polynucleotide antibodies to a mammalian, preferably human, patient for treating one or more of the described disorders. Methods for producing anti-polypeptides and anti-polynucleotide antibodies polyclonal and monoclonal antibodies are described in detail elsewhere herein. Such antibodies may be provided in pharmaceutically acceptable compositions as known in the art or as described herein.

[0599] A summary of the ways in which the antibodies of the present invention may be used therapeutically includes binding polynucleotides or polypeptides of the present invention locally or systemically in the body or by direct cytotoxicity of the antibody, e.g. as mediated by complement (CDC) or by effector cells (ADCC). Some of these approaches are described in more detail below. Armed with the teachings provided herein, one of ordinary skill in the art will know how to use the antibodies of the present invention for diagnostic, monitoring or therapeutic purposes without undue experimentation.

[0600] In particular, the antibodies, fragments and derivatives of the present invention are useful for treating a subject having or developing cell proliferative and/or differentiation disorders as described herein. Such treatment comprises administering a single or multiple doses of the antibody, or a fragment, derivative, or a conjugate thereof.

[0601] The antibodies of this invention may be advantageously utilized in combination with other monoclonal or chimeric antibodies, or with lymphokines or hematopoietic growth factors, for example., which serve to increase the number or activity of effector cells which interact with the antibodies.

[0602] It is preferred to use high affinity and/or potent in vivo inhibiting and/or neutralizing antibodies against polypeptides or polynucleotides of the present invention, fragments or regions thereof, for both immunoassays directed to and therapy of disorders related to polynucleotides or polypeptides, including fragements thereof, of the present invention. Such antibodies, fragments, or regions, will preferably have an affinity for polynucleotides or polypeptides, including fragements thereof. Preferred binding affinities include those with a dissociation constant or Kd less than 5×10⁻⁶M, 10⁻⁶M, 5×10⁻⁷M, 10⁻⁷M, 5×10⁻⁸M, 10⁻⁸M, 5×10⁻⁹M, 10⁻⁹M, 5×10⁻¹⁰M, 10⁻¹⁰M, 5×10⁻¹¹M, 10⁻¹¹M, 5×10⁻¹²M, 10⁻¹²M, 5×10⁻¹³M, 10⁻¹³M, 5×10⁻¹⁴M, 10⁻¹⁴M, 5×10⁻¹⁵M, 10⁻¹⁵M.

[0603] Moreover, polypeptides of the present invention are useful in inhibiting the angiogenesis of proliferative cells or tissues, either alone, as a protein fusion, or in combination with other polypeptides directly or indirectly, as described elsewhere herein. In a most preferred embodiment, said anti-angiogenesis effect may be achieved indirectly, for example, through the inhibition of hematopoietic, tumor-specific cells, such as tumor-associated macrophages (See Joseph IB, et al. J. Natl Cancer Inst, 90(21):1648-53 (1998), which is hereby incorporated by reference). Antibodies directed to polypeptides or polynucleotides of the present invention may also result in inhibition of angiogenesis directly, or indirectly (See Witte L, et al., Cancer Metastasis Rev. 17(2):155-61 (1998), which is hereby incorporated by reference)).

[0604] Polypeptides, including protein fusions, of the present invention, or fragments thereof may be useful in inhibiting proliferative cells or tissues through the induction of apoptosis. Said polypeptides may act either directly, or indirectly to induce apoptosis of proliferative cells and tissues, for example in the activation of a death-domain receptor, such as tumor necrosis factor (TNF) receptor-1, CD95 (Fas/APO-1), TNF-receptor-related apoptosis-mediated protein (TRAMP) and TNF-related apoptosis-inducing ligand (TRAIL) receptor-1 and -2 (See Schulze-Osthoff K, et.al., Eur J. Biochem 254(3):439-59 (1998), which is hereby incorporated by reference). Moreover, in another preferred embodiment of the present invention, said polypeptides may induce apoptosis through other mechanisms, such as in the activation of other proteins which will activate apoptosis, or through stimulating the expression of said proteins, either alone or in combination with small molecule drugs or adjuviants, such as apoptonin, galectins, thioredoxins, anti-inflammatory proteins (See for example, Mutat Res 400(1-2):447-55 (1998), Med Hypotheses.50(5):423-33 (1998), Chem Biol Interact. Apr 24;111-112:23-34 (1998), J. Mol Med.76(6):402-12 (1998), Int J. Tissue React; 20(1):3-15 (1998), which are all hereby incorporated by reference).

[0605] Polypeptides, including protein fusions to, or fragments thereof, of the present invention are useful in inhibiting the metastasis of proliferative cells or tissues. Inhibition may occur as a direct result of administering polypeptides, or antibodies directed to said polypeptides as described elsewere herein, or indirectly, such as activating the expression of proteins known to inhibit metastasis, for example alpha 4 integrins, (See, e.g., Curr Top Microbiol Immunol 1998;231:125-41, which is hereby incorporated by reference). Such thereapeutic affects of the present invention may be achieved either alone, or in combination with small molecule drugs or adjuvants.

[0606] In another embodiment, the invention provides a method of delivering compositions containing the polypeptides of the invention (e.g., compositions containing polypeptides or polypeptide antibodes associated with heterologous polypeptides, heterologous nucleic acids, toxins, or prodrugs) to targeted cells expressing the polypeptide of the present invention. Polypeptides or polypeptide antibodes of the invention may be associated with with heterologous polypeptides, heterologous nucleic acids, toxins, or prodrugs via hydrophobic, hydrophilic, ionic and/or covalent interactions.

[0607] Polypeptides, protein fusions to, or fragments thereof, of the present invention are useful in enhancing the immunogenicity and/or antigenicity of proliferating cells or tissues, either directly, such as would occur if the polypeptides of the present invention ‘vaccinated’ the immune response to respond to proliferative antigens and immunogens, or indirectly, such as in activating the expression of proteins known to enhance the immune response (e.g. chemokines), to said antigens and immunogens.

[0608] Renal Disorders

[0609] Polynucleotides, polypeptides, antibodies, and/or agonists or antagonists of the present invention, may be used to treat, prevent, diagnose, and/or prognose disorders of the renal system. Renal disorders which can be diagnosed, prognosed, prevented, and/or treated with compositions of the invention include, but are not limited to, kidney failure, nephritis, blood vessel disorders of kidney, metabolic and congenital kidney disorders, urinary disorders of the kidney, autoimmune disorders, sclerosis and necrosis, electrolyte imbalance, and kidney cancers.

[0610] Kidney diseases which can be diagnosed, prognosed, prevented, and/or treated with compositions of the invention include, but are not limited to, acute kidney failure, chronic kidney failure, atheroembolic renal failure, end-stage renal disease, inflammatory diseases of the kidney (e.g., acute glomerulonephritis, postinfectious glomerulonephritis, rapidly progressive glomerulonephritis, nephrotic syndrome, membranous glomerulonephritis, familial nephrotic syndrome, membranoproliferative glomerulonephritis I and II, mesangial proliferative glomerulonephritis, chronic glomerulonephritis, acute tubulointerstitial nephritis, chronic tubulointerstitial nephritis, acute post-streptococcal glomerulonephritis (PSGN), pyelonephritis, lupus nephritis, chronic nephritis, interstitial nephritis, and post-streptococcal glomerulonephritis), blood vessel disorders of the kidneys (e.g., kidney infarction, atheroembolic kidney disease, cortical necrosis, malignant nephrosclerosis, renal vein thrombosis, renal underperfusion, renal retinopathy, renal ischemia-reperfusion, renal artery embolism, and renal artery stenosis), and kidney disorders resulting form urinary tract disease (e.g., pyelonephritis, hydronephrosis, urolithiasis (renal lithiasis, nephrolithiasis), reflux nephropathy, urinary tract infections, urinary retention, and acute or chronic unilateral obstructive uropathy.)

[0611] In addition, compositions of the invention can be used to diagnose, prognose, prevent, and/or treat metabolic and congenital disorders of the kidney (e.g., uremia, renal amyloidosis, renal osteodystrophy, renal tubular acidosis, renal glycosuria, nephrogenic diabetes insipidus, cystinuria, Fanconi's syndrome, renal fibrocystic osteosis (renal rickets), Hartnup disease, Bartter's syndrome, Liddle's syndrome, polycystic kidney disease, medullary cystic disease, medullary sponge kidney, Alport's syndrome, nail-patella syndrome, congenital nephrotic syndrome, CRUSH syndrome, horseshoe kidney, diabetic nephropathy, nephrogenic diabetes insipidus, analgesic nephropathy, kidney stones, and membranous nephropathy), and autoimmune disorders of the kidney (e.g., systemic lupus erythematosus (SLE), Goodpasture syndrome, IgA nephropathy, and IgM mesangial proliferative glomerulonephritis).

[0612] Compositions of the invention can also be used to diagnose, prognose, prevent, and/or treat sclerotic or necrotic disorders of the kidney (e.g., glomerulosclerosis, diabetic nephropathy, focal segmental glomerulosclerosis (FSGS), necrotizing glomerulonephritis, and renal papillary necrosis), cancers of the kidney (e.g., nephroma, hypemephroma, nephroblastoma, renal cell cancer, transitional cell cancer, renal adenocarcinoma, squamous cell cancer, and Wilm's tumor), and electrolyte imbalances (e.g., nephrocalcinosis, pyuria, edema, hydronephritis, proteinuria, hyponatremia, hypernatremia, hypokalemia, hyperkalemia, hypocalcemia, hypercalcemia, hypophosphatemia, and hyperphosphatemia).

[0613] Polypeptides may be administered using any method known in the art, including, but not limited to, direct needle injection at the delivery site, intravenous injection, topical administration, catheter infusion, biolistic injectors, particle accelerators, gelfoam sponge depots, other commercially available depot materials, osmotic pumps, oral or suppositorial solid pharmaceutical formulations, decanting or topical applications during surgery, aerosol delivery. Such methods are known in the art. Polypeptides may be administered as part of a Therapeutic, described in more detail below. Methods of delivering polynucleotides are described in more detail herein.

[0614] Cardiovascular Disorders

[0615] Polynucleotides or polypeptides, or agonists or antagonists of the present invention, may be used to treat, prevent, diagnose, and/or prognose cardiovascular disorders, including, but not limited to, peripheral artery disease, such as limb ischemia.

[0616] Cardiovascular disorders include, but are not limited to, cardiovascular abnormalities, such as arterio-arterial fistula, arteriovenous fistula, cerebral arteriovenous malformations, congenital heart defects, pulmonary atresia, and Scimitar Syndrome. Congenital heart defects include, but are not limited to, aortic coarctation, cor triatriatum, coronary vessel anomalies, crisscross heart, dextrocardia, patent ductus arteriosus, Ebstein's anomaly, Eisenmenger complex, hypoplastic left heart syndrome, levocardia, tetralogy of fallot, transposition of great vessels, double outlet right ventricle, tricuspid atresia, persistent truncus arteriosus, and heart septal defects, such as aortopulmonary septal defect, endocardial cushion defects, Lutembacher's Syndrome, trilogy of Fallot, ventricular heart septal defects.

[0617] Cardiovascular disorders also include, but are not limited to, heart disease, such as arrhythmias, carcinoid heart disease, high cardiac output, low cardiac output, cardiac tamponade, endocarditis (including bacterial), heart aneurysm, cardiac arrest, congestive heart failure, congestive cardiomyopathy, paroxysmal dyspnea, cardiac edema, heart hypertrophy, congestive cardiomyopathy, left ventricular hypertrophy, right ventricular hypertrophy, post-infarction heart rupture, ventricular septal rupture, heart valve diseases, myocardial diseases, myocardial ischemia, pericardial effusion, pericarditis (including constrictive and tuberculous), pneumopericardium, postpericardiotomy syndrome, pulmonary heart disease, rheumatic heart disease, ventricular dysfunction, hyperemia, cardiovascular pregnancy complications, Scimitar Syndrome, cardiovascular syphilis, and cardiovascular tuberculosis.

[0618] Arrhythmias include, but are not limited to, sinus arrhythmia, atrial fibrillation, atrial flutter, bradycardia, extrasystole, Adams-Stokes Syndrome, bundle-branch block, sinoatrial block, long QT syndrome, parasystole, Lown-Ganong-Levine Syndrome, Mahaim-type pre-excitation syndrome, Wolff-Parkinson-White syndrome, sick sinus syndrome, tachycardias, and ventricular fibrillation. Tachycardias include paroxysmal tachycardia, supraventricular tachycardia, accelerated idioventricular rhythm, atrioventricular nodal reentry tachycardia, ectopic atrial tachycardia, ectopic junctional tachycardia, sinoatrial nodal reentry tachycardia, sinus tachycardia, Torsades de Pointes, and ventricular tachycardia.

[0619] Heart valve diseases include, but are not limited to, aortic valve insufficiency, aortic valve stenosis, hear murmurs, aortic valve prolapse, mitral valve prolapse, tricuspid valve prolapse, mitral valve insufficiency, mitral valve stenosis, pulmonary atresia, pulmonary valve insufficiency, pulmonary valve stenosis, tricuspid atresia, tricuspid valve insufficiency, and tricuspid valve stenosis.

[0620] Myocardial diseases include, but are not limited to, alcoholic cardiomyopathy, congestive cardiomyopathy, hypertrophic cardiomyopathy, aortic subvalvular stenosis, pulmonary subvalvular stenosis, restrictive cardiomyopathy, Chagas cardiomyopathy, endocardial fibroelastosis, endomyocardial fibrosis, Kearns Syndrome, myocardial reperfusion injury, and myocarditis.

[0621] Myocardial ischemias include, but are not limited to, coronary disease, such as angina pectoris, coronary aneurysm, coronary arteriosclerosis, coronary thrombosis, coronary vasospasm, myocardial infarction and myocardial stunning.

[0622] Cardiovascular diseases also include vascular diseases such as aneurysms, angiodysplasia, angiomatosis, bacillary angiomatosis, Hippel-Lindau Disease, Klippel-Trenaunay-Weber Syndrome, Sturge-Weber Syndrome, angioneurotic edema, aortic diseases, Takayasu's Arteritis, aortitis, Leriche's Syndrome, arterial occlusive diseases, arteritis, enarteritis, polyarteritis nodosa, cerebrovascular disorders, diabetic angiopathies, diabetic retinopathy, embolisms, thrombosis, erythromelalgia, hemorrhoids, hepatic veno-occlusive disease, hypertension, hypotension, ischemia, peripheral vascular diseases, phlebitis, pulmonary veno-occlusive disease, Raynaud's disease, CREST syndrome, retinal vein occlusion, Scimitar syndrome, superior vena cava syndrome, telangiectasia, atacia telangiectasia, hereditary hemorrhagic telangiectasia, varicocele, varicose veins, varicose ulcer, vasculitis, and venous insufficiency.

[0623] Aneurysms include, but are not limited to, dissecting aneurysms, false aneurysms, infected aneurysms, ruptured aneurysms, aortic aneurysms, cerebral aneurysms, coronary aneurysms, heart aneurysms, and iliac aneurysms.

[0624] Arterial occlusive diseases include, but are not limited to, arteriosclerosis, intermittent claudication, carotid stenosis, fibromuscular dysplasias, mesenteric vascular occlusion, Moyamoya disease, renal artery obstruction, retinal artery occlusion, and thromboangiitis obliterans.

[0625] Cerebrovascular disorders include, but are not limited to, carotid artery diseases, cerebral amyloid angiopathy, cerebral aneurysm, cerebral anoxia, cerebral arteriosclerosis, cerebral arteriovenous malformation, cerebral artery diseases, cerebral embolism and thrombosis, carotid artery thrombosis, sinus thrombosis, Wallenberg's syndrome, cerebral hemorrhage, epidural hematoma, subdural hematoma, subaraxhnoid hemorrhage, cerebral infarction, cerebral ischemia (including transient), subclavian steal syndrome, periventricular leukomalacia, vascular headache, cluster headache, migraine, and vertebrobasilar insufficiency.

[0626] Embolisms include, but are not limited to, air embolisms, amniotic fluid embolisms, cholesterol embolisms, blue toe syndrome, fat embolisms, pulmonary embolisms, and thromoboembolisms. Thrombosis include, but are not limited to, coronary thrombosis, hepatic vein thrombosis, retinal vein occlusion, carotid artery thrombosis, sinus thrombosis, Wallenberg's syndrome, and thrombophlebitis.

[0627] Ischemic disorders include, but are not limited to, cerebral ischemia, ischemic colitis, compartment syndromes, anterior compartment syndrome, myocardial ischemia, reperfusion injuries, and peripheral limb ischemia. Vasculitis includes, but is not limited to, aortitis, arteritis, Behcet's Syndrome, Churg-Strauss Syndrome, mucocutaneous lymph node syndrome, thromboangiitis obliterans, hypersensitivity vasculitis, Schoenlein-Henoch purpura, allergic cutaneous vasculitis, and Wegener's granulomatosis.

[0628] Polypeptides may be administered using any method known in the art, including, but not limited to, direct needle injection at the delivery site, intravenous injection, topical administration, catheter infusion, biolistic injectors, particle accelerators, gelfoam sponge depots, other commercially available depot materials, osmotic pumps, oral or suppositorial solid pharmaceutical formulations, decanting or topical applications during surgery, aerosol delivery. Such methods are known in the art. Polypeptides may be administered as part of a Therapeutic, described in more detail below. Methods of delivering polynucleotides are described in more detail herein.

[0629] Respiratory Disorders

[0630] Polynucleotides or polypeptides, or agonists or antagonists of the present invention may be used to treat, prevent, diagnose, and/or prognose diseases and/or disorders of the respiratory system.

[0631] Diseases and disorders of the respiratory system include, but are not limited to, nasal vestibulitis, nonallergic rhinitis (e.g., acute rhinitis, chronic rhinitis, atrophic rhinitis, vasomotor rhinitis), nasal polyps, and sinusitis, juvenile angiofibromas, cancer of the nose and juvenile papillomas, vocal cord polyps, nodules (singer's nodules), contact ulcers, vocal cord paralysis, laryngoceles, pharyngitis (e.g., viral and bacterial), tonsillitis, tonsillar cellulitis, parapharyngeal abscess, laryngitis, laryngoceles, and throat cancers (e.g., cancer of the nasopharynx, tonsil cancer, larynx cancer), lung cancer (e.g., squamous cell carcinoma, small cell (oat cell) carcinoma, large cell carcinoma, and adenocarcinoma), allergic disorders (eosinophilic pneumonia, hypersensitivity pneumonitis (e.g., extrinsic allergic alveolitis, allergic interstitial pneumonitis, organic dust pneumoconiosis, allergic bronchopulmonary aspergillosis, asthma, Wegener's granulomatosis (granulomatous vasculitis), Goodpasture's syndrome)), pneumonia (e.g., bacterial pneumonia (e.g., Streptococcus pneumoniae (pneumoncoccal pneumonia), Staphylococcus aureus (staphylococcal pneumonia), Gram-negative bacterial pneumonia (caused by, e.g., Klebsiella and Pseudomas spp.), Mycoplasma pneumoniae pneumonia, Hemophilus influenzae pneumonia, Legionella pneumophila (Legionnaires' disease), and Chlamydia psittaci (Psittacosis)), and viral pneumonia (e.g., influenza, chickenpox (varicella).

[0632] Additional diseases and disorders of the respiratory system include, but are not limited to bronchiolitis, polio (poliomyelitis), croup, respiratory syncytial viral infection, mumps, erythema infectiosum (fifth disease), roseola infantum, progressive rubella panencephalitis, german measles, and subacute sclerosing panencephalitis), fungal pneumonia (e.g., Histoplasmosis, Coccidioidomycosis, Blastomycosis, fungal infections in people with severely suppressed immune systems (e.g., cryptococcosis, caused by Cryptococcus neoformans; aspergillosis, caused by Aspergillus spp.; candidiasis, caused by Candida; and mucormycosis)), Pneumocystis carinii (pneumocystis pneumonia), atypical pneumonias (e.g., Mycoplasma and Chlamydia spp.), opportunistic infection pneumonia, nosocomial pneumonia, chemical pneumonitis, and aspiration pneumonia, pleural disorders (e.g., pleurisy, pleural effusion, and pneumothorax (e.g., simple spontaneous pneumothorax, complicated spontaneous pneumothorax, tension pneumothorax)), obstructive airway diseases (e.g., asthma, chronic obstructive pulmonary disease (COPD), emphysema, chronic or acute bronchitis), occupational lung diseases (e.g., silicosis, black lung (coal workers' pneumoconiosis), asbestosis, berylliosis, occupational asthsma, byssinosis, and benign pneumoconioses), Infiltrative Lung Disease (e.g., pulmonary fibrosis (e.g., fibrosing alveolitis, usual interstitial pneumonia), idiopathic pulmonary fibrosis, desquamative interstitial pneumonia, lymphoid interstitial pneumonia, histiocytosis X (e.g., Letterer-Siwe disease, Hand-Schüller-Christian disease, eosinophilic granuloma), idiopathic pulmonary hemosiderosis, sarcoidosis and pulmonary alveolar proteinosis), Acute respiratory distress syndrome (also called, e.g., adult respiratory distress syndrome), edema, pulmonary embolism, bronchitis (e.g., viral, bacterial), bronchiectasis, atelectasis, lung abscess (caused by, e.g., Staphylococcus aureus or Legionella pneumophila), and cystic fibrosis.

[0633] Anti-Angiogenesis Activity

[0634] The naturally occurring balance between endogenous stimulators and inhibitors of angiogenesis is one in which inhibitory influences predominate. Rastinejad et al., Cell 56:345-355 (1989). In those rare instances in which neovascularization occurs under normal physiological conditions, such as wound healing, organ regeneration, embryonic development, and female reproductive processes, angiogenesis is stringently regulated and spatially and temporally delimited. Under conditions of pathological angiogenesis such as that characterizing solid tumor growth, these regulatory controls fail. Unregulated angiogenesis becomes pathologic and sustains progression of many neoplastic and non-neoplastic diseases. A number of serious diseases are dominated by abnormal neovascularization including solid tumor growth and metastases, arthritis, some types of eye disorders, and psoriasis. See, e.g., reviews by Moses et al., Biotech. 9:630-634 (1991); Folkman et al., N. Engl. J. Med., 333:1757-1763 (1995); Auerbach et al., J. Microvasc. Res. 29:401-411 (1985); Folkinan, Advances in Cancer Research, eds. Klein and Weinhouse, Academic Press, New York, pp. 175-203 (1985); Patz, Am. J. Opthalmol. 94:715-743 (1982); and Folkman et al., Science 221:719-725 (1983). In a number of pathological conditions, the process of angiogenesis contributes to the disease state. For example, significant data have accumulated which suggest that the growth of solid tumors is dependent on angiogenesis. Folkman and Klagsbrun, Science 235:442-447 (1987).

[0635] The present invention provides for treatment of diseases or disorders associated with neovascularization by administration of the polynucleotides and/or polypeptides of the invention, as well as agonists or antagonists of the present invention. Malignant and metastatic conditions which can be treated with the polynucleotides and polypeptides, or agonists or antagonists of the invention include, but are not limited to, malignancies, solid tumors, and cancers described herein and otherwise known in the art (for a review of such disorders, see Fishman et al, Medicine, 2d Ed., J. B. Lippincott Co., Philadelphia (1985)).Thus, the present invention provides a method of treating an angiogenesis-related disease and/or disorder, comprising administering to an individual in need thereof a therapeutically effective amount of a polynucleotide, polypeptide, antagonist and/or agonist of the invention. For example, polynucleotides, polypeptides, antagonists and/or agonists may be utilized in a variety of additional methods in order to therapeutically treat a cancer or tumor. Cancers which may be treated with polynucleotides, polypeptides, antagonists and/or agonists include, but are not limited to solid tumors, including prostate, lung, breast, ovarian, stomach, pancreas, larynx, esophagus, testes, liver, parotid, biliary tract, colon, rectum, cervix, uterus, endometrium, kidney, bladder, thyroid cancer; primary tumors and metastases; melanomas; glioblastoma; Kaposi's sarcoma; leiomyosarcoma; non-small cell lung cancer; colorectal cancer; advanced malignancies; and blood born tumors such as leukemias. For example, polynucleotides, polypeptides, antagonists and/or agonists may be delivered topically, in order to treat cancers such as skin cancer, head and neck tumors, breast tumors, and Kaposi's sarcoma.

[0636] Within yet other aspects, polynucleotides, polypeptides, antagonists and/or agonists may be utilized to treat superficial forms of bladder cancer by, for example, intravesical administration. Polynucleotides, polypeptides, antagonists and/or agonists may be delivered directly into the tumor, or near the tumor site, via injection or a catheter. Of course, as the artisan of ordinary skill will appreciate, the appropriate mode of administration will vary according to the cancer to be treated. Other modes of delivery are discussed herein.

[0637] Polynucleotides, polypeptides, antagonists and/or agonists may be useful in treating other disorders, besides cancers, which involve angiogenesis. These disorders include, but are not limited to: benign tumors, for example hemangiomas, acoustic neuromas, neurofibromas, trachomas, and pyogenic granulomas; artheroscleric plaques; ocular angiogenic diseases, for example, diabetic retinopathy, retinopathy of prematurity, macular degeneration, corneal graft rejection, neovascular glaucoma, retrolental fibroplasia, rubeosis, retinoblastoma, uvietis and Pterygia (abnormal blood vessel growth) of the eye; rheumatoid arthritis; psoriasis; delayed wound healing; endometriosis; vasculogenesis; granulations; hypertrophic scars (keloids); nonunion fractures; scleroderma; trachoma; vascular adhesions; myocardial angiogenesis; coronary collaterals; cerebral collaterals; arteriovenous malformations; ischemic limb angiogenesis; Osler-Webber Syndrome; plaque neovascularization; telangiectasia; hemophiliac joints; angiofibroma; fibromuscular dysplasia; wound granulation; Crohn's disease; and atherosclerosis.

[0638] For example, within one aspect of the present invention methods are provided for treating hypertrophic scars and keloids, comprising the step of administering a polynucleotide, polypeptide, antagonist and/or agonist of the invention to a hypertrophic scar or keloid.

[0639] Within one embodiment of the present invention polynucleotides, polypeptides, antagonists and/or agonists of the invention are directly injected into a hypertrophic scar or keloid, in order to prevent the progression of these lesions. This therapy is of particular value in the prophylactic treatment of conditions which are known to result in the development of hypertrophic scars and keloids (e.g., burns), and is preferably initiated after the proliferative phase has had time to progress (approximately 14 days after the initial injury), but before hypertrophic scar or keloid development. As noted above, the present invention also provides methods for treating neovascular diseases of the eye, including for example, corneal neovascularization, neovascular glaucoma, proliferative diabetic retinopathy, retrolental fibroplasia and macular degeneration.

[0640] Moreover, Ocular disorders associated with neovascularization which can be treated with the polynucleotides and polypeptides of the present invention (including agonists and/or antagonists) include, but are not limited to: neovascular glaucoma, diabetic retinopathy, retinoblastoma, retrolental fibroplasia, uveitis, retinopathy of prematurity macular degeneration, corneal graft neovascularization, as well as other eye inflammatory diseases, ocular tumors and diseases associated with choroidal or iris neovascularization. See, e.g., reviews by Waltman et al., Am. J. Ophthal. 85:704-710 (1978) and Gartner et al., Surv. Ophthal. 22:291-312 (1978).

[0641] Thus, within one aspect of the present invention methods are provided for treating neovascular diseases of the eye such as corneal neovascularization (including corneal graft neovascularization), comprising the step of administering to a patient a therapeutically effective amount of a compound (as described above) to the cornea, such that the formation of blood vessels is inhibited. Briefly, the cornea is a tissue which normally lacks blood vessels. In certain pathological conditions however, capillaries may extend into the cornea from the pericorneal vascular plexus of the limbus. When the cornea becomes vascularized, it also becomes clouded, resulting in a decline in the patient's visual acuity. Visual loss may become complete if the cornea completely opacitates. A wide variety of disorders can result in corneal neovascularization, including for example, corneal infections (e.g., trachoma, herpes simplex keratitis, leishmaniasis and onchocerciasis), immunological processes (e.g., graft rejection and Stevens-Johnson's syndrome), alkali bums, trauma, inflammation (of any cause), toxic and nutritional deficiency states, and as a complication of wearing contact lenses.

[0642] Within particularly preferred embodiments of the invention, may be prepared for topical administration in saline (combined with any of the preservatives and antimicrobial agents commonly used in ocular preparations), and administered in eyedrop form. The solution or suspension may be prepared in its pure form and administered several times daily. Alternatively, anti-angiogenic compositions, prepared as described above, may also be administered directly to the cornea. Within preferred embodiments, the anti-angiogenic composition is prepared with a muco-adhesive polymer which binds to cornea. Within further embodiments, the anti-angiogenic factors or anti-angiogenic compositions may be utilized as an adjunct to conventional steroid therapy. Topical therapy may also be useful prophylactically in corneal lesions which are known to have a high probability of inducing an angiogenic response (such as chemical burns). In these instances the treatment, likely in combination with steroids, may be instituted immediately to help prevent subsequent complications.

[0643] Within other embodiments, the compounds described above may be injected directly into the corneal stroma by an ophthalmologist under microscopic guidance. The preferred site of injection may vary with the morphology of the individual lesion, but the goal of the administration would be to place the composition at the advancing front of the vasculature (i.e., interspersed between the blood vessels and the normal cornea). In most cases this would involve perilimbic corneal injection to “protect” the cornea from the advancing blood vessels. This method may also be utilized shortly after a corneal insult in order to prophylactically prevent corneal neovascularization. In this situation the material could be injected in the perilimbic cornea interspersed between the corneal lesion and its undesired potential limbic blood supply. Such methods may also be utilized in a similar fashion to prevent capillary invasion of transplanted corneas. In a sustained-release form injections might only be required 2-3 times per year. A steroid could also be added to the injection solution to reduce inflammation resulting from the injection itself.

[0644] Within another aspect of the present invention, methods are provided for treating neovascular glaucoma, comprising the step of administering to a patient a therapeutically effective amount of a polynucleotide, polypeptide, antagonist and/or agonist to the eye, such that the formation of blood vessels is inhibited. In one embodiment, the compound may be administered topically to the eye in order to treat early forms of neovascular glaucoma. Within other embodiments, the compound may be implanted by injection into the region of the anterior chamber angle. Within other embodiments, the compound may also be placed in any location such that the compound is continuously released into the aqueous humor. Within another aspect of the present invention, methods are provided for treating proliferative diabetic retinopathy, comprising the step of administering to a patient a therapeutically effective amount of a polynucleotide, polypeptide, antagonist and/or agonist to the eyes, such that the formation of blood vessels is inhibited.

[0645] Within particularly preferred embodiments of the invention, proliferative diabetic retinopathy may be treated by injection into the aqueous humor or the vitreous, in order to increase the local concentration of the polynucleotide, polypeptide, antagonist and/or agonist in the retina. Preferably, this treatment should be initiated prior to the acquisition of severe disease requiring photocoagulation.

[0646] Within another aspect of the present invention, methods are provided for treating retrolental fibroplasia, comprising the step of administering to a patient a therapeutically effective amount of a polynucleotide, polypeptide, antagonist and/or agonist to the eye, such that the formation of blood vessels is inhibited. The compound may be administered topically, via intravitreous injection and/or via intraocular implants.

[0647] Additionally, disorders which can be treated with the polynucleotides, polypeptides, agonists and/or agonists include, but are not limited to, hemangioma, arthritis, psoriasis, angiofibroma, atherosclerotic plaques, delayed wound healing, granulations, hemophilic joints, hypertrophic scars, nonunion fractures, Osler-Weber syndrome, pyogenic granuloma, scleroderma, trachoma, and vascular adhesions.

[0648] Moreover, disorders and/or states, which can be treated, prevented, diagnosed, and/or prognosed with the the polynucleotides, polypeptides, agonists and/or agonists of the invention include, but are not limited to, solid tumors, blood born tumors such as leukemias, tumor metastasis, Kaposi's sarcoma, benign tumors, for example hemangiomas, acoustic neuromas, neurofibromas, trachomas, and pyogenic granulomas, rheumatoid arthritis, psoriasis, ocular angiogenic diseases, for example, diabetic retinopathy, retinopathy of prematurity, macular degeneration, corneal graft rejection, neovascular glaucoma, retrolental fibroplasia, rubeosis, retinoblastoma, and uvietis, delayed wound healing, endometriosis, vascluogenesis, granulations, hypertrophic scars (keloids), nonunion fractures, scleroderma, trachoma, vascular adhesions, myocardial angiogenesis, coronary collaterals, cerebral collaterals, arteriovenous malformations, ischemic limb angiogenesis, Osler-Webber Syndrome, plaque neovascularization, telangiectasia, hemophiliac joints, angiofibroma fibromuscular dysplasia, wound granulation, Crohn's disease, atherosclerosis, birth control agent by preventing vascularization required for embryo implantation controlling menstruation, diseases that have angiogenesis as a pathologic consequence such as cat scratch disease (Rochele minalia quintosa), ulcers (Helicobacter pylori), Bartonellosis and bacillary angiomatosis.

[0649] In one aspect of the birth control method, an amount of the compound sufficient to block embryo implantation is administered before or after intercourse and fertilization have occurred, thus providing an effective method of birth control, possibly a “morning after” method. Polynucleotides, polypeptides, agonists and/or agonists may also be used in controlling menstruation or administered as either a peritoneal lavage fluid or for peritoneal implantation in the treatment of endometriosis.

[0650] Polynucleotides, polypeptides, agonists and/or agonists of the present invention may be incorporated into surgical sutures in order to prevent stitch granulomas.

[0651] Polynucleotides, polypeptides, agonists and/or agonists may be utilized in a wide variety of surgical procedures. For example, within one aspect of the present invention a compositions (in the form of, for example, a spray or film) may be utilized to coat or spray an area prior to removal of a tumor, in order to isolate normal surrounding tissues from malignant tissue, and/or to prevent the spread of disease to surrounding tissues. Within other aspects of the present invention, compositions (e.g., in the form of a spray) may be delivered via endoscopic procedures in order to coat tumors, or inhibit angiogenesis in a desired locale. Within yet other aspects of the present invention, surgical meshes which have been coated with anti-angiogenic compositions of the present invention may be utilized in any procedure wherein a surgical mesh might be utilized. For example, within one embodiment of the invention a surgical mesh laden with an anti-angiogenic composition may be utilized during abdominal cancer resection surgery (e.g., subsequent to colon resection) in order to provide support to the structure, and to release an amount of the anti-angiogenic factor.

[0652] Within further aspects of the present invention, methods are provided for treating tumor excision sites, comprising administering a polynucleotide, polypeptide, agonist and/or agonist to the resection margins of a tumor subsequent to excision, such that the local recurrence of cancer and the formation of new blood vessels at the site is inhibited. Within one embodiment of the invention, the anti-angiogenic compound is administered directly to the tumor excision site (e.g., applied by swabbing, brushing or otherwise coating the resection margins of the tumor with the anti-angiogenic compound). Alternatively, the anti-angiogenic compounds may be incorporated into known surgical pastes prior to administration. Within particularly preferred embodiments of the invention, the anti-angiogenic compounds are applied after hepatic resections for malignancy, and after neurosurgical operations.

[0653] Within one aspect of the present invention, polynucleotides, polypeptides, agonists and/or agonists may be administered to the resection margin of a wide variety of tumors, including for example, breast, colon, brain and hepatic tumors. For example, within one embodiment of the invention, anti-angiogenic compounds may be administered to the site of a neurological tumor subsequent to excision, such that the formation of new blood vessels at the site are inhibited.

[0654] The polynucleotides, polypeptides, agonists and/or agonists of the present invention may also be administered along with other anti-angiogenic factors. Representative examples of other anti-angiogenic factors include: Anti-Invasive Factor, retinoic acid and derivatives thereof, paclitaxel, Suramin, Tissue Inhibitor of Metalloproteinase-1, Tissue Inhibitor of Metalloproteinase-2, Plasminogen Activator Inhibitor-1, Plasminogen Activator Inhibitor-2, and various forms of the lighter “d group” transition metals.

[0655] Lighter “d group” transition metals include, for example, vanadium, molybdenum, tungsten, titanium, niobium, and tantalum species. Such transition metal species may form transition metal complexes. Suitable complexes of the above-mentioned transition metal species include oxo transition metal complexes.

[0656] Representative examples of vanadium complexes include oxo vanadium complexes such as vanadate and vanadyl complexes. Suitable vanadate complexes include metavanadate and orthovanadate complexes such as, for example, ammonium metavanadate, sodium metavanadate, and sodium orthovanadate. Suitable vanadyl complexes include, for example, vanadyl acetylacetonate and vanadyl sulfate including vanadyl sulfate hydrates such as vanadyl sulfate mono- and trihydrates.

[0657] Representative examples of tungsten and molybdenum complexes also include oxo complexes. Suitable oxo tungsten complexes include tungstate and tungsten oxide complexes. Suitable tungstate complexes include ammonium tungstate, calcium tungstate, sodium tungstate dihydrate, and tungstic acid. Suitable tungsten oxides include tungsten (IV) oxide and tungsten (VI) oxide. Suitable oxo molybdenum complexes include molybdate, molybdenum oxide, and molybdenyl complexes. Suitable molybdate complexes include ammonium molybdate and its hydrates, sodium molybdate and its hydrates, and potassium molybdate and its hydrates. Suitable molybdenum oxides include molybdenum (VI) oxide, molybdenum (VI) oxide, and molybdic acid. Suitable molybdenyl complexes include, for example, molybdenyl acetylacetonate. Other suitable tungsten and molybdenum complexes include hydroxo derivatives derived from, for example, glycerol, tartaric acid, and sugars.

[0658] A wide variety of other anti-angiogenic factors may also be utilized within the context of the present invention. Representative examples include platelet factor 4; protamine sulphate; sulphated chitin derivatives (prepared from queen crab shells), (Murata et al., Cancer Res. 51:22-26, 1991); Sulphated Polysaccharide Peptidoglycan Complex (SP-PG) (the function of this compound may be enhanced by the presence of steroids such as estrogen, and tamoxifen citrate); Staurosporine; modulators of matrix metabolism, including for example, proline analogs, cishydroxyproline, d,L-3,4-dehydroproline, Thiaproline, alpha,alpha-dipyridyl, aminopropionitrile fumarate; 4-propyl-5-(4-pyridinyl)-2(3H)-oxazolone; Methotrexate; Mitoxantrone; Heparin; Interferons; 2 Macroglobulin-serum; ChIMP-3 (Pavloff et al., J. Bio. Chem. 267:17321-17326, 1992); Chymostatin (Tomkinson et al., Biochem J. 286:475-480, 1992); Cyclodextrin Tetradecasulfate; Eponemycin; Camptothecin; Fumagillin (Ingber et al., Nature 348:555-557, 1990); Gold Sodium Thiomalate (“GST”; Matsubara and Ziff, J. Clin. Invest. 79:1440-1446, 1987); anticollagenase-serum; alpha2-antiplasmin (Holmes et al., J. Biol. Chem. 262(4):1659-1664, 1987); Bisantrene (National Cancer Institute); Lobenzarit disodium (N-(2)-carboxyphenyl-4-chloroanthronilic acid disodium or “CCA”; Takeuchi et al., Agents Actions 36:312-316, 1992); Thalidomide; Angostatic steroid; AGM-1470; carboxynaminolmidazole; and metalloproteinase inhibitors such as BB94.

[0659] Diseases at the Cellular Level

[0660] Diseases associated with increased cell survival or the inhibition of apoptosis that could be treated, prevented, diagnosed, and/or prognosed using polynucleotides or polypeptides, as well as antagonists or agonists of the present invention, include cancers (such as follicular lymphomas, carcinomas with p53 mutations, and hormone-dependent tumors, including, but not limited to colon cancer, cardiac tumors, pancreatic cancer, melanoma, retinoblastoma, glioblastoma, lung cancer, intestinal cancer, testicular cancer, stomach cancer, neuroblastoma, myxoma, myoma, lymphoma, endothelioma, osteoblastoma, osteoclastoma, osteosarcoma, chondrosarcoma, adenoma, breast cancer, prostate cancer, Kaposi's sarcoma and ovarian cancer); autoimmune disorders (such as, multiple sclerosis, Sjogren's syndrome, Hashimoto's thyroiditis, biliary cirrhosis, Behcet's disease, Crohn's disease, polymyositis, systemic lupus erythematosus and immune-related glomerulonephritis and rheumatoid arthritis) and viral infections (such as herpes viruses, pox viruses and adenoviruses), inflammation, graft v. host disease, acute graft rejection, and chronic graft rejection.

[0661] In preferred embodiments, polynucleotides, polypeptides, and/or antagonists of the invention are used to inhibit growth, progression, and/or metasis of cancers, in particular those listed above.

[0662] Additional diseases or conditions associated with increased cell survival that could be treated or detected by polynucleotides or polypeptides, or agonists or antagonists of the present invention include, but are not limited to, progression, and/or metastases of malignancies and related disorders such as leukemia (including acute leukemias (e.g., acute lymphocytic leukemia, acute myelocytic leukemia (including myeloblastic, promyelocytic, myelomonocytic, monocytic, and erythroleukemia)) and chronic leukemias (e.g., chronic myelocytic (granulocytic) leukemia and chronic lymphocytic leukemia)), polycythemia vera, lymphomas (e.g., Hodgkin's disease and non-Hodgkin's disease), multiple myeloma, Waldenstrom's macroglobulinemia, heavy chain disease, and solid tumors including, but not limited to, sarcomas and carcinomas such as fibrosarcoma, myxosarcoma, liposarcoma, chondrosarcoma, osteogenic sarcoma, chordoma, angiosarcoma, endotheliosarcoma, lymphangiosarcoma, lymphangioendotheliosarcoma, synovioma, mesothelioma, Ewing's tumor, leiomyosarcoma, rhabdomyosarcoma, colon carcinoma, pancreatic cancer, breast cancer, ovarian cancer, prostate cancer, squamous cell carcinoma, basal cell carcinoma, adenocarcinoma, sweat gland carcinoma, sebaceous gland carcinoma, papillary carcinoma, papillary adenocarcinomas, cystadenocarcinoma, medullary carcinoma, bronchogenic carcinoma, renal cell carcinoma, hepatoma, bile duct carcinoma, choriocarcinoma, seminoma, embryonal carcinoma, Wilm's tumor, cervical cancer, testicular tumor, lung carcinoma, small cell lung carcinoma, bladder carcinoma, epithelial carcinoma, glioma, astrocytoma, medulloblastoma, craniopharyngioma, ependymoma, pinealoma, hemangioblastoma, acoustic neuroma, oligodendroglioma, menangioma, melanoma, neuroblastoma, and retinoblastoma.

[0663] Diseases associated with increased apoptosis that could be treated, prevented, diagnosed, and/or prognesed using polynucleotides or polypeptides, as well as agonists or antagonists of the present invention, include, but are not limited to, AIDS; neurodegenerative disorders (such as Alzheimer's disease, Parkinson's disease, Amyotrophic lateral sclerosis, Retinitis pigmentosa, Cerebellar degeneration and brain tumor or prior associated disease); autoimmune disorders (such as, multiple sclerosis, Sjogren's syndrome, Hashimoto's thyroiditis, biliary cirrhosis, Behcet's disease, Crohn's disease, polymyositis, systemic lupus erythematosus and immune-related glomerulonephritis and rheumatoid arthritis) myelodysplastic syndromes (such as aplastic anemia), graft v. host disease, ischemic injury (such as that caused by myocardial infarction, stroke and reperfusion injury), liver injury (e.g., hepatitis related liver injury, ischemia/reperfusion injury, cholestosis (bile duct injury) and liver cancer); toxin-induced liver disease (such as that caused by alcohol), septic shock, cachexia and anorexia.

[0664] Wound Healing and Epithelial Cell Proliferation

[0665] In accordance with yet a further aspect of the present invention, there is provided a process for utilizing polynucleotides or polypeptides, as well as agonists or antagonists of the present invention, for therapeutic purposes, for example, to stimulate epithelial cell proliferation and basal keratinocytes for the purpose of wound healing, and to stimulate hair follicle production and healing of dermal wounds. Polynucleotides or polypeptides, as well as agonists or antagonists of the present invention, may be clinically useful in stimulating wound healing including surgical wounds, excisional wounds, deep wounds involving damage of the dermis and epidermis, eye tissue wounds, dental tissue wounds, oral cavity wounds, diabetic ulcers, dermal ulcers, cubitus ulcers, arterial ulcers, venous stasis ulcers, bums resulting from heat exposure or chemicals, and other abnormal wound healing conditions such as uremia, malnutrition, vitamin deficiencies and complications associated with systemic treatment with steroids, radiation therapy and antineoplastic drugs and antimetabolites. Polynucleotides or polypeptides, as well as agonists or antagonists of the present invention, could be used to promote dermal reestablishment subsequent to dermal loss

[0666] Polynucleotides or polypeptides, as well as agonists or antagonists of the present invention, could be used to increase the adherence of skin grafts to a wound bed and to stimulate re-epithelialization from the wound bed. The following are types of grafts that polynucleotides or polypeptides, agonists or antagonists of the present invention, could be used to increase adherence to a wound bed: autografts, artificial skin, allografts, autodermic graft, autoepdermic grafts, avacular grafts, Blair-Brown grafts, bone graft, brephoplastic grafts, cutis graft, delayed graft, dermic graft, epidermic graft, fascia graft, full thickness graft, heterologous graft, xenograft, homologous graft, hyperplastic graft, lamellar graft, mesh graft, mucosal graft, Ollier-Thiersch graft, omenpal graft, patch graft, pedicle graft, penetrating graft, split skin graft, thick split graft. Polynucleotides or polypeptides, as well as agonists or antagonists of the present invention, can be used to promote skin strength and to improve the appearance of aged skin.

[0667] It is believed that polynucleotides or polypeptides, as well as agonists or antagonists of the present invention, will also produce changes in hepatocyte proliferation, and epithelial cell proliferation in the lung, breast, pancreas, stomach, small intestine, and large intestine. Polynucleotides or polypeptides, as well as agonists or antagonists of the present invention, could promote proliferation of epithelial cells such as sebocytes, hair follicles, hepatocytes, type II pneumocytes, mucin-producing goblet cells, and other epithelial cells and their progenitors contained within the skin, lung, liver, and gastrointestinal tract. Polynucleotides or polypeptides, agonists or antagonists of the present invention, may promote proliferation of endothelial cells, keratinocytes, and basal keratinocytes.

[0668] Polynucleotides or polypeptides, as well as agonists or antagonists of the present invention, could also be used to reduce the side effects of gut toxicity that result from radiation, chemotherapy treatments or viral infections. Polynucleotides or polypeptides, as well as agonists or antagonists of the present invention, may have a cytoprotective effect on the small intestine mucosa. Polynucleotides or polypeptides, as well as agonists or antagonists of the present invention, may also stimulate healing of mucositis (mouth ulcers) that result from chemotherapy and viral infections.

[0669] Polynucleotides or polypeptides, as well as agonists or antagonists of the present invention, could further be used in full regeneration of skin in full and partial thickness skin defects, including burns, (i.e., repopulation of hair follicles, sweat glands, and sebaceous glands), treatment of other skin defects such as psoriasis. Polynucleotides or polypeptides, as well as agonists or antagonists of the present invention, could be used to treat epidermolysis bullosa, a defect in adherence of the epidermis to the underlying dermis which results in frequent, open and painful blisters by accelerating reepithelialization of these lesions. Polynucleotides or polypeptides, as well as agonists or antagonists of the present invention, could also be used to treat gastric and doudenal ulcers and help heal by scar formation of the mucosal lining and regeneration of glandular mucosa and duodenal mucosal lining more rapidly. Inflammatory bowel diseases, such as Crohn's disease and ulcerative colitis, are diseases which result in destruction of the mucosal surface of the small or large intestine, respectively. Thus, polynucleotides or polypeptides, as well as agonists or antagonists of the present invention, could be used to promote the resurfacing of the mucosal surface to aid more rapid healing and to prevent progression of inflammatory bowel disease. Treatment with polynucleotides or polypeptides, agonists or antagonists of the present invention, is expected to have a significant effect on the production of mucus throughout the gastrointestinal tract and could be used to protect the intestinal mucosa from injurious substances that are ingested or following surgery. Polynucleotides or polypeptides, as well as agonists or antagonists of the present invention, could be used to treat diseases associate with the under expression.

[0670] Moreover, polynucleotides or polypeptides, as well as agonists or antagonists of the present invention, could be used to prevent and heal damage to the lungs due to various pathological states. Polynucleotides or polypeptides, as well as agonists or antagonists of the present invention, which could stimulate proliferation and differentiation and promote the repair of alveoli and brochiolar epithelium to prevent or treat acute or chronic lung damage. For example, emphysema, which results in the progressive loss of aveoli, and inhalation injuries, i.e., resulting from smoke inhalation and bums, that cause necrosis of the bronchiolar epithelium and alveoli could be effectively treated using polynucleotides or polypeptides, agonists or antagonists of the present invention. Also, polynucleotides or polypeptides, as well as agonists or antagonists of the present invention, could be used to stimulate the proliferation of and differentiation of type II pneumocytes, which may help treat or prevent disease such as hyaline membrane diseases, such as infant respiratory distress syndrome and bronchopulmonary displasia, in premature infants.

[0671] Polynucleotides or polypeptides, as well as agonists or antagonists of the present invention, could stimulate the proliferation and differentiation of hepatocytes and, thus, could be used to alleviate or treat liver diseases and pathologies such as fulminant liver failure caused by cirrhosis, liver damage caused by viral hepatitis and toxic substances (i.e., acetaminophen, carbon tetraholoride and other hepatotoxins known in the art).

[0672] In addition, polynucleotides or polypeptides, as well as agonists or antagonists of the present invention, could be used treat or prevent the onset of diabetes mellitus. In patients with newly diagnosed Types I and II diabetes, where some islet cell function remains, polynucleotides or polypeptides, as well as agonists or antagonists of the present invention, could be used to maintain the islet function so as to alleviate, delay or prevent permanent manifestation of the disease. Also, polynucleotides or polypeptides, as well as agonists or antagonists of the present invention, could be used as an auxiliary in islet cell transplantation to improve or promote islet cell function.

[0673] Neural Activity and Neurological Diseases

[0674] The polynucleotides, polypeptides and agonists or antagonists of the invention may be used for the diagnosis and/or treatment of diseases, disorders, damage or injury of the brain and/or nervous system. Nervous system disorders that can be treated with the compositions of the invention (e.g., polypeptides, polynucleotides, and/or agonists or antagonists), include, but are not limited to, nervous system injuries, and diseases or disorders which result in either a disconnection of axons, a diminution or degeneration of neurons, or demyelination. Nervous system lesions which may be treated in a patient (including human and non-human mammalian patients) according to the methods of the invention, include but are not limited to, the following lesions of either the central (including spinal cord, brain) or peripheral nervous systems: (1) ischemic lesions, in which a lack of oxygen in a portion of the nervous system results in neuronal injury or death, including cerebral infarction or ischemia, or spinal cord infarction or ischemia; (2) traumatic lesions, including lesions caused by physical injury or associated with surgery, for example, lesions which sever a portion of the nervous system, or compression injuries; (3) malignant lesions, in which a portion of the nervous system is destroyed or injured by malignant tissue which is either a nervous system associated malignancy or a malignancy derived from non-nervous system tissue; (4) infectious lesions, in which a portion of the nervous system is destroyed or injured as a result of infection, for example, by an abscess or associated with infection by human immunodeficiency virus, herpes zoster, or herpes simplex virus or with Lyme disease, tuberculosis, or syphilis; (5) degenerative lesions, in which a portion of the nervous system is destroyed or injured as a result of a degenerative process including but not limited to, degeneration associated with Parkinson's disease, Alzheimer's disease, Huntington's chorea, or amyotrophic lateral sclerosis (ALS); (6) lesions associated with nutritional diseases or disorders, in which a portion of the nervous system is destroyed or injured by a nutritional disorder or disorder of metabolism including, but not limited to, vitamin B 12 deficiency, folic acid deficiency, Wemicke disease, tobacco-alcohol amblyopia, Marchiafava-Bignami disease (primary degeneration of the corpus callosum), and alcoholic cerebellar degeneration; (7) neurological lesions associated with systemic diseases including, but not limited to, diabetes (diabetic neuropathy, Bell's palsy), systemic lupus erythematosus, carcinoma, or sarcoidosis; (8) lesions caused by toxic substances including alcohol, lead, or particular neurotoxins; and (9) demyelinated lesions in which a portion of the nervous system is destroyed or injured by a demyelinating disease including, but not limited to, multiple sclerosis, human immunodeficiency virus-associated myelopathy, transverse myelopathy or various etiologies, progressive multifocal leukoencephalopathy, and central pontine myelinolysis.

[0675] In one embodiment, the polypeptides, polynucleotides, or agonists or antagonists of the invention are used to protect neural cells from the damaging effects of hypoxia. In a further preferred embodiment, the polypeptides, polynucleotides, or agonists or antagonists of the invention are used to protect neural cells from the damaging effects of cerebral hypoxia. According to this embodiment, the compositions of the invention are used to treat or prevent neural cell injury associated with cerebral hypoxia. In one non-exclusive aspect of this embodiment, the polypeptides, polynucleotides, or agonists or antagonists of the invention, are used to treat or prevent neural cell injury associated with cerebral ischemia. In another non-exclusive aspect of this embodiment, the polypeptides, polynucleotides, or agonists or antagonists of the invention are used to treat or prevent neural cell injury associated with cerebral infarction.

[0676] In another preferred embodiment, the polypeptides, polynucleotides, or agonists or antagonists of the invention are used to treat or prevent neural cell injury associated with a stroke. In a specific embodiment, the polypeptides, polynucleotides, or agonists or antagonists of the invention are used to treat or prevent cerebral neural cell injury associated with a stroke.

[0677] In another preferred embodiment, the polypeptides, polynucleotides, or agonists or antagonists of the invention are used to treat or prevent neural cell injury associated with a heart attack. In a specific embodiment, the polypeptides, polynucleotides, or agonists or antagonists of the invention are used to treat or prevent cerebral neural cell injury associated with a heart attack.

[0678] The compositions of the invention which are useful for treating or preventing a nervous system disorder may be selected by testing for biological activity in promoting the survival or differentiation of neurons. For example, and not by way of limitation, compositions of the invention which elicit any of the following effects may be useful according to the invention: (1) increased survival time of neurons in culture either in the presence or absence of hypoxia or hypoxic conditions; (2) increased sprouting of neurons in culture or in vivo; (3) increased production of a neuron-associated molecule in culture or in vivo, e.g., choline acetyltransferase or acetylcholinesterase with respect to motor neurons; or (4) decreased symptoms of neuron dysfunction in vivo. Such effects may be measured by any method known in the art. In preferred, non-limiting embodiments, increased survival of neurons may routinely be measured using a method set forth herein or otherwise known in the art, such as, for example, in Zhang et al., Proc Natl Acad Sci USA 97:3637-42 (2000) or in Arakawa et al., J. Neurosci., 10:3507-15 (1990); increased sprouting of neurons may be detected by methods known in the art, such as, for example, the methods set forth in Pestronk et al., Exp. Neurol., 70:65-82 (1980), or Brown et al, Ann. Rev. Neurosci., 4:17-42 (1981); increased production of neuron-associated molecules may be measured by bioassay, enzymatic assay, antibody binding, Northern blot assay, etc., using techniques known in the art and depending on the molecule to be measured; and motor neuron dysfunction may be measured by assessing the physical manifestation of motor neuron disorder, e.g., weakness, motor neuron conduction velocity, or functional disability.

[0679] In specific embodiments, motor neuron disorders that may be treated according to the invention include, but are not limited to, disorders such as infarction, infection, exposure to toxin, trauma, surgical damage, degenerative disease or malignancy that may affect motor neurons as well as other components of the nervous system, as well as disorders that selectively affect neurons such as amyotrophic lateral sclerosis, and including, but not limited to, progressive spinal muscular atrophy, progressive bulbar palsy, primary lateral sclerosis, infantile and juvenile muscular atrophy, progressive bulbar paralysis of childhood (Fazio-Londe syndrome), poliomyelitis and the post polio syndrome, and Hereditary Motorsensory Neuropathy (Charcot-Marie-Tooth Disease).

[0680] Further, polypeptides or polynucleotides of the invention may play a role in neuronal survival; synapse formation; conductance; neural differentiation, etc. Thus, compositions of the invention (including polynucleotides, polypeptides, and agonists or antagonists) may be used to diagnose and/or treat or prevent diseases or disorders associated with these roles, including, but not limited to, learning and/or cognition disorders. The compositions of the invention may also be useful in the treatment or prevention of neurodegenerative disease states and/or behavioural disorders. Such neurodegenerative disease states and/or behavioral disorders include, but are not limited to, Alzheimer's Disease, Parkinson's Disease, Huntington's Disease, Tourette Syndrome, schizophrenia, mania, dementia, paranoia, obsessive compulsive disorder, panic disorder, learning disabilities, ALS, psychoses, autism, and altered behaviors, including disorders in feeding, sleep patterns, balance, and perception. In addition, compositions of the invention may also play a role in the treatment, prevention and/or detection of developmental disorders associated with the developing embryo, or sexually-linked disorders.

[0681] Additionally, polypeptides, polynucleotides and/or agonists or antagonists of the invention, may be useful in protecting neural cells from diseases, damage, disorders, or injury, associated with cerebrovascular disorders including, but not limited to, carotid artery diseases (e.g., carotid artery thrombosis, carotid stenosis, or Moyamoya Disease), cerebral amyloid angiopathy, cerebral aneurysm, cerebral anoxia, cerebral arteriosclerosis, cerebral arteriovenous malformations, cerebral artery diseases, cerebral embolism and thrombosis (e.g., carotid artery thrombosis, sinus thrombosis, or Wallenberg's Syndrome), cerebral hemorrhage (e.g., epidural or subdural hematoma, or subarachnoid hemorrhage), cerebral infarction, cerebral ischemia (e.g., transient cerebral ischemia, Subclavian Steal Syndrome, or vertebrobasilar insufficiency), vascular dementia (e.g., multi-infarct), leukomalacia, periventricular, and vascular headache (e.g., cluster headache or migraines).

[0682] In accordance with yet a further aspect of the present invention, there is provided a process for utilizing polynucleotides or polypeptides, as well as agonists or antagonists of the present invention, for therapeutic purposes, for example, to stimulate neurological cell proliferation and/or differentiation. Therefore, polynucleotides, polypeptides, agonists and/or antagonists of the invention may be used to treat and/or detect neurologic diseases. Moreover, polynucleotides or polypeptides, or agonists or antagonists of the invention, can be used as a marker or detector of a particular nervous system disease or disorder.

[0683] Examples of neurologic diseases which can be treated or detected with polynucleotides, polypeptides, agonists, and/or antagonists of the present invention include brain diseases, such as metabolic brain diseases which includes phenylketonuria such as maternal phenylketonuria, pyruvate carboxylase deficiency, pyruvate dehydrogenase complex deficiency, Wemicke's Encephalopathy, brain edema, brain neoplasms such as cerebellar neoplasms which include infratentorial neoplasms, cerebral ventricle neoplasms such as choroid plexus neoplasms, hypothalamic neoplasms, supratentorial neoplasms, canavan disease, cerebellar diseases such as cerebellar ataxia which include spinocerebellar degeneration such as ataxia telangiectasia, cerebellar dyssynergia, Friederich's Ataxia, Machado-Joseph Disease, olivopontocerebellar atrophy, cerebellar neoplasms such as infratentorial neoplasms, diffuse cerebral sclerosis such as encephalitis periaxialis, globoid cell leukodystrophy, metachromatic leukodystrophy and subacute sclerosing panencephalitis.

[0684] Additional neurologic diseases which can be treated or detected with polynucleotides, polypeptides, agonists, and/or antagonists of the present invention include cerebrovascular disorders (such as carotid artery diseases which include carotid artery thrombosis, carotid stenosis and Moyamoya Disease), cerebral amyloid angiopathy, cerebral aneurysm, cerebral anoxia, cerebral arteriosclerosis, cerebral arteriovenous malformations, cerebral artery diseases, cerebral embolism and thrombosis such as carotid artery thrombosis, sinus thrombosis and Wallenberg's Syndrome, cerebral hemorrhage such as epidural hematoma, subdural hematoma and subarachnoid hemorrhage, cerebral infarction, cerebral ischemia such as transient cerebral ischemia, Subdlavian Steal Syndrome and vertebrobasilar insufficiency, vascular dementia such as multi-infarct dementia, periventricular leukomalacia, vascular headache such as cluster headache and migraine.

[0685] Additional neurologic diseases which can be treated or detected with polynucleotides, polypeptides, agonists, and/or antagonists of the present invention include dementia such as AIDS Dementia Complex, presenile dementia such as Alzheimer's Disease and Creutzfeldt-Jakob Syndrome, senile dementia such as Alzheimer's Disease and progressive supranuclear palsy, vascular dementia such as multi-infarct dementia, encephalitis which include encephalitis periaxialis, viral encephalitis such as epidemic encephalitis, Japanese Encephalitis, St. Louis Encephalitis, tick-borne encephalitis and West Nile Fever, acute disseminated encephalomyelitis, meningoencephalitis such as uveomeningoencephalitic syndrome, Postencephalitic Parkinson Disease and subacute sclerosing panencephalitis, encephalomalacia such as periventricular leukomalacia, epilepsy such as generalized epilepsy which includes infantile spasms, absence epilepsy, myoclonic epilepsy which includes MERRF Syndrome, tonic-clonic epilepsy, partial epilepsy such as complex partial epilepsy, frontal lobe epilepsy and temporal lobe epilepsy, post-traumatic epilepsy, status epilepticus such as Epilepsia Partialis Continua, and Hallervorden-Spatz Syndrome.

[0686] Additional neurologic diseases which can be treated or detected with polynucleotides, polypeptides, agonists, and/or antagonists of the present invention include hydrocephalus such as Dandy-Walker Syndrome and normal pressure hydrocephalus, hypothalamic diseases such as hypothalamic neoplasms, cerebral malaria, narcolepsy which includes cataplexy, bulbar poliomyelitis, cerebri pseudotumor, Rett Syndrome, Reye's Syndrome, thalamic diseases, cerebral toxoplasmosis, intracranial tuberculoma and Zellweger Syndrome, central nervous system infections such as AIDS Dementia Complex, Brain Abscess, subdural empyema, encephalomyelitis such as Equine Encephalomyelitis, Venezuelan Equine Encephalomyelitis, Necrotizing Hemorrhagic Encephalomyelitis, Visna, and cerebral malaria.

[0687] Additional neurologic diseases which can be treated or detected with polynucleotides, polypeptides, agonists, and/or antagonists of the present invention include meningitis such as arachnoiditis, aseptic meningtitis such as viral meningtitis which includes lymphocytic choriomeningitis, Bacterial meningtitis which includes Haemophilus Meningtitis, Listeria Meningtitis, Meningococcal Meningtitis such as Waterhouse-Friderichsen Syndrome, Pneumococcal Meningtitis and meningeal tuberculosis, fungal meningitis such as Cryptococcal Meningtitis, subdural effusion, meningoencephalitis such as uvemeningoencephalitic syndrome, myelitis such as transverse myelitis, neurosyphilis such as tabes dorsalis, poliomyelitis which includes bulbar poliomyelitis and postpoliomyelitis syndrome, prion diseases (such as Creutzfeldt-Jakob Syndrome, Bovine Spongiform Encephalopathy, Gerstmann-Straussler Syndrome, Kuru, Scrapie), and cerebral toxoplasmosis.

[0688] Additional neurologic diseases which can be treated or detected with polynucleotides, polypeptides, agonists, and/or antagonists of the present invention include central nervous system neoplasms such as brain neoplasms that include cerebellar neoplasms such as infratentorial neoplasms, cerebral ventricle neoplasms such as choroid plexus neoplasms, hypothalamic neoplasms and supratentorial neoplasms, meningeal neoplasms, spinal cord neoplasms which include epidural neoplasms, demyelinating diseases such as Canavan Diseases, diffuse cerebral sceloris which includes adrenoleukodystrophy, encephalitis periaxialis, globoid cell leukodystrophy, diffuse cerebral sclerosis such as metachromatic leukodystrophy, allergic encephalomyelitis, necrotizing hemorrhagic encephalomyelitis, progressive multifocal leukoencephalopathy, multiple sclerosis, central pontine myelinolysis, transverse myelitis, neuromyelitis optica, Scrapie, Swayback, Chronic Fatigue Syndrome, Visna, High Pressure Nervous Syndrome, Meningism, spinal cord diseases such as amyotonia congenita, amyotrophic lateral sclerosis, spinal muscular atrophy such as Werdnig-Hoffmann Disease, spinal cord compression, spinal cord neoplasms such as epidural neoplasms, syringomyelia, Tabes Dorsalis, Stiff-Man Syndrome, mental retardation such as Angelman Syndrome, Cri-du-Chat Syndrome, De Lange's Syndrome, Down Syndrome, Gangliosidoses such as gangliosidoses G(M1), Sandhoff Disease, Tay-Sachs Disease, Hartnup Disease, homocystinuria, Laurence-Moon- Biedl Syndrome, Lesch-Nyhan Syndrome, Maple Syrup Urine Disease, mucolipidosis such as fucosidosis, neuronal ceroid-lipofuscinosis, oculocerebrorenal syndrome, phenylketonuria such as maternal phenylketonuria, Prader-Willi Syndrome, Rett Syndrome, Rubinstein-Taybi Syndrome, Tuberous Sclerosis, WAGR Syndrome, nervous system abnormalities such as holoprosencephaly, neural tube defects such as anencephaly which includes hydrangencephaly, Arnold-Chairi Deformity, encephalocele, meningocele, meningomyelocele, spinal dysraphism such as spina bifida cystica and spina bifida occulta.

[0689] Additional neurologic diseases which can be treated or detected with polynucleotides, polypeptides, agonists, and/or antagonists of the present invention include hereditary motor and sensory neuropathies which include Charcot-Marie Disease, Hereditary optic atrophy, Refsum's Disease, hereditary spastic paraplegia, Werdnig-Hoffmann Disease, Hereditary Sensory and Autonomic Neuropathies such as Congenital Analgesia and Familial Dysautonomia, Neurologic manifestations (such as agnosia that include Gerstmann's Syndrome, Amnesia such as retrograde amnesia, apraxia, neurogenic bladder, cataplexy, communicative disorders such as hearing disorders that includes deafness, partial hearing loss, loudness recruitment and tinnitus, language disorders such as aphasia which include agraphia, anomia, broca aphasia, and Wernicke Aphasia, Dyslexia such as Acquired Dyslexia, language development disorders, speech disorders such as aphasia which includes anomia, broca aphasia and Wemicke Aphasia, articulation disorders, communicative disorders such as speech disorders which include dysarthria, echolalia, mutism and stuttering, voice disorders such as aphonia and hoarseness, decerebrate state, delirium, fasciculation, hallucinations, meningism, movement disorders such as angelman syndrome, ataxia, athetosis, chorea, dystonia, hypokinesia, muscle hypotonia, myoclonus, tic, torticollis and tremor, muscle hypertonia such as muscle rigidity such as stiff-man syndrome, muscle spasticity, paralysis such as facial paralysis which includes Herpes Zoster Oticus, Gastroparesis, Hemiplegia, ophthalmoplegia such as diplopia, Duane's Syndrome, Homer's Syndrome, Chronic progressive external ophthalmoplegia such as Kearns Syndrome, Bulbar Paralysis, Tropical Spastic Paraparesis, Paraplegia such as Brown-Sequard Syndrome, quadriplegia, respiratory paralysis and vocal cord paralysis, paresis, phantom limb, taste disorders such as ageusia and dysgeusia, vision disorders such as amblyopia, blindness, color vision defects, diplopia, hemianopsia, scotoma and subnormal vision, sleep disorders such as hypersomnia which includes Kleine-Levin Syndrome, insomnia, and somnambulism, spasm such as trismus, unconsciousness such as coma, persistent vegetative state and syncope and vertigo, neuromuscular diseases such as amyotonia congenita, amyotrophic lateral sclerosis, Lambert-Eaton Myasthenic Syndrome, motor neuron disease, muscular atrophy such as spinal muscular atrophy, Charcot-Marie Disease and Werdnig-Hoffmann Disease, Postpoliomyelitis Syndrome, Muscular Dystrophy, Myasthenia Gravis, Myotonia Atrophica, Myotonia Confenita, Nemaline Myopathy, Familial Periodic Paralysis, Multiplex Paramyloclonus, Tropical Spastic Paraparesis and Stiff-Man Syndrome, peripheral nervous system diseases such as acrodynia, amyloid neuropathies, autonomic nervous system diseases such as Adie's Syndrome, Barre-Lieou Syndrome, Familial Dysautonomia, Homer's Syndrome, Reflex Sympathetic Dystrophy and Shy-Drager Syndrome, Cranial Nerve Diseases such as Acoustic Nerve Diseases such as Acoustic Neuroma which includes Neurofibromatosis 2, Facial Nerve Diseases such as Facial Neuralgia,Melkersson-Rosenthal Syndrome, ocular motility disorders which includes amblyopia, nystagmus, oculomotor nerve paralysis, ophthalmoplegia such as Duane's Syndrome, Homer's Syndrome, Chronic Progressive External Ophthalmoplegia which includes Kearns Syndrome, Strabismus such as Esotropia and Exotropia, Oculomotor Nerve Paralysis, Optic Nerve Diseases such as Optic Atrophy which includes Hereditary Optic Atrophy, Optic Disk Drusen, Optic Neuritis such as Neuromyelitis Optica, Papilledema, Trigeminal Neuralgia, Vocal Cord Paralysis, Demyelinating Diseases such as Neuromyelitis Optica and Swayback, and Diabetic neuropathies such as diabetic foot.

[0690] Additional neurologic diseases which can be treated or detected with polynucleotides, polypeptides, agonists, and/or antagonists of the present invention include nerve compression syndromes such as carpal tunnel syndrome, tarsal tunnel syndrome, thoracic outlet syndrome such as cervical rib syndrome, ulnar nerve compression syndrome, neuralgia such as causalgia, cervico-brachial neuralgia, facial neuralgia and trigeminal neuralgia, neuritis such as experimental allergic neuritis, optic neuritis, polyneuritis, polyradiculoneuritis and radiculities such as polyradiculitis, hereditary motor and sensory neuropathies such as Charcot-Marie Disease, Hereditary Optic Atrophy, Refsum's Disease, Hereditary Spastic Paraplegia and Werdnig-Hoffmann Disease, Hereditary Sensory and Autonomic Neuropathies which include Congenital Analgesia and Familial Dysautonomia, POEMS Syndrome, Sciatica, Gustatory Sweating and Tetany).

[0691] Endocrine Disorders

[0692] Polynucleotides or polypeptides, or agonists or antagonists of the present invention, may be used to treat, prevent, diagnose, and/or prognose disorders and/or diseases related to hormone imbalance, and/or disorders or diseases of the endocrine system.

[0693] Hormones secreted by the glands of the endocrine system control physical growth, sexual function, metabolism, and other functions. Disorders may be classified in two ways: disturbances in the production of hormones, and the inability of tissues to respond to hormones. The etiology of these hormone imbalance or endocrine system diseases, disorders or conditions may be genetic, somatic, such as cancer and some autoimmune diseases, acquired (e.g., by chemotherapy, injury or toxins), or infectious. Moreover, polynucleotides, polypeptides, antibodies, and/or agonists or antagonists of the present invention can be used as a marker or detector of a particular disease or disorder related to the endocrine system and/or hormone imbalance.

[0694] Endocrine system and/or hormone imbalance and/or diseases encompass disorders of uterine motility including, but not limited to: complications with pregnancy and labor (e.g., pre-term labor, post-term pregnancy, spontaneous abortion, and slow or stopped labor); and disorders and/or diseases of the menstrual cycle (e.g., dysmenorrhea and endometriosis).

[0695] Endocrine system and/or hormone imbalance disorders and/or diseases include disorders and/or diseases of the pancreas, such as, for example, diabetes mellitus, diabetes insipidus, congenital pancreatic agenesis, pheochromocytoma—islet cell tumor syndrome; disorders and/or diseases of the adrenal glands such as, for example, Addison's Disease, corticosteroid deficiency, virilizing disease, hirsutism, Cushing's Syndrome, hyperaldosteronism, pheochromocytoma; disorders and/or diseases of the pituitary gland, such as, for example, hyperpituitarism, hypopituitarism, pituitary dwarfism, pituitary adenoma, panhypopituitarism, acromegaly, gigantism; disorders and/or diseases of the thyroid, including but not limited to, hyperthyroidism, hypothyroidism, Plummer's disease, Graves' disease (toxic diffuse goiter), toxic nodular goiter, thyroiditis (Hashimoto's thyroiditis, subacute granulomatous thyroiditis, and silent lymphocytic thyroiditis), Pendred's syndrome, myxedema, cretinism, thyrotoxicosis, thyroid hormone coupling defect, thymic aplasia, Hurthle cell tumours of the thyroid, thyroid cancer, thyroid carcinoma, Medullary thyroid carcinoma; disorders and/or diseases of the parathyroid, such as, for example, hyperparathyroidism, hypoparathyroidism; disorders and/or diseases of the hypothalamus.

[0696] In addition, endocrine system and/or hormone imbalance disorders and/or diseases may also include disorders and/or diseases of the testes or ovaries, including cancer. Other disorders and/or diseases of the testes or ovaries further include, for example, ovarian cancer, polycystic ovary syndrome, Klinefelter's syndrome, vanishing testes syndrome (bilateral anorchia), congenital absence of Leydig's cells, cryptorchidism, Noonan's syndrome, myotonic dystrophy, capillary haemangioma of the testis (benign), neoplasias of the testis and neo-testis.

[0697] Moreover, endocrine system and/or hormone imbalance disorders and/or diseases may also include disorders and/or diseases such as, for example, polyglandular deficiency syndromes, pheochromocytoma, neuroblastoma, multiple Endocrine neoplasia, and disorders and/or cancers of endocrine tissues.

[0698] In another embodiment, a polypeptide of the invention, or polynucleotides, antibodies, agonists, or antagonists corresponding to that polypeptide, may be used to diagnose, prognose, prevent, and/or treat endocrine diseases and/or disorders associated with the tissue(s) in which the polypeptide of the invention is expressed, including one, two, three, four, five, or more tissues disclosed in Table 1A, column 8 (Tissue Distribution Library Code).

[0699] Reproductive System Disorders

[0700] The polynucleotides or polypeptides, or agonists or antagonists of the invention may be used for the diagnosis, treatment, or prevention of diseases and/or disorders of the reproductive system. Reproductive system disorders that can be treated by the compositions of the invention, include, but are not limited to, reproductive system injuries, infections, neoplastic disorders, congenital defects, and diseases or disorders which result in infertility, complications with pregnancy, labor, or parturition, and postpartum difficulties.

[0701] Reproductive system disorders and/or diseases include diseases and/or disorders of the testes, including testicular atrophy, testicular feminization, cryptorchism (unilateral and bilateral), anorchia, ectopic testis, epididymitis and orchitis (typically resulting from infections such as, for example, gonorrhea, mumps, tuberculosis, and syphilis), testicular torsion, vasitis nodosa, germ cell tumors (e.g., seminomas, embryonal cell carcinomas, teratocarcinomas, choriocarcinomas, yolk sac tumors, and teratomas), stromal tumors (e.g., Leydig cell tumors), hydrocele, hematocele, varicocele, spermatocele, inguinal hernia, and disorders of sperm production (e.g., immotile cilia syndrome, aspermia, asthenozoospermia, azoospermia, oligospermia, and teratozoospermia).

[0702] Reproductive system disorders also include disorders of the prostate gland, such as acute non-bacterial prostatitis, chronic non-bacterial prostatitis, acute bacterial prostatitis, chronic bacterial prostatitis, prostatodystonia, prostatosis, granulomatous prostatitis, malacoplakia, benign prostatic hypertrophy or hyperplasia, and prostate neoplastic disorders, including adenocarcinomas, transitional cell carcinomas, ductal carcinomas, and squamous cell carcinomas.

[0703] Additionally, the compositions of the invention may be useful in the diagnosis, treatment, and/or prevention of disorders or diseases of the penis and urethra, including inflammatory disorders, such as balanoposthitis, balanitis xerotica obliterans, phimosis, paraphimosis, syphilis, herpes simplex virus, gonorrhea, non-gonococcal urethritis, chlamydia, mycoplasma, trichomonas, HIV, AIDS, Reiter's syndrome, condyloma acuminatum, condyloma latum, and pearly penile papules; urethral abnormalities, such as hypospadias, epispadias, and phimosis; premalignant lesions, including Erythroplasia of Queyrat, Bowen's disease, Bowenoid paplosis, giant condyloma of Buscke-Lowenstein, and varrucous carcinoma; penile cancers, including squamous cell carcinomas, carcinoma in situ, verrucous carcinoma, and disseminated penile carcinoma; urethral neoplastic disorders, including penile urethral carcinoma, bulbomembranous urethral carcinoma, and prostatic urethral carcinoma; and erectile disorders, such as priapism, Peyronie's disease, erectile dysfunction, and impotence.

[0704] Moreover, diseases and/or disorders of the vas deferens include vasculititis and CBAVD (congenital bilateral absence of the vas deferens); additionally, the polynucleotides, polypeptides, and agonists or antagonists of the present invention may be used in the diagnosis, treatment, and/or prevention of diseases and/or disorders of the seminal vesicles, including hydatid disease, congenital chloride diarrhea, and polycystic kidney disease.

[0705] Other disorders and/or diseases of the male reproductive system include, for example, Klinefelter's syndrome, Young's syndrome, premature ejaculation, diabetes mellitus, cystic fibrosis, Kartagener's syndrome, high fever, multiple sclerosis, and gynecomastia.

[0706] Further, the polynucleotides, polypeptides, and agonists or antagonists of the present invention may be used in the diagnosis, treatment, and/or prevention of diseases and/or disorders of the vagina and vulva, including bacterial vaginosis, candida vaginitis, herpes simplex virus, chancroid, granuloma inguinale, lymphogranuloma venereum, scabies, human papillomavirus, vaginal trauma, vulvar trauma, adenosis, chlamydia vaginitis, gonorrhea, trichomonas vaginitis, condyloma acuminatum, syphilis, molluscum contagiosum, atrophic vaginitis, Paget's disease, lichen sclerosus, lichen planus, vulvodynia, toxic shock syndrome, vaginismus, vulvovaginitis, vulvar vestibulitis, and neoplastic disorders, such as squamous cell hyperplasia, clear cell carcinoma, basal cell carcinoma, melanomas, cancer of Bartholin's gland, and vulvar intraepithelial neoplasia.

[0707] Disorders and/or diseases of the uterus include dysmenorrhea, retroverted uterus, endometriosis, fibroids, adenomyosis, anovulatory bleeding, amenorrhea, Cushing's syndrome, hydatidiform moles, Asherman's syndrome, premature menopause, precocious puberty, uterine polyps, dysfunctional uterine bleeding (e.g., due to aberrant hormonal signals), and neoplastic disorders, such as adenocarcinomas, keiomyosarcomas, and sarcomas. Additionally, the polypeptides, polynucleotides, or agonists or antagonists of the invention may be useful as a marker or detector of, as well as in the diagnosis, treatment, and/or prevention of congenital uterine abnormalities, such as bicomuate uterus, septate uterus, simple unicornuate uterus, unicornuate uterus with a noncavitary rudimentary horn, unicornuate uterus with a non-communicating cavitary rudimentary horn, unicornuate uterus with a communicating cavitary horn, arcuate uterus, uterine didelfus, and T-shaped uterus.

[0708] Ovarian diseases and/or disorders include anovulation, polycystic ovary syndrome (Stein-Leventhal syndrome), ovarian cysts, ovarian hypofunction, ovarian insensitivity to gonadotropins, ovarian overproduction of androgens, right ovarian vein syndrome, amenorrhea, hirutism, and ovarian cancer (including, but not limited to, primary and secondary cancerous growth, Sertoli-Leydig tumors, endometriod carcinoma of the ovary, ovarian papillary serous adenocarcinoma, ovarian mucinous adenocarcinoma, and Ovarian Krukenberg tumors).

[0709] Cervical diseases and/or disorders include cervicitis, chronic cervicitis, mucopurulent cervicitis, cervical dysplasia, cervical polyps, Nabothian cysts, cervical erosion, cervical incompetence, and cervical neoplasms (including, for example, cervical carcinoma, squamous metaplasia, squamous cell carcinoma, adenosquamous cell neoplasia, and columnar cell neoplasia).

[0710] Additionally, diseases and/or disorders of the reproductive system include disorders and/or diseases of pregnancy, including miscarriage and stillbirth, such as early abortion, late abortion, spontaneous abortion, induced abortion, therapeutic abortion, threatened abortion, missed abortion, incomplete abortion, complete abortion, habitual abortion, missed abortion, and septic abortion; ectopic pregnancy, anemia, Rh incompatibility, vaginal bleeding during pregnancy, gestational diabetes, intrauterine growth retardation, polyhydramnios, HELLP syndrome, abruptio placentae, placenta previa, hyperemesis, preeclampsia, eclampsia, herpes gestationis, and urticaria of pregnancy. Additionally, the polynucleotides, polypeptides, and agonists or antagonists of the present invention may be used in the diagnosis, treatment, and/or prevention of diseases that can complicate pregnancy, including heart disease, heart failure, rheumatic heart disease, congenital heart disease, mitral valve prolapse, high blood pressure, anemia, kidney disease, infectious disease (e.g., rubella, cytomegalovirus, toxoplasmosis, infectious hepatitis, chlamydia, HIV, AIDS, and genital herpes), diabetes mellitus, Graves' disease, thyroiditis, hypothyroidism, Hashimoto's thyroiditis, chronic active hepatitis, cirrhosis of the liver, primary biliary cirrhosis, asthma, systemic lupus eryematosis, rheumatoid arthritis, myasthenia gravis, idiopathic thrombocytopenic purpura, appendicitis, ovarian cysts, gallbladder disorders,and obstruction of the intestine.

[0711] Complications associated with labor and parturition include premature rupture of the membranes, pre-term labor, post-term pregnancy, postmaturity, labor that progresses too slowly, fetal distress (e.g., abnormal heart rate (fetal or maternal), breathing problems, and abnormal fetal position), shoulder dystocia, prolapsed umbilical cord, amniotic fluid embolism, and aberrant uterine bleeding.

[0712] Further, diseases and/or disorders of the postdelivery period, including endometritis, myometritis, parametritis, peritonitis, pelvic thrombophlebitis, pulmonary embolism, endotoxemia, pyelonephritis, saphenous thrombophlebitis, mastitis, cystitis, postpartum hemorrhage, and inverted uterus.

[0713] Other disorders and/or diseases of the female reproductive system that may be diagnosed, treated, and/or prevented by the polynucleotides, polypeptides, and agonists or antagonists of the present invention include, for example, Turner's syndrome, pseudohermaphroditism, premenstrual syndrome, pelvic inflammatory disease, pelvic congestion (vascular engorgement), frigidity, anorgasmia, dyspareunia, ruptured fallopian tube, and Mittelschmerz.

[0714] Infectious Disease

[0715] Polynucleotides or polypeptides, as well as agonists or antagonists of the present invention can be used to treat or detect infectious agents. For example, by increasing the immune response, particularly increasing the proliferation and differentiation of B and/or T cells, infectious diseases may be treated. The immune response may be increased by either enhancing an existing immune response, or by initiating a new immune response. Alternatively, polynucleotides or polypeptides, as well as agonists or antagonists of the present invention may also directly inhibit the infectious agent, without necessarily eliciting an immune response.

[0716] Viruses are one example of an infectious agent that can cause disease or symptoms that can be treated or detected by a polynucleotide or polypeptide and/or agonist or antagonist of the present invention. Examples of viruses, include, but are not limited to Examples of viruses, include, but are not limited to the following DNA and RNA viruses and viral families: Arbovirus, Adenoviridae, Arenaviridae, Arterivirus, Birnaviridae, Bunyaviridae, Caliciviridae, Circoviridae, Coronaviridae, Dengue, EBV, HIV, Flaviviridae, Hepadnaviridae (Hepatitis), Herpesviridae (such as, Cytomegalovirus, Herpes Simplex, Herpes Zoster), Mononegavirus (e.g., Paramyxoviridae, Morbillivirus, Rhabdoviridae), Orthomyxoviridae (e.g., Influenza A, Influenza B, and parainfluenza), Papiloma virus, Papovaviridae, Parvoviridae, Picomaviridae, Poxviridae (such as Smallpox or Vaccinia), Reoviridae (e.g., Rotavirus), Retroviridae (HTLV-I, HTLV-II, Lentivirus), and Togaviridae (e.g., Rubivirus). Viruses falling within these families can cause a variety of diseases or symptoms, including, but not limited to: arthritis, bronchiollitis, respiratory syncytial virus, encephalitis, eye infections (e.g., conjunctivitis, keratitis), chronic fatigue syndrome, hepatitis (A, B, C, E, Chronic Active, Delta), Japanese B encephalitis, Junin, Chikungunya, Rift Valley fever, yellow fever, meningitis, opportunistic infections (e.g., AIDS), pneumonia, Burkitt's Lymphoma, chickenpox, hemorrhagic fever, Measles, Mumps, Parainfluenza, Rabies, the common cold, Polio, leukemia, Rubella, sexually transmitted diseases, skin diseases (e.g., Kaposi's, warts), and viremia. polynucleotides or polypeptides, or agonists or antagonists of the invention, can be used to treat or detect any of these symptoms or diseases. In specific embodiments, polynucleotides, polypeptides, or agonists or antagonists of the invention are used to treat: meningitis, Dengue, EBV, and/or hepatitis (e.g., hepatitis B). In an additional specific embodiment polynucleotides, polypeptides, or agonists or antagonists of the invention are used to treat patients nonresponsive to one or more other commercially available hepatitis vaccines. In a further specific embodiment polynucleotides, polypeptides, or agonists or antagonists of the invention are used to treat AIDS.

[0717] Similarly, bacterial and fungal agents that can cause disease or symptoms and that can be treated or detected by a polynucleotide or polypeptide and/or agonist or antagonist of the present invention include, but not limited to, the following Gram-Negative and Gram-positive bacteria, bacterial families, and fungi: Actinomyces (e.g., Norcardia), Acinetobacter, Cryptococcus neoformans, Aspergillus, Bacillaceae (e.g., Bacillus anthrasis), Bacteroides (e.g., Bacteroides fragilis), Blastomycosis, Bordetella, Borrelia (e.g., Borrelia burgdorferi), Brucella, Candidia, Campylobacter, Chlamydia, Clostridium (e.g., Clostridium botulinum, Clostridium dificile, Clostridium perfringens, Clostridium tetani), Coccidioides, Corynebacterium (e.g., Corynebacterium diptheriae), Cryptococcus, Dermatocycoses, E. coli (e.g., Enterotoxigenic E. coli and Enterohemorrhagic E. coli), Enterobacter (e.g. Enterobacter aerogenes), Enterobacteriaceae (Klebsiella, Salmonella (e.g., Salmonella typhi, Salmonella enteritidis, Salmonella typhi), Serratia, Yersinia, Shigella), Erysipelothrix, Haemophilus (e.g., Haemophilus influenza type B), Helicobacter, Legionella (e.g., Legionella pneumophila), Leptospira, Listeria (e.g., Listeria monocytogenes), Mycoplasma, Mycobacterium (e.g., Mycobacterium leprae and Mycobacterium tuberculosis), Vibrio (e.g., Vibrio cholerae), Neisseriaceae (e.g., Neisseria gonorrhea, Neisseria meningitidis), Pasteurellacea, Proteus, Pseudomonas (e.g., Pseudomonas aeruginosa), Rickettsiaceae, Spirochetes (e.g., Treponema spp., Leptospira spp., Borrelia spp.), Shigella spp., Staphylococcus (e.g., Staphylococcus aureus), Meningiococcus, Pneumococcus and Streptococcus (e.g., Streptococcus pneumoniae and Groups A, B, and C Streptococci), and Ureaplasmas. These bacterial, parasitic, and fungal families can cause diseases or symptoms, including, but not limited to: antibiotic-resistant infections, bacteremia, endocarditis, septicemia, eye infections (e.g., conjunctivitis), uveitis, tuberculosis, gingivitis, bacterial diarrhea, opportunistic infections (e.g., AIDS related infections), paronychia, prosthesis-related infections, dental caries, Reiter's Disease, respiratory tract infections, such as Whooping Cough or Empyema, sepsis, Lyme Disease, Cat-Scratch Disease, dysentery, paratyphoid fever, food poisoning, Legionella disease, chronic and acute inflammation, erythema, yeast infections, typhoid, pneumonia, gonorrhea, meningitis (e.g., mengitis types A and B), chlamydia, syphillis, diphtheria, leprosy, brucellosis, peptic ulcers, anthrax, spontaneous abortions, birth defects, pneumonia, lung infections, ear infections, deafness, blindness, lethargy, malaise, vomiting, chronic diarrhea, Crohn's disease, colitis, vaginosis, sterility, pelvic inflammatory diseases, candidiasis, paratuberculosis, tuberculosis, lupus, botulism, gangrene, tetanus, impetigo, Rheumatic Fever, Scarlet Fever, sexually transmitted diseases, skin diseases (e.g., cellulitis, dermatocycoses), toxemia, urinary tract infections, wound infections, noscomial infections. Polynucleotides or polypeptides, agonists or antagonists of the invention, can be used to treat or detect any of these symptoms or diseases. In specific embodiments, polynucleotides, polypeptides, agonists or antagonists of the invention are used to treat: tetanus, diptheria, botulism, and/or meningitis type B.

[0718] Moreover, parasitic agents causing disease or symptoms that can be treated, prevented, and/or diagnosed by a polynucleotide or polypeptide and/or agonist or antagonist of the present invention include, but not limited to, the following families or class: Amebiasis, Babesiosis, Coccidiosis, Cryptosporidiosis, Dientamoebiasis, Dourine, Ectoparasitic, Giardias, Hehninthiasis, Leishmaniasis, Schistisoma, Theileriasis, Toxoplasmosis, Trypanosomiasis, and Trichomonas and Sporozoans (e.g., Plasmodium virax, Plasmodium falciparium, Plasmodium malariae and Plasmodium ovale). These parasites can cause a variety of diseases or symptoms, including, but not limited to: Scabies, Trombiculiasis, eye infections, intestinal disease (e.g., dysentery, giardiasis), liver disease, lung disease, opportunistic infections (e.g., AIDS related), malaria, pregnancy complications, and toxoplasmosis. polynucleotides or polypeptides, or agonists or antagonists of the invention, can be used to treat, prevent, and/or diagnose any of these symptoms or diseases. In specific embodiments, polynucleotides, polypeptides, or agonists or antagonists of the invention are used to treat, prevent, and/or diagnose malaria.

[0719] Polynucleotides or polypeptides, as well as agonists or antagonists of the present invention of the present invention could either be by administering an effective amount of a polypeptide to the patient, or by removing cells from the patient, supplying the cells with a polynucleotide of the present invention, and returning the engineered cells to the patient (ex vivo therapy). Moreover, the polypeptide or polynucleotide of the present invention can be used as an antigen in a vaccine to raise an immune response against infectious disease.

[0720] Regeneration

[0721] Polynucleotides or polypeptides, as well as agonists or antagonists of the present invention can be used to differentiate, proliferate, and attract cells, leading to the regeneration of tissues. (See, Science 276:59-87 (1997)). The regeneration of tissues could be used to repair, replace, or protect tissue damaged by congenital defects, trauma (wounds, bums, incisions, or ulcers), age, disease (e.g. osteoporosis, osteocarthritis, periodontal disease, liver failure), surgery, including cosmetic plastic surgery, fibrosis, reperfusion injury, or systemic cytokine damage.

[0722] Tissues that could be regenerated using the present invention include organs (e.g., pancreas, liver, intestine, kidney, skin, endothelium), muscle (smooth, skeletal or cardiac), vasculature (including vascular and lymphatics), nervous, hematopoietic, and skeletal (bone, cartilage, tendon, and ligament) tissue. Preferably, regeneration occurs without or decreased scarring. Regeneration also may include angiogenesis.

[0723] Moreover, polynucleotides or polypeptides, as well as agonists or antagonists of the present invention, may increase regeneration of tissues difficult to heal. For example, increased tendon/ligament regeneration would quicken recovery time after damage. Polynucleotides or polypeptides, as well as agonists or antagonists of the present invention could also be used prophylactically in an effort to avoid damage. Specific diseases that could be treated include of tendinitis, carpal tunnel syndrome, and other tendon or ligament defects. A further example of tissue regeneration of non-healing wounds includes pressure ulcers, ulcers associated with vascular insufficiency, surgical, and traumatic wounds.

[0724] Similarly, nerve and brain tissue could also be regenerated by using polynucleotides or polypeptides, as well as agonists or antagonists of the present invention, to proliferate and differentiate nerve cells. Diseases that could be treated using this method include central and peripheral nervous system diseases, neuropathies, or mechanical and traumatic disorders (e.g., spinal cord disorders, head trauma, cerebrovascular disease, and stoke). Specifically, diseases associated with peripheral nerve injuries, peripheral neuropathy (e.g., resulting from chemotherapy or other medical therapies), localized neuropathies, and central nervous system diseases (e.g., Alzheimer's disease, Parkinson's disease, Huntington's disease, amyotrophic lateral sclerosis, and Shy-Drager syndrome), could all be treated using the polynucleotides or polypeptides, as well as agonists or antagonists of the present invention.

[0725] Gastrointestinal Disorders

[0726] Polynucleotides or polypeptides, or agonists or antagonists of the present invention, may be used to treat, prevent, diagnose, and/or prognose gastrointestinal disorders, including inflammatory diseases and/or conditions, infections, cancers (e.g., intestinal neoplasms (carcinoid tumor of the small intestine, non-Hodgkin's lymphoma of the small intestine, small bowl lymphoma)), and ulcers, such as peptic ulcers.

[0727] Gastrointestinal disorders include dysphagia, odynophagia, inflammation of the esophagus, peptic esophagitis, gastric reflux, submucosal fibrosis and stricturing, Mallory-Weiss lesions, leiomyomas, lipomas, epidermal cancers, adeoncarcinomas, gastric retention disorders, gastroenteritis, gastric atrophy, gastric/stomach cancers, polyps of the stomach, autoimmune disorders such as pernicious anemia, pyloric stenosis, gastritis (bacterial, viral, eosinophilic, stress-induced, chronic erosive, atrophic, plasma cell, and Menetrier's), and peritoneal diseases (e.g., chyloperioneum, hemoperitoneum, mesenteric cyst, mesenteric lymphadenitis, mesenteric vascular occlusion, panniculitis, neoplasms, peritonitis, pneumoperitoneum, bubphrenic abscess,).

[0728] Gastrointestinal disorders also include disorders associated with the small intestine, such as malabsorption syndromes, distension, irritable bowel syndrome, sugar intolerance, celiac disease, duodenal ulcers, duodenitis, tropical sprue, Whipple's disease, intestinal lymphangiectasia, Crohn's disease, appendicitis, obstructions of the ileum, Meckel's diverticulum, multiple diverticula, failure of complete rotation of the small and large intestine, lymphoma, and bacterial and parasitic diseases (such as Traveler's diarrhea, typhoid and paratyphoid, cholera, infection by Roundworms (Ascariasis lumbricoides), Hookworms (Ancylostoma duodenale), Threadworms (Enterobius vermicularis), Tapeworms (Taenia saginata, Echinococcus granulosus, Diphyllobothrium spp., and T solium).

[0729] Liver diseases and/or disorders include intrahepatic cholestasis (alagille syndrome, biliary liver cirrhosis), fatty liver (alcoholic fatty liver, reye syndrome), hepatic vein thrombosis, hepatolentricular degeneration, hepatomegaly, hepatopulmonary syndrome, hepatorenal syndrome, portal hypertension (esophageal and gastric varices), liver abscess (amebic liver abscess), liver cirrhosis (alcoholic, biliary and experimental), alcoholic liver diseases (fatty liver, hepatitis, cirrhosis), parasitic (hepatic echinococcosis, fascioliasis, amebic liver abscess), jaundice (hemolytic, hepatocellular, and cholestatic), cholestasis, portal hypertension, liver enlargement, ascites, hepatitis (alcoholic hepatitis, animal hepatitis, chronic hepatitis (autoimmune, hepatitis B, hepatitis C, hepatitis D, drug induced), toxic hepatitis, viral human hepatitis (hepatitis A, hepatitis B, hepatitis C, hepatitis D, hepatitis E), Wilson's disease, granulomatous hepatitis, secondary biliary cirrhosis, hepatic encephalopathy, portal hypertension, varices, hepatic encephalopathy, primary biliary cirrhosis, primary sclerosing cholangitis, hepatocellular adenoma, hemangiomas, bile stones, liver failure (hepatic encephalopathy, acute liver failure), and liver neoplasms (angiomyolipoma, calcified liver metastases, cystic liver metastases, epithelial tumors, fibrolamellar hepatocarcinoma, focal nodular hyperplasia, hepatic adenoma, hepatobiliary cystadenoma, hepatoblastoma, hepatocellular carcinoma, hepatoma, liver cancer, liver hemangioendothelioma, mesenchymal hamartoma, mesenchymal tumors of liver, nodular regenerative hyperplasia, benign liver tumors (Hepatic cysts [Simple cysts, Polycystic liver disease, Hepatobiliary cystadenoma, Choledochal cyst], Mesenchymal tumors [Mesenchymal hamartoma, Infantile hemangioendothelioma, Hemangioma, Peliosis hepatis, Lipomas, Inflammatory pseudotumor, Miscellaneous], Epithelial tumors [Bile duct epithelium (Bile duct hamartoma, Bile duct adenoma), Hepatocyte (Adenoma, Focal nodular hyperplasia, Nodular regenerative hyperplasia)], malignant liver tumors [hepatocellular, hepatoblastoma, hepatocellular carcinoma, cholangiocellular, cholangiocarcinoma, cystadenocarcinoma, tumors of blood vessels, angiosarcoma, Karposi's sarcoma, hemangioendothelioma, other tumors, embryonal sarcoma, fibrosarcoma, leiomyosarcoma, rhabdomyosarcoma, carcinosarcoma, teratoma, carcinoid, squamous carcinoma, primary lymphoma]), peliosis hepatis, erythrohepatic porphyria, hepatic porphyria (acute intermittent porphyria, porphyria cutanea tarda), Zellweger syndrome).

[0730] Pancreatic diseases and/or disorders include acute pancreatitis, chronic pancreatitis (acute necrotizing pancreatitis, alcoholic pancreatitis), neoplasms (adenocarcinoma of the pancreas, cystadenocarcinoma, insulinoma, gastrinoma, and glucagonoma, cystic neoplasms, islet-cell tumors, pancreoblastoma), and other pancreatic diseases (e.g., cystic fibrosis, cyst (pancreatic pseudocyst, pancreatic fistula, insufficiency)).

[0731] Gallbladder diseases include gallstones (cholelithiasis and choledocholithiasis), postcholecystectomy syndrome, diverticulosis of the gallbladder, acute cholecystitis, chronic cholecystitis, bile duct tumors, and mucocele.

[0732] Diseases and/or disorders of the large intestine include antibiotic-associated colitis, diverticulitis, ulcerative colitis, acquired megacolon, abscesses, fungal and bacterial infections, anorectal disorders (e.g., fissures, hemorrhoids), colonic diseases (colitis, colonic neoplasms [colon cancer, adenomatous colon polyps (e.g., villous adenoma), colon carcinoma, colorectal cancer], colonic diverticulitis, colonic diverticulosis, megacolon [Hirschsprung disease, toxic megacolon]; sigmoid diseases [proctocolitis, sigmoin neoplasms]), constipation, Crohn's disease, diarrhea (infantile diarrhea, dysentery), duodenal diseases (duodenal neoplasms, duodenal obstruction, duodenal ulcer, duodenitis), enteritis (enterocolitis), HIV enteropathy, ileal diseases (ileal neoplasms, ileitis), immunoproliferative small intestinal disease, inflammatory bowel disease (ulcerative colitis, Crohn's disease), intestinal atresia, parasitic diseases (anisakiasis, balantidiasis, blastocystis infections, cryptosporidiosis, dientamoebiasis, amebic dysentery, giardiasis), intestinal fistula (rectal fistula), intestinal neoplasms (cecal neoplasms, colonic neoplasms, duodenal neoplasms, ileal neoplasms, intestinal polyps, jejunal neoplasms, rectal neoplasms), intestinal obstruction (afferent loop syndrome, duodenal obstruction, impacted feces, intestinal pseudo-obstruction [cecal volvulus], intussusception), intestinal perforation, intestinal polyps (colonic polyps, gardner syndrome, peutz-jeghers syndrome), jejunal diseases (jejunal neoplasms), malabsorption syndromes (blind loop syndrome, celiac disease, lactose intolerance, short bowl syndrome, tropical sprue, whipple's disease), mesenteric vascular occlusion, pneumatosis cystoides intestinalis, protein-losing enteropathies (intestinal lymphagiectasis), rectal diseases (anus diseases, fecal incontinence, hemorrhoids, proctitis, rectal fistula, rectal prolapse, rectocele), peptic ulcer (duodenal ulcer, peptic esophagitis, hemorrhage, perforation, stomach ulcer, Zollinger-Ellison syndrome), postgastrectomy syndromes (dumping syndrome), stomach diseases (e.g., achlorhydria, duodenogastric reflux (bile reflux), gastric antral vascular ectasia, gastric fistula, gastric outlet obstruction, gastritis (atrophic or hypertrophic), gastroparesis, stomach dilatation, stomach diverticulum, stomach neoplasms (gastric cancer, gastric polyps, gastric adenocarcinoma, hyperplastic gastric polyp), stomach rupture, stomach ulcer, stomach volvulus), tuberculosis, visceroptosis, vomiting (e.g., hematemesis, hyperemesis gravidarum, postoperative nausea and vomiting) and hemorrhagic colitis.

[0733] Further diseases and/or disorders of the gastrointestinal system include biliary tract diseases, such as, gastroschisis, fistula (e.g., biliary fistula, esophageal fistula, gastric fistula, intestinal fistula, pancreatic fistula), neoplasms (e.g., biliary tract neoplasms, esophageal neoplasms, such as adenocarcinoma of the esophagus, esophageal squamous cell carcinoma, gastrointestinal neoplasms, pancreatic neoplasms, such as adenocarcinoma of the pancreas, mucinous cystic neoplasm of the pancreas, pancreatic cystic neoplasms, pancreatoblastoma, and peritoneal neoplasms), esophageal disease (e.g., bullous diseases, candidiasis, glycogenic acanthosis, ulceration, barrett esophagus varices, atresia, cyst, diverticulum (e.g., Zenker's diverticulum), fistula (e.g., tracheoesophageal fistula), motility disorders (e.g., CREST syndrome, deglutition disorders, achalasia, spasm, gastroesophageal reflux), neoplasms, perforation (e.g., Boerhaave syndrome, Mallory-Weiss syndrome), stenosis, esophagitis, diaphragmatic hernia (e.g., hiatal hernia); gastrointestinal diseases, such as, gastroenteritis (e.g., cholera morbus, norwalk virus infection), hemorrhage (e.g., hematemesis, melena, peptic ulcer hemorrhage), stomach neoplasms (gastric cancer, gastric polyps, gastric adenocarcinoma, stomach cancer)), hernia (e.g., congenital diaphragmatic hernia, femoral hernia, inguinal hernia, obturator hernia, umbilical hernia, ventral hernia), and intestinal diseases (e.g., cecal diseases (appendicitis, cecal neoplasms)).

[0734] Chemotaxis

[0735] Polynucleotides or polypeptides, as well as agonists or antagonists of the present invention may have chemotaxis activity. A chemotaxic molecule attracts or mobilizes cells (e.g., monocytes, fibroblasts, neutrophils, T-cells, mast cells, eosinophils, epithelial and/or endothelial cells) to a particular site in the body, such as inflammation, infection, or site of hyperproliferation. The mobilized cells can then fight off and/or heal the particular trauma or abnormality.

[0736] Polynucleotides or polypeptides, as well as agonists or antagonists of the present invention may increase chemotaxic activity of particular cells. These chemotactic molecules can then be used to treat inflammation, infection, hyperproliferative disorders, or any immune system disorder by increasing the number of cells targeted to a particular location in the body. For example, chemotaxic molecules can be used to treat wounds and other trauma to tissues by attracting immune cells to the injured location. Chemotactic molecules of the present invention can also attract fibroblasts, which can be used to treat wounds.

[0737] It is also contemplated that polynucleotides or polypeptides, as well as agonists or antagonists of the present invention may inhibit chemotactic activity. These molecules could also be used to treat disorders. Thus, polynucleotides or polypeptides, as well as agonists or antagonists of the present invention could be used as an inhibitor of chemotaxis.

[0738] Binding Activity

[0739] A polypeptide of the present invention may be used to screen for molecules that bind to the polypeptide or for molecules to which the polypeptide binds. The binding of the polypeptide and the molecule may activate (agonist), increase, inhibit (antagonist), or decrease activity of the polypeptide or the molecule bound. Examples of such molecules include antibodies, oligonucleotides, proteins (e.g., receptors),or small molecules.

[0740] Preferably, the molecule is closely related to the natural ligand of the polypeptide, e.g., a fragment of the ligand, or a natural substrate, a ligand, a structural or functional mimetic. (See, Coligan et al., Current Protocols in Immunology 1(2):Chapter 5 (1991)). Similarly, the molecule can be closely related to the natural receptor to which the polypeptide binds, or at least, a fragment of the receptor capable of being bound by the polypeptide (e.g., active site). In either case, the molecule can be rationally designed using known techniques.

[0741] Preferably, the screening for these molecules involves producing appropriate cells which express the polypeptide. Preferred cells include cells from mammals, yeast, Drosophila, or E. coli. Cells expressing the polypeptide (or cell membrane containing the expressed polypeptide) are then preferably contacted with a test compound potentially containing the molecule to observe binding, stimulation, or inhibition of activity of either the polypeptide or the molecule.

[0742] The assay may simply test binding of a candidate compound to the polypeptide, wherein binding is detected by a label, or in an assay involving competition with a labeled competitor. Further, the assay may test whether the candidate compound results in a signal generated by binding to the polypeptide.

[0743] Alternatively, the assay can be carried out using cell-free preparations, polypeptide/molecule affixed to a solid support, chemical libraries, or natural product mixtures. The assay may also simply comprise the steps of mixing a candidate compound with a solution containing a polypeptide, measuring polypeptide/molecule activity or binding, and comparing the polypeptide/molecule activity or binding to a standard.

[0744] Preferably, an ELISA assay can measure polypeptide level or activity in a sample (e.g., biological sample) using a monoclonal or polyclonal antibody. The antibody can measure polypeptide level or activity by either binding, directly or indirectly, to the polypeptide or by competing with the polypeptide for a substrate.

[0745] Additionally, the receptor to which the polypeptide of the present invention binds can be identified by numerous methods known to those of skill in the art, for example, ligand panning and FACS sorting (Coligan, et al., Current Protocols in Immun., 1(2), Chapter 5, (1991)). For example, expression cloning is employed wherein polyadenylated RNA is prepared from a cell responsive to the polypeptides, for example, NIH3T3 cells which are known to contain multiple receptors for the FGF family proteins, and SC-3 cells, and a cDNA library created from this RNA is divided into pools and used to transfect COS cells or other cells that are not responsive to the polypeptides. Transfected cells which are grown on glass slides are exposed to the polypeptide of the present invention, after they have been labeled. The polypeptides can be labeled by a variety of means including iodination or inclusion of a recognition site for a site-specific protein kinase.

[0746] Following fixation and incubation, the slides are subjected to auto-radiographic analysis. Positive pools are identified and sub-pools are prepared and re-transfected using an iterative sub-pooling and re-screening process, eventually yielding a single clones that encodes the putative receptor.

[0747] As an alternative approach for receptor identification, the labeled polypeptides can be photoaffinity linked with cell membrane or extract preparations that express the receptor molecule. Cross-linked material is resolved by PAGE analysis and exposed to X-ray film. The labeled complex containing the receptors of the polypeptides can be excised, resolved into peptide fragments, and subjected to protein microsequencing. The amino acid sequence obtained from microsequencing would be used to design a set of degenerate oligonucleotide probes to screen a cDNA library to identify the genes encoding the putative receptors.

[0748] Moreover, the techniques of gene-shuffling, motif-shuffling, exon-shuffling, and/or codon-shuffling (collectively referred to as “DNA shuffling”) may be employed to modulate the activities of the polypeptide of the present invention thereby effectively generating agonists and antagonists of the polypeptide of the present invention. See generally, U.S. Pat. Nos. 5,605,793, 5,811,238, 5,830,721, 5,834,252, and 5,837,458, and Patten, P. A., et al., Curr. Opinion Biotechnol. 8:724-33 (1997); Harayama, S. Trends Biotechnol. 16(2):76-82 (1998); Hansson, L. O., et al., J. Mol. Biol. 287:265-76 (1999); and Lorenzo, M. M. and Blasco, R. Biotechniques 24(2):308-13 (1998); each of these patents and publications are hereby incorporated by reference). In one embodiment, alteration of polynucleotides and corresponding polypeptides may be achieved by DNA shuffling. DNA shuffling involves the assembly of two or more DNA segments into a desired molecule by homologous, or site-specific, recombination. In another embodiment, polynucleotides and corresponding polypeptides may be altered by being subjected to random mutagenesis by error-prone PCR, random nucleotide insertion or other methods prior to recombination. In another embodiment, one or more components, motifs, sections, parts, domains, fragments, etc., of the polypeptide of the present invention may be recombined with one or more components, motifs, sections, parts, domains, fragments, etc. of one or more heterologous molecules. In preferred embodiments, the heterologous molecules are family members. In further preferred embodiments, the heterologous molecule is a growth factor such as, for example, platelet-derived growth factor (PDGF), insulin-like growth factor (IGF-I), transforming growth factor (TGF)-alpha, epidermal growth factor (EGF), fibroblast growth factor (FGF), TGF-beta, bone morphogenetic protein (BMP)-2, BMP-4, BMP-5, BMP-6, BMP-7, activins A and B, decapentaplegic(dpp), 60A, OP-2, dorsalin, growth differentiation factors (GDFs), nodal, MIS, inhibin-alpha, TGF-beta1, TGF-beta2, TGF-beta3, TGF-beta5, and glial-derived neurotrophic factor (GDNF).

[0749] Other preferred fragments are biologically active fragments of the polypeptide of the present invention. Biologically active fragments are those exhibiting activity similar, but not necessarily identical, to an activity of the polypeptide of the present invention. The biological activity of the fragments may include an improved desired activity, or a decreased undesirable activity.

[0750] Additionally, this invention provides a method of screening compounds to identify those which modulate the action of the polypeptide of the present invention. An example of such an assay comprises combining a mammalian fibroblast cell, a the polypeptide of the present invention, the compound to be screened and ³[H] thymidine under cell culture conditions where the fibroblast cell would normally proliferate. A control assay may be performed in the absence of the compound to be screened and compared to the amount of fibroblast proliferation in the presence of the compound to determine if the compound stimulates proliferation by determining the uptake of ³[H] thymidine in each case. The amount of fibroblast cell proliferation is measured by liquid scintillation chromatography which measures the incorporation of ³[H] thymidine. Both agonist and antagonist compounds may be identified by this procedure.

[0751] In another method, a mammalian cell or membrane preparation expressing a receptor for a polypeptide of the present invention is incubated with a labeled polypeptide of the present invention in the presence of the compound. The ability of the compound to enhance or block this interaction could then be measured. Alternatively, the response of a known second messenger system following interaction of a compound to be screened and the receptor is measured and the ability of the compound to bind to the receptor and elicit a second messenger response is measured to determine if the compound is a potential agonist or antagonist. Such second messenger systems include but are not limited to, cAMP guanylate cyclase, ion channels or phosphoinositide hydrolysis.

[0752] All of these above assays can be used as diagnostic or prognostic markers. The molecules discovered using these assays can be used to treat disease or to bring about a particular result in a patient (e.g., blood vessel growth) by activating or inhibiting the polypeptide/molecule. Moreover, the assays can discover agents which may inhibit or enhance the production of the polypeptides of the invention from suitably manipulated cells or tissues.

[0753] Therefore, the invention includes a method of identifying compounds which bind to a polypeptide of the invention comprising the steps of: (a) incubating a candidate binding compound with a polypeptide of the present invention; and (b) determining if binding has occurred. Moreover, the invention includes a method of identifying agonists/antagonists comprising the steps of: (a) incubating a candidate compound with a polypeptide of the present invention, (b) assaying a biological activity, and (b) determining if a biological activity of the polypeptide has been altered.

[0754] Targeted Delivery

[0755] In another embodiment, the invention provides a method of delivering compositions to targeted cells expressing a receptor for a polypeptide of the invention, or cells expressing a cell bound form of a polypeptide of the invention.

[0756] As discussed herein, polypeptides or antibodies of the invention may be associated with heterologous polypeptides, heterologous nucleic acids, toxins, or prodrugs via hydrophobic, hydrophilic, ionic and/or covalent interactions. In one embodiment, the invention provides a method for the specific delivery of compositions of the invention to cells by administering polypeptides of the invention (including antibodies) that are associated with heterologous polypeptides or nucleic acids. In one example, the invention provides a method for delivering a therapeutic protein into the targeted cell. In another example, the invention provides a method for delivering a single stranded nucleic acid (e.g., antisense or ribozymes) or double stranded nucleic acid (e.g., DNA that can integrate into the cell's genome or replicate episomally and that can be transcribed) into the targeted cell.

[0757] In another embodiment, the invention provides a method for the specific destruction of cells (e.g., the destruction of tumor cells) by administering polypeptides of the invention (e.g., polypeptides of the invention or antibodies of the invention) in association with toxins or cytotoxic prodrugs.

[0758] By “toxin” is meant compounds that bind and activate endogenous cytotoxic effector systems, radioisotopes, holotoxins, modified toxins, catalytic subunits of toxins, or any molecules or enzymes not normally present in or on the surface of a cell that under defined conditions cause the cell's death. Toxins that may be used according to the methods of the invention include, but are not limited to, radioisotopes known in the art, compounds such as, for example, antibodies (or complement fixing containing portions thereof) that bind an inherent or induced endogenous cytotoxic effector system, thymidine kinase, endonuclease, RNAse, alpha toxin, ricin, abrin, Pseudomonas exotoxin A, diphtheria toxin, saporin, momordin, gelonin, pokeweed antiviral protein, alpha-sarcin and cholera toxin. By “cytotoxic prodrug” is meant a non-toxic compound that is converted by an enzyme, normally present in the cell, into a cytotoxic compound. Cytotoxic prodrugs that may be used according to the methods of the invention include, but are not limited to, glutamyl derivatives of benzoic acid mustard alkylating agent, phosphate derivatives of etoposide or mitomycin C, cytosine arabinoside, daunorubisin, and phenoxyacetamide derivatives of doxorubicin.

[0759] Drug Screening

[0760] Further contemplated is the use of the polypeptides of the present invention, or the polynucleotides encoding these polypeptides, to screen for molecules which modify the activities of the polypeptides of the present invention. Such a method would include contacting the polypeptide of the present invention with a selected compound(s) suspected of having antagonist or agonist activity, and assaying the activity of these polypeptides following binding.

[0761] This invention is particularly useful for screening therapeutic compounds by using the polypeptides of the present invention, or binding fragments thereof, in any of a variety of drug screening techniques. The polypeptide or fragment employed in such a test may be affixed to a solid support, expressed on a cell surface, free in solution, or located intracellularly. One method of drug screening utilizes eukaryotic or prokaryotic host cells which are stably transformed with recombinant nucleic acids expressing the polypeptide or fragment. Drugs are screened against such transformed cells in competitive binding assays. One may measure, for example, the formulation of complexes between the agent being tested and a polypeptide of the present invention.

[0762] Thus, the present invention provides methods of screening for drugs or any other agents which affect activities mediated by the polypeptides of the present invention. These methods comprise contacting such an agent with a polypeptide of the present invention or a fragment thereof and assaying for the presence of a complex between the agent and the polypeptide or a fragment thereof, by methods well known in the art. In such a competitive binding assay, the agents to screen are typically labeled. Following incubation, free agent is separated from that present in bound form, and the amount of free or uncomplexed label is a measure of the ability of a particular agent to bind to the polypeptides of the present invention.

[0763] Another technique for drug screening provides high throughput screening for compounds having suitable binding affinity to the polypeptides of the present invention, and is described in great detail in European Patent Application 84/03564, published on Sep. 13, 1984, which is incorporated herein by reference herein. Briefly stated, large numbers of different small peptide test compounds are synthesized on a solid substrate, such as plastic pins or some other surface. The peptide test compounds are reacted with polypeptides of the present invention and washed. Bound polypeptides are then detected by methods well known in the art. Purified polypeptides are coated directly onto plates for use in the aforementioned drug screening techniques. In addition, non-neutralizing antibodies may be used to capture the peptide and immobilize it on the solid support.

[0764] This invention also contemplates the use of competitive drug screening assays in which neutralizing antibodies capable of binding polypeptides of the present invention specifically compete with a test compound for binding to the polypeptides or fragments thereof. In this manner, the antibodies are used to detect the presence of any peptide which shares one or more antigenic epitopes with a polypeptide of the invention.

[0765] Antisense And Ribozyme (Antagonists)

[0766] In specific embodiments, antagonists according to the present invention are nucleic acids corresponding to the sequences contained in SEQ ID NO:X, or the complementary strand thereof, and/or to cDNA sequences contained in cDNA Clone ID NO:Z identified for example, in Table 1A. In one embodiment, antisense sequence is generated internally, by the organism, in another embodiment, the antisense sequence is separately administered (see, for example, O'Connor, J., Neurochem. 56:560 (1991). Oligodeoxynucleotides as Antisense Inhibitors of Gene Expression, CRC Press, Boca Raton, Fla. (1988). Antisense technology can be used to control gene expression through antisense DNA or RNA, or through triple-helix formation. Antisense techniques are discussed for example, in Okano, J., Neurochem. 56:560 (1991); Oligodeoxynucleotides as Antisense Inhibitors of Gene Expression, CRC Press, Boca Raton, Fla. (1988). Triple helix formation is discussed in, for instance, Lee et al., Nucleic Acids Research 6:3073 (1979); Cooney et al., Science 241:456 (1988); and Dervan et al., Science 251:1300 (1991). The methods are based on binding of a polynucleotide to a complementary DNA or RNA.

[0767] For example, the use of c-myc and c-myb antisense RNA constructs to inhibit the growth of the non-lymphocytic leukemia cell line HL-60 and other cell lines was previously described. (Wickstrom et al. (1988); Anfossi et al. (1989)). These experiments were performed in vitro by incubating cells with the oligoribonucleotide. A similar procedure for in vivo use is described in WO 91/15580. Briefly, a pair of oligonucleotides for a given antisense RNA is produced as follows: A sequence complimentary to the first 15 bases of the open reading frame is flanked by an EcoR1 site on the 5 end and a Hind III site on the 3 end. Next, the pair of oligonucleotides is heated at 90° C. for one minute and then annealed in 2× ligation buffer (20 mM TRIS HCl pH 7.5, 10 mM MgC12, 10 MM dithiothreitol (DTT) and 0.2 mM ATP) and then ligated to the EcoR1/Hind III site of the retroviral vector PMV7 (WO 91/15580).

[0768] For example, the 5′ coding portion of a polynucleotide that encodes the polypeptide of the present invention may be used to design an antisense RNA oligonucleotide of from about 10 to 40 base pairs in length. A DNA oligonucleotide is designed to be complementary to a region of the gene involved in transcription thereby preventing transcription and the production of the receptor. The antisense RNA oligonucleotide hybridizes to the mRNA in vivo and blocks translation of the mRNA molecule into receptor polypeptide.

[0769] In one embodiment, the antisense nucleic acid of the invention is produced intracellularly by transcription from an exogenous sequence. For example, a vector or a portion thereof, is transcribed, producing an antisense nucleic acid (RNA) of the invention. Such a vector would contain a sequence encoding the antisense nucleic acid. Such a vector can remain episomal or become chromosomally integrated, as long as it can be transcribed to produce the desired antisense RNA. Such vectors can be constructed by recombinant DNA technology methods standard in the art. Vectors can be plasmid, viral, or others known in the art, used for replication and expression in vertebrate cells. Expression of the sequence encoding the polypeptide of the present invention or fragments thereof, can be by any promoter known in the art to act in vertebrate, preferably human cells. Such promoters can be inducible or constitutive. Such promoters include, but are not limited to, the SV40 early promoter region (Bemoist and Chambon, Nature 29:304-310 (1981), the promoter contained in the 3′ long terminal repeat of Rous sarcoma virus (Yamamoto et al., Cell 22:787-797 (1980), the herpes thymidine promoter (Wagner et al., Proc. Natl. Acad. Sci. U.S.A. 78:1441-1445 (1981), the regulatory sequences of the metallothionein gene (Brinster, et al., Nature 296:39-42 (1982)), etc.

[0770] The antisense nucleic acids of the invention comprise a sequence complementary to at least a portion of an RNA transcript of a gene of the present invention. However, absolute complementarity, although preferred, is not required. A sequence “complementary to at least a portion of an RNA,” referred to herein, means a sequence having sufficient complementarity to be able to hybridize with the RNA, forming a stable duplex; in the case of double stranded antisense nucleic acids, a single strand of the duplex DNA may thus be tested, or triplex formation may be assayed. The ability to hybridize will depend on both the degree of complementarity and the length of the antisense nucleic acid. Generally, the larger the hybridizing nucleic acid, the more base mismatches with a RNA it may contain and still form a stable duplex (or triplex as the case may be). One skilled in the art can ascertain a tolerable degree of mismatch by use of standard procedures to determine the melting point of the hybridized complex.

[0771] Oligonucleotides that are complementary to the 5′ end of the message, e.g., the 5′ untranslated sequence up to and including the AUG initiation codon, should work most efficiently at inhibiting translation. However, sequences complementary to the 3′ untranslated sequences of mRNAs have been shown to be effective at inhibiting translation of mRNAs as well. See generally, Wagner, R., 1994, Nature 372:333-335. Thus, oligonucleotides complementary to either the 5′- or 3′-non-translated, non-coding regions of polynucleotide sequences described herein could be used in an antisense approach to inhibit translation of endogenous mRNA. Oligonucleotides complementary to the 5′ untranslated region of the mRNA should include the complement of the AUG start codon. Antisense oligonucleotides complementary to mRNA coding regions are less efficient inhibitors of translation but could be used in accordance with the invention. Whether designed to hybridize to the 5′-, 3′- or coding region of mRNA of the present invention, antisense nucleic acids should be at least six nucleotides in length, and are preferably oligonucleotides ranging from 6 to about 50 nucleotides in length. In specific aspects the oligonucleotide is at least 10 nucleotides, at least 17 nucleotides, at least 25 nucleotides or at least 50 nucleotides.

[0772] The polynucleotides of the invention can be DNA or RNA or chimeric mixtures or derivatives or modified versions thereof, single-stranded or double-stranded. The oligonucleotide can be modified at the base moiety, sugar moiety, or phosphate backbone, for example, to improve stability of the molecule, hybridization, etc. The oligonucleotide may include other appended groups such as peptides (e.g., for targeting host cell receptors in vivo), or agents facilitating transport across the cell membrane (see, e.g., Letsinger et al., 1989, Proc. Natl. Acad. Sci. U.S.A. 86:6553-6556; Lemaitre et al., 1987, Proc. Natl. Acad. Sci. 84:648-652; PCT Publication No. WO 88/09810, published Dec. 15, 1988) or the blood-brain barrier (see, e.g., PCT Publication No. WO 89/10134, published Apr. 25, 1988), hybridization-triggered cleavage agents. (See, e.g., Krol et al., 1988, BioTechniques 6:958-976) or intercalating agents. (See, e.g., Zon, 1988, Pharm. Res. 5:539-549). To this end, the oligonucleotide may be conjugated to another molecule, e.g., a peptide, hybridization triggered cross-linking agent, transport agent, hybridization-triggered cleavage agent, etc.

[0773] The antisense oligonucleotide may comprise at least one modified base moiety which is selected from the group including, but not limited to, 5-fluorouracil, 5-bromouracil, 5-chlorouracil, 5-iodouracil, hypoxanthine, xantine, 4-acetylcytosine, 5-(carboxyhydroxylmethyl) uracil, 5-carboxymethylaminomethyl-2-thiouridine, 5-carboxymethylaminomethyluracil, dihydrouracil, beta-D-galactosylqueosine, inosine, N6-isopentenyladenine, 1-methylguanine, 1-methylinosine, 2,2-dimethylguanine, 2-methyladenine, 2-methylguanine, 3-methylcytosine, 5-methylcytosine, N6-adenine, 7-methylguanine, 5-methylaminomethyluracil, 5-methoxyaminomethyl-2-thiouracil, beta-D-mannosylqueosine, 5′-methoxycarboxymethyluracil, 5-methoxyuracil, 2-methylthio-N6-isopentenyladenine, uracil-5-oxyacetic acid (v), wybutoxosine, pseudouracil, queosine, 2-thiocytosine, 5-methyl-2-thiouracil, 2-thiouracil, 4-thiouracil, 5-methyluracil, uracil-5-oxyacetic acid methylester, uracil-5-oxyacetic acid (v), 5-methyl-2-thiouracil, 3-(3-amino-3-N-2-carboxypropyl) uracil, (acp3)w, and 2,6-diaminopurine.

[0774] The antisense oligonucleotide may also comprise at least one modified sugar moiety selected from the group including, but not limited to, arabinose, 2-fluoroarabinose, xylulose, and hexose.

[0775] In yet another embodiment, the antisense oligonucleotide comprises at least one modified phosphate backbone selected from the group including, but not limited to, a phosphorothioate, a phosphorodithioate, a phosphoramidothioate, a phosphoramidate, a phosphordiamidate, a methylphosphonate, an alkyl phosphotriester, and a formacetal or analog thereof.

[0776] In yet another embodiment, the antisense oligonucleotide is an a-anomenc oligonucleotide. An a-anomeric oligonucleotide forms specific double-stranded hybrids with complementary RNA in which, contrary to the usual b-units, the strands run parallel to each other (Gautier et al., 1987, Nucl. Acids Res. 15:6625-6641). The oligonucleotide is a 2′-0-methylribonucleotide (Inoue et al., 1987, Nucl. Acids Res. 15:6131-6148), or a chimeric RNA-DNA analogue (Inoue et al., 1987, FEBS Lett. 215:327-330).

[0777] Polynucleotides of the invention may be synthesized by standard methods known in the art, e.g. by use of an automated DNA synthesizer (such as are commercially available from Biosearch, Applied Biosystems, etc.). As examples, phosphorothioate oligonucleotides may be synthesized by the method of Stein et al. (1988, Nucl. Acids Res. 16:3209), methylphosphonate oligonucleotides can be prepared by use of controlled pore glass polymer supports (Sarin et al., 1988, Proc. Natl. Acad. Sci. U.S.A. 85:7448-7451), etc.

[0778] While antisense nucleotides complementary to the coding region sequence could be used, those complementary to the transcribed untranslated region are most preferred.

[0779] Potential antagonists according to the invention also include catalytic RNA, or a ribozyme (See, e.g., PCT International Publication WO 90/11364, published Oct. 4, 1990; Sarver et al, Science 247:1222-1225 (1990). While ribozymes that cleave mRNA at site specific recognition sequences can be used to destroy mRNAs, the use of hammerhead ribozymes is preferred. Hammerhead ribozymes cleave mRNAs at locations dictated by flanking regions that form complementary base pairs with the target mRNA. The sole requirement is that the target mRNA have the following sequence of two bases: 5′-UG-3′. The construction and production of hammerhead ribozymes is well known in the art and is described more fully in Haseloff and Gerlach, Nature 334:585-591 (1988). There are numerous potential hammerhead ribozyme cleavage sites within the nucleotide sequence of SEQ ID NO:X. Preferably, the ribozyme is engineered so that the cleavage recognition site is located near the 5′ end of the mRNA; i.e., to increase efficiency and minimize the intracellular accumulation of non-functional mRNA transcripts.

[0780] As in the antisense approach, the ribozymes of the invention can be composed of modified oligonucleotides (e.g., for improved stability, targeting, etc.) and should be delivered to cells which express in vivo. DNA constructs encoding the ribozyme may be introduced into the cell in the same manner as described above for the introduction of antisense encoding DNA. A preferred method of delivery involves using a DNA construct “encoding” the ribozyme under the control of a strong constitutive promoter, such as, for example, pol III or pol II promoter, so that transfected cells will produce sufficient quantities of the ribozyme to destroy endogenous messages and inhibit translation. Since ribozymes unlike antisense molecules, are catalytic, a lower intracellular concentration is required for efficiency.

[0781] Antagonist/agonist compounds may be employed to inhibit the cell growth and proliferation effects of the polypeptides of the present invention on neoplastic cells and tissues, i.e. stimulation of angiogenesis of tumors, and, therefore, retard or prevent abnormal cellular growth and proliferation, for example, in tumor formation or growth.

[0782] The antagonist/agonist may also be employed to prevent hyper-vascular diseases, and prevent the proliferation of epithelial lens cells after extracapsular cataract surgery. Prevention of the mitogenic activity of the polypeptides of the present invention may also be desirous in cases such as restenosis after balloon angioplasty.

[0783] The antagonist/agonist may also be employed to prevent the growth of scar tissue during wound healing.

[0784] The antagonist/agonist may also be employed to treat the diseases described herein.

[0785] Thus, the invention provides a method of treating disorders or diseases, including but not limited to the disorders or diseases listed throughout this application, associated with overexpression of a polynucleotide of the present invention by administering to a patient (a) an antisense molecule directed to the polynucleotide of the present invention, and/or (b) a ribozyme directed to the polynucleotide of the present invention.

[0786] Binding Peptides and Other Molecules

[0787] The invention also encompasses screening methods for identifying polypeptides and nonpolypeptides that bind polypeptides of the invention, and the binding molecules identified thereby. These binding molecules are useful, for example, as agonists and antagonists of the polypeptides of the invention. Such agonists and antagonists can be used, in accordance with the invention, in the therapeutic embodiments described in detail, below.

[0788] This method comprises the steps of:

[0789] a. contacting polypeptides of the invention with a plurality of molecules; and

[0790] b. identifying a molecule that binds the polypeptides of the invention.

[0791] The step of contacting the polypeptides of the invention with the plurality of molecules may be effected in a number of ways. For example, one may contemplate immobilizing the polypeptides on a solid support and bringing a solution of the plurality of molecules in contact with the immobilized polypeptides. Such a procedure would be akin to an affinity chromatographic process, with the affinity matrix being comprised of the immobilized polypeptides of the invention. The molecules having a selective affinity for the polypeptides can then be purified by affinity selection. The nature of the solid support, process for attachment of the polypeptides to the solid support, solvent, and conditions of the affinity isolation or selection are largely conventional and well known to those of ordinary skill in the art.

[0792] Alternatively, one may also separate a plurality of polypeptides into substantially separate fractions comprising a subset of or individual polypeptides. For instance, one can separate the plurality of polypeptides by gel electrophoresis, column chromatography, or like method known to those of ordinary skill for the separation of polypeptides. The individual polypeptides can also be produced by a transformed host cell in such a way as to be expressed on or about its outer surface (e.g., a recombinant phage). Individual isolates can then be “probed” by the polypeptides of the invention, optionally in the presence of an inducer should one be required for expression, to determine if any selective affinity interaction takes place between the polypeptides and the individual clone. Prior to contacting the polypeptides with each fraction comprising individual polypeptides, the polypeptides could first be transferred to a solid support for additional convenience. Such a solid support may simply be a piece of filter membrane, such as one made of nitrocellulose or nylon. In this manner, positive clones could be identified from a collection of transformed host cells of an expression library, which harbor a DNA construct encoding a polypeptide having a selective affinity for polypeptides of the invention. Furthermore, the amino acid sequence of the polypeptide having a selective affinity for the polypeptides of the invention can be determined directly by conventional means or the coding sequence of the DNA encoding the polypeptide can frequently be determined more conveniently. The primary sequence can then be deduced from the corresponding DNA sequence. If the amino acid sequence is to be determined from the polypeptide itself, one may use microsequencing techniques. The sequencing technique may include mass spectroscopy.

[0793] In certain situations, it may be desirable to wash away any unbound polypeptides from a mixture of the polypeptides of the invention and the plurality of polypeptides prior to attempting to determine or to detect the presence of a selective affinity interaction. Such a wash step may be particularly desirable when the polypeptides of the invention or the plurality of polypeptides are bound to a solid support.

[0794] The plurality of molecules provided according to this method may be provided by way of diversity libraries, such as random or combinatorial peptide or nonpeptide libraries which can be screened for molecules that specifically bind polypeptides of the invention. Many libraries are known in the art that can be used, e.g., chemically synthesized libraries, recombinant (e.g., phage display libraries), and in vitro translation-based libraries. Examples of chemically synthesized libraries are described in Fodor et al., 1991, Science 251:767-773; Houghten et al., 1991, Nature 354:84-86; Lam et al., 1991, Nature 354:82-84; Medynski, 1994, Bio/Technology 12:709-710;Gallop et al., 1994, J. Medicinal Chemistry 37(9):1233-1251; Ohlmeyer et al., 1993, Proc. Natl. Acad. Sci. USA 90:10922-10926; Erb et al., 1994, Proc. Natl. Acad. Sci. USA 91:11422-11426; Houghten et al., 1992, Biotechniques 13:412; Jayawickreme et al., 1994, Proc. Natl. Acad. Sci. USA 91:1614-1618; Salmon et al., 1993, Proc. Natl. Acad. Sci. USA 90:11708-11712; PCT Publication No. WO 93/20242; and Brenner and Lemer, 1992, Proc. Natl. Acad. Sci. USA 89:5381-5383.

[0795] Examples of phage display libraries are described in Scott and Smith, 1990, Science 249:386-390; Devlin et al., 1990, Science, 249:404-406; Christian, R. B., et al., 1992, J. Mol. Biol. 227:711-718); Lenstra, 1992, J. Immunol. Meth. 152:149-157; Kay et al., 1993, Gene 128:59-65; and PCT Publication No. WO 94/18318 dated Aug. 18, 1994.

[0796] In vitro translation-based libraries include but are not limited to those described in PCT Publication No. WO 91/05058 dated Apr. 18, 1991; and Mattheakis et al., 1994, Proc. Natl. Acad. Sci. USA 91:9022-9026.

[0797] By way of examples of nonpeptide libraries, a benzodiazepine library (see e.g., Bunin et al., 1994, Proc. Natl. Acad. Sci. USA 91:4708-4712) can be adapted for use. Peptoid libraries (Simon et al., 1992, Proc. Natl. Acad. Sci. USA 89:9367-9371) can also be used. Another example of a library that can be used, in which the amide functionalities in peptides have been permethylated to generate a chemically transformed combinatorial library, is described by Ostresh et al. (1994, Proc. Natl. Acad. Sci. USA 91:11138-11142).

[0798] The variety of non-peptide libraries that are useful in the present invention is great. For example, Ecker and Crooke, 1995, Bio/Technology 13:351-360 list benzodiazepines, hydantoins, piperazinediones, biphenyls, sugar analogs, beta-mercaptoketones, arylacetic acids, acylpiperidines, benzopyrans, cubanes, xanthines, aminimides, and oxazolones as among the chemical species that form the basis of various libraries.

[0799] Non-peptide libraries can be classified broadly into two types: decorated monomers and oligomers. Decorated monomer libraries employ a relatively simple scaffold structure upon which a variety functional groups is added. Often the scaffold will be a molecule with a known useful pharmacological activity. For example, the scaffold might be the benzodiazepine structure.

[0800] Non-peptide oligomer libraries utilize a large number of monomers that are assembled together in ways that create new shapes that depend on the order of the monomers. Among the monomer units that have been used are carbamates, pyrrolinones, and morpholinos. Peptoids, peptide-like oligomers in which the side chain is attached to the alpha amino group rather than the alpha carbon, form the basis of another version of non-peptide oligomer libraries. The first non-peptide oligomer libraries utilized a single type of monomer and thus contained a repeating backbone. Recent libraries have utilized more than one monomer, giving the libraries added flexibility.

[0801] Screening the libraries can be accomplished by any of a variety of commonly known methods. See, e.g., the following references, which disclose screening of peptide libraries: Parmley and Smith, 1989, Adv. Exp. Med. Biol. 251:215-218; Scott and Smith, 1990, Science 249:386-390; Fowlkes et al., 1992; BioTechniques 13:422-427; Oldenburg et al., 1992, Proc. Natl. Acad. Sci. USA 89:5393-5397; Yu et al., 1994, Cell 76:933-945; Staudt et al., 1988, Science 241:577-580; Bock et al., 1992, Nature 355:564-566; Tuerk et al., 1992, Proc. Natl. Acad. Sci. USA 89:6988-6992; Ellington et al., 1992, Nature 355:850-852; U.S. Pat. Nos. 5,096,815, 5,223,409, and 5,198,346, all to Ladner et al.; Rebar and Pabo, 1993, Science 263:671-673; and CT Publication No. WO 94/18318.

[0802] In a specific embodiment, screening to identify a molecule that binds polypeptides of the invention can be carried out by contacting the library members with polypeptides of the invention immobilized on a solid phase and harvesting those library members that bind to the polypeptides of the invention. Examples of such screening methods, termed “panning” techniques are described by way of example in Parmley and Smith, 1988, Gene 73:305-318; Fowlkes et al., 1992, BioTechniques 13:422-427; PCT Publication No. WO 94/18318; and in references cited herein.

[0803] In another embodiment, the two-hybrid system for selecting interacting proteins in yeast (Fields and Song, 1989, Nature 340:245-246; Chien et al., 1991, Proc. Natl. Acad. Sci. USA 88:9578-9582) can be used to identify molecules that specifically bind to polypeptides of the invention.

[0804] Where the binding molecule is a polypeptide, the polypeptide can be conveniently selected from any peptide library, including random peptide libraries, combinatorial peptide libraries, or biased peptide libraries. The term “biased” is used herein to mean that the method of generating the library is manipulated so as to restrict one or more parameters that govern the diversity of the resulting collection of molecules, in this case peptides.

[0805] Thus, a truly random peptide library would generate a collection of peptides in which the probability of finding a particular amino acid at a given position of the peptide is the same for all 20 amino acids. A bias can be introduced into the library, however, by specifying, for example, that a lysine occur every fifth amino acid or that positions 4, 8, and 9 of a decapeptide library be fixed to include only arginine. Clearly, many types of biases can be contemplated, and the present invention is not restricted to any particular bias. Furthermore, the present invention contemplates specific types of peptide libraries, such as phage displayed peptide libraries and those that utilize a DNA construct comprising a lambda phage vector with a DNA insert.

[0806] As mentioned above, in the case of a binding molecule that is a polypeptide, the polypeptide may have about 6 to less than about 60 amino acid residues, preferably about 6 to about 10 amino acid residues, and most preferably, about 6 to about 22 amino acids. In another embodiment, a binding polypeptide has in the range of 15-100 amino acids, or 20-50 amino acids.

[0807] The selected binding polypeptide can be obtained by chemical synthesis or recombinant expression.

[0808] Other Activities

[0809] A polypeptide, polynucleotide, agonist, or antagonist of the present invention, as a result of the ability to stimulate vascular endothelial cell growth, may be employed in treatment for stimulating re-vascularization of ischemic tissues due to various disease conditions such as thrombosis, arteriosclerosis, and other cardiovascular conditions. The polypeptide, polynucleotide, agonist, or antagonist of the present invention may also be employed to stimulate angiogenesis and limb regeneration, as discussed above.

[0810] A polypeptide, polynucleotide, agonist, or antagonist of the present invention may also be employed for treating wounds due to injuries, bums, post-operative tissue repair, and ulcers since they are mitogenic to various cells of different origins, such as fibroblast cells and skeletal muscle cells, and therefore, facilitate the repair or replacement of damaged or diseased tissue.

[0811] A polypeptide, polynucleotide, agonist, or antagonist of the present invention may also be employed stimulate neuronal growth and to treat and prevent neuronal damage which occurs in certain neuronal disorders or neuro-degenerative conditions such as Alzheimer's disease, Parkinson's disease, and AIDS-related complex. A polypeptide, polynucleotide, agonist, or antagonist of the present invention may have the ability to stimulate chondrocyte growth, therefore, they may be employed to enhance bone and periodontal regeneration and aid in tissue transplants or bone grafts.

[0812] A polypeptide, polynucleotide, agonist, or antagonist of the present invention may be also be employed to prevent skin aging due to sunburn by stimulating keratinocyte growth.

[0813] A polypeptide, polynucleotide, agonist, or antagonist of the present invention may also be employed for preventing hair loss, since FGF family members activate hair-forming cells and promotes melanocyte growth. Along the same lines, a polypeptide, polynucleotide, agonist, or antagonist of the present invention may be employed to stimulate growth and differentiation of hematopoietic cells and bone marrow cells when used in combination with other cytokines.

[0814] A polypeptide, polynucleotide, agonist, or antagonist of the present invention may also be employed to maintain organs before transplantation or for supporting cell culture of primary tissues. A polypeptide, polynucleotide, agonist, or antagonist of the present invention may also be employed for inducing tissue of mesodermal origin to differentiate in early embryos.

[0815] A polypeptide, polynucleotide, agonist, or antagonist of the present invention may also increase or decrease the differentiation or proliferation of embryonic stem cells, besides, as discussed above, hematopoietic lineage.

[0816] A polypeptide, polynucleotide, agonist, or antagonist of the present invention may also be used to modulate mammalian characteristics, such as body height, weight, hair color, eye color, skin, percentage of adipose tissue, pigmentation, size, and shape (e.g., cosmetic surgery). Similarly, a polypeptide, polynucleotide, agonist, or antagonist of the present invention may be used to modulate mammalian metabolism affecting catabolism, anabolism, processing, utilization, and storage of energy.

[0817] A polypeptide, polynucleotide, agonist, or antagonist of the present invention may be used to change a mammal's mental state or physical state by influencing biorhythms, caricadic rhythms, depression (including depressive disorders), tendency for violence, tolerance for pain, reproductive capabilities (preferably by Activin or Inhibin-like activity), hormonal or endocrine levels, appetite, libido, memory, stress, or other cognitive qualities.

[0818] A polypeptide, polynucleotide, agonist, or antagonist of the present invention may also be used as a food additive or preservative, such as to increase or decrease storage capabilities, fat content, lipid, protein, carbohydrate, vitamins, minerals, cofactors or other nutritional components.

[0819] The above-recited applications have uses in a wide variety of hosts. Such hosts include, but are not limited to, human, murine, rabbit, goat, guinea pig, camel, horse, mouse, rat, hamster, pig, micro-pig, chicken, goat, cow, sheep, dog, cat, non-human primate, and human. In specific embodiments, the host is a mouse, rabbit, goat, guinea pig, chicken, rat, hamster, pig, sheep, dog or cat. In preferred embodiments, the host is a mammal. In most preferred embodiments, the host is a human.

[0820] Other Preferred Embodiments

[0821] Other preferred embodiments of the claimed invention include an isolated nucleic acid molecule comprising a nucleotide sequence which is at least 95% identical to a sequence of at least about 50 contiguous nucleotides in the nucleotide sequence of SEQ ID NO:X or the complementary strand thereto, the nucleotide sequence as defined in column 5 of Table 1A or columns 8 and 9 of Table 2 or the complementary strand thereto, and/or cDNA contained in Clone ID NO:Z.

[0822] Also preferred is a nucleic acid molecule wherein said sequence of contiguous nucleotides is included in the nucleotide sequence of the portion of SEQ ID NO:X as defined in column 5, “ORF (From-To)”, in Table 1A.

[0823] Also preferred is a nucleic acid molecule wherein said sequence of contiguous nucleotides is included in the nucleotide sequence of the portion of SEQ ID NO:X as defined in columns 8 and 9, “NT From” and “NT To” respectively, in Table 2.

[0824] Also preferred is an isolated nucleic acid molecule comprising a nucleotide sequence which is at least 95% identical to a sequence of at least about 150 contiguous nucleotides in the nucleotide sequence of SEQ ID NO:X or the complementary strand thereto, the nucleotide sequence as defined in column 5 of Table 1A or columns 8 and 9 of Table 2 or the complementary strand thereto, and/or cDNA contained in Clone ID NO:Z.

[0825] Further preferred is an isolated nucleic acid molecule comprising a nucleotide sequence which is at least 95% identical to a sequence of at least about 500 contiguous nucleotides in the nucleotide sequence of SEQ ID NO:X or the complementary strand thereto, the nucleotide sequence as defined in column 5 of Table 1A or columns 8 and 9 of Table 2 or the complementary strand thereto, and/or cDNA contained in Clone ID NO:Z.

[0826] A further preferred embodiment is a nucleic acid molecule comprising a nucleotide sequence which is at least 95% identical to the nucleotide sequence of the portion of SEQ ID NO:X defined in column 5, “ORF (From-To)”, in Table 1A.

[0827] A further preferred embodiment is a nucleic acid molecule comprising a nucleotide sequence which is at least 95% identical to the nucleotide sequence of the portion of SEQ ID NO:X defined in columns 8 and 9, “NT From” and “NT To”, respectively, in Table 2.

[0828] A further preferred embodiment is an isolated nucleic acid molecule comprising a nucleotide sequence which is at least 95% identical to the complete nucleotide sequence of SEQ ID NO:X or the complementary strand thereto, the nucleotide sequence as defined in column 5 of Table 1A or columns 8 and 9 of Table 2 or the complementary strand thereto, and/or cDNA contained in Clone ID NO:Z.

[0829] Also preferred is an isolated nucleic acid molecule which hybridizes under stringent hybridization conditions to a nucleic acid molecule comprising a nucleotide sequence of SEQ ID NO:X or the complementary strand thereto, the nucleotide sequence as defined in column 5 of Table 1A or columns 8 and 9 of Table 2 or the complementary strand thereto, and/or cDNA contained in Clone ID NO:Z, wherein said nucleic acid molecule which hybridizes does not hybridize under stringent hybridization conditions to a nucleic acid molecule having a nucleotide sequence consisting of only A residues or of only T residues.

[0830] Also preferred is a composition of matter comprising a DNA molecule which comprises the cDNA contained in Clone ID NO:Z.

[0831] Also preferred is an isolated nucleic acid molecule comprising a nucleotide sequence which is at least 95% identical to a sequence of at least 50 contiguous nucleotides of the cDNA sequence contained in Clone ID NO:Z.

[0832] Also preferred is an isolated nucleic acid molecule, wherein said sequence of at least 50 contiguous nucleotides is included in the nucleotide sequence of an open reading frame sequence encoded by cDNA contained in Clone ID NO:Z.

[0833] Also preferred is an isolated nucleic acid molecule comprising a nucleotide sequence which is at least 95% identical to sequence of at least 150 contiguous nucleotides in the nucleotide sequence encoded by cDNA contained in Clone ID NO:Z.

[0834] A further preferred embodiment is an isolated nucleic acid molecule comprising a nucleotide sequence which is at least 95% identical to sequence of at least 500 contiguous nucleotides in the nucleotide sequence encoded by cDNA contained in Clone ID NO:Z.

[0835] A further preferred embodiment is an isolated nucleic acid molecule comprising a nucleotide sequence which is at least 95% identical to the complete nucleotide sequence encoded by cDNA contained in Clone ID NO:Z.

[0836] A further preferred embodiment is a method for detecting in a biological sample a nucleic acid molecule comprising a nucleotide sequence which is at least 95% identical to a sequence of at least 50 contiguous nucleotides in a sequence selected from the group consisting of: a nucleotide sequence of SEQ ID NO:X or the complementary strand thereto; the nucleotide sequence as defined in column 5 of Table 1A or columns 8 and 9 of Table 2 or the complementary strand thereto; and a nucleotide sequence encoded by cDNA contained in Clone ID NO:Z; which method comprises a step of comparing a nucleotide sequence of at least one nucleic acid molecule in said sample with a sequence selected from said group and determining whether the sequence of said nucleic acid molecule in said sample is at least 95% identical to said selected sequence.

[0837] Also preferred is the above method wherein said step of comparing sequences comprises determining the extent of nucleic acid hybridization between nucleic acid molecules in said sample and a nucleic acid molecule comprising said sequence selected from said group. Similarly, also preferred is the above method wherein said step of comparing sequences is performed by comparing the nucleotide sequence determined from a nucleic acid molecule in said sample with said sequence selected from said group. The nucleic acid molecules can comprise DNA molecules or RNA molecules.

[0838] A further preferred embodiment is a method for identifying the species, tissue or cell type of a biological sample which method comprises a step of detecting nucleic acid molecules in said sample, if any, comprising a nucleotide sequence that is at least 95% identical to a sequence of at least 50 contiguous nucleotides in a sequence selected from the group consisting of: a nucleotide sequence of SEQ ID NO:X or the complementary strand thereto; the nucleotide sequence as defined in column 5 of Table 1A or columns 8 and 9 of Table 2 or the complementary strand thereto; and a nucleotide sequence of the cDNA contained in Clone ID NO:Z.

[0839] The method for identifying the species, tissue or cell type of a biological sample can comprise a step of detecting nucleic acid molecules comprising a nucleotide sequence in a panel of at least two nucleotide sequences, wherein at least one sequence in said panel is at least 95% identical to a sequence of at least 50 contiguous nucleotides in a sequence selected from said group.

[0840] Also preferred is a method for diagnosing in a subject a pathological condition associated with abnormal structure or expression of a nucleotide sequence of SEQ ID NO:X or the complementary strand thereto; the nucleotide sequence as defined in column 5 of Table 1 A or columns 8 and 9 of Table 2 or the complementary strand thereto; or the cDNA contained in Clone ID NO:Z which encodes a protein, wherein the method comprises a step of detecting in a biological sample obtained from said subject nucleic acid molecules, if any, comprising a nucleotide sequence that is at least 95% identical to a sequence of at least 50 contiguous nucleotides in a sequence selected from the group consisting of: a nucleotide sequence of SEQ ID NO:X or the complementary strand thereto; the nucleotide sequence as defined in column 5 of Table 1A or columns 8 and 9 of Table 2 or the complementary strand thereto; and a nucleotide sequence of cDNA contained in Clone ID NO:Z.

[0841] The method for diagnosing a pathological condition can comprise a step of detecting nucleic acid molecules comprising a nucleotide sequence in a panel of at least two nucleotide sequences, wherein at least one sequence in said panel is at least 95% identical to a sequence of at least 50 contiguous nucleotides in a sequence selected from said group.

[0842] Also preferred is a composition of matter comprising isolated nucleic acid molecules wherein the nucleotide sequences of said nucleic acid molecules comprise a panel of at least two nucleotide sequences, wherein at least one sequence in said panel is at least 95% identical to a sequence of at least 50 contiguous nucleotides in a sequence selected from the group consisting of: a nucleotide sequence of SEQ ID NO:X or the complementary strand thereto; the nucleotide sequence as defined in column 5 of Table 1A or columns 8 and 9 of Table 2 or the complementary strand thereto; and a nucleotide sequence encoded by cDNA contained in Clone ID NO:Z. The nucleic acid molecules can comprise DNA molecules or RNA molecules.

[0843] Also preferred is a composition of matter comprising isolated nucleic acid molecules wherein the nucleotide sequences of said nucleic acid molecules comprise a DNA microarray or “chip” of at least 1, 2, 3, 4, 5, 6, 7, 8, 9, 10, 15, 20, 25, 30, 40, 50, 100, 150, 200, 250, 300, 500, 1000, 2000, 3000, or 4000 nucleotide sequences, wherein at least one sequence in said DNA microarray or “chip” is at least 95% identical to a sequence of at least 50 contiguous nucleotides in a sequence selected from the group consisting of: a nucleotide sequence of SEQ ID NO:X wherein X is any integer as defined in Table 1A; and a nucleotide sequence encoded by a human cDNA clone identified by a cDNA “Clone ID” in Table 1A.

[0844] Also preferred is an isolated polypeptide comprising an amino acid sequence at least 90% identical to a sequence of at least about 10 contiguous amino acids in the polypeptide sequence of SEQ ID NO:Y; a polypeptide encoded by SEQ ID NO:X or the complementary strand thereto; the polypeptide encoded by the nucleotide sequence as defined in columns 8 and 9 of Table 2; and/or a polypeptide encoded by cDNA contained in Clone ID NO:Z.

[0845] Also preferred is an isolated polypeptide comprising an amino acid sequence at least 95% identical to a sequence of at least about 30 contiguous amino acids in the amino acid sequence of SEQ ID NO:Y; a polypeptide encoded by SEQ ID NO:X or the complementary strand thereto; the polypeptide encoded by the nucleotide sequence as defined in columns 8 and 9 of Table 2; and/or a polypeptide encoded by cDNA contained in Clone ID NO:Z.

[0846] Further preferred is an isolated polypeptide comprising an amino acid sequence at least 95% identical to a sequence of at least about 100 contiguous amino acids in the amino acid sequence of SEQ ID NO:Y; a polypeptide encoded by SEQ ID NO:X or the complementary strand thereto; the polypeptide encoded by the nucleotide sequence as defined in columns 8 and 9 of Table 2; and/or a polypeptide encoded by cDNA contained in Clone ID NO:Z.

[0847] Further preferred is an isolated polypeptide comprising an amino acid sequence at least 95% identical to the complete amino acid sequence of SEQ ID NO:Y; a polypeptide encoded by SEQ ID NO:X or the complementary strand thereto; the polypeptide encoded by the nucleotide sequence as defined in columns 8 and 9 of Table 2; and/or a polypeptide encoded by cDNA contained in Clone ID NO:Z.

[0848] Further preferred is an isolated polypeptide comprising an amino acid sequence at least 90% identical to a sequence of at least about 10 contiguous amino acids in the complete amino acid sequence of a polypeptide encoded by contained in Clone ID NO:Z

[0849] Also preferred is a polypeptide wherein said sequence of contiguous amino acids is included in the amino acid sequence of a portion of said polypeptide encoded by cDNA contained in Clone ID NO:Z; a polypeptide encoded by SEQ ID NO:X or the complementary strand thereto; the polypeptide encoded by the nucleotide sequence as defined in columns 8 and 9 of Table 2; and/or the polypeptide sequence of SEQ ID NO:Y.

[0850] Also preferred is an isolated polypeptide comprising an amino acid sequence at least 95% identical to a sequence of at least about 30 contiguous amino acids in the amino acid sequence of a polypeptide encoded by the cDNA contained in Clone ID NO:Z.

[0851] Also preferred is an isolated polypeptide comprising an amino acid sequence at least 95% identical to a sequence of at least about 100 contiguous amino acids in the amino acid sequence of a polypeptide encoded by cDNA contained in Clone ID NO:Z.

[0852] Also preferred is an isolated polypeptide comprising an amino acid sequence at least 95% identical to the amino acid sequence of a polypeptide encoded by the cDNA contained in Clone ID NO:Z.

[0853] Further preferred is an isolated antibody which binds specifically to a polypeptide comprising an amino acid sequence that is at least 90% identical to a sequence of at least 10 contiguous amino acids in a sequence selected from the group consisting of: a polypeptide sequence of SEQ ID NO:Y; a polypeptide encoded by SEQ ID NO:X or the complementary strand thereto; the polypeptide encoded by the nucleotide sequence as defined in columns 8 and 9 of Table 2; and a polypeptide encoded by the cDNA contained in Clone ID NO:Z.

[0854] Further preferred is a method for detecting in a biological sample a polypeptide comprising an amino acid sequence which is at least 90% identical to a sequence of at least 10 contiguous amino acids in a sequence selected from the group consisting of: a polypeptide sequence of SEQ ID NO:Y; a polypeptide encoded by SEQ ID NO:X or the complementary strand thereto; the polypeptide encoded by the nucleotide sequence as defined in columns 8 and 9 of Table 2; and a polypeptide encoded by the cDNA contained in Clone ID NO:Z; which method comprises a step of comparing an amino acid sequence of at least one polypeptide molecule in said sample with a sequence selected from said group and determining whether the sequence of said polypeptide molecule in said sample is at least 90% identical to said sequence of at least 10 contiguous amino acids.

[0855] Also preferred is the above method wherein said step of comparing an amino acid sequence of at least one polypeptide molecule in said sample with a sequence selected from said group comprises determining the extent of specific binding of polypeptides in said sample to an antibody which binds specifically to a polypeptide comprising an amino acid sequence that is at least 90% identical to a sequence of at least 10 contiguous amino acids in a sequence selected from the group consisting of: a polypeptide sequence of SEQ ID NO:Y; a polypeptide encoded by SEQ ID NO:X or the complementary strand thereto; the polypeptide encoded by the nucleotide sequence as defined in columns 8 and 9 of Table 2; and a polypeptide encoded by the cDNA contained in Clone ID NO:Z.

[0856] Also preferred is the above method wherein said step of comparing sequences is performed by comparing the amino acid sequence determined from a polypeptide molecule in said sample with said sequence selected from said group.

[0857] Also preferred is a method for identifying the species, tissue or cell type of a biological sample which method comprises a step of detecting polypeptide molecules in said sample, if any, comprising an amino acid sequence that is at least 90% identical to a sequence of at least 10 contiguous amino acids in a sequence selected from the group consisting of: polypeptide sequence of SEQ ID NO:Y; a polypeptide encoded by SEQ ID NO:X or the complementary strand thereto; the polypeptide encoded by the nucleotide sequence as defined in columns 8 and 9 of Table 2; and a polypeptide encoded by the cDNA contained in Clone ID NO:Z.

[0858] Also preferred is the above method for identifying the species, tissue or cell type of a biological sample, which method comprises a step of detecting polypeptide molecules comprising an amino acid sequence in a panel of at least two amino acid sequences, wherein at least one sequence in said panel is at least 90% identical to a sequence of at least 10 contiguous amino acids in a sequence selected from the above group.

[0859] Also preferred is a method for diagnosing in a subject a pathological condition associated with abnormal structure or expression of a nucleic acid sequence identified in Table 1A or Table 2 encoding a polypeptide, which method comprises a step of detecting in a biological sample obtained from said subject polypeptide molecules comprising an amino acid sequence in a panel of at least two amino acid sequences, wherein at least one sequence in said panel is at least 90% identical to a sequence of at least 10 contiguous amino acids in a sequence selected from the group consisting of: polypeptide sequence of SEQ ID NO:Y; a polypeptide encoded by SEQ ID NO:X or the complementary strand thereto; the polypeptide encoded by the nucleotide sequence as defined in columns 8 and 9 of Table 2; and a polypeptide encoded by the cDNA contained in Clone ID NO:Z.

[0860] In any of these methods, the step of detecting said polypeptide molecules includes using an antibody.

[0861] Also preferred is an isolated nucleic acid molecule comprising a nucleotide sequence which is at least 95% identical to a nucleotide sequence encoding a polypeptide wherein said polypeptide comprises an amino acid sequence that is at least 90% identical to a sequence of at least 10 contiguous amino acids in a sequence selected from the group consisting of: polypeptide sequence of SEQ ID NO:Y; a polypeptide encoded by SEQ ID NO:X or the complementary strand thereto; the polypeptide encoded by the nucleotide sequence as defined in columns 8 and 9 of Table 2; and a polypeptide encoded by the cDNA contained in Clone ID NO:Z.

[0862] Also preferred is an isolated nucleic acid molecule, wherein said nucleotide sequence encoding a polypeptide has been optimized for expression of said polypeptide in a prokaryotic host.

[0863] Also preferred is a polypeptide molecule, wherein said polypeptide comprises an amino acid sequence selected from the group consisting of: polypeptide sequence of SEQ ID NO:Y; a polypeptide encoded by SEQ ID NO:X or the complementary strand thereto; the polypeptide encoded by the nucleotide sequence as defined in columns 8 and 9 of Table 2; and a polypeptide encoded by the cDNA contained in Clone ID NO:Z.

[0864] Further preferred is a method of making a recombinant vector comprising inserting any of the above isolated nucleic acid molecule into a vector. Also preferred is the recombinant vector produced by this method. Also preferred is a method of making a recombinant host cell comprising introducing the vector into a host cell, as well as the recombinant host cell produced by this method.

[0865] Also preferred is a method of making an isolated polypeptide comprising culturing this recombinant host cell under conditions such that said polypeptide is expressed and recovering said polypeptide. Also preferred is this method of making an isolated polypeptide, wherein said recombinant host cell is a eukaryotic cell and said polypeptide is a human protein comprising an amino acid sequence selected from the group consisting of: polypeptide sequence of SEQ ID NO:Y; a polypeptide encoded by SEQ ID NO:X or the complementary strand thereto; the polypeptide encoded by the nucleotide sequence as defined in columns 8 and 9 of Table 2; and a polypeptide encoded by the cDNA contained in Clone ID NO:Z. The isolated polypeptide produced by this method is also preferred.

[0866] Also preferred is a method of treatment of an individual in need of an increased level of a protein activity, which method comprises administering to such an individual a Therapeutic comprising an amount of an isolated polypeptide, polynucleotide, immunogenic fragment or analogue thereof, binding agent, antibody, or antigen binding fragment of the claimed invention effective to increase the level of said protein activity in said individual.

[0867] Also preferred is a method of treatment of an individual in need of a decreased level of a protein activity, which method comprised administering to such an individual a Therapeutic comprising an amount of an isolated polypeptide, polynucleotide, immunogenic fragment or analogue thereof, binding agent, antibody, or antigen binding fragment of the claimed invention effective to decrease the level of said protein activity in said individual.

[0868] Also preferred is a method of treatment of an individual in need of a specific delivery of toxic compositions to diseased cells (e.g., tumors, leukemias or lymphomas), which method comprises administering to such an individual a Therapeutic comprising an amount of an isolated polypeptide of the invention, including, but not limited to a binding agent, or antibody of the claimed invention that are associated with toxin or cytotoxic prodrugs.

[0869] Having generally described the invention, the same will be more readily understood by reference to the following examples, which are provided by way of illustration and are not intended as limiting.

TABLE 6

| ATCC Deposits | Deposit Date | ATCC Designation Number |
|---|---|---|
| LP01, LP02, LP03, | May-20-97 | 209059, 209060, 209061, |
| LP04, LP05, LP06, | | 209062, 209063, 209064, 209065, |
| LP07, LP08, LP09, | | 209066, 209067, 209068, 209069 |
| LP10, LP11, | | |
| LP12 | Jan-12-98 | 209579 |
| LP13 | Jan-12-98 | 209578 |
| LP14 | Jul-16-98 | 203067 |
| LP15 | Jul-16-98 | 203068 |
| LP16 | Feb-1-99 | 203609 |
| LP17 | Feb-1-99 | 203610 |
| LP20 | Nov-17-98 | 203485 |
| LP21 | Jun-18-99 | PTA-252 |
| LP22 | Jun-18-99 | PTA-253 |
| LP23 | Dec-22-99 | PTA-1081 |

### EXAMPLES

### Example 1: Isolation of a Selected cDNA Clone From the Deposited Sample

[0870] Each Clone ID NO:Z is contained in a plasmid vector. Table 7 identifies the vectors used to construct the cDNA library from which each clone was isolated. In many cases, the vector used to construct the library is a phage vector from which a plasmid has been excised. The following correlates the related plasmid for each phage vector used in constructing the cDNA library. For example, where a particular clone is identified in Table 7 as being isolated in the vector “Lambda Zap,” the corresponding deposited clone is in “pBluescript.”

| Vector Used to Construct Library | Corresponding Deposited Plasmid |
|---|---|
| Lambda Zap | pBluescript (pBS) |
| Uni-Zap XR | pBluescript (pBS) |
| Zap Express | pBK |
| lafmid BA | plafmid BA |
| pSportl | pSport1 |
| pCMVSport 2.0 | pCMVSport 2.0 |
| pCMVSport 3.0 | pCMVSport 3.0 |
| pCR ® 2.1 | pCR ® 2.1 |

[0871] Vectors Lambda Zap (U.S. Pat. Nos. 5,128,256 and 5,286,636), Uni-Zap XR (U.S. Pat. Nos. 5,128, 256 and 5,286,636), Zap Express (U.S. Pat. Nos. 5,128,256 and 5,286,636), pBluescript (pBS) (Short, J. M. et al., Nucleic Acids Res. 16:7583-7600 (1988); Alting-Mees, M. A. and Short, J. M., Nucleic Acids Res. 17:9494 (1989)) and pBK (Alting-Mees, M. A. et al., Strategies 5:58-61 (1992)) are commercially available from Stratagene Cloning Systems, Inc., 11011 N. Torrey Pines Road, La Jolla, Calif, 92037. pBS contains an ampicillin resistance gene and pBK contains a neomycin resistance gene. Both can be transformed into E. coli strain XL-1 Blue, also available from Stratagene. pBS comes in 4 forms SK+, SK−, KS+ and KS. The S and K refers to the orientation of the polylinker to the T7 and T3 primer sequences which flank the polylinker region (“S” is for SacI and “K” is for KpnI which are the first sites on each respective end of the linker). “+” or “−” refer to the orientation of the f1 origin of replication (“ori”), such that in one orientation, single stranded rescue initiated from the f1 ori generates sense strand DNA and in the other, antisense.

[0872] Vectors pSport1, pCMVSport 2.0 and pCMVSport 3.0, were obtained from Life Technologies, Inc., P.O. Box 6009, Gaithersburg, Md. 20897. All Sport vectors contain an ampicillin resistance gene and may be transformed into E. coli strain DH10B, also available from Life Technologies. (See, for instance, Gruber, C. E., et al., Focus 15:59 (1993)). Vector lafmid BA (Bento Soares, Columbia University, N.Y.) contains an ampicillin resistance gene and can be transformed into E. coli strain XL-1 Blue. Vector pCR®2.1, which is available from Invitrogen, 1600 Faraday Avenue, Carlsbad, Calif. 92008, contains an ampicillin resistance gene and may be transformed into E. coli strain DH10B, available from Life Technologies. (See, for instance, Clark, J. M., Nuc. Acids Res. 16:9677-9686 (1988) and Mead, D. et al., Bio/Technology 9: (1991)). Preferably, a polynucleotide of the present invention does not comprise the phage vector sequences identified for the particular clone in Table 7, as well as the corresponding plasmid vector sequences designated above.

[0873] The deposited material in the sample assigned the ATCC Deposit Number cited by reference to Tables 1, 2, 6 and 7 for any given cDNA clone also may contain one or more additional plasmids, each comprising a cDNA clone different from that given clone. Thus, deposits sharing the same ATCC Deposit Number contain at least a plasmid for each Clone ID NO:Z.

TABLE 7

| | | | ATCC |
|---|---|---|---|
| Libraries owned by Catalog | Catalog Description | Vector | Deposit |
| HUKA HUKB HUKC HUKD HUKE | Human Uterine Cancer | Lambda ZAP II | LP01 |
| HUKF HUKG | | | |
| HCNA HCNB | Human Colon | Lambda Zap II | LP01 |
| HFFA | Human Fetal Brain, random primed | Lambda Zap II | LP01 |
| HTWA | Resting T-CeIl | Lambda ZAP II | LP01 |
| HBQA | Early Stage Human Brain, random | Lambda ZAP II | LP01 |
| | primed | | |
| HLMB HLMF HLMG HLMH HLMI | breast lymph node CDNA library | Lambda ZAP II | LP01 |
| HLMJ HLMM HLMN | | | |
| HCQA HCQB | human colon cancer | Lamda ZAP II | LP01 |
| HMEA HMEC HMED HMEE HMEF | Human Microvascular Endothelial | Lambda ZAP II | LP01 |
| HMEG HMEI HMEJ HMEK HMEL | Cells, fract. A | | |
| HUSA HUSC | Human Umbilical Vein Endothelial | Lambda ZAP II | LP01 |
| | Cells, fract. A | | |
| HLQA HLQB | Hepatocellular Tumor | Lambda ZAP II | LP01 |
| HHGA HHGB HHGC HHGD | Hemangiopericytoma | Lambda ZAP II | LP01 |
| HSDM | Human Striatum Depression, re- | Lambda ZAP II | LP01 |
| | rescue | | |
| HUSH | H Umbilical Vein Endothelial Cells, | Lambda ZAP II | LP01 |
| | frac A, re-excision | | |
| HSGS | Salivary gland, subtracted | Lambda ZAP II | LP01 |
| HFXA HFXB HFXC HFXD HFXE | Brain frontal cortex | Lambda ZAP II | LP01 |
| HFXF HFXG HFXH | | | |
| HPQA HPQB HPQC | PERM TF274 | Lambda ZAP II | LP01 |
| HFXJ HFXK | Brain Frontal Cortex, re-excision | Lambda ZAP II | LP01 |
| HCWA HCWB HCWC HCWD HCWE | CD34 positive cells (Cord Blood) | ZAP Express | LP02 |
| HCWF HCWG HCWH HCWI HCWJ | | | |
| HCWK | | | |
| HCUA HCUB HCUC | CD34 depleted Buffy Coat (Cord | ZAP Express | LP02 |
| | Blood) | | |
| HRSM | A-14 cell line | ZAP Express | LP02 |
| HRSA | A1-CELL LINE | ZAP Express | LP02 |
| HCUD HCUE HCUF HCUG HCUH | CD34 depleted Buffy Coat (Cord | ZAP Express | LP02 |
| HCUI | Blood), re-excision | | |
| HBXE HBXF HBXG | H. Whole Brain #2, re-excision | ZAP Express | LP02 |
| HRLM | L8 cell line | ZAP Express | LP02 |
| HBXA HBXB HBXC HBXD | Human Whole Brain #2- Oligo dT > | ZAP Express | LP02 |
| | 1.5 Kb | | |
| HUDA HUDB HUDC | Testes | ZAP Express | LP02 |
| HHTM HHTN HHTO | H. hypothalamus, frac A; re-excision | ZAP Express | LP02 |
| HHTL | H. hypothalamus, frac A | ZAP Express | LP02 |
| HASA HASD | Human Adult Spleen | Uni-ZAP XR | LP03 |
| HFKC HFKD HFKB HFKF HFKG | Human Fetal Kidney | Uni-ZAP XR | LP03 |
| HE8A HE8B HE8C HE8D HE8E HE8F | Human 8 Week Whole Embryo | Uni-ZAP XR | LP03 |
| HE8M HE8N | | | |
| HGBA HGBD HGBE HGBF HGBG | Human Gall Bladder | Uni-ZAP XR | LP03 |
| HGBH HGBI | | | |
| HLHA HLHB HLHC HLHD HLHE | Human Fetal Lung III | Uni-ZAP XR | LP03 |
| HLHF HLHG HLHH HLHQ | | | |
| HPMA HPMB HPMC HPMD HPME | Human Placenta | Uni-ZAP XR | LP03 |
| HPMF HPMG HPMH | | | |
| HPRA HPRB HPRC HPRD | Human Prostate | Uni-ZAP XR | LP03 |
| HSIA HSIC HSID HSIE | Human Adult Small Intestine | Uni-ZAP XR | LP03 |
| HTEA HTEB HTEC HTED HTEE | Human Testes | Uni-ZAP XR | LP03 |
| HTEF HTEG HTEH HTEI HTEJ HTEK | | | |
| HTPA HTPB HTPC HTPD HTPE | Human Pancreas Tumor | Uni-ZAP XR | LP03 |
| HTTA HTTB HTTC HTTD HTTE | Human Testes Tumor | Uni-ZAP XR | LP03 |
| HTTF | | | |
| HAPA HAPB HAPC HAPM | Human Adult Pulmonary | Uni-ZAP XR | LP03 |
| HETA HETB HETC HETD HETE | Human Endometrial Tumor | Uni-ZAP XR | LP03 |
| HETE HETG HETH HETI | | | |
| HHFB HHFC HHFD HHFE HHFF | Human Fetal Heart | Uni-ZAP XR | LP03 |
| HHFG HHFH HHFI | | | |
| HHPB HHPC HHPD HHPE HHPF | Human Hippocampus | Uni-ZAP XR | LP03 |
| HHPG HHPH | | | |
| HCE1 HCE2 HCE3 HCE4 HCE5 HCEB | Human Cerebellum | Uni-ZAP XR | LP03 |
| HCEC HCED HCEE HCEF HCEG | | | |
| HUVB HUVC HUVD HUVE | Human Umbilical Vein, Endo. | Uni-ZAP XR | LP03 |
| | remake | | |
| HSTA HSTB HSTC HSTD | Human Skin Tumor | Uni-ZAP XR | LP03 |
| HTAA HTAB HTAC HTAD HTAE | Human Activated T-Cells | Uni-ZAP XR | LP03 |
| HFEA HFEB HFEC | Human Fetal Epithelium (Skin) | Uni-ZAP XR | LP03 |
| HJPA HJPB HJPC HJPD | HUMAN JURKAT MEMBRANE | Uni-ZAP XR | LP03 |
| | BOUND POLYSOMES | | |
| HESA | Human epithelioid sarcoma | Uni-Zap XR | LP03 |
| HLTA HLTB HLTC HLTD HLTE | Human T-Cell Lymphoma | Uni-ZAP XR | LP03 |
| HLTF | | | |
| HFTA HFTB HFTC HFTD | Human Fetal Dura Mater | Uni-ZAP XR | LP03 |
| HRDA HRDB HRDC HRDD HRDE | Human Rhabdomyosarcoma | Uni-ZAP XR | LP03 |
| HRDF | | | |
| HCAA HCAB HCAC | Cem cells cyclohexamide treated | Uni-ZAP XR | LP03 |
| HRGA HRGB HRGC HRGD | Raji Cells, cyclohexamide treated | Uni-ZAP XR | LP03 |
| HSUA HSUB HSUC HSUM | Supt Cells, cyclohexamide treated | Uni-ZAP XR | LP03 |
| HT4A HT4C HT4D | Activated T-Cells, 12 hrs. | Uni-ZAP XR | LP03 |
| HE9A HE9B HE9C HE9D HE9E HE9F | Nine Week Old Early Stage Human | Uni-ZAP XR | LP03 |
| HE9G HE9H HE9M HE9N | | | |
| HATA HATB HATC HATD HATE | Human Adrenal Gland Tumor | Uni-ZAP XR | LP03 |
| HTSA | Activated T-Cells, 24 hrs. | Uni-ZAP XR | LP03 |
| HFGA HFGM | Human Fetal Brain | Uni-ZAP XR | LP03 |
| HNEA HNEB HNEC HNED HNEE | Human Neutrophil | Uni-ZAP XR | LP03 |
| HBGB HBGD | Human Primary Breast Cancer | Uni-ZAP XR | LP03 |
| HBNA HBNB | Human Normal Breast | Uni-ZAP XR | LP03 |
| HCAS | Cem Cells, cyclohexamide treated, | Uni-ZAP XR | LP03 |
| | subtra | | |
| HHPS | Human Hippocampus, subtracted | pBS | LP03 |
| HKCS HKCU | Human Colon Cancer, subtracted | pBS | LP03 |
| HRGS | Raji cells, cyclohexamide treated, | pBS | LP03 |
| | subtracted | | |
| HSUT | Supt cells, cyclohexamide treated, | pBS | LP03 |
| | differentially expressed | | |
| HT4S | Activated T-Cells, 12 hrs, subtracted | Uni-ZAP XR | LP03 |
| HCDA HCDB HCDC HCDD HCDE | Human Chondrosarcoma | Uni-ZAP XR | LP03 |
| HOAA HOAB HOAC | Human Osteosarcoma | Uni-ZAP XR | LP03 |
| HTLA HTLB HTLC HTLD HTLE | Human adult testis, large inserts | Uni-ZAP XR | LP03 |
| HTLF | | | |
| HLMA HLMC HLMD | Breast Lymph node cDNA library | Uni-ZAP XR | LP03 |
| H6EA H6EB H6EC | HL-60, PMA 4H | Uni-ZAP XR | LP03 |
| HTXA HTXB HTXC HTXD HTXE | Activated T-Cell (12hs)/Thiouridine | Uni-ZAP XR | LP03 |
| HTXF HTXG HTXH | labelledEco | | |
| HNFA HNFB HNFC HNFD HNFE | Human Neutrophil, Activated | Uni-ZAP XR | LP03 |
| HNFF HNFG HNFH HNFJ | | | |
| HTOB HTOC | HUMAN TONSILS, FRACTION 2 | Uni-ZAP XR | LP03 |
| HMGB | Human OB MG63 control fraction I | Uni-ZAP XR | LP03 |
| HOPB | Human OB HOS control fraction I | Uni-ZAP XR | LP03 |
| HORB | Human OB HOS treated (10 nM E2) | Uni-ZAP XR | LP03 |
| | fraction I | | |
| HSVA HSVB HSVC | Human Chronic Synovitis | Uni-ZAP XR | LP03 |
| HROA | HUMAN STOMACH | Uni-ZAP XR | LP03 |
| HBJA HBJB HBJC HBJD HBJE HBJF | HUMAN B CELL LYMPHOMA | Uni-ZAP XR | LP03 |
| HBJG HBJH HBJI HBJJ HBJK | | | |
| HCRA HCRB HCRC | human corpus colosum | Uni-ZAP XR | LP03 |
| HODA HODB HODC HODD | human ovarian cancer | Uni-ZAP XR | LP03 |
| HDSA | Dermatofibrosarcoma Protuberance | Uni-ZAP XR | LP03 |
| HMWA HMWB HMWC HMWD | Bone Marrow Cell Line (RS4; 11) | Uni-ZAP XR | LP03 |
| HMWE HMWF HMWG HMWH | | | |
| HMWI HMWJ | | | |
| HSOA | stomach cancer (human) | Uni-ZAP XR | LP03 |
| HERA | SKIN | Uni-ZAP XR | LP03 |
| HMDA | Brain-medulloblastoma | Uni-ZAP XR | LP03 |
| HGLA HGLB HGLD | Glioblastoma | Uni-ZAP XR | LP03 |
| HEAA | H. Atrophic Endometrium | Uni-ZAP XR | LP03 |
| HBCA HBCB | H. Lymph node breast Cancer | Uni-ZAP XR | LP03 |
| HPWT | Human Prostate BPH, re-excision | Uni-ZAP XR | LP03 |
| HFVG HFVH HFVI | Fetal Liver, subtraction II | pBS | LP03 |
| HNFI | Human Neutrophils, Activated, re- | pBS | LP03 |
| | excision | | |
| HBMB HBMC HBMD | Human Bone Marrow, re-excision | pBS | LP03 |
| HKML HKMM HKMN | H. Kidney Medulla, re-excision | pBS | LP03 |
| HKIX HKIY | H. Kidney Cortex, subtracted | pBS | LP03 |
| HADT | H. Amygdala Depression, subtracted | pBS | LP03 |
| H6AS | HI-60, untreated, subtracted | Uni-ZAP XR | LP03 |
| H6ES | HL-60, PMA 4H, subtracted | Uni-ZAP XR | LP03 |
| H6BS | HL-60, RA 4h, Subtracted | Uni-ZAP XR | LP03 |
| H6CS | HL-60, PMA 1d, subtracted | Uni-ZAP XR | LP03 |
| HTXJ HTXK | Activated T-cell(12h)/Thiouridine-re- | Uni-ZAP XR | LP03 |
| | excision | | |
| HMSA HMSB HMSC HMSD HMSE | Monocyte activated | Uni-ZAP XR | LP03 |
| HMSF HMSG HMSH HMSI HMSJ | | | |
| HMSK | | | |
| HAGA HAGB HAGC HAGD HAGE | Human Amygdala | Uni-ZAP XR | LP03 |
| HAGF | | | |
| HSRA HSRB HSRE | STROMAL -OSTEOCLASTOMA | Uni-ZAP XR | LP03 |
| HSRD HSRF HSRG HSRH | Human Osteoclastoma Stromal Cells | Uni-ZAP XR | LP03 |
| | - unamplified | | |
| HSQA HSQB HSQC HSQD HSQE | Stromal cell TF274 | Uni-ZAP XR | LP03 |
| HSQF HSQG | | | |
| HSKA HSKB HSKC HSKD HSKE | Smooth muscle, serum treated | Uni-ZAP XR | LP03 |
| HSKF HSKZ | | | |
| HSLA HSLB HSLC HSLD HSLE HSLF | Smooth muscle, control | Uni-ZAP XR | LP03 |
| HSLG | | | |
| HSDA HSDD HSDE HSDF HSDG | Spinal cord | Uni-ZAP XR | LP03 |
| HSDH | | | |
| HPWS | Prostate-BPH subtracted II | pBS | LP03 |
| HSKW HSKX HSKY | Smooth Muscle- HASTE normalized | pBS | LP03 |
| HFPB HFPC HFPD | H. Frontal cortex, epileptic; re-excision | Uni-ZAP XR | LP03 |
| HSDI HSDJ HSDK | Spinal Cord, re-excision | Uni-ZAP XR | LP03 |
| HSKN HSKO | Smooth Muscle Serum Treated, Norm | pBS | LP03 |
| HSKG HSKH HSKI | Smooth muscle, serum induced, re-exc | pBS | LP03 |
| HFCA HFCB HFCC HFCD HFCE | Human Fetal Brain | Uni-ZAP XR | LP04 |
| HFCF | | | |
| HPTA HPTB HPTD | Human Pituitary | Uni-ZAP XR | LP04 |
| HTHB HTHC HTHD | Human Thymus | Uni-ZAP XR | LP04 |
| HE6B HE6C HE6D HE6E HE6F HE6G | Human Whole Six Week Old Embryo | Uni-ZAP XR | LP04 |
| HE6S | | | |
| HSSA HSSB HSSC HSSD HSSE HSSF | Human Synovial Sarcoma | Uni-ZAP XR | LP04 |
| HSSG HSSH HSSI HSSJ HSSK | | | |
| HE7T | 7 Week Old Early Stage Human, | Uni-ZAP XR | LP04 |
| | subtracted | | |
| HEPA HBPB HEPC | Human Epididymus | Uni-ZAP XR | LP04 |
| HSNA HSNB HSNC HSNM HSNN | Human Synovium | Uni-ZAP XR | LP04 |
| HPFB HPFC HPFD HPFE | Human Prostate Cancer, Stage C | Uni-ZAP XR | LP04 |
| | fraction | | |
| HE2A HE2D HE2E HE2H HE2I HE2M | 2 Week Old Early Stage Human | Uni-ZAP XR | LP04 |
| HE2N HE2O | | | |
| HE2B HE2C HE2F HE2G HE2P HE2Q | 12 Week Old Early Stage Human, II | Uni-ZAP XR | LP04 |
| HPTS HPTT HPTU | Human Pituitary, subtracted | Uni-ZAP XR | LP04 |
| HAUA HAUB HAUC | Amniotic Cells - TNF induced | Uni-ZAP XR | LP04 |
| HAQA HAQB HAQC HAQD | Amniotic Cells - Primary Culture | Uni-ZAP XR | LP04 |
| HWTA HWTB HWTC | wilm's tumor | Uni-ZAP XR | LP04 |
| HBSD | Bone Cancer, re-excision | Uni-ZAP XR | LP04 |
| HSGB | Salivary gland, re-excision | Uni-ZAP XR | LP04 |
| HSJA HSJB HSJC | Smooth muscle-ILb induced | Uni-ZAP XR | LP04 |
| HSXA HSXB HSXC HSXD | Human Substantia Nigra | Uni-ZAP XR | LP04 |
| HSHA HSHB HSHC | Smooth muscle, IL 1b induced | Uni-ZAP XR | LP04 |
| HOUA HOUB HOUC HOUD HOUE | Adipocytes | Uni-ZAP XR | LP04 |
| HPWA HPWB HPWC HPWD HPWE | Prostate BPH | Uni-ZAP XR | LP04 |
| HELA HELB HELC HELD HELE | Endothelial cells-control | Uni-ZAP XR | LP04 |
| HELF HELG HELH | | | |
| HEMA HEMB HEMC HEMD HEME | Endothelial-induced | Uni-ZAP XR | LP04 |
| HEME HEMG HEMH | | | |
| HBIA HBIB HBIC | Human Brain, Striatum | Uni-ZAP XR | LP04 |
| HHSA HHSB HHSC HHSD HHSE | Human Hypothalmus, Schizophrenia | Uni-ZAP XR | LP04 |
| HNGA HNGB HNGC HNGD HNGE | neutrophils control | Uni-ZAP XR | LP04 |
| HNGF HNGG HNGH HNGI HNGJ | | | |
| HNHA HNHB HNHC HNHD HNHE | Neutrophils IL-1 and LPS induced | Uni-ZAP XR | LP04 |
| HNHF HNHG HNHH HNHI HNHJ | | | |
| HSDB HSDC | STRIATUM DEPRESSION | Uni-ZAP XR | LP04 |
| HHPT | Hypothalamus | Uni-ZAP XR | LP04 |
| HSAT HSAU HSAV HSAW HSAX | Anergic T-cell | Uni-ZAP XR | LP04 |
| HSAY HSAZ | | | |
| HBMS HBMT HBMU HBMV HBMW | Bone marrow | Uni-ZAP XR | LP04 |
| HBMX | | | |
| HOEA HOEB HOEC HOED HOEE | Osteoblasts | Uni-ZAP XR | LP04 |
| HOEF HOEJ | | | |
| HAIA HAIB HAIC HAID HAIE HAIF | Epithehal-TNFa and INF induced | Uni-ZAP XR | LP04 |
| HTGA HTGB HTGC HTGD | Apoptotic T-cell | Uni-ZAP XR | LP04 |
| HMCA HMCB HMCC HMCD HMCE | Macrophage-oxLDL | Uni-ZAP XR | LP04 |
| HMAA HMAB HMAC HMAD HMAE | Macrophage (GM-CSF treated) | Uni-ZAP XR | LP04 |
| HMAF HMAG | | | |
| HPHA | Normal Prostate | Uni-ZAP XR | LP04 |
| HPIA HPIB HPIC | LNCAP prostate cell line | Uni-ZAP XR | LP04 |
| HPJA HPJB HPJC | PC3 Prostate cell line | Uni-ZAP XR | LP04 |
| HOSE HOSF HOSG | Human Osteoclastoma, re-excision | Uni-ZAP XR | LP04 |
| HTGE HTGF | Apoptotic T-cell, re-excision | Uni-ZAP XR | LP04 |
| HMAJ HMAK | H Macrophage (GM-CSF treated), re- | Uni-ZAP XR | LP04 |
| | excision | | |
| HACB HACC HACD | Human Adipose Tissue, re-excision | Uni-ZAP XR | LP04 |
| HFPA | H. Frontal Cortex, Epileptic | Uni-ZAP XR | LP04 |
| HFAA HFAB HFAC HFAD HFAE | Alzheimer's, spongy change | Uni-ZAP XR | LP04 |
| HFAM | Frontal Lobe, Dementia | Uni-ZAP XR | LP04 |
| HMIA HMIB HMIC | Human Manic Depression Tissue | Uni-ZAP XR | LP04 |
| HTSA HTSE HTSF HTSG HTSH | Human Thymus | pBS | LP05 |
| HPBA HPBB HPBC HPBD HPBE | Human Pineal Gland | pBS | LP05 |
| HSAA HSAB HSAC | HSA 172 Cells | pBS | LP05 |
| HSBA HSBB HSBC HSBM | HSC 172 cells | pBS | LP05 |
| HJAA HJAB HJAC HJAD | Jurkat T-cell G1 phase | pBS | LP05 |
| HJBA HJBB HJBC HJBD | Jurkat T-Cell, S phase | pBS | LP05 |
| HAFA HAFB | Aorta endothelial cells + TNF-a | pBS | LP05 |
| HAWA HAWB HAWC | Human White Adipose | pBS | LP05 |
| HTNA HTNB | Human Thyroid | pBS | LP05 |
| HONA | Normal Ovary, Premenopausal | pBS | LP05 |
| HARA HARB | Human Adult Retina | pBS | LP05 |
| HLJA HLJB | Human Lung | pCMVSport 1 | LP06 |
| HOEM HOEN HOEO | H. Ovarian Tumor, II, OV5232 | pCMVSport 2.0 | LP07 |
| HOGA HOGB HOGC | OV 10-3-95 | pCMVSport 2.0 | LP07 |
| HCGL | CD34+ cells, II | pCMVSport 2.0 | LP07 |
| HDLA | Hodgkin's Lymphoma I | pCMVSport 2.0 | LP07 |
| HDTA HDTB HDTC HDTD HDTE | Hodgkin's Lymphoma II | pCMVSport 2.0 | LP07 |
| HKAA HKAB HKAC HKAD HKAE | Keratinocyte | pCMVSport2.0 | LP07 |
| HKAF HKAG HKAH | | | |
| HCIM | CAPFINDER, Crohn's Disease, lib 2 | pCMVSport 2.0 | LP07 |
| HKAL | Keratinocyte, lib 2 | pCMVSport2.0 | LP07 |
| HKAT | Keratinocyte, lib 3 | pCMVSport2.0 | LP07 |
| HNDA | Nasal polyps | pCMVSport2.0 | LP07 |
| HDRA | H. Primary Dendritic Cells, lib 3 | pCMVSport2.0 | LP07 |
| HOHA HOHB HOHC | Human Osteoblasts II | pCMVSport2.0 | LP07 |
| HLDA HLDB HLDC | Liver, Hepatoma | pCMVSport3.0 | LP08 |
| HLDN HLDO HLDP | Human Liver, normal | pCMVSport3.0 | LP08 |
| HMTA | pBMC stimulated w/poly I/C | pCMVSport3.0 | LP08 |
| HNTA | NTERA2, control | pCMVSport3.0 | LP08 |
| HDPA HDPB HDPC HDPD HDPF | Primary Dendritic Cells, lib 1 | pCMVSport3.0 | LP08 |
| HDPG HDPH HDPI HDPJ HDPK | | | |
| HDPM HDPN HDPO HDPP | Primary Dendritic cells, frac 2 | pCMVSport3.0 | LP08 |
| HMUA HMUB HMUC | Myoloid Progenitor Cell Line | pCMVSport3.0 | LP0S |
| HHEA HHEB HHEC HHED | T Cell helper I | pCMVSport3.0 | LP08 |
| HHEM HHEN HHEO HHEP | T cell helper II | pCMVSport3.0 | LP08 |
| HEQA HEQB HEQC | Human endometrial stromal cells | pCMVSport3.0 | LP08 |
| HJMA HJMB | Human endometrial stromal cells- | pCMVSport3.0 | LP08 |
| | treated with progesterone | | |
| HSWA HSWB HSWC | Human endometrial stromal cells- | pCMVSport3.0 | LP08 |
| | treated with estradiol | | |
| HSYA HSYB HSYC | Human Thymus Stromal Cells | pCMVSport3.0 | LP08 |
| HLWA HLWB HLWC | Human Placenta | pCMVSport3.0 | LP08 |
| HRAA HRAB HRAC | Rejected Kidney, lib 4 | pCMVSport3.0 | LP08 |
| HMTM | PCR, pBMC I/C treated | PCRII | LP09 |
| HMJA | H. Meniingima, M6 | pSport 1 | LP10 |
| HMKA HMKB HMKC HMKD HMKE | H. Meningima, M1 | pSport 1 | LP10 |
| HUSG HUSI | Human umbilical vein endothelial | pSport 1 | LP10 |
| | cells, IL-4 induced | | |
| HUSX HUSY | Human Umbilical Vein Endothelial | pSport 1 | LP10 |
| | Cells, uninduced | | |
| HOFA | Ovarian Tumor I, OV5232 | pSport 1 | LP10 |
| HCFA HCFB HCFC HCFD | T-Cell PHA 16 hrs | pSport 1 | LP10 |
| HCFL HCFM HCFN HCFO | T-Cell PHA 24 hrs | pSport 1 | LP10 |
| HADA HADC HADD HADE HADF | Human Adipose | pSport 1 | LP10 |
| HADG | | | |
| HOVA HOVB HOVC | Human Ovary | pSport 1 | LP10 |
| HTWB HTWC HTWD HTWE HTWF | Resting T-Cell Library, II | pSport 1 | LP10 |
| HMMA | Spleen metastic melanoma | pSport 1 | LP10 |
| HLYA HLYB HLYC HLYD HLYE | Spleen, Chronic lymphocytic | pSport 1 | LP10 |
| | leukemia | | |
| HCGA | CD34+ cell, I | pSport 1 | LP10 |
| HEOM HEON | Human Eosinophils | pSport 1 | LP10 |
| HTDA | Human Tonsil, Lib 3 | pSport 1 | LP10 |
| HSPA | Salivary Gland, Lib 2 | pSport 1 | LP10 |
| HCHA HCHB HCHC | Breast Cancer cell line, MDA 36 | pSport 1 | LP10 |
| HCHM HCHN | Breast Cancer Cell line, angiogenic | pSport 1 | LP10 |
| HCIA | Crohn's Disease | pSport 1 | LP10 |
| HDAA HDAB HDAC | HEL cell line | pSport 1 | LP10 |
| HABA | Human Astrocyte | pSport 1 | LP10 |
| HUFA HUFB HUFC | Ulcerative Colitis | pSport 1 | LP10 |
| HNTM | NTERA2 + retinoic acid, 14 days | pSport 1 | LP10 |
| HDQA | Primary Dendritic cells, CapFinder2, | pSport 1 | LP10 |
| | frac 1 | | |
| HDQM | Primary Dendritic Cells, CapFinder, | pSport 1 | LP10 |
| | frac 2 | | |
| HLDX | Human Liver, normal, CapFinder | pSport 1 | LP10 |
| HULA HULB HULC | Human Dermal Endothelial | pSport 1 | LP10 |
| | Cells, untreated | | |
| HUMA | Human Dermal Endothelial | pSport1 | LP10 |
| | cells, treated | | |
| HCJA | Human Stromal Endometrial | pSport1 | LP10 |
| | fibroblasts, untreated | | |
| HCJM | Human Stromal endometrial | pSport1 | LP10 |
| | fibroblasts, treated w/estradiol | | |
| HEDA | Human Stromal endometrial | pSport1 | LP10 |
| | fibroblasts, treated with progesterone | | |
| HFNA | Human ovary tumor cell OV350721 | pSport1 | LP10 |
| HKGA HKGB HKGC HKGD | Merkel Cells | pSport1 | LP10 |
| HISA HISB HISC | Pancreas Islet Cell Tumor | pSport1 | LP10 |
| HLSA | Skin, burned | pSport1 | LP10 |
| HBZA | Prostate, BPH, Lib 2 | pSport 1 | LP10 |
| HBZS | Prostate BPH, Lib 2, subtracted | pSport 1 | LP10 |
| HFIA HFIB HEIC | Synovial Fibroblasts (control) | pSport 1 | LP10 |
| HFIH HFII HFIJ | Synovial hypoxia | pSport 1 | LP10 |
| HFIT HFIU HFIV | Synovial IL-1/TNF stimulated | pSport 1 | LP10 |
| HGCA | Messangial cell, frac 1 | pSport1 | LP10 |
| HMVA HMVB HMVC | Bone Marrow Stromal Cell, untreated | pSport1 | LP10 |
| HFIX HFIY HFIZ | Synovial Fibroblasts (Ill/TNF), subt | pSport1 | LP10 |
| HFOX HFOY HFOZ | Synovial hypoxia-RSF subtracted | pSport1 | LP10 |
| HMQA HMQB HMQC HMQD | Human Activated Monocytes | Uni-ZAP XR | LP11 |
| HLIA HLIB HLIC | Human Liver | pCMVSport 1 | LP012 |
| HHBA HHBB HHBC HHBD HHBE | Human Heart | pCMVSport 1 | LP012 |
| HBBA HBBB | Human Brain | pCMVSport 1 | LP012 |
| HLJA HLJB HLJC HLJD HLJE | Human Lung | pCMVSport 1 | LP012 |
| HOGA HOGB HOGC | Ovarian Tumor | pCMVSport 2.0 | LP012 |
| HTJM | Human Tonsils, Lib 2 | pCMVSport 2.0 | LP012 |
| HAMF HAMG | KMH2 | pCMVSport 3.0 | LP012 |
| HAJA HAJB HAJC | L428 | pCMVSport 3.0 | LP012 |
| HWBA HWBB HWBC HWBD HWBE | Dendritic cells, pooled | pCMVSport 3.0 | LP012 |
| HWAA HWAB HWAC HWAD HWAE | Human Bone Marrow, treated | pCMVSport 3.0 | LP012 |
| HYAA HYAB HYAC | B Cell lymphoma | pCMVSport 3.0 | LP012 |
| HWHG HWHH HWHI | Healing groin wound, 6.5 hours post | pCMVSport 3.0 | LP012 |
| | incision | | |
| HWHP HWHQ HWHR | Healing groin wound; 7.5 hours post | pCMVSport 3.0 | LP012 |
| | incision | | |
| HARM | Healing groin wound - zero hr post- | pCMVSport 3.0 | LP012 |
| | incision (control) | | |
| HBIM | Olfactory epithelium; nasalcavity | pCMVSport 3.0 | LP012 |
| HWDA | Healing Abdomen wound; 70 & 90 | pCMVSport 3.0 | LP012 |
| | min post incision | | |
| HWEA | Healing Abdomen Wound; 15 days | pCMVSport 3.0 | LP012 |
| | post incision | | |
| HWJA | Healing Abdomen Wound; 21 & 29 | pCMVSport 3.0 | LP012 |
| | days | | |
| HNAL | Human Tongue, frac 2 | pSport1 | LP012 |
| HMJA | H. Meniingima, M6 | pSport1 | LP012 |
| HMKA HMKB HMKC HMKD HMKE | H. Meningima, M1 | pSport1 | LP012 |
| HOFA | Ovarian Tumor I, OV5232 | pSport1 | LP012 |
| HCFA HCFB HCFC HCFD | T-Cell PHA 16 hrs | pSport1 | LP012 |
| HCFL HCFM HCFN HCFO | T-Cell PHA 24 hrs | pSport1 | LP012 |
| HMMA HMMB HMMC | Spleen metastic melanoma | pSport1 | LP012 |
| HTDA | Human Tonsil, Lib 3 | pSport1 | LP012 |
| HDBA | Human Fetal Thymus | pSport1 | LP012 |
| HDUA | Pericardium | pSport1 | LP012 |
| HBZA | Prostate, BPH, Lib 2 | pSport1 | LP012 |
| HWCA | Larynx tumor | pSport1 | LP012 |
| HWKA | Normal lung | pSport1 | LP012 |
| HSMB | Bone marrow stroma, treated | pSport1 | LP012 |
| HBHM | Normal trachea | pSport1 | LP012 |
| HLFC | Human Larynx | pSport1 | LP012 |
| HLRB | Siebben Polyposis | pSport1 | LP012 |
| HNIA | Mammary Gland | pSport1 | LP012 |
| HNJB | Palate carcinoma | pSport1 | LP012 |
| HNKA | Palate normal | pSport1 | LP012 |
| HMZA | Pharynx carcinoma | pSport1 | LP012 |
| HABG | Cheek Carcinoma | pSport1 | LP012 |
| HMZM | Pharynx Carcinoma | pSport1 | LP012 |
| HDRM | Larynx Carcinoma | pSport1 | LP012 |
| HVAA | Pancreas normal PCA4 No | pSport1 | LP012 |
| HICA | Tongue carcinoma | pSport1 | LP012 |
| HUKA HUKB HUKC HUKD HUKE | Human Uterine Cancer | Lambda ZAP II | LP013 |
| HFFA | Human Fetal Brain, random primed | Lambda ZAP II | LP013 |
| HTUA | Activated T-cell labeled with 4- | Lambda ZAP II | LP013 |
| | thioluri | | |
| HBQA | Early Stage Human Brain, random | Lambda ZAP II | LP013 |
| | primed | | |
| HMEB | Human microvascular Endothelial | Lambda ZAP II | LP013 |
| | cells, fract. B | | |
| HUSH | Human Umbilical Vein Endothelial | Lambda ZAP II | LP013 |
| | cells, fract. A, re-excision | | |
| HLQC HLQD | Hepatocellular tumor, re-excision | Lambda ZAP II | LP013 |
| HTWJ HTWK HTWL | Resting T-cell, re-excision | Lambda ZAP II | LP013 |
| HF6S | Human Whole 6 week Old Embryo | pBluescript | LP013 |
| | (II), subt | | |
| HHPS | Human Hippocampus, subtracted | pBluescript | LP013 |
| HL1S | LNCAP, differential expression | pBluescript | LP013 |
| HLHS HLHT | Early Stage Human Lung, Subtracted | pBluescript | LP013 |
| HSUS | Supt cells, cyclohexamide treated, | pBluescript | LP013 |
| | subtracted | | |
| HSUT | Supt cells, cyclohexamide treated, | pBluescript | LP013 |
| | differentially expressed | | |
| HSDS | H. Striatum Depression, subtracted | pBluescript | LP013 |
| HPTZ | Human Pituitary, Subtracted VII | pBluescript | LP013 |
| HSDX | H. Striatum Depression, subt II | pBluescript | LP013 |
| HSDZ | H. Striatum Depression, subt | pBluescript | LP013 |
| HPBA HPBB HPBC HPBD HPBE | Human Pineal Gland | pBluescript SK- | LP013 |
| HRTA | Colorectal Tumor | pBluescript SK- | LP013 |
| HSBA HSBB HSBC HSBM | HSCl72 cells | pBluescript SK- | LP013 |
| HJAA HJAB HJAC HJAD | Jurkat T-cell G1 phase | pBluescript SK- | LP013 |
| HJBA HJBB HJBC HJBD | Jurkat T-cell, S1 phase | pBluescript SK- | LP013 |
| HTNA HTNB | Human Thyroid | pBluescript SK- | LP013 |
| HAHA HAHB | Human Adult Heart | Uni-ZAP XR | LP013 |
| HE6A | Whole 6 week Old Embryo | Uni-ZAP XR | LP013 |
| HFCA HFCB HFCC HFCD HFCE | Human Fetal Brain | Uni-ZAP XR | LP013 |
| HFKC HFKD HFKE HFKF HFKG | Human Fetal Kidney | Uni-ZAP XR | LP013 |
| HGBA HGBD HGBE HGBF HGBG | Human Gall Bladder | Uni-ZAP XR | LP013 |
| HPRA HPRB HPRC HPRD | Human Prostate | Uni-ZAP XR | LP013 |
| HTEA HTEB HTEC HTED HTEE | Human Testes | Uni-ZAP XR | LP013 |
| HTTA HTTB HTTC HTTD HTTE | Human Testes Tumor | Uni-ZAP XR | LP013 |
| HYBA HYBB | Human Fetal Bone | Uni-ZAP XR | LP013 |
| HFLA | Human Fetal Liver | Uni-ZAP XR | LP013 |
| HHFB HHFC HHFD HHFE HHFF | Human Fetal Heart | Uni-ZAP XR | LP013 |
| HUVB HUVC HUVD HUVE | Human Umbilical Vein, End. remake | Uni-ZAP XR | LP013 |
| HTHB HTHC HTHD | Human Thymus | Uni-ZAP XR | LP013 |
| HSTA HSTB HSTC HSTD | Human Skin Tumor | Uni-ZAP XR | LP013 |
| HTAA HTAB HTAC HTAD HTAE | Human Activated T-cells | Uni-ZAP XR | LP013 |
| HFEA HFEB HFEC | Human Fetal Epithelium (skin) | Uni-ZAP XR | LP013 |
| HJPA HJPB HJPC HJPD | Human Jurkat Membrane Bound | Uni-ZAP XR | LP013 |
| | Polysomes | | |
| HESA | Human Epithelioid Sarcoma | Uni-ZAP XR | LP013 |
| HALS | Human Adult Liver, Subtracted | Uni-ZAP XR | LP013 |
| HFTA HFTB HFTC HFTD | Human Fetal Dura Mater | Uni-ZAP XR | LP013 |
| HCAA HCAB HCAC | Cem cells, cyclohexamide treated | Uni-ZAP XR | LP013 |
| HRGA HRGB HRGC HRGD | Raji Cells, cyclohexamide treated | Uni-ZAP XR | LP013 |
| HE9A HE9B HE9C HE9D HE9E | Nine Week Old Early Stage Human | Uni-ZAP XR | LP013 |
| HSFA | Human Fibrosarcoma | Uni-ZAP XR | LP013 |
| HATA HATB HATC HATD HATE | Human Adrenal Gland Tumor | Uni-ZAP XR | LP013 |
| HTRA | Human Trachea Tumor | Uni-ZAP XR | LP013 |
| HE2A HE2D HE2E HE2H HE2I | 12 Week Old Early Stage Human | Uni-ZAP XR | LP013 |
| HE2B HE2C HE2F HE2G HE2P | 12 Week Old Early Stage Human, II | Uni-ZAP XR | LP013 |
| HNEA HNEB HNEC HNED HNEE | Human Neutrophil | Uni-ZAP XR | LP013 |
| HBGA | Human Primary Breast Cancer | Uni-ZAP XR | LP013 |
| HPTS HPTT HPTU | Human Pituitary, subtracted | Uni-ZAP XR | LP013 |
| HMQA HMQB HMQC HMQD | Human Activated Monocytes | Uni-ZAP XR | LP013 |
| HOAA HOAB HOAC | Human Osteosarcoma | Uni-ZAP XR | LP013 |
| HTOA HTOD HTOE HTOF HTOG | human tonsils | Uni-ZAP XR | LP013 |
| HMGB | Human OB MG63 control fraction I | Uni-ZAP XR | LP013 |
| HOPB | Human OB HOS control fraction I | Uni-ZAP XR | LP013 |
| HOQB | Human OB HOS treated (1 nM E2) | Uni-ZAP XR | LP013 |
| | fraction I | | |
| HAUA HAUB HAUC | Amniotic Cells - TNF induced | Uni-ZAP XR | LP013 |
| HAQA HAQB HAQC HAQD | Amniotic Cells - Primary Culture | Uni-ZAP XR | LP013 |
| HROA HROC | HUMAN STOMACH | Uni-ZAP XR | LP013 |
| HBJA HBJB HBJC HBJD HBJE | HUMAN B CELL LYMPHOMA | Uni-ZAP XR | LP013 |
| HODA HODB HODC HODD | human ovarian cancer | Uni-ZAP XR | LP013 |
| HCPA | Corpus Callosum | Uni-ZAP XR | LP013 |
| HSOA | stomach cancer (human) | Uni-ZAP XR | LP013 |
| HERA | SKIN | Uni-ZAP XR | LP013 |
| HMDA | Brain-medulloblastoma | Uni-ZAP XR | LP013 |
| HGLA HGLB HGLD | Glioblastoma | Uni-ZAP XR | LP013 |
| HWTA HWTB HWTC | wilm's tumor | Uni-ZAP XR | LP013 |
| HEAA | H. Atrophic Endometrium | Uni-ZAP XR | LP013 |
| HAPN HAPO HAPP HAPQ HAPR | Human Adult Pulmonary; re-excision | Uni-ZAP XR | LP013 |
| HLTG HLTH | Human T-cell lymphoma; re-excision | Uni-ZAP XR | LP013 |
| HAHC HAHD HAHE | Human Adult Heart; re-excision | Uni-ZAP XR | LP013 |
| HAGA HAGB HAGC HAGD HAGE | Human Amygdala | Uni-ZAP XR | LP013 |
| HSJA HSJB HSJC | Smooth muscle-ILb induced | Uni-ZAP XR | LP013 |
| HSHA HSHB HSHC | Smooth muscle, IL 1b induced | Uni-ZAP XR | LP013 |
| HPWA HPWB HPWC HPWD HPWE | Prostate BPH | Uni-ZAP XR | LP013 |
| HPIA HPIB HPIC | LNCAP prostate cell line | Uni-ZAP XR | LP013 |
| HPJA HPJB HPJC | PC3 Prostate cell line | Uni-ZAP XR | LP013 |
| HBTA | Bone Marrow Stroma, TNF & LPS ind | Uni-ZAP XR | LP013 |
| HMCF HMCG HMCH HMCI HMCJ | Macrophage-oxLDL; re-excision | Uni-ZAP XR | LP013 |
| HAGG HAGH HAGI | Human Amygdala; re-excision | Uni-ZAP XR | LP013 |
| HACA | H. Adipose Tissue | Uni-ZAP XR | LP013 |
| HKFB | K562 + PMA (36 hrs), re-excision | ZAP Express | LP013 |
| HCWT HCWU HCWV | CD34 positive cells (cord blood),re- | ZAP Express | LP013 |
| | ex | | |
| HBWA | Whole brain | ZAP Express | LP013 |
| HBXA HBXB HBXC HBXD | Human Whole Brain #2 - Oligo dT > | ZAP Express | LP013 |
| | 1.5 Kb | | |
| HAVM | Temporal cortex-Alzheizmer | pT-Adv | LP014 |
| HAVT | Hippocampus, Alzheimer Subtracted | pT-Adv | LP014 |
| HHAS | CHME Cell Line | Uni-ZAP XR | LP014 |
| HAJR | Larynx normal | pSport 1 | LP014 |
| HWLE HWLF HWLG HWLH | Colon Normal | pSport 1 | LP014 |
| HCRM HCRN HCRO | Colon Carcinoma | pSport 1 | LP014 |
| HWLI HWLJ HWLK | Colon Normal | pSport 1 | LP014 |
| HWLQ HWLR HWLS HWLT | Colon Tumor | pSport 1 | LP014 |
| HBFM | Gastrocnemius Muscle | pSport 1 | LP014 |
| HBOD HBOE | Quadriceps Muscle | pSport 1 | LP014 |
| HBKD HBKE | Soleus Muscle | pSport 1 | LP014 |
| HCCM | Pancreatic Langerhans | pSport 1 | LP014 |
| HWGA | Larynx carcinoma | pSport 1 | LP014 |
| HWGM HWGN | Larynx carcinoma | pSport 1 | LP014 |
| HWLA HWLB HWLC | Normal colon | pSport 1 | LP014 |
| HWLM HWLN | Colon Tumor | pSport 1 | LP014 |
| HVAM HVAN HVAO | Pancreas Tumor | pSport 1 | LP014 |
| HWGQ | Larynx carcinoma | pSport 1 | LP014 |
| HAQM HAQN | Salivary Gland | pSport 1 | LP014 |
| HASM | Stomach; normal | pSport 1 | LP014 |
| HBCM | Uterus; normal | pSport 1 | LP014 |
| HCDM | Testis; normal | pSport 1 | LP014 |
| HDJM | Brain; normal | pSport 1 | LP014 |
| HEFM | Adrenal Gland, normal | pSport 1 | LP014 |
| HBAA | Rectum normal | pSport 1 | LP014 |
| HFDM | Rectum tumour | pSport 1 | LP014 |
| HGAM | Colon, normal | pSport 1 | LP014 |
| HHMM | Colon, tumour | pSport 1 | LP014 |
| HCLB HCLC | Human Lung Cancer | Lambda Zap II | LP015 |
| HRLA | L1 Cell line | ZAP Express | LP015 |
| HHAM | Hypothalamus, Alzheimer's | pCMVSport 30 | LP015 |
| HKBA | Ku 812F Basophils Line | pSport 1 | LP015 |
| HS2S | Saos2, Dexamethosome Treated | pSport 1 | LP016 |
| HA5A | Lung Carcinoma A549 TNFalpha | pSport 1 | LP016 |
| | activated | | |
| HTFM | TF-1 Cell Line GM-CSF Treated | pSport 1 | LP016 |
| HYAS | Thyroid Tumour | pSport 1 | LP016 |
| HUTS | Larynx Normal | pSport 1 | LP016 |
| HXOA | Larynx Tumor | pSport 1 | LP016 |
| HEAH | Ea.hy.926 cell line | pSport 1 | LP016 |
| HINA | Adenocarcinoma Human | pSport 1 | LP016 |
| HRMA | Lung Mesothelium | pSport 1 | LP016 |
| HLCL | Human Pre-Differentiated Adipocytes | Uni-Zap XR | LP017 |
| HS2A | Saos2 Cells | pSport 1 | LP020 |
| HS21 | Saos2 Cells; Vitamin D3 Treated | pSport 1 | LP020 |
| HUCM | CHME Cell Line, untreated | pSport 1 | LP020 |
| HEPN | Aryepiglottis Normal | pSport 1 | LP020 |
| HPSN | Sinus Piniformis Tumour | pSport 1 | LP020 |
| HNSA | Stomach Normal | pSport 1 | LP020 |
| HNSM | Stomach Tumour | pSport 1 | LP020 |
| HNLA | Liver Normal Met5No | pSport 1 | LP020 |
| HUTA | Liver Tumour Met 5 Tu | pSport 1 | LP020 |
| HOCN | Colon Normal | pSport 1 | LP020 |
| HOCT | Colon Tumor | pSport 1 | LP020 |
| HTNT | Tongue Tumour | pSport 1 | LP020 |
| HLXN | Larynx Normal | pSport 1 | LP020 |
| HLXT | Larynx Tumour | pSport 1 | LP020 |
| HTYN | Thymus | pSport 1 | LP020 |
| HPLN | Placenta | pSport 1 | LP020 |
| HTNG | Tongue Normal | pSport 1 | LP020 |
| HZAA | Thyroid Normal (SDCA2 No) | pSport 1 | LP020 |
| HWES | Thyroid Thyroiditis | pSport 1 | LP020 |
| HFHD | Ficolled Human Stromal Cells, 5Fu | pTrip1Ex2 | LP021 |
| | treated | | |
| HFHM,HFHN | Ficolled Human Stromal Cells, | pTrip1Ex2 | LP021 |
| | Untreated | | |
| HPCI | Hep G2 Cells, lambda library | lambda Zap-CMV XR | LP021 |
| HBCA,HBCB,HBCC | H. Lymph node breast Cancer | Uni-ZAP XR | LP021 |
| HCOK | Chondrocytes | pSPORT1 | LP022 |
| HDCA, HDCB, HDCC | Dendritic Cells From CD34 Cells | pSPORT1 | LP022 |
| HDMA, HDMB | CD40 activated monocyte dendritic | pSPORT1 | LP022 |
| | cells | | |
| HDDM, HDDN, HDDO | LPS activated derived dendritic cells | pSPORT1 | LP022 |
| HPCR | Hep G2 Cells, PCR library | lambda Zap-CMV XR | LP022 |
| HAAA, HAAB, HAAC | Lung, Cancer (4005313A3): Invasive | pSPORT1 | LP022 |
| | Poorly Differentiated Lung | | |
| | Adenocarcinoma | | |
| HIPA, HIPB, HIPC | Lung, Cancer (4005163 B7). | pSPORT1 | LP022 |
| | Invasive, Poorly Diff. | | |
| | Adenocarcinoma, Metastatic | | |
| HOOH, HOOI | Ovary, Cancer: (4004562 B6) | pSPORT1 | LP022 |
| | Papillary Serous Cystic Neoplasm, | | |
| | Low Malignant Pot | | |
| HIDA | Lung, Normal: (4005313 B1) | pSPORT1 | LP022 |
| HUJA, HUJB, HUJC, HUJD, HUJE | B-Cell | spCMVSport 3.0 | LP022 |
| HNOA, HNOB, HNOC, HNOD | Ovary, Normal: (9805C040R) | pSPORT1 | LP022 |
| HNLM | Lung, Normal: (4005313 B1) | pSPORT1 | LP022 |
| HSCL | Stromal Cells | pSPORT1 | LP022 |
| HAAX | Lung, Cancer: (4005313 A3) Invasive | pSPORT1 | LP022 |
| | Poorly-differentiated Metastatic lung | | |
| | adenocarcinoma | | |
| HUUA, HUUB, HUUC, HUUD | B-cells (unstimulated) | pTrip1Ex2 | LP022 |
| HWWA, HWWB, HWWC, HWWD, HW | B-cells (stimulated) | pSPORT1 | LP022 |
| WE, HWWF, HWWG | | | |
| HCCC | Colon, Cancer: (9808C064R) | pCMVSport 3.0 | LP023 |
| HPDO HPDP HPDQ HPDR HPD | Ovary, Cancer (9809C332): Poorly | pSport 1 | LP023 |
| | differentiated adenocarcinoma | | |
| HPCO HPCP HPCQ HPCT | Ovary, Cancer (15395A1F): Grade II | pSport 1 | LP023 |
| | Papillary Carcinoma | | |
| HOCM HOCO HOCP HOCQ | Ovary, Cancer: (15799A1F) Poorly | pSport 1 | LP023 |
| | differentiated carcinoma | | |
| HCBM HCBN HCBO | Breast, Cancer: (4004943 A5) | pSport 1 | LP023 |
| HNBT HNBU HNBV | Breast, Normal: (4005522B2) | pSport 1 | LP023 |
| HBCP HBCQ | Breast, Cancer: (4005522 A2) | pSport 1 | LP023 |
| | Breast, Cancer: (9806C012R) | pSport 1 | LP023 |
| | Stromal cells 3.88 | pSport 1 | LP023 |
| HVCA HVCB HVCC HVCD | Ovary, Cancer: (4004332 A2) | pSport 1 | LP023 |
| HSCK HSEN HSEO | Stromal cells (HBM3.18) | pSport 1 | LP023 |
| | stromal cell clone 2.5 | pSport 1 | LP023 |
| HUXA | Breast Cancer: (4005385 A2) | pSport 1 | LP023 |
| HCOM HCON HCOO HCOP HCOQ | Ovary, Cancer (4004650 A3): Well- | pSport 1 | LP023 |
| | Differentiated Micropapillary Serous | | |
| | Carcinoma | | |
| HBNM | Breast, Cancer: (9802C020E) | pSport 1 | LP023 |
| HVVA HVVB HVVC HVVD HVVE | Human Bone Marrow, treated | pSport 1 | LP023 |

[0874] Two nonlimiting examples are provided below for isolating a particular clone from the deposited sample of plasmid cDNAs cited for that clone in Table 7. First, a plasmid is directly isolated by screening the clones using a polynucleotide probe corresponding to the nucleotide sequence of SEQ ID NO:X.

[0875] Particularly, a specific polynucleotide with 30-40 nucleotides is synthesized using an Applied Biosystems DNA synthesizer according to the sequence reported. The oligonucleotide is labeled, for instance, with ³²P-γ-ATP using T4 polynucleotide kinase and purified according to routine methods. (E.g., Maniatis et al., Molecular Cloning: A Laboratory Manual, Cold Spring Harbor Press, Cold Spring, N.Y. (1982)). The plasmid mixture is transformed into a suitable host, as indicated above (such as XL-1 Blue (Stratagene)) using techniques known to those of skill in the art, such as those provided by the vector supplier or in related publications or patents cited above. The transformants are plated on 1.5% agar plates (containing the appropriate selection agent, e.g., ampicillin) to a density of about 150 transformants (colonies) per plate. These plates are screened using Nylon membranes according to routine methods for bacterial colony screening (e.g., Sambrook et al., Molecular Cloning: A Laboratory Manual, 2nd Edit., (1989), Cold Spring Harbor Laboratory Press, pages 1.93 to 1.104), or other techniques known to those of skill in the art.

[0876] Alternatively, two primers of 17-20 nucleotides derived from both ends of the nucleotide sequence of SEQ ID NO:X are synthesized and used to amplify the desired cDNA using the deposited cDNA plasmid as a template. The polymerase chain reaction is carried out under routine conditions, for instance, in 25 μl of reaction mixture with 0.5 ug of the above cDNA template. A convenient reaction mixture is 1.5-5 mM MgCl₂, 0.01% (w/v) gelatin, 20 μM each of dATP, dCTP, dGTP, dTTP, 25 pmol of each primer and 0.25 Unit of Taq polymerase. Thirty five cycles of PCR (denaturation at 94° C. for 1 min; annealing at 55° C. for 1 min; elongation at 72° C. for 1 min) are performed with a Perkin-Elmer Cetus automated thermal cycler. The amplified product is analyzed by agarose gel electrophoresis and the DNA band with expected molecular weight is excised and purified. The PCR product is verified to be the selected sequence by subcloning and sequencing the DNA product.

[0877] Several methods are available for the identification of the 5′ or 3′ non-coding portions of a gene which may not be present in the deposited clone. These methods include but are not limited to, filter probing, clone enrichment using specific probes, and protocols similar or identical to 5′ and 3′ “RACE” protocols which are well known in the art. For instance, a method similar to 5′ RACE is available for generating the missing 5′ end of a desired full-length transcript. (Fromont-Racine et al., Nucleic Acids Res. 21(7):1683-1684 (1993)).

[0878] Briefly, a specific RNA oligonucleotide is ligated to the 5′ ends of a population of RNA presumably containing full-length gene RNA transcripts. A primer set containing a primer specific to the ligated RNA oligonucleotide and a primer specific to a known sequence of the gene of interest is used to PCR amplify the 5′ portion of the desired full-length gene. This amplified product may then be sequenced and used to generate the full length gene.

[0879] This above method starts with total RNA isolated from the desired source, although poly-A+ RNA can be used. The RNA preparation can then be treated with phosphatase if necessary to eliminate 5′ phosphate groups on degraded or damaged RNA which may interfere with the later RNA ligase step. The phosphatase should then be inactivated and the RNA treated with tobacco acid pyrophosphatase in order to remove the cap structure present at the 5′ ends of messenger RNAs. This reaction leaves a 5′ phosphate group at the 5′ end of the cap cleaved RNA which can then be ligated to an RNA oligonucleotide using T4 RNA ligase.

[0880] This modified RNA preparation is used as a template for first strand cDNA synthesis using a gene specific oligonucleotide. The first strand synthesis reaction is used as a template for PCR amplification of the desired 5′ end using a primer specific to the ligated RNA oligonucleotide and a primer specific to the known sequence of the gene of interest. The resultant product is then sequenced and analyzed to confirm that the 5′ end sequence belongs to the desired gene.

### Example 2: Isolation of Genomic Clones Corresponding to a Polynucleotide

[0881] A human genomic P1 library (Genomic Systems, Inc.) is screened by PCR using primers selected for the sequence corresponding to SEQ ID NO:X according to the method described in Example 1. (See also, Sambrook.)

### Example 3: Tissue Specific Expression Analysis

[0882] The Human Genome Sciences, Inc. (HGS) database is derived from sequencing tissue and/or disease specific cDNA libraries. Libraries generated from a particular tissue are selected and the specific tissue expression pattern of EST groups or assembled contigs within these libraries is determined by comparison of the expression patterns of those groups or contigs within the entire database. ESTs and assembled contigs which show tissue specific expression are selected.

[0883] The original clone from which the specific EST sequence was generated, or in the case of an assembled contig, the clone from which the 5′ most EST sequence was generated, is obtained from the catalogued library of clones and the insert amplified by PCR using methods known in the art. The PCR product is denatured and then transferred in 96 or 384 well format to a nylon membrane (Schleicher and Scheull) generating an array filter of tissue specific clones. Housekeeping genes, maize genes, and known tissue specific genes are included on the filters. These targets can be used in signal normalization and to validate assay sensitivity. Additional targets are included to monitor probe length and specificity of hybridization.

[0884] Radioactively labeled hybridization probes are generated by first strand cDNA synthesis per the manufacturer's instructions (Life Technologies) from mRNA/RNA samples prepared from the specific tissue being analyzed (e.g., prostate, prostate cancer, ovarian, ovarian cancer, etc.). The hybridization probes are purified by gel exclusion chromatography, quantitated, and hybridized with the array filters in hybridization bottles at 65° C. overnight. The filters are washed under stringent conditions and signals are captured using a Fuji phosphorimager.

[0885] Data is extracted using AIS software and following background subtraction, signal normalization is performed. This includes a normalization of filter-wide expression levels between different experimental runs. Genes that are differentially expressed in the tissue of interest are identified.

### Example 4: Chromosomal Mapping of the Polynucleotides

[0886] An oligonucleotide primer set is designed according to the sequence at the 5′ end of SEQ ID NO:X. This primer preferably spans about 100 nucleotides. This primer set is then used in a polymerase chain reaction under the following set of conditions: 30 seconds, 95° C.; 1 minute, 56° C.; 1 minute, 70° C. This cycle is repeated 32 times followed by one minute cycle at 70° C. Human, mouse, and hamster DNA is used as template in addition to a somatic cell hybrid panel containing individual chromosomes or chromosome fragments (Bios, Inc). The reactions are analyzed on either 8% polyacrylamide gels or 3.5% agarose gels. Chromosome mapping is determined by the presence of an approximately 100 bp PCR fragment in the particular somatic cell hybrid.

### Example 5: Bacterial Expression of a Polypeptide

[0887] A polynucleotide encoding a polypeptide of the present invention is amplified using PCR oligonucleotide primers corresponding to the 5′ and 3′ ends of the DNA sequence, as outlined in Example 1, to synthesize insertion fragments. The primers used to amplify the cDNA insert should preferably contain restriction sites, such as BamHI and XbaI, at the 5′ end of the primers in order to clone the amplified product into the expression vector. For example, BamHI and XbaI correspond to the restriction enzyme sites on the bacterial expression vector pQE-9. (Qiagen, Inc., Chatsworth, Calif.). This plasmid vector encodes antibiotic resistance (Amp^{r}), a bacterial origin of replication (ori), an IPTG-regulatable promoter/operator (P/O), a ribosome binding site (RBS), a 6-histidine tag (6-His), and restriction enzyme cloning sites.

[0888] The pQE-9 vector is digested with BamHI and XbaI and the amplified fragment is ligated into the pQE-9 vector maintaining the reading frame initiated at the bacterial RBS. The ligation mixture is then used to transform the E. coli strain M15/rep4 (Qiagen, Inc.) which contains multiple copies of the plasmid pR-EP4, which expresses the lacI repressor and also confers kanamycin resistance (Kan^{r}). Transformants are identified by their ability to grow on LB plates and ampicillin/kanamycin resistant colonies are selected. Plasmid DNA is isolated and confirmed by restriction analysis.

[0889] Clones containing the desired constructs are grown overnight (O/N) in liquid culture in LB media supplemented with both Amp (100 ug/ml) and Kan (25 ug/ml). The O/N culture is used to inoculate a large culture at a ratio of 1:100 to 1:250. The cells are grown to an optical density 600 (O.D.⁶⁰⁰) of between 0.4 and 0.6. IPTG (Isopropyl-B-D-thiogalacto pyranoside) is then added to a final concentration of 1 mM. IPTG induces by inactivating the lacI repressor, clearing the P/O leading to increased gene expression.

[0890] Cells are grown for an extra 3 to 4 hours. Cells are then harvested by centrifugation (20 mins at 6000×g). The cell pellet is solubilized in the chaotropic agent 6 Molar Guanidine HCl by stirring for 3-4 hours at 4° C. The cell debris is removed by centrifugation, and the supernatant containing the polypeptide is loaded onto a nickel-nitrilo-tri-acetic acid (“Ni-NTA”) affinity resin column (available from QIAGEN, Inc., supra). Proteins with a 6× His tag bind to the Ni-NTA resin with high affinity and can be purified in a simple one-step procedure (for details see: The QIAexpressionist (1995) QIAGEN, Inc., supra).

[0891] Briefly, the supernatant is loaded onto the column in 6 M guanidine-HCl, pH 8. The column is first washed with 10 volumes of 6 M guanidine-HCl, pH 8, then washed with 10 volumes of 6 M guanidine-HCl pH 6, and finally the polypeptide is eluted with 6 M guanidine-HCl, pH 5.

[0892] The purified protein is then renatured by dialyzing it against phosphate-buffered saline (PBS) or 50 mM Na-acetate, pH 6 buffer plus 200 mM NaCl. Alternatively, the protein can be successfully refolded while immobilized on the Ni-NTA column. The recommended conditions are as follows: renature using a linear 6M-1M urea gradient in 500 mM NaCl, 20% glycerol, 20 mM Tris/HCl pH 7.4, containing protease inhibitors. The renaturation should be performed over a period of 1.5 hours or more. After renaturation the proteins are eluted by the addition of 250 mM immidazole. Immidazole is removed by a final dialyzing step against PBS or 50 mM sodium acetate pH 6 buffer plus 200 mM NaCl. The purified protein is stored at 4° C. or frozen at −80° C.

[0893] In addition to the above expression vector, the present invention further includes an expression vector, called pHE4a (ATCC Accession Number 209645, deposited on Feb. 25, 1998) which contains phage operator and promoter elements operatively linked to a polynucleotide of the present invention, called pHE4a. (ATCC Accession Number 209645, deposited on Feb. 25, 1998.) This vector contains: 1) a neomycinphosphotransferase gene as a selection marker, 2) an E. coli origin of replication, 3) a T5 phage promoter sequence, 4) two lac operator sequences, 5) a Shine-Delgarno sequence, and 6) the lactose operon repressor gene (lacIq). The origin of replication (oriC) is derived from pUC19 (LTI, Gaithersburg, Md.). The promoter and operator sequences are made synthetically.

[0894] DNA can be inserted into the pHE4a by restricting the vector with NdeI and XbaI, BamHI, XhoI, or Asp718, running the restricted product on a gel, and isolating the larger fragment (the stuffer fragment should be about 310 base pairs). The DNA insert is generated according to the PCR protocol described in Example 1, using PCR primers having restriction sites for NdeI (5′ primer) and XbaI, BamHI, XhoI, or Asp718 (3′ primer). The PCR insert is gel purified and restricted with compatible enzymes. The insert and vector are ligated according to standard protocols.

[0895] The engineered vector could easily be substituted in the above protocol to express protein in a bacterial system.

### Example 6: Purification of a Polypeptide from an Inclusion Body

[0896] The following alternative method can be used to purify a polypeptide expressed in E. coli when it is present in the form of inclusion bodies. Unless otherwise specified, all of the following steps are conducted at 4-10° C.

[0897] Upon completion of the production phase of the E. coli fermentation, the cell culture is cooled to 4-10° C. and the cells harvested by continuous centrifugation at 15,000 rpm (Heraeus Sepatech). On the basis of the expected yield of protein per unit weight of cell paste and the amount of purified protein required, an appropriate amount of cell paste, by weight, is suspended in a buffer solution containing 100 mM Tris, 50 mM EDTA, pH 7.4. The cells are dispersed to a homogeneous suspension using a high shear mixer.

[0898] The cells are then lysed by passing the solution through a microfluidizer (Microfuidics, Corp. or APV Gaulin, Inc.) twice at 4000-6000 psi. The homogenate is then mixed with NaCl solution to a final concentration of 0.5 M NaCl, followed by centrifugation at 7000×g for 15 min. The resultant pellet is washed again using 0.5M NaCl, 100 mM Tris, 50 mM EDTA, pH 7.4.

[0899] The resulting washed inclusion bodies are solubilized with 1.5 M guanidine hydrochloride (GuHCl) for 2-4 hours. After 7000×g centrifugation for 15 min., the pellet is discarded and the polypeptide containing supernatant is incubated at 4° C. overnight to allow further GuHCl extraction.

[0900] Following high speed centrifugation (30,000×g) to remove insoluble particles, the GuHCl solubilized protein is refolded by quickly mixing the GuHCl extract with 20 volumes of buffer containing 50 mM sodium, pH 4.5, 150 mM NaCl, 2 mM EDTA by vigorous stirring. The refolded diluted protein solution is kept at 4° C. without mixing for 12 hours prior to further purification steps.

[0901] To clarify the refolded polypeptide solution, a previously prepared tangential filtration unit equipped with 0.16 μm membrane filter with appropriate surface area (e.g., Filtron), equilibrated with 40 mM sodium acetate, pH 6.0 is employed. The filtered sample is loaded onto a cation exchange resin (e.g., Poros HS-50, Perseptive Biosystems). The column is washed with 40 mM sodium acetate, pH 6.0 and eluted with 250 mM, 500 mM, 1000 mM, and 1500 mM NaCl in the same buffer, in a stepwise manner. The absorbance at 280 nm of the effluent is continuously monitored. Fractions are collected and further analyzed by SDS-PAGE.

[0902] Fractions containing the polypeptide are then pooled and mixed with 4 volumes of water. The diluted sample is then loaded onto a previously prepared set of tandem columns of strong anion (Poros HQ-50, Perseptive Biosystems) and weak anion (Poros CM-20, Perseptive Biosystems) exchange resins. The columns are equilibrated with 40 mM sodium acetate, pH 6.0. Both columns are washed with 40 mM sodium acetate, pH 6.0, 200 mM NaCl. The CM-20 column is then eluted using a 10 column volume linear gradient ranging from 0.2 M NaCl, 50 mM sodium acetate, pH 6.0 to 1.0 M NaCl, 50 mM sodium acetate, pH 6.5. Fractions are collected under constant A₂₈₀ monitoring of the effluent. Fractions containing the polypeptide (determined, for instance, by 16% SDS-PAGE) are then pooled.

[0903] The resultant polypeptide should exhibit greater than 95% purity after the above refolding and purification steps. No major contaminant bands should be observed from Commassie blue stained 16% SDS-PAGE gel when 5 μg of purified protein is loaded. The purified protein can also be tested for endotoxin/LPS contamination, and typically the LPS content is less than 0.1 ng/ml according to LAL assays.

### Example 7: Cloning and Expression of a Polypeptide in a Baculovirus Expression System

[0904] In this example, the plasmid shuttle vector pA2 is used to insert a polynucleotide into a baculovirus to express a polypeptide. This expression vector contains the strong polyhedrin promoter of the Autographa californica nuclear polyhedrosis virus (AcMNPV) followed by convenient restriction sites such as BamHI, XbaI and Asp718. The polyadenylation site of the simian virus 40 (“SV40”) is used for efficient polyadenylation. For easy selection of recombinant virus, the plasmid contains the beta-galactosidase gene from E. coli under control of a weak Drosophila promoter in the same orientation, followed by the polyadenylation signal of the polyhedrin gene. The inserted genes are flanked on both sides by viral sequences for cell-mediated homologous recombination with wild-type viral DNA to generate a viable virus that express the cloned polynucleotide.

[0905] Many other baculovirus vectors can be used in place of the vector above, such as pAc373, pVL941, and pAcIM1, as one skilled in the art would readily appreciate, as long as the construct provides appropriately located signals for transcription, translation, secretion and the like, including a signal peptide and an in-frame AUG as required. Such vectors are described, for instance, in Luckow et al., Virology 170:31-39 (1989).

[0906] Specifically, the cDNA sequence contained in the deposited clone, including the AUG initiation codon, is amplified using the PCR protocol described in Example 1. If a naturally occurring signal sequence is used to produce the polypeptide of the present invention, the pA2 vector does not need a second signal peptide. Alternatively, the vector can be modified (pA2 GP) to include a baculovirus leader sequence, using the standard methods described in Summers et al., “A Manual of Methods for Baculovirus Vectors and Insect Cell Culture Procedures,” Texas Agricultural Experimental Station Bulletin No. 1555 (1987).

[0907] The amplified fragment is isolated from a 1% agarose gel using a commercially available kit (“Geneclean,” BIO 101 Inc., La Jolla, Calif.). The fragment then is digested with appropriate restriction enzymes and again purified on a 1% agarose gel.

[0908] The plasmid is digested with the corresponding restriction enzymes and optionally, can be dephosphorylated using calf intestinal phosphatase, using routine procedures known in the art. The DNA is then isolated from a 1% agarose gel using a commercially available kit (“Geneclean” BIO 101 Inc., La Jolla, Calif.).

[0909] The fragment and the dephosphorylated plasmid are ligated together with T4 DNA ligase. E. coli HB101 or other suitable E. coli hosts such as XL-1 Blue (Stratagene Cloning Systems, La Jolla, Calif.) cells are transformed with the ligation mixture and spread on culture plates. Bacteria containing the plasmid are identified by digesting DNA from individual colonies and analyzing the digestion product by gel electrophoresis. The sequence of the cloned fragment is confirmed by DNA sequencing.

[0910] Five μg of a plasmid containing the polynucleotide is co-transfected with 1.0 μg of a commercially available linearized baculovirus DNA (“BaculoGold™ baculovirus DNA, Pharmingen, San Diego, Calif.), using the lipofection method described by Felgner et al., Proc. Natl. Acad. Sci. USA 84:7413-7417 (1987). One μg of BaculoGold™ virus DNA and 5 μg of the plasmid are mixed in a sterile well of a microtiter plate containing 50 μl of serum-free Grace's medium (Life Technologies Inc., Gaithersburg, Md.). Afterwards, 10 μl Lipofectin plus 90 μl Grace's medium are added, mixed and incubated for 15 minutes at room temperature. Then the transfection mixture is added drop-wise to Sf9 insect cells (ATCC CRL 1711) seeded in a 35 mm tissue culture plate with 1 ml Grace's medium without serum. The plate is then incubated for 5 hours at 27° C. The transfection solution is then removed from the plate and 1 ml of Grace's insect medium supplemented with 10% fetal calf serum is added. Cultivation is then continued at 27° C. for four days.

[0911] After four days the supernatant is collected and a plaque assay is performed, as described by Summers and Smith, supra. An agarose gel with “Blue Gal” (Life Technologies Inc., Gaithersburg) is used to allow easy identification and isolation of gal-expressing clones, which produce blue-stained plaques. (A detailed description of a “plaque assay” of this type can also be found in the user's guide for insect cell culture and baculovirology distributed by Life Technologies Inc., Gaithersburg, page 9-10.) After appropriate incubation, blue stained plaques are picked with the tip of a micropipettor (e.g., Eppendorf). The agar containing the recombinant viruses is then resuspended in a microcentrifuge tube containing 200 μl of Grace's medium and the suspension containing the recombinant baculovirus is used to infect Sf9 cells seeded in 35 mm dishes. Four days later the supernatants of these culture dishes are harvested and then they are stored at 4° C.

[0912] To verify the expression of the polypeptide, Sf9 cells are grown in Grace's medium supplemented with 10% heat-inactivated FBS. The cells are infected with the recombinant baculovirus containing the polynucleotide at a multiplicity of infection (“MOI”) of about 2. If radiolabeled proteins are desired, 6 hours later the medium is removed and is replaced with SF900 II medium minus methionine and cysteine (available from Life Technologies Inc., Rockville, Md.). After 42 hours, 5 μCi of ³⁵S-methionine and 5 μCi ³⁵S-cysteine (available from Amersham) are added. The cells are further incubated for 16 hours and then are harvested by centrifugation. The proteins in the supernatant as well as the intracellular proteins are analyzed by SDS-PAGE followed by autoradiography (if radiolabeled).

[0913] Microsequencing of the amino acid sequence of the amino terminus of purified protein may be used to determine the amino terminal sequence of the produced protein.

### Example 8: Expression of a Polypeptide in Mammalian Cells

[0914] The polypeptide of the present invention can be expressed in a mammalian cell. A typical mammalian expression vector contains a promoter element, which mediates the initiation of transcription of mRNA, a protein coding sequence, and signals required for the termination of transcription and polyadenylation of the transcript. Additional elements include enhancers, Kozak sequences and intervening sequences flanked by donor and acceptor sites for RNA splicing. Highly efficient transcription is achieved with the early and late promoters from SV40, the long terminal repeats (LTRs) from Retroviruses, e.g., RSV, HTLVI, HIVI and the early promoter of the cytomegalovirus (CMV). However, cellular elements can also be used (e.g., the human actin promoter).

[0915] Suitable expression vectors for use in practicing the present invention include, for example, vectors such as pSVL and pMSG (Pharmacia, Uppsala, Sweden), pRSVcat (ATCC 37152), pSV2dhfr (ATCC 37146), pBC12MI (ATCC 67109), pCMVSport 2.0, and pCMVSport 3.0. Mammalian host cells that could be used include, human Hela, 293, H9 and Jurkat cells, mouse NIH3T3 and C127 cells, Cos 1, Cos 7 and CV1, quail QC1-3 cells, mouse L cells and Chinese hamster ovary (CHO) cells.

[0916] Alternatively, the polypeptide can be expressed in stable cell lines containing the polynucleotide integrated into a chromosome. The co-transfection with a selectable marker such as DHFR, gpt, neomycin, or hygromycin allows the identification and isolation of the transfected cells.

[0917] The transfected gene can also be amplified to express large amounts of the encoded protein. The DHFR (dihydrofolate reductase) marker is useful in developing cell lines that carry several hundred or even several thousand copies of the gene of interest. (See, e.g., Alt, F. W., et al., J. Biol. Chem. 253:1357-1370 (1978); Hamlin, J. L. and Ma, C., Biochem. et Biophys. Acta, 1097:107-143 (1990); Page, M. J. and Sydenham, M. A., Biotechnology 9:64-68 (1991)). Another useful selection marker is the enzyme glutamine synthase (GS) (Murphy et al., Biochem J. 227:277-279 (1991); Bebbington et al., Bio/Technology 10:169-175 (1992). Using these markers, the mammalian cells are grown in selective medium and the cells with the highest resistance are selected. These cell lines contain the amplified gene(s) integrated into a chromosome. Chinese hamster ovary (CHO) and NSO cells are often used for the production of proteins.

[0918] Derivatives of the plasmid pSV2-dhfr (ATCC Accession No. 37146), the expression vectors pC4 (ATCC Accession No. 209646) and pC6 (ATCC Accession No.209647) contain the strong promoter (LTR) of the Rous Sarcoma Virus (Cullen et al., Molecular and Cellular Biology, 438-447 (March, 1985)) plus a fragment of the CMV-enhancer (Boshart et al., Cell 41:521-530 (1985)). Multiple cloning sites, e.g., with the restriction enzyme cleavage sites BamHI, XbaI and Asp718, facilitate the cloning of the gene of interest. The vectors also contain the 3′ intron, the polyadenylation and termination signal of the rat preproinsulin gene, and the mouse DHFR gene under control of the SV40 early promoter.

[0919] Specifically, the plasmid pC6, for example, is digested with appropriate restriction enzymes and then dephosphorylated using calf intestinal phosphates by procedures known in the art. The vector is then isolated from a 1% agarose gel.

[0920] A polynucleotide of the present invention is amplified according to the protocol outlined in Example 1. If a naturally occurring signal sequence is used to produce the polypeptide of the present invention, the vector does not need a second signal peptide. Alternatively, if a naturally occurring signal sequence is not used, the vector can be modified to include a heterologous signal sequence. (See, e.g., International Publication No. WO 96/34891.)

[0921] The amplified fragment is isolated from a 1% agarose gel using a commercially available kit (“Geneclean,” BIO 101 Inc., La Jolla, Calif.). The fragment then is digested with appropriate restriction enzymes and again purified on a 1% agarose gel.

[0922] The amplified fragment is then digested with the same restriction enzyme and purified on a 1% agarose gel. The isolated fragment and the dephosphorylated vector are then ligated with T4 DNA ligase. E. Coli HB101 or XL-1 Blue cells are then transformed and bacteria are identified that contain the fragment inserted into plasmid pC6 using, for instance, restriction enzyme analysis.

[0923] Chinese hamster ovary cells lacking an active DHFR gene is used for transfection. Five μg of the expression plasmid pC6 or pC4 is cotransfected with 0.5 μg of the plasmid pSVneo using lipofectin (Felgner et al., supra). The plasmid pSV2-neo contains a dominant selectable marker, the neo gene from Tn5 encoding an enzyme that confers resistance to a group of antibiotics including G418. The cells are seeded in alpha minus MEM supplemented with 1 mg/ml G418. After 2 days, the cells are trypsinized and seeded in hybridoma cloning plates (Greiner, Germany) in alpha minus MEM supplemented with 10, 25, or 50 ng/ml of methotrexate plus 1 mg/ml G418. After about 10-14 days single clones are trypsinized and then seeded in 6-well petri dishes or 10 ml flasks using different concentrations of methotrexate (50 nM, 100 nM, 200 nM, 400 nM, 800 nM). Clones growing at the highest concentrations of methotrexate are then transferred to new 6-well plates containing even higher concentrations of methotrexate (1 μM, 2 μM, 5 μM, 10 mM, 20 mM). The same procedure is repeated until clones are obtained which grow at a concentration of 100-200 μM. Expression of the desired gene product is analyzed, for instance, by SDS-PAGE and Western blot or by reversed phase HPLC analysis.

### Example 9: Protein Fusions

[0924] The polypeptides of the present invention are preferably fused to other proteins. These fusion proteins can be used for a variety of applications. For example, fusion of the present polypeptides to His-tag, HA-tag, protein A, IgG domains, and maltose binding protein facilitates purification. (See Example 5; see also EP A 394,827; Traunecker, et al., Nature 331:84-86 (1988)). Similarly, fusion to IgG-1, IgG-3, and albumin increases the halflife time in vivo. Nuclear localization signals fused to the polypeptides of the present invention can target the protein to a specific subcellular localization, while covalent heterodimer or homodimers can increase or decrease the activity of a fusion protein. Fusion proteins can also create chimeric molecules having more than one function. Finally, fusion proteins can increase solubility and/or stability of the fused protein compared to the non-fused protein. All of the types of fusion proteins described above can be made by modifying the following protocol, which outlines the fusion of a polypeptide to an IgG molecule, or the protocol described in Example 5.

[0925] Briefly, the human Fc portion of the IgG molecule can be PCR amplified, using primers that span the 5′ and 3′ ends of the sequence described below. These primers also should have convenient restriction enzyme sites that will facilitate cloning into an expression vector, preferably a mammalian expression vector.

[0926] For example, if pC4 (ATCC Accession No. 209646) is used, the human Fc portion can be ligated into the BamHI cloning site. Note that the 3′ BamHI site should be destroyed. Next, the vector containing the human Fc portion is re-restricted with BamHI, linearizing the vector, and a polynucleotide of the present invention, isolated by the PCR protocol described in Example 1, is ligated into this BamHI site. Note that the polynucleotide is cloned without a stop codon, otherwise a fusion protein will not be produced.

[0927] If the naturally occurring signal sequence is used to produce the polypeptide of the present invention, pC4 does not need a second signal peptide. Alternatively, if the naturally occurring signal sequence is not used, the vector can be modified to include a heterologous signal sequence. (See, e.g., International Publication No. WO 96/34891.)

| | |
|---|---|
| Human IgG Fc region: | |
| GGGATCCGGAGCCCAAATCTTCTGACAAAACTCACACATGCCCACCGTGCCCA | (SEQ ID NO: 1) |
| GCACCTGAATTCGAGGGTGCACCGTCAGTCTTCCTCTTCCCCCCAAAACCCAAG | |
| GACACCCTCATGATCTCCCGGACTCCTGAGGTCACATGCGTGGTGGTGGACGTA | |
| AGCCACGAAGACCCTGAGGTCAAGTTCAACTGGTACGTGGACGGCGTGGAGGT | |
| GCATAATGCCAAGACAAAGCCGCGGGAGGAGCAGTACAACAGCACGTACCGTG | |
| TGGTCAGCGTCCTCACCGTCCTGCACCAGGACTGGCTGAATGGCAAGGAGTAC | |
| AAGTGCAAGGTCTCCAACAAAGCCCTCCCAACCCCCATCGAGAAAACCATCTC | |
| CAAAGCCAAAGGGCAGCCCCGAGAACCACAGGTGTACACCCTGCCCCCATCCC | |
| GGGATGAGCTGACCAAGAACCAGGTCAGCCTGACCTGCCTGGTCAAAGGCTTC | |
| TATCCAAGCGACATCGCCGTGGAGTGGGAGAGCAATGGGCAGCCGGAGAACAA | |
| CTACAAGACCACGCCTCCCGTGCTGGACTCCGACGGCTCCTTCTTCCTCTACAG | |
| CAAGCTCACCGTGGACAAGAGCAGGTGGCAGCAGGGGAACGTCTTCTCATGCT | |
| CCGTGATGCATGAGGCTCTGCACAACCACTACACGCAGAAGAGCCTCTCCCTGT | |
| CTCCGGGTAAATGAGTGCGACGGCCGCGACTCTAGAGGAT | |

### Example 10: Production of an Antibody from a Polypeptide

[0928] a) Hybridoma Technology

[0929] The antibodies of the present invention can be prepared by a variety of methods. (See, Current Protocols, Chapter 2.) As one example of such methods, cells expressing a polypeptide of the present invention are administered to an animal to induce the production of sera containing polyclonal antibodies. In a preferred method, a preparation of a a polypeptide of the present invention is prepared and purified to render it substantially free of natural contaminants. Such a preparation is then introduced into an animal in order to produce polyclonal antisera of greater specific activity.

[0930] Monoclonal antibodies specific for a polypeptide of the present invention are prepared using hybridoma technology (Kohler et al., Nature 256:495 (1975); Kohler et al., Eur. J. Immunol. 6:511 (1976); Kohler et al., Eur. J. Immunol. 6:292 (1976); Hammerling et al., in: Monoclonal Antibodies and T-Cell Hybridomas, Elsevier, N.Y., pp. 563-681 (1981)). In general, an animal (preferably a mouse) is immunized with a polypeptide of the present invention or, more preferably, with a secreted polypeptide of the present invention-expressing cell. Such polypeptide-expressing cells are cultured in any suitable tissue culture medium, preferably in Earle's modified Eagle's medium supplemented with 10% fetal bovine serum (inactivated at about 56° C.), and supplemented with about 10 g/l of nonessential amino acids, about 1,000 U/ml of penicillin, and about 100 μg/ml of streptomycin.

[0931] The splenocytes of such mice are extracted and fused with a suitable myeloma cell line. Any suitable myeloma cell line may be employed in accordance with the present invention; however, it is preferable to employ the parent myeloma cell line (SP20), available from the ATCC. After fusion, the resulting hybridoma cells are selectively maintained in HAT medium, and then cloned by limiting dilution as described by Wands et al. (Gastroenterology 80:225-232 (1981)). The hybridoma cells obtained through such a selection are then assayed to identify clones which secrete antibodies capable of binding the polypeptide of the present invention.

[0932] Alternatively, additional antibodies capable of binding to polypeptide of the present invention can be produced in a two-step procedure using anti-idiotypic antibodies. Such a method makes use of the fact that antibodies are themselves antigens, and therefore, it is possible to obtain an antibody which binds to a second antibody. In accordance with this method, protein specific antibodies are used to immunize an animal, preferably a mouse. The splenocytes of such an animal are then used to produce hybridoma cells, and the hybridoma cells are screened to identify clones which produce an antibody whose ability to bind to the polypeptide of the present invention-specific antibody can be blocked by polypeptide of the present invention. Such antibodies comprise anti-idiotypic antibodies to the polypeptide of the present invention-specific antibody and are used to immunize an animal to induce formation of further polypeptide of the present invention-specific antibodies.

[0933] For in vivo use of antibodies in humans, an antibody is “humanized”. Such antibodies can be produced using genetic constructs derived from hybridoma cells producing the monoclonal antibodies described above. Methods for producing chimeric and humanized antibodies are known in the art and are discussed herein. (See, for review, Morrison, Science 229:1202 (1985); Oi et al., BioTechniques 4:214 (1986); Cabilly et al., U.S. Pat. No. 4,816,567; Taniguchi et al., EP 171496; Morrison et al., EP 173494; Neuberger et al., WO 8601533; Robinson et al., International Publication No. WO 8702671; Boulianne et al., Nature 312:643 (1984); Neuberger et al., Nature 314:268 (1985)).

[0934] b) Isolation Of Antibody Fragments Directed Against Polypeptide of the Present Invention From A Library Of scFvs

[0935] Naturally occurring V-genes isolated from human PBLs are constructed into a library of antibody fragments which contain reactivities against polypeptide of the present invention to which the donor may or may not have been exposed (see e.g., U.S. Pat. No. 5,885,793 incorporated herein by reference in its entirety).

[0936] Rescue of the Library. A library of scFvs is constructed from the RNA of human PBLs as described in International Publication No. WO 92/01047. To rescue phage displaying antibody fragments, approximately 109 E. coli harboring the phagemid are used to inoculate 50 ml of 2×TY containing 1% glucose and 100 μg/ml of ampicillin (2×TY-AMP-GLU) and grown to an O.D. of 0.8 with shaking. Five ml of this culture is used to inoculate 50 ml of 2×TY-AMP-GLU, 2×108 TU of delta gene 3 helper (M13 delta gene III, see International Publication No. WO 92/01047) are added and the culture incubated at 37° C. for 45 minutes without shaking and then at 37° C. for 45 minutes with shaking. The culture is centrifuged at 4000 r.p.m. for 10 min. and the pellet resuspended in 2 liters of 2×TY containing 100 μg/ml ampicillin and 50 ug/ml kanamycin and grown overnight. Phage are prepared as described in International Publication No. WO 92/01047.

[0937] M13 delta gene III is prepared as follows: M13 delta gene III helper phage does not encode gene III protein, hence the phage(mid) displaying antibody fragments have a greater avidity of binding to antigen. Infectious M13 delta gene III particles are made by growing the helper phage in cells harboring a pUC19 derivative supplying the wild type gene III protein during phage morphogenesis. The culture is incubated for 1 hour at 37° C. without shaking and then for a further hour at 37° C. with shaking. Cells are spun down (IEC-Centra 8,400 r.p.m. for 10 min), resuspended in 300 ml 2×TY broth containing 100 μg ampicillin/ml and 25 μg kanamycin/ml (2×TY-AMP-KAN) and grown overnight, shaking at 37° C. Phage particles are purified and concentrated from the culture medium by two PEG-precipitations (Sambrook et al., 1990), resuspended in 2 ml PBS and passed through a 0.45 μm filter (Minisart NML; Sartorius) to give a final concentration of approximately 10¹³ transducing units/ml (ampicillin-resistant clones).

[0938] Panning of the Library. Immunotubes (Nunc) are coated overnight in PBS with 4 ml of either 100 μg/ml or 10 μg/ml of a polypeptide of the present invention. Tubes are blocked with 2% Marvel-PBS for 2 hours at 37° C. and then washed 3 times in PBS. Approximately 10¹³ TU of phage is applied to the tube and incubated for 30 minutes at room temperature tumbling on an over and under turntable and then left to stand for another 1.5 hours. Tubes are washed 10 times with PBS 0.1% Tween-20 and 10 times with PBS. Phage are eluted by adding 1 ml of 100 mM triethylamine and rotating 15 minutes on an under and over turntable after which the solution is immediately neutralized with 0.5 ml of 1.0M Tris-HCl, pH 7.4. Phage are then used to infect 10 ml of mid-log E. coli TG1 by incubating eluted phage with bacteria for 30 minutes at 37° C. The E. coli are then plated on TYE plates containing 1% glucose and 100 μg/ml ampicillin. The resulting bacterial library is then rescued with delta gene 3 helper phage as described above to prepare phage for a subsequent round of selection. This process is then repeated for a total of 4 rounds of affinity purification with tube-washing increased to 20 times with PBS, 0. 1% Tween-20 and 20 times with PBS for rounds 3 and 4.

[0939] Characterization of Binders. Eluted phage from the 3rd and 4th rounds of selection are used to infect E. coli HB 2151 and soluble scFv is produced (Marks, et al., 1991) from single colonies for assay. ELISAs are performed with microtitre plates coated with either 10 pg/ml of the polypeptide of the present invention in 50 mM bicarbonate pH 9.6. Clones positive in ELISA are further characterized by PCR fingerprinting (see, e.g., International Publication No. WO 92/01047) and then by sequencing. These ELISA positive clones may also be further characterized by techniques known in the art, such as, for example, epitope mapping, binding affinity, receptor signal transduction, ability to block or competitively inhibit antibody/antigen binding, and competitive agonistic or antagonistic activity.

### Example 11: Method of Determining Alterations in a Gene Corresponding to a Polynucleotide

[0940] RNA isolated from entire families or individual patients presenting with a phenotype of interest (such as a disease) is isolated. cDNA is then generated from these RNA samples using protocols known in the art. (See, Sambrook.) The cDNA is then used as a template for PCR, employing primers surrounding regions of interest in SEQ ID NO:X; and/or the nucleotide sequence of the cDNA contained in Clone ID NO:Z. Suggested PCR conditions consist of 35 cycles at 95 degrees C. for 30 seconds; 60-120 seconds at 52-58 degrees C.; and 60-120 seconds at 70 degrees C., using buffer solutions described in Sidransky et al., Science 252:706 (1991).

[0941] PCR products are then sequenced using primers labeled at their 5′ end with T4 polynucleotide kinase, employing SequiTherm Polymerase (Epicentre Technologies). The intron-exon boundaries of selected exons is also determined and genomic PCR products analyzed to confirm the results. PCR products harboring suspected mutations are then cloned and sequenced to validate the results of the direct sequencing.

[0942] PCR products are cloned into T-tailed vectors as described in Holton et al., Nucleic Acids Research, 19:1156 (1991) and sequenced with T7 polymerase (United States Biochemical). Affected individuals are identified by mutations not present in unaffected individuals.

[0943] Genomic rearrangements are also observed as a method of determining alterations in a gene corresponding to a polynucleotide. Genomic clones isolated according to Example 2 are nick-translated with digoxigenindeoxy-uridine 5′-triphosphate (Boehringer Manheim), and FISH performed as described in Johnson et al., Methods Cell Biol. 35:73-99 (1991). Hybridization with the labeled probe is carried out using a vast excess of human cot-1 DNA for specific hybridization to the corresponding genomic locus.

[0944] Chromosomes are counterstained with 4,6-diamino-2-phenylidole and propidium iodide, producing a combination of C- and R-bands. Aligned images for precise mapping are obtained using a triple-band filter set (Chroma Technology, Brattleboro, Vt.) in combination with a cooled charge-coupled device camera (Photometrics, Tucson, Ariz.) and variable excitation wavelength filters. (Johnson et al., Genet. Anal. Tech. Appl., 8:75 (1991)). Image collection, analysis and chromosomal fractional length measurements are performed using the ISee Graphical Program System. (Inovision Corporation, Durham, N.C.) Chromosome alterations of the genomic region hybridized by the probe are identified as insertions, deletions, and translocations. These alterations are used as a diagnostic marker for an associated disease.

### Example 12: Method of Detecting Abnormal Levels of a Polypeptide in a Biological Sample

[0945] A polypeptide of the present invention can be detected in a biological sample, and if an increased or decreased level of the polypeptide is detected, this polypeptide is a marker for a particular phenotype. Methods of detection are numerous, and thus, it is understood that one skilled in the art can modify the following assay to fit their particular needs.

[0946] For example, antibody-sandwich ELISAs are used to detect polypeptides in a sample, preferably a biological sample. Wells of a microtiter plate are coated with specific antibodies, at a final concentration of 0.2 to 10 ug/ml. The antibodies are either monoclonal or polyclonal and are produced by the method described in Example 10. The wells are blocked so that non-specific binding of the polypeptide to the well is reduced.

[0947] The coated wells are then incubated for >2 hours at RT with a sample containing the polypeptide. Preferably, serial dilutions of the sample should be used to validate results. The plates are then washed three times with deionized or distilled water to remove unbound polypeptide.

[0948] Next, 50 ul of specific antibody-alkaline phosphatase conjugate, at a concentration of 25-400 ng, is added and incubated for 2 hours at room temperature. The plates are again washed three times with deionized or distilled water to remove unbound conjugate.

[0949] Add 75 ul of 4-methylumbelliferyl phosphate (MUP) or p-nitrophenyl phosphate (NPP) substrate solution to each well and incubate 1 hour at room temperature. Measure the reaction by a microtiter plate reader. Prepare a standard curve, using serial dilutions of a control sample, and plot polypeptide concentration on the X-axis (log scale) and fluorescence or absorbance of the Y-axis (linear scale). Interpolate the concentration of the polypeptide in the sample using the standard curve.

### Example 13: Formulation

[0950] The invention also provides methods of treatment and/or prevention of diseases or disorders (such as, for example, any one or more of the diseases or disorders disclosed herein) by administration to a subject of an effective amount of a Therapeutic. By therapeutic is meant polynucleotides or polypeptides of the invention (including fragments and variants), agonists or antagonists thereof, and/or antibodies thereto, in combination with a pharmaceutically acceptable carrier type (e.g., a sterile carrier).

[0951] The Therapeutic will be formulated and dosed in a fashion consistent with good medical practice, taking into account the clinical condition of the individual patient (especially the side effects of treatment with the Therapeutic alone), the site of delivery, the method of administration, the scheduling of administration, and other factors known to practitioners. The “effective amount” for purposes herein is thus determined by such considerations.

[0952] As a general proposition, the total pharmaceutically effective amount of the Therapeutic administered parenterally per dose will be in the range of about 1 ug/kg/day to 10 mg/kg/day of patient body weight, although, as noted above, this will be subject to therapeutic discretion. More preferably, this dose is at least 0.01 mg/kg/day, and most preferably for humans between about 0.01 and 1 mg/kg/day for the hormone. If given continuously, the Therapeutic is typically administered at a dose rate of about 1 ug/kg/hour to about 50 ug/kg/hour, either by 1-4 injections per day or by continuous subcutaneous infusions, for example, using a mini-pump. An intravenous bag solution may also be employed. The length of treatment needed to observe changes and the interval following treatment for responses to occur appears to vary depending on the desired effect.

[0953] Therapeutics can be are administered orally, rectally, parenterally, intracistemally, intravaginally, intraperitoneally, topically (as by powders, ointments, gels, drops or transdermal patch), bucally, or as an oral or nasal spray. “Pharmaceutically acceptable carrier” refers to a non-toxic solid, semisolid or liquid filler, diluent, encapsulating material or formulation auxiliary of any. The tenn “parenteral” as used herein refers to modes of administration which include intravenous, intramuscular, intraperitoneal, intrastemal, subcutaneous and intraarticular injection and infusion.

[0954] Therapeutics of the invention are also suitably administered by sustained-release systems. Suitable examples of sustained-release Therapeutics are administered orally, rectally, parenterally, intracistemally, intravaginally, intraperitoneally, topically (as by powders, ointments, gels, drops or transdermal patch), bucally, or as an oral or nasal spray. “Pharmaceutically acceptable carrier” refers to a non-toxic solid, semisolid or liquid filler, diluent, encapsulating material or formulation auxiliary of any type. The term “parenteral” as used herein refers to modes of administration which include intravenous, intramuscular, intraperitoneal, intrastemal, subcutaneous and intraarticular injection and infusion.

[0955] Therapeutics of the invention are also suitably administered by sustained-release systems. Suitable examples of sustained-release Therapeutics include suitable polymeric materials (such as, for example, semi-permeable polymer matrices in the form of shaped articles, e.g., films, or mirocapsules), suitable hydrophobic materials (for example as an emulsion in an acceptable oil) or ion exchange resins, and sparingly soluble derivatives (such as, for example, a sparingly soluble salt).

[0956] Sustained-release matrices include polylactides (U.S. Pat. No. 3,773,919, EP 58,481), copolymers of L-glutamic acid and gamma-ethyl-L-glutamate (Sidman et al., Biopolymers 22:547-556 (1983)), poly (2- hydroxyethyl methacrylate) (Langer et al., J. Biomed. Mater. Res. 15:167-277 (1981), and Langer, Chem. Tech. 12:98-105 (1982)), ethylene vinyl acetate (Langer et al., Id.) or poly-D-(−)-3-hydroxybutyric acid (EP 133,988).

[0957] Sustained-release Therapeutics also include liposomally entrapped Therapeutics of the invention (see generally, Langer, Science 249:1527-1533 (1990); Treat et al., in Liposomes in the Therapy of Infectious Disease and Cancer, Lopez-Berestein and Fidler (eds.), Liss, N.Y., pp. 317 -327 and 353-365 (1989)). Liposomes containing the Therapeutic are prepared by methods known per se: DE 3,218,121; Epstein et al., Proc. Natl. Acad. Sci. (USA) 82:3688-3692 (1985); Hwang et al., Proc. Natl. Acad. Sci. (USA) 77:4030-4034 (1980); EP 52,322; EP 36,676; EP 88,046; EP 143,949; EP 142,641; Japanese Pat. Appl. 83-118008; U.S. Pat. Nos. 4,485,045 and 4,544,545; and EP 102,324. Ordinarily, the liposomes are of the small (about 200-800 Angstroms) unilamellar type in which the lipid content is greater than about 30 mol. percent cholesterol, the selected proportion being adjusted for the optimal Therapeutic.

[0958] In yet an additional embodiment, the Therapeutics of the invention are delivered by way of a pump (see Langer, supra; Sefton, CRC Crit. Ref. Biomed. Eng. 14:201 (1987); Buchwald et al., Surgery 88:507 (1980); Saudek et al., N. Engl. J. Med. 321:574 (1989)).

[0959] Other controlled release systems are discussed in the review by Langer (Science 249:1527-1533 (1990)).

[0960] For parenteral administration, in one embodiment, the Therapeutic is formulated generally by mixing it at the desired degree of purity, in a unit dosage injectable form (solution, suspension, or emulsion), with a pharmaceutically acceptable carrier, i.e., one that is non-toxic to recipients at the dosages and concentrations employed and is compatible with other ingredients of the formulation. For example, the formulation preferably does not include oxidizing agents and other compounds that are known to be deleterious to the Therapeutic.

[0961] Generally, the formulations are prepared by contacting the Therapeutic uniformly and intimately with liquid carriers or finely divided solid carriers or both. Then, if necessary, the product is shaped into the desired formulation. Preferably the carrier is a parenteral carrier, more preferably a solution that is isotonic with the blood of the recipient. Examples of such carrier vehicles include water, saline, Ringer's solution, and dextrose solution. Non-aqueous vehicles such as fixed oils and ethyl oleate are also useful herein, as well as liposomes.

[0962] The carrier suitably contains minor amounts of additives such as substances that enhance isotonicity and chemical stability. Such materials are non-toxic to recipients at the dosages and concentrations employed, and include buffers such as phosphate, citrate, succinate, acetic acid, and other organic acids or their salts; antioxidants such as ascorbic acid; low molecular weight (less than about ten residues) polypeptides, e.g., polyarginine or tripeptides; proteins, such as serum albumin, gelatin, or immunoglobulins; hydrophilic polymers such as polyvinylpyrrolidone; amino acids, such as glycine, glutamic acid, aspartic acid, or arginine; monosaccharides, disaccharides, and other carbohydrates including cellulose or its derivatives, glucose, manose, or dextrins; chelating agents such as EDTA; sugar alcohols such as mannitol or sorbitol; counterions such as sodium; and/or nonionic surfactants such as polysorbates, poloxamers, or PEG.

[0963] The Therapeutic is typically formulated in such vehicles at a concentration of about 0.1 mg/ml to 100 mg/ml, preferably 1-10 mg/ml, at a pH of about 3 to 8. It will be understood that the use of certain of the foregoing excipients, carriers, or stabilizers will result in the formation of polypeptide salts.

[0964] Any pharmaceutical used for therapeutic administration can be sterile. Sterility is readily accomplished by filtration through sterile filtration membranes (e.g., 0.2 micron membranes). Therapeutics generally are placed into a container having a sterile access port, for example, an intravenous solution bag or vial having a stopper pierceable by a hypodermic injection needle.

[0965] Therapeutics ordinarily will be stored in unit or multi-dose containers, for example, sealed ampoules or vials, as an aqueous solution or as a lyophilized formulation for reconstitution. As an example of a lyophilized formulation, 1 0-ml vials are filled with 5 ml of sterile-filtered 1% (w/v) aqueous Therapeutic solution, and the resulting mixture is lyophilized. The infusion solution is prepared by reconstituting the lyophilized Therapeutic using bacteriostatic Water-for-Injection.

[0966] The invention also provides a pharmaceutical pack or kit comprising one or more containers filled with one or more of the ingredients of the Therapeutics of the invention. Associated with such container(s) can be a notice in the form prescribed by a governmental agency regulating the manufacture, use or sale of pharmaceuticals or biological products, which notice reflects approval by the agency of manufacture, use or sale for human administration. In addition, the Therapeutics may be employed in conjunction with other therapeutic compounds.

[0967] The Therapeutics of the invention may be administered alone or in combination with adjuvants. Adjuvants that may be administered with the Therapeutics of the invention include, but are not limited to, alum, alum plus deoxycholate (ImmunoAg), MTP-PE (Biocine Corp.), QS21 (Genentech, Inc.), BCG (e.g., THERACYS®), MPL and nonviable prepartions of Corynebacterium parvum. In a specific embodiment, Therapeutics of the invention are administered in combination with alum. In another specific embodiment, Therapeutics of the invention are administered in combination with QS-21. Further adjuvants that may be administered with the Therapeutics of the invention include, but are not limited to, Monophosphoryl lipid immunomodulator, 100a, QS-21, QS-18, CRL1005, Aluminum salts, MF-59, and Virosomal adjuvant technology. Vaccines that may be administered with the Therapeutics of the invention include, but are not limited to, vaccines directed toward protection against MMR (measles, mumps, rubella), polio, varicella, tetanus/diptheria, hepatitis A, hepatitis B, haemophilus influenzae B, whooping cough, pneumonia, influenza, Lyme's Disease, rotavirus, cholera, yellow fever, Japanese encephalitis, poliomyelitis, rabies, typhoid fever, and pertussis. Combinations may be administered either concomitantly, e.g., as an admixture, separately but simultaneously or concurrently; or sequentially. This includes presentations in which the combined agents are administered together as a therapeutic mixture, and also procedures in which the combined agents are administered separately but simultaneously, e.g., as through separate intravenous lines into the same individual. Administration “in combination” further includes the separate administration of one of the compounds or agents given first, followed by the second.

[0968] The Therapeutics of the invention may be administered alone or in combination with other therapeutic agents. Therapeutic agents that may be administered in combination with the Therapeutics of the invention, include but not limited to, chemotherapeutic agents, antibiotics, steroidal and non-steroidal anti-inflammatories, conventional immunotherapeutic agents, and/or therapeutic treatments described below. Combinations may be administered either concomitantly, e.g., as an admixture, separately but simultaneously or concurrently; or sequentially. This includes presentations in which the combined agents are administered together as a therapeutic mixture, and also procedures in which the combined agents are administered separately but simultaneously, e.g., as through separate intravenous lines into the same individual. Administration “in combination” further includes the separate administration of one of the compounds or agents given first, followed by the second.

[0969] In one embodiment, the Therapeutics of the invention are administered in combination with an anticoagulant. Anticoagulants that may be administered with the compositions of the invention include, but are not limited to, heparin, low molecular weight heparin, warfarin sodium (e.g., COUMADIN®), dicumarol, 4-hydroxycoumarin, anisindione (e.g., MIRADON™), acenocoumarol (e.g., nicoumalone, SINTHROME™), indan-1,3-dione, phenprocoumon (e.g., MARCUMAR™), ethyl biscoumacetate (e.g., TROMEXAN™), and aspirin. In a specific embodiment, compositions of the invention are administered in combination with heparin and/or warfarin. In another specific embodiment, compositions of the invention are administered in combination with warfarin. In another specific embodiment, compositions of the invention are administered in combination with warfarin and aspirin. In another specific embodiment, compositions of the invention are administered in combination with heparin. In another specific embodiment, compositions of the invention are administered in combination with heparin and aspirin.

[0970] In another embodiment, the Therapeutics of the invention are administered in combination with thrombolytic drugs. Thrombolytic drugs that may be administered with the compositions of the invention include, but are not limited to, plasminogen, lys-plasminogen, alpha2-antiplasmin, streptokinae (e.g., KABIKINASE™), antiresplace (e.g., EMINASE™), tissue plasminogen activator (t-PA, altevase, ACTIVASE™), urokinase (e.g., ABBOKINASE™), sauruplase, (Prourokinase, single chain urokinase), and aminocaproic acid (e.g., AMICAR™). In a specific embodiment, compositions of the invention are administered in combination with tissue plasminogen activator and aspirin.

[0971] In another embodiment, the Therapeutics of the invention are administered in combination with antiplatelet drugs. Antiplatelet drugs that may be administered with the compositions of the invention include, but are not limited to, aspirin, dipyridamole (e.g., PERSANTINE™), and ticlopidine (e.g., TICLID™).

[0972] In specific embodiments, the use of anti-coagulants, thrombolytic and/or antiplatelet drugs in combination with Therapeutics of the invention is contemplated for the prevention, diagnosis, and/or treatment of thrombosis, arterial thrombosis, venous thrombosis, thromboembolism, pulmonary embolism, atherosclerosis, myocardial infarction, transient ischemic attack, unstable angina. In specific embodiments, the use of anticoagulants, thrombolytic drugs and/or antiplatelet drugs in combination with Therapeutics of the invention is contemplated for the prevention of occulsion of saphenous grafts, for reducing the risk of periprocedural thrombosis as might accompany angioplasty procedures, for reducing the risk of stroke in patients with atrial fibrillation including nonrheumatic atrial fibrillation, for reducing the risk of embolism associated with mechanical heart valves and or mitral valves disease. Other uses for the therapeutics of the invention, alone or in combination with antiplatelet, anticoagulant, and/or thrombolytic drugs, include, but are not limited to, the prevention of occlusions in extracorporeal devices (e.g., intravascular canulas, vascular access shunts in hemodialysis patients, hemodialysis machines, and cardiopulmonary bypass machines).

[0973] In certain embodiments, Therapeutics of the invention are administered in combination with antiretroviral agents, nucleoside/nucleotide reverse transcriptase inhibitors (NRTIs), non-nucleoside reverse transcriptase inhibitors (NNRTIs), and/or protease inhibitors (PIs). NRTIs that may be administered in combination with the Therapeutics of the invention, include, but are not limited to, RETROVIR™ (zidovudine/AZT), VIDEX™ (didanosine/ddI), HIVID™ (zalcitabine/ddC), ZERIT™ (stavudine/d4T), EPIVIR™ (lamivudine/3TC), and COMBIVIR™ (zidovudine/lamivudine). NNRTIs that may be administered in combination with the Therapeutics of the invention, include, but are not limited to, VIRAMUNE™ (nevirapine), RESCRIPTOR™ (delavirdine), and SUSTIVA™ (efavirenz). Protease inhibitors that may be administered in combination with the Therapeutics of the invention, include, but are not limited to, CRIXIVAN™ (indinavir), NORVIR™ (ritonavir), INVIRASE™ (saquinavir), and VIRACEPT™ (nelfinavir). In a specific embodiment, antiretroviral agents, nucleoside reverse transcriptase inhibitors, non-nucleoside reverse transcriptase inhibitors, and/or protease inhibitors may be used in any combination with Therapeutics of the invention to treat AIDS and/or to prevent or treat HIV infection.

[0974] Additional NRTIs include LODENOSINE™ (F-ddA; an acid-stable adenosine NRTI; Triangle/Abbott; COVIRACIL™ (emtricitabine/FTC; structurally related to lamivudine (3TC) but with 3- to 10-fold greater activity in vitro; Triangle/Abbott); dOTC (BCH-10652, also structurally related to lamivudine but retains activity against a substantial proportion of lamivudine-resistant isolates; Biochem Pharma); Adefovir (refused approval for anti-HIV therapy by FDA; Gilead Sciences); PREVEON® (Adefovir Dipivoxil, the active prodrug of adefovir; its active form is PMEA-pp); TENOFOVIR™ (bis-POC PMPA, a PMPA prodrug; Gilead); DAPD/DXG (active metabolite of DAPD; Triangle/Abbott); D-D4FC (related to 3TC, with activity against AZT/3TC-resistant virus); GW420867X (Glaxo Wellcome); ZIAGEN™ (abacavir/159U89; Glaxo Wellcome Inc.); CS-87 (3′ azido-2′,3′-dideoxyuridine; WO 99/66936); and S-acyl-2-thioethyl (SATE)-bearing prodrug forms of β-L-FD4C and β-L-FddC (WO 98/17281).

[0975] Additional NNRTIs include COACTINON™ (Emivirine/MKC-442, potent NNRTI of the HEPT class; Triangle/Abbott); CAPRAVIRINE™ (AG-1549/S-1153, a next generation NNRTI with activity against viruses containing the K103N mutation; Agouron); PNU-142721 (has 20- to 50-fold greater activity than its predecessor delavirdine and is active against K103N mutants; Pharmacia & Upjohn); DPC-961 and DPC-963 (second-generation derivatives of efavirenz, designed to be active against viruses with the K103N mutation; DuPont); GW-420867X (has 25-fold greater activity than HBY097 and is active against K103N mutants; Glaxo Wellcome); CALANOLIDE A (naturally occurring agent from the latex tree; active against viruses containing either or both the Y181C and K103N mutations); and Propolis (WO 99/49830).

[0976] Additional protease inhibitors include LOPINAVIR™ (ABT378/r; Abbott Laboratories); BMS-232632 (an azapeptide; Bristol-Myres Squibb); TIPRANAVIR™ (PNU-140690, a non-peptic dihydropyrone; Pharmacia & Upjohn); PD-178390 (a nonpeptidic dihydropyrone; Parke-Davis); BMS 232632 (an azapeptide; Bristol-Myers Squibb); L-756,423 (an indinavir analog; Merck); DMP-450 (a cyclic urea compound; Avid & DuPont); AG-1776 (a peptidomimetic with in vitro activity against protease inhibitor-resistant viruses; Agouron); VX-175/GW-433908 (phosphate prodrug of amprenavir; Vertex & Glaxo Welcome); CGP61755 (Ciba); and AGENERASE™ (amprenavir; Glaxo Wellcome Inc.).

[0977] Additional antiretroviral agents include fusion inhibitors/gp41 binders. Fusion inhibitors/gp41 binders include T-20 (a peptide from residues 643-678 of the HIV gp41 transmembrane protein ectodomain which binds to gp41 in its resting state and prevents transformation to the fusogenic state; Trimeris) and T-1249 (a second-generation fusion inhibitor; Trimeris).

[0978] Additional antiretroviral agents include fusion inhibitors/chemokine receptor antagonists. Fusion inhibitors/chemokine receptor antagonists include CXCR4 antagonists such as AMD 3100 (a bicyclam), SDF-1 and its analogs, and ALX40-4C (a cationic peptide), T22 (an 18 amino acid peptide; Trimeris) and the T22 analogs T134 and T140; CCR5 antagonists such as RANTES (9-68), AOP-RANTES, NNY-RANTES, and TAK-779; and CCR5/CXCR4 antagonists such as NSC 651016 (a distamycin analog). Also included are CCR2B, CCR3, and CCR6 antagonists. Chemokine recpetor agonists such as RANTES, SDF-1, MIP-1α, MIP-1β, etc., may also inhibit fusion.

[0979] Additional antiretroviral agents include integrase inhibitors. Integrase inhibitors include dicaffeoylquinic (DFQA) acids; L-chicoric acid (a dicaffeoyltartaric (DCTA) acid); quinalizarin (QLC) and related anthraquinones; ZINTEVIR™ (AR 177, an oligonucleotide that probably acts at cell surface rather than being a true integrase inhibitor; Arondex); and naphthols such as those disclosed in WO 98/50347.

[0980] Additional antiretroviral agents include hydroxyurea-like compounds such as BCX-34 (a purine nucleoside phosphorylase inhibitor; Biocryst); ribonucleotide reductase inhibitors such as DIDOX™ (Molecules for Health); inosine monophosphate dehydrogenase (IMPDH) inhibitors sucha as VX-497 (Vertex); and mycopholic acids such as CellCept (mycophenolate mofetil; Roche).

[0981] Additional antiretroviral agents include inhibitors of viral integrase, inhibitors of viral genome nuclear translocation such as arylene bis(methylketone) compounds; inhibitors of HIV entry such as AOP-RANTES, NNY-RANTES, RANTES-IgG fusion protein, soluble complexes of RANTES and glycosaminoglycans (GAG), and AMD-3100; nucleocapsid zinc finger inhibitors such as dithiane compounds; targets of HIV Tat and Rev; and pharmacoenhancers such as ABT-378.

[0982] Other antiretroviral therapies and adjunct therapies include cytokines and lymphokines such as MIP-1α, MIP-1β, SDF-1α, IL-2, PROLEUKIN™ (aldesleukin/L2-7001; Chiron), IL-4, IL-10, IL-12, and IL-13; interferons such as IFN-α2a; antagonists of TNFs, NFκB, GM-CSF, M-CSF, and IL-10; agents that modulate immune activation such as cyclosporin and prednisone; vaccines such as Remune™ (HIV Immunogen), APL 400-003 (Apollon), recombinant gp120 and fragments, bivalent (B/E) recombinant envelope glycoprotein, rgp120CM235, MN rgp120, SF-2 rgp120, gp120/soluble CD4 complex, Delta JR-FL protein, branched synthetic peptide derived from discontinuous gp120 C3/C4 domain, fusion-competent immunogens, and Gag, Pol, Nef, and Tat vaccines; gene-based therapies such as genetic suppressor elements (GSEs; WO 98/54366), and intrakines (genetically modified CC chemokines targetted to the ER to block surface expression of newly synthesized CCR5 (Yang et al., PNAS 94:11567-72 (1997); Chen et al., Nat. Med. 3:1110-16 (1997)); antibodies such as the anti-CXCR4 antibody 12G5, the anti-CCR5 antibodies 2D7, 5C7, PA8, PA9, PA10, PA11, PA12, and PA14, the anti-CD4 antibodies Q4120 and RPA-T4, the anti-CCR3 antibody 7B11, the anti-gp120 antibodies 17b, 48d, 447-52D, 257-D, 268-D and 50.1, anti-Tat antibodies, anti-TNF-α antibodies, and monoclonal antibody 33A; aryl hydrocarbon (AH) receptor agonists and antagonists such as TCDD, 3,3′,4,4′,5-pentachlorobiphenyl, 3,3′,4,4′-tetrachlorobiphenyl, and α-naphthoflavone (WO 98/30213); and antioxidants such as γ-L-glutamyl-L-cysteine ethyl ester (γ-GCE; WO 99/56764).

[0983] In a further embodiment, the Therapeutics of the invention are administered in combination with an antiviral agent. Antiviral agents that may be administered with the Therapeutics of the invention include, but are not limited to, acyclovir, ribavirin, amantadine, and remantidine.

[0984] In other embodiments, Therapeutics of the invention may be administered in combination with anti-opportunistic infection agents. Anti-opportunistic agents that may be administered in combination with the Therapeutics of the invention, include, but are not limited to, TRIMETHOPRIM-SULFAMETHOXAZOLE™, DAPSONE™, PENTAMIDINET, ATOVAQUONE™, ISONJAZID™, RIFAMPIN™, PYRAZINAMIDE™, ETHAMBUTOL™, RIFABUTIN™, CLARITHROMYCIN™, AZITHROMYCIN™, GANCICLOVIR™, FOSCARNET™, CIDOFOVIR™, FLUCONAZOLE™, ITRACONAZOLE™, KETOCONAZOLE™, ACYCLOVIR™, FAMCICOLVIR™, PYRIMETHAMINE™, LEUCOVORIN™, NEUPOGEN™ (filgrastim/G-CSF), and LEUKINE™ (sargramostim/GM-CSF). In a specific embodiment, Therapeutics of the invention are used in any combination with TRIMETHOPRIM-SULFAMETHOXAZOLE™, DAPSONE™, PENTAMIDINE™, and/or ATOVAQUONETM™ to prophylactically treat or prevent an opportunistic Pneumocystis carinii pneumonia infection. In another specific embodiment, Therapeutics of the invention are used in any combination with ISONIAZID™, RIFAMPIN™, PYRAZINAMIDE™, and/or ETHAMBUTOL™ to prophylactically treat or prevent an opportunistic Mycobacterium avium complex infection. In another specific embodiment, Therapeutics of the invention are used in any combination with RIFABUTIN™, CLARITHROMYCIN™, and/or AZITHROMYCIN™ to prophylactically treat or prevent an opportunistic Mycobacterium tuberculosis infection. In another specific embodiment, Therapeutics of the invention are used in any combination with GANCICLOVIR™, FOSCARNET™, and/or CIDOFOVIR™ to prophylactically treat or prevent an opportunistic cytomegalovirus infection. In another specific embodiment, Therapeutics of the invention are used in any combination with FLUCONAZOLE™, ITRACONAZOLE™, and/or KETOCONAZOLE™ to prophylactically treat or prevent an opportunistic fungal infection. In another specific embodiment, Therapeutics of the invention are used in any combination with ACYCLOVIR™ and/or FAMCICOLVIR™ to prophylactically treat or prevent an opportunistic herpes simplex virus type I and/or type II infection. In another specific embodiment, Therapeutics of the invention are used in any combination with PYRIMETHAMINE™ and/or LEUCOVORIN™ to prophylactically treat or prevent an opportunistic Toxoplasma gondii infection. In another specific embodiment, Therapeutics of the invention are used in any combination with LEUCOVORN™ and/or NEUPOGEN™ to prophylactically treat or prevent an opportunistic bacterial infection.

[0985] In a further embodiment, the Therapeutics of the invention are administered in combination with an antibiotic agent. Antibiotic agents that may be administered with the Therapeutics of the invention include, but are not limited to, amoxicillin, beta-lactamases, aminoglycosides, beta-lactam (glycopeptide), beta-lactamases, Clindamycin, chloramphenicol, cephalosporins, ciprofloxacin, erythromycin, fluoroquinolones, macrolides, metronidazole, penicillins, quinolones, rapamycin, rifampin, streptomycin, sulfonamide, tetracyclines, trimethoprim, trimethoprim-sulfamethoxazole, and vancomycin.

[0986] In other embodiments, the Therapeutics of the invention are administered in combination with immunestimulants. Immunostimulants that may be administered in combination with the Therapeutics of the invention include, but are not limited to, levamisole (e.g., ERGAMISOL™), isoprinosine (e.g. INOSIPLEX™), interferons (e.g. interferon alpha), and interleukins (e.g., IL-2).

[0987] In other embodiments, Therapeutics of the invention are administered in combination with immunosuppressive agents. Immunosuppressive agents that may be administered in combination with the Therapeutics of the invention include, but are not limited to, steroids, cyclosporine, cyclosporine analogs, cyclophosphamide methylprednisone, prednisone, azathioprine, FK-506, 15-deoxyspergualin, and other immunosuppressive agents that act by suppressing the function of responding T cells. Other immunosuppressive agents that may be administered in combination with the Therapeutics of the invention include, but are not limited to, prednisolone, methotrexate, thalidomide, methoxsalen, rapamycin, leflunomide, mizoribine (BREDININ™), brequinar, deoxyspergualin, and azaspirane (SKF 105685), ORTHOCLONE OKT® 3 (muromonab-CD3), SANDIMMUNE™, NEORAL™, SANGDYA™ (cyclosporine), PROGRAF® (FK506, tacrolimus), CELLCEPT® (mycophenolate motefil, of which the active metabolite is mycophenolic acid), IMURAN™ (azathioprine), glucocorticosteroids, adrenocortical steroids such as DELTASONE™ (prednisone) and HYDELTRASOL™ (prednisolone), FOLEX™ and MEXATE™ (methotrxate), OXSORALEN-ULTRA™ (methoxsalen) and RAPAMUNE™ (sirolimus). In a specific embodiment, immunosuppressants may be used to prevent rejection of organ or bone marrow transplantation.

[0988] In an additional embodiment, Therapeutics of the invention are administered alone or in combination with one or more intravenous immune globulin preparations. Intravenous immune globulin preparations that may be administered with the Therapeutics of the invention include, but not limited to, GAMMAR™, IVEEGAM™, SANDOGLOBULIN™, GAMMAGARD S/D™, ATGAM™ (antithymocyte glubulin), and GAMIMUNE™. In a specific embodiment, Therapeutics of the invention are administered in combination with intravenous immune globulin preparations in transplantation therapy (e.g., bone marrow transplant).

[0989] In certain embodiments, the Therapeutics of the invention are administered alone or in combination with an anti-inflammatory agent. Anti-inflammatory agents that may be administered with the Therapeutics of the invention include, but are not limited to, corticosteroids (e.g. betamethasone, budesonide, cortisone, dexamethasone, hydrocortisone, methylprednisolone, prednisolone, prednisone, and triamcinolone), nonsteroidal anti-inflammatory drugs (e.g., diclofenac, diflunisal, etodolac, fenoprofen, floctafenine, flurbiprofen, ibuprofen, indomethacin, ketoprofen, meclofenamate, mefenamic acid, meloxicam, nabumetone, naproxen, oxaprozin, phenylbutazone, piroxicam, sulindac, tenoxicam, tiaprofenic acid, and tolmetin.), as well as antihistamines, aminoarylcarboxylic acid derivatives, arylacetic acid derivatives, arylbutyric acid derivatives, arylcarboxylic acids, arylpropionic acid derivatives, pyrazoles, pyrazolones, salicylic acid derivatives, thiazinecarboxamides, e-acetamidocaproic acid, S-adenosylmethionine, 3-amino-4-hydroxybutyric acid, amixetrine, bendazac, benzydamine, bucolome, difenpiramide, ditazol, emorfazone, guaiazulene, nabumetone, nimesulide, orgotein, oxaceprol, paranyline, perisoxal, pifoxime, proquazone, proxazole, and tenidap.

[0990] In an additional embodiment, the compositions of the invention are administered alone or in combination with an anti-angiogenic agent. Anti-angiogenic agents that may be administered with the compositions of the invention include, but are not limited to, Angiostatin (Entremed, Rockville, Md.), Troponin-1 (Boston Life Sciences, Boston, Mass.), anti-Invasive Factor, retinoic acid and derivatives thereof, paclitaxel (Taxol), Suramin, Tissue Inhibitor of Metalloproteinase-1, Tissue Inhibitor of Metalloproteinase-2, VEGI, Plasminogen Activator Inhibitor-1, Plasminogen Activator Inhibitor-2, and various forms of the lighter “d group” transition metals.

[0991] Lighter “d group” transition metals include, for example, vanadium, molybdenum, tungsten, titanium, niobium, and tantalum species. Such transition metal species may form transition metal complexes. Suitable complexes of the above-mentioned transition metal species include oxo transition metal complexes.

[0992] Representative examples of vanadium complexes include oxo vanadium complexes such as vanadate and vanadyl complexes. Suitable vanadate complexes include metavanadate and orthovanadate complexes such as, for example, ammonium metavanadate, sodium metavanadate, and sodium orthovanadate. Suitable vanadyl complexes include, for example, vanadyl acetylacetonate and vanadyl sulfate including vanadyl sulfate hydrates such as vanadyl sulfate mono- and trihydrates.

[0993] Representative examples of tungsten and molybdenum complexes also include oxo complexes. Suitable oxo tungsten complexes include tungstate and tungsten oxide complexes. Suitable tungstate complexes include ammonium tungstate, calcium tungstate, sodium tungstate dihydrate, and tungstic acid. Suitable tungsten oxides include tungsten (IV) oxide and tungsten (VI) oxide. Suitable oxo molybdenum complexes include molybdate, molybdenum oxide, and molybdenyl complexes. Suitable molybdate complexes include ammonium molybdate and its hydrates, sodium molybdate and its hydrates, and potassium molybdate and its hydrates. Suitable molybdenum oxides include molybdenum (VI) oxide, molybdenum (VI) oxide, and molybdic acid. Suitable molybdenyl complexes include, for example, molybdenyl acetylacetonate. Other suitable tungsten and molybdenum complexes include hydroxo derivatives derived from, for example, glycerol, tartaric acid, and sugars.

[0994] A wide variety of other anti-angiogenic factors may also be utilized within the context of the present invention. Representative examples include, but are not limited to, platelet factor 4; protamine sulphate; sulphated chitin derivatives (prepared from queen crab shells), (Murata et al., Cancer Res. 51:22-26, (1991)); Sulphated Polysaccharide Peptidoglycan Complex (SP-PG) (the function of this compound may be enhanced by the presence of steroids such as estrogen, and tamoxifen citrate); Staurosporine; modulators of matrix metabolism, including for example, proline analogs, cishydroxyproline, d,L-3,4-dehydroproline, Thiaproline, alpha,alpha-dipyridyl, aminopropionitrile fumarate; 4-propyl-5-(4-pyridinyl)-2(3H)-oxazolone; Methotrexate; Mitoxantrone; Heparin; Interferons; 2 Macroglobulin-serum; ChIMP-3 (Pavloff et al., J. Bio. Chem. 267:17321-17326, (1992)); Chymostatin (Tomkinson et al., Biochem J. 286:475-480, (1992)); Cyclodextrin Tetradecasulfate; Eponemycin; Camptothecin; Fumagillin (Ingber et al., Nature 348:555-557, (1990)); Gold Sodium Thiomalate (“GST”; Matsubara and Ziff, J. Clin. Invest. 79:1440-1446, (1987)); anticollagenase-serum; alpha2-antiplasmin (Holmes et al., J. Biol. Chem. 262(4):1659-1664, (1987)); Bisantrene (National Cancer Institute); Lobenzarit disodium (N-(2)-carboxyphenyl-4- chloroanthronilic acid disodium or “CCA”; (Takeuchi et al., Agents Actions 36:312-316, (1992)); and metalloproteinase inhibitors such as BB94.

[0995] Additional anti-angiogenic factors that may also be utilized within the context of the present invention include Thalidomide, (Celgene, Warren, N.J.); Angiostatic steroid; AGM-1470 (H. Brem and J. Folkman J. Pediatr. Surg. 28:445-51 (1993)); an integrin alpha v beta 3 antagonist (C. Storgard et al., J. Clin. Invest. 103:47-54 (1999)); carboxynaminolmidazole; Carboxyamidotriazole (CAI) (National Cancer Institute, Bethesda, Md.); Conbretastatin A-4 (CA4P) (OXiGENE, Boston, Mass.); Squalamine (Magainin Pharmaceuticals, Plymouth Meeting, Pa); TNP-470, (Tap Pharmaceuticals, Deerfield, Ill.); ZD-0101 AstraZeneca (London, UK); APRA (CT2584); Benefin, Byrostatin-1 (SC339555); CGP-41251 (PKC 412); CM101; Dexrazoxane (ICRF187); DMXAA; Endostatin; Flavopridiol; Genestein; GTE; ImmTher; Iressa (ZD1839); Octreotide (Somatostatin); Panretin; Penacillamine; Photopoint; PI-88; Prinomastat (AG-3340) Purlytin; Suradista (FCE26644); Tamoxifen (Nolvadex); Tazarotene; Tetrathiomolybdate; Xeloda (Capecitabine); and 5-Fluorouracil.

[0996] Anti-angiogenic agents that may be administered in combination with the compounds of the invention may work through a variety of mechanisms including, but not limited to, inhibiting proteolysis of the extracellular matrix, blocking the function of endothelial cell-extracellular matrix adhesion molecules, by antagonizing the function of angiogenesis inducers such as growth factors, and inhibiting integrin receptors expressed on proliferating endothelial cells. Examples of anti-angiogenic inhibitors that interfere with extracellular matrix proteolysis and which may be administered in combination with the compositions of the invention include, but are not limited to, AG-3340 (Agouron, La Jolla, Calif.), BAY-12-9566 (Bayer, West Haven, Conn.), BMS-275291 (Bristol Myers Squibb, Princeton, N.J.), CGS-27032A (Novartis, East Hanover, N.J.), Marimastat (British Biotech, Oxford, UK), and Metastat (Aetema, St-Foy, Quebec). Examples of anti-angiogenic inhibitors that act by blocking the function of endothelial cell-extracellular matrix adhesion molecules and which may be administered in combination with the compositions of the invention include, but are not limited to, EMD-121974 (Merck KcgaA Darmstadt, Germany) and Vitaxin (Ixsys, La Jolla, Calif./Medimmune, Gaithersburg, Md.). Examples of anti-angiogenic agents that act by directly antagonizing or inhibiting angiogenesis inducers and which may be administered in combination with the compositons of the invention include, but are not limited to, Angiozyme (Ribozyme, Boulder, Colo.), Anti-VEGF antibody (Genentech, S. San Francisco, Calif. ), PTK-787/ZK-225846 (Novartis, Basel, Switzerland), SU-101 (Sugen, S. San Francisco, Calif. ), SU-5416 (Sugen/ Pharmacia Upjohn, Bridgewater, N.J.), and SU-6668 (Sugen). Other anti-angiogenic agents act to indirectly inhibit angiogenesis. Examples of indirect inhibitors of angiogenesis which may be administered in combination with the compositons of the invention include, but are not limited to, IM-862 (Cytran, Kirkland, Wash.), Interferon-alpha, IL-12 (Roche, Nutley, N.J.), and Pentosan polysulfate (Georgetown University, Washington, DC).

[0997] In particular embodiments, the use of compositions of the invention in combination with anti-angiogenic agents is contemplated for the treatment, prevention, and/or amelioration of an autoimmune disease, such as for example, an autoimmune disease described herein.

[0998] In a particular embodiment, the use of compositions of the invention in combination with anti-angiogenic agents is contemplated for the treatment, prevention, and/or amelioration of arthritis. In a more particular embodiment, the use of compositions of the invention in combination with anti-angiogenic agents is contemplated for the treatment, prevention, and/or amelioration of rheumatoid arthritis.

[0999] In another embodiment, the polynucleotides encoding a polypeptide of the present invention are administered in combination with an angiogenic protein, or polynucleotides encoding an angiogenic protein. Examples of angiogenic proteins that may be administered with the compositions of the invention include, but are not limited to, acidic and basic fibroblast growth factors, VEGF-1, VEGF-2, VEGF-3, epidermal growth factor alpha and beta, platelet-derived endothelial cell growth factor, platelet-derived growth factor, tumor necrosis factor alpha, hepatocyte growth factor, insulin-like growth factor, colony stimulating factor, macrophage colony stimulating factor, granulocyte/macrophage colony stimulating factor, and nitric oxide synthase.

[1000] In additional embodiments, compositions of the invention are administered in combination with a chemotherapeutic agent. Chemotherapeutic agents that may be administered with the Therapeutics of the invention include, but are not limited to alkylating agents such as nitrogen mustards (for example, Mechlorethamine, cyclophosphamide, Cyclophosphamide Ifosfamide, Melphalan (L-sarcolysin), and Chlorambucil), ethylenimines and methylmelamines (for example, Hexamethylmelamine and Thiotepa), alkyl sulfonates (for example, Busulfan), nitrosoureas (for example, Carmustine (BCNU), Lomustine (CCNU), Semustine (methyl-CCNU), and Streptozocin (streptozotocin)), triazenes (for example, Dacarbazine (DTIC; dimethyltriazenoimidazolecarboxamide)), folic acid analogs (for example, Methotrexate (amethopterin)), pyrimidine analogs (for example, Fluorouacil (5-fluorouracil; 5-FU), Floxuridine (fluorodeoxyuridine; FudR), and Cytarabine (cytosine arabinoside)), purine analogs and related inhibitors (for example, Mercaptopurine (6-mercaptopurine; 6-MP), Thioguanine (6-thioguanine; TG), and Pentostatin (2′-deoxycoformycin)), vinca alkaloids (for example, Vinblastine (VLB, vinblastine sulfate)) and Vincristine (vincristine sulfate)), epipodophyllotoxins (for example, Etoposide and Teniposide), antibiotics (for example, Dactinomycin (actinomycin D), Daunorubicin (daunomycin; rubidomycin), Doxorubicin, Bleomycin, Plicamycin (mithramycin), and Mitomycin (mitomycin C), enzymes (for example, L-Asparaginase), biological response modifiers (for example, Interferon-alpha and interferon-alpha-2b), platinum coordination compounds (for example, Cisplatin (cis-DDP) and Carboplatin), anthracenedione (Mitoxantrone), substituted ureas (for example, Hydroxyurea), methylhydrazine derivatives (for example, Procarbazine (N-methylhydrazine; MIH), adrenocorticosteroids (for example, Prednisone), progestins (for example, Hydroxyprogesterone caproate, Medroxyprogesterone, Medroxyprogesterone acetate, and Megestrol acetate), estrogens (for example, Diethylstilbestrol (DES), Diethylstilbestrol diphosphate, Estradiol, and Ethinyl estradiol), antiestrogens (for example, Tamoxifen), androgens (Testosterone proprionate, and Fluoxymesterone), antiandrogens (for example, Flutamide), gonadotropin-releasing horomone analogs (for example, Leuprolide), other hormones and hormone analogs (for example, methyltestosterone, estramustine, estramustine phosphate sodium, chlorotrianisene, and testolactone), and others (for example, dicarbazine, glutamic acid, and mitotane).

[1001] In one embodiment, the compositions of the invention are administered in combination with one or more of the following drugs: infliximab (also known as Remicade™ Centocor, Inc.), Trocade (Roche, RO-32-3555), Leflunomide (also known as Arava™ from Hoechst Marion Roussel), Kineret™ (an IL-1 Receptor antagonist also known as Anakinra from Amgen, Inc.)

[1002] In a specific embodiment, compositions of the invention are administered in combination with CHOP (cyclophosphamide, doxorubicin, vincristine, and prednisone) or combination of one or more of the components of CHOP. In one embodiment, the compositions of the invention are administered in combination with anti-CD20 antibodies, human monoclonal anti-CD20 antibodies. In another embodiment, the compositions of the invention are administered in combination with anti-CD20 antibodies and CHOP, or anti-CD20 antibodies and any combination of one or more of the components of CHOP, particularly cyclophosphamide and/or prednisone. In a specific embodiment, compositions of the invention are administered in combination with Rituximab. In a further embodiment, compositions of the invention are administered with Rituximab and CHOP, or Rituximab and any combination of one or more of the components of CHOP, particularly cyclophosphamide and/or prednisone. In a specific embodiment, compositions of the invention are administered in combination with tositumomab. In a further embodiment, compositions of the invention are administered with tositumomab and CHOP, or tositumomab and any combination of one or more of the components of CHOP, particularly cyclophosphamide and/or prednisone. The anti-CD20 antibodies may optionally be associated with radioisotopes, toxins or cytotoxic prodrugs.

[1003] In another specific embodiment, the compositions of the invention are administered in combination Zevalin™. In a further embodiment, compositions of the invention are administered with Zevalin™ and CHOP, or Zevalin™ and any combination of one or more of the components of CHOP, particularly cyclophosphamide and/or prednisone. Zevalin™ may be associated with one or more radisotopes. Particularly preferred isotopes are ⁹⁰Y and ¹¹¹In.

[1004] In an additional embodiment, the Therapeutics of the invention are administered in combination with cytokines. Cytokines that may be administered with the Therapeutics of the invention include, but are not limited to, IL2, IL3, IL4, IL5, IL6, IL7, IL10, IL12, IL13, IL15, anti-CD40, CD40L, IFN-gamma and TNF-alpha. In another embodiment, Therapeutics of the invention may be administered with any interleukin, including, but not limited to, IL-1alpha, IL-1beta, IL-2, IL-3, IL-4, IL-5, IL-6, IL-7, IL-8, IL-9, IL-10, IL-11, IL-12, IL-13, IL-14, IL-15, IL-16, IL-17, IL-18, IL-19, IL-20, and IL-21.

[1005] In one embodiment, the Therapeutics of the invention are administered in combination with members of the TNF family. TNF, TNF-related or TNF-like molecules that may be administered with the Therapeutics of the invention include, but are not limited to, soluble forms of TNF-alpha, lymphotoxin-alpha (LT-alpha, also known as TNF-beta), LT-beta (found in complex heterotrimer LT-alpha2-beta), OPGL, FasL, CD27L, CD30L, CD40L, 4-1BBL, DcR3, OX40L, TNF-gamma (International Publication No. WO 96/14328), AIM-I (International Publication No. WO 97/33899), endokine-alpha (International Publication No. WO 98/07880), OPG, and neutrokine-alpha (International Publication No. WO 98/18921, OX40, and nerve growth factor (NGF), and soluble forms of Fas, CD30, CD27, CD40 and 4-IBB, TR2 (International Publication No. WO 96/34095), DR3 (International Publication No. WO 97/33904), DR4 (International Publication No. WO 98/32856), TR5 (International Publication No. WO 98/30693), TRANK, TR9 (International Publication No. WO 98/56892),TR10 (International Publication No. WO 98/54202), 312C2 (International Publication No. WO 98/06842), and TR12, and soluble forms CD154, CD70, and CD153.

[1006] In an additional embodiment, the Therapeutics of the invention are administered in combination with angiogenic proteins. Angiogenic proteins that may be administered with the Therapeutics of the invention include, but are not limited to, Glioma Derived Growth Factor (GDGF), as disclosed in European Patent Number EP-399816; Platelet Derived Growth Factor-A (PDGF-A), as disclosed in European Patent Number EP-682110; Platelet Derived Growth Factor-B (PDGF-B), as disclosed in European Patent Number EP-282317; Placental Growth Factor (PlGF), as disclosed in International Publication Number WO 92/06194; Placental Growth Factor-2 (PlGF-2), as disclosed in Hauser et al., Growth Factors, 4:259-268 (1993); Vascular Endothelial Growth Factor (VEGF), as disclosed in International Publication Number WO 90/13649; Vascular Endothelial Growth Factor-A (VEGF-A), as disclosed in European Patent Number EP-506477; Vascular Endothelial Growth Factor-2 (VEGF-2), as disclosed in International Publication Number WO 96/39515; Vascular Endothelial Growth Factor B (VEGF-3); Vascular Endothelial Growth Factor B-186 (VEGF-B186), as disclosed in International Publication Number WO 96/26736; Vascular Endothelial Growth Factor-D (VEGF-D), as disclosed in International Publication Number WO 98/02543; Vascular Endothelial Growth Factor-D (VEGF-D), as disclosed in International Publication Number WO 98/07832; and Vascular Endothelial Growth Factor-E (VEGF-E), as disclosed in German Patent Number DE19639601. The above mentioned references are herein incorporated by reference in their entireties.

[1007] In an additional embodiment, the Therapeutics of the invention are administered in combination with Fibroblast Growth Factors. Fibroblast Growth Factors that may be administered with the Therapeutics of the invention include, but are not limited to, FGF-1, FGF-2, FGF-3, FGF-4, FGF-5, FGF-6, FGF-7, FGF-8, FGF-9, FGF-10, FGF-11, FGF-12, FGF-13, FGF-14, and FGF-15.

[1008] In an additional embodiment, the Therapeutics of the invention are administered in combination with hematopoietic growth factors. Hematopoietic growth factors that may be administered with the Therapeutics of the invention include, but are not limited to, granulocyte macrophage colony stimulating factor (GM-CSF) (sargramostim, LEUKINE™, PROKINE™), granulocyte colony stimulating factor (G-CSF) (filgrastim, NEUPOGEN™), macrophage colony stimulating factor (M-CSF, CSF-1) erythropoietin (epoetin alfa, EPOGEN™, PROCRIT™), stem cell factor (SCF, c-kit ligand, steel factor), megakaryocyte colony stimulating factor, PIXY321 (a GMCSF/IL-3 fusion protein), interleukins, especially any one or more of IL-1 through IL-12, interferon-gamma, or thrombopoietin.

[1009] In certain embodiments, Therapeutics of the present invention are administered in combination with adrenergic blockers, such as, for example, acebutolol, atenolol, betaxolol, bisoprolol, carteolol, labetalol, metoprolol, nadolol, oxprenolol, penbutolol, pindolol, propranolol, sotalol, and timolol.

[1010] In another embodiment, the Therapeutics of the invention are administered in combination with an antiarrhythmic drug (e.g., adenosine, amidoarone, bretylium, digitalis, digoxin, digitoxin, diliazem, disopyramide, esmolol, flecainide, lidocaine, mexiletine, moricizine, phenytoin, procainamide, N-acetyl procainamide, propafenone, propranolol, quinidine, sotalol, tocainide, and verapamil).

[1011] In another embodiment, the Therapeutics of the invention are administered in combination with diuretic agents, such as carbonic anhydrase-inhibiting agents (e.g., acetazolamide, dichlorphenamide, and methazolamide), osmotic diuretics (e.g., glycerin, isosorbide, mannitol, and urea), diuretics that inhibit Na⁺-K⁺-2Cl³¹ symport (e.g., furosemide, bumetanide, azosemide, piretanide, tripamide, ethacrynic acid, muzolimine, and torsemide), thiazide and thiazide-like diuretics (e.g., bendroflumethiazide, benzthiazide, chlorothiazide, hydrochlorothiazide, hydroflumethiazide, methyclothiazide, polythiazide, trichormethiazide, chlorthalidone, indapamide, metolazone, and quinethazone), potassium sparing diuretics (e.g., amiloride and triamterene), and mineralcorticoid receptor antagonists (e.g., spironolactone, canrenone, and potassium canrenoate).

[1012] In one embodiment, the Therapeutics of the invention are administered in combination with treatments for endocrine and/or hormone imbalance disorders. Treatments for endocrine and/or hormone imbalance disorders include, but are not limited to, ¹²⁷I, radioactive isotopes of iodine such as ¹³¹I and ¹²³I; recombinant growth hormone, such as HUMATROPE™ (recombinant somatropin); growth hormone analogs such as PROTROPIN™ (somatrem); dopamine agonists such as PARLODEL™ (bromocriptine); somatostatin analogs such as SANDOSTATIN™ (octreotide); gonadotropin preparations such as PREGNYL™, A.P.L.™ and PROFASI™ (chorionic gonadotropin (CG)), PERGONAL™ (menotropins), and METRODIN™ (urofollitropin (uFSH)); synthetic human gonadotropin releasing hormone preparations such as FACTREL™ and LUTREPULSE™ (gonadorelin hydrochloride); synthetic gonadotropin agonists such as LUPRON™ (leuprolide acetate), SUPPRELIN™ (histrelin acetate), SYNAREL™ (nafarelin acetate), and ZOLADEX™ (goserelin acetate); synthetic preparations of thyrotropin-releasing hormone such as RELEFACT TRH™ and THYPINONE™ (protirelin); recombinant human TSH such as THYROGEN™; synthetic preparations of the sodium salts of the natural isomers of thyroid hormones such as L-T₄™, SYNTHROID™ and LEVOTHROID™ (levothyroxine sodium), L-T₃™, CYTOMEL™ and TRIOSTAT™ (liothyroine sodium), and THYROLAR™ (liotrix); antithyroid compounds such as 6-n-propylthiouracil (propylthiouracil), 1-methyl-2-mercaptoimidazole and TAPAZOLE™ (methimazole), NEO-MERCAZOLE™ (carbimazole); beta-adrenergic receptor antagonists such as propranolol and esmolol; Ca²⁺ channel blockers; dexamethasone and iodinated radiological contrast agents such as TELEPAQUE™ (iopanoic acid) and ORAGRAFIN™ (sodium ipodate).

[1013] Additional treatments for endocrine and/or hormone imbalance disorders include, but are not limited to, estrogens or congugated estrogens such as ESTRACE™ (estradiol), ESTINYL™ (ethinyl estradiol), PREMARIN™, ESTRATAB™, ORTHO-EST™, OGEN™ and estropipate (estrone), ESTROVIS™ (quinestrol), ESTRADERM™ (estradiol), DELESTROGEN™ and VALERGEN™ (estradiol valerate), DEPO-ESTRADIOL CYPIONATE™ and ESTROJECT LA™ (estradiol cypionate); antiestrogens such as NOLVADEX™ (tamoxifen), SEROPHENE™ and CLOMID™ (clomiphene); progestins such as DURALUTIN™ (hydroxyprogesterone caproate), MPA™ and DEPO-PROVERA™ (medroxyprogesterone acetate), PROVERA™ and CYCRIN™ (MPA), MEGACE™ (megestrol acetate), NORLUTIN™ (norethindrone), and NORLUTATE™ and AYGESTIN™ (norethindrone acetate); progesterone implants such as NORPLANT SYSTEM™ (subdermal implants of norgestrel); antiprogestins such as RU 486™ (mifepristone); hormonal contraceptives such as ENOVID™ (norethynodrel plus mestranol), PROGESTASERT™ (intrauterine device that releases progesterone), LOESTRIN™, BREVICON™, MODICON™, GENORA™, NELONA™, NORINYL™, OVACON-35™ and OVACON-50™ (ethinyl estradiol/norethindrone), LEVLEN™, NORDETTE™, TRI-LEVLEN™ and TRIPHASIL-21™ (ethinyl estradiol/levonorgestrel) LO/OVRAL™ and OVRAL™ (ethinyl estradiol/norgestrel), DEMULEN™ (ethinyl estradiol/ethynodiol diacetate), NORINYL™, ORTHO-NOVUM™, NORETHIN™, GENORA™, and NELOVA™ (norethindrone/mestranol), DESOGEN™ and ORTHO-CEPT™ (ethinyl estradiol/desogestrel), ORTHO-CYCLEN™ and ORTHO-TRICYCLEN™ (ethinyl estradiol/norgestimate), MICRONOR™ and NOR-QD™ (norethindrone), and OVRETTE™ (norgestrel).

[1014] Additional treatments for endocrine and/or hormone imbalance disorders include, but are not limited to, testosterone esters such as methenolone acetate and testosterone undecanoate; parenteral and oral androgens such as TESTOJECT-50™ (testosterone), TESTEX™ (testosterone propionate), DELATESTRYL™ (testosterone enanthate), DEPO-TESTOSTERONE™ (testosterone cypionate), DANOCRINE™ (danazol), HALOTESTIN™ (fluoxymesterone), ORETON METHYL™, TESTRED™ and VIRILON™ (methyltestosterone), and OXANDRIN™ (oxandrolone); testosterone transdermal systems such as TESTODERM™; androgen receptor antagonist and 5-alpha-reductase inhibitors such as ANDROCUR™ (cyproterone acetate), EULEXIN™ (flutamide), and PROSCAR™ (finasteride); adrenocorticotropic hormone preparations such as CORTROSYN™ (cosyntropin); adrenocortical steroids and their synthetic analogs such as ACLOVATE™ (alclometasone dipropionate), CYCLOCORT™ (amcinonide), BECLOVENT™ and VANCERIL™ (beclomethasone dipropionate), CELESTONE™ (betamethasone), BENISONE™ and UTICORT™ (betamethasone benzoate), DIPROSONE™ (betamethasone dipropionate), CELESTONE PHOSPHATE™ (betamethasone sodium phosphate), CELESTONE SOLUSPAN™ (betamethasone sodium phosphate and acetate), BETA-VAL™ and VALISONE™ (betamethasone valerate), TEMOVATE™ (clobetasol propionate), CLODERM™ (clocortolone pivalate), CORTEF™ and HYDROCORTONE™ (cortisol (hydrocortisone)), HYDROCORTONE ACETATE™ (cortisol (hydrocortisone) acetate), LOCOID™ (cortisol (hydrocortisone) butyrate), HYDROCORTONE PHOSPHATE™ (cortisol (hydrocortisone) sodium phosphate), A-HYDROCORT™ and SOLU CORTEF™ (cortisol (hydrocortisone) sodium succinate), WESTCORT™ (cortisol (hydrocortisone) valerate), CORTISONE ACETATE™ (cortisone acetate), DESOWEN™ and TRIDESILON™ (desonide), TOPICORT™ (desoximetasone), DECADRON™ (dexamethasone), DECADRON LA™ (dexamethasone acetate), DECADRON PHOSPHATE™ and HEXADROL PHOSPHATE™ (dexamethasone sodium phosphate), FLORONE™ and MAXIFLOR™ (diflorasone diacetate), FLORINEF ACETATE™ (fludrocortisone acetate), AEROBID™ and NASALIDE™ (flunisolide), FLUONID™ and SYNALAR™ (fluocinolone acetonide), LIDEX™ (fluocinonide), FLUOR-OP™ and FML™ (fluorometholone), CORDRAN™ (flurandrenolide), HALOG™ (halcinonide), HMS LIZUIFILM™ (medrysone), MEDROL™ (methylprednisolone), DEPO-MEDROL™ and MEDROL ACETATE™ (methylprednisone acetate), A-METHAPRED™ and SOLUMEDROL™ (methylprednisolone sodium succinate), ELOCON™ (mometasone furoate), HALDRONE™ (paramethasone acetate), DELTA-CORTEF™ (prednisolone), ECONOPRED™ (prednisolone acetate), HYDELTRASOL™ (prednisolone sodium phosphate), HYDELTRA-T.B.A™ (prednisolone tebutate), DELTASONE™ (prednisone), ARISTOCORT™ and KENACORT™ (triamcinolone), KENALOG™ (triamcinolone acetonide), ARISTOCORT™ and KENACORT DIACETATE™ (triamcinolone diacetate), and ARISTOSPAN™ (triamcinolone hexacetonide); inhibitors of biosynthesis and action of adrenocortical steroids such as CYTADREN™ (aminoglutethimide), NIZORAL™ (ketoconazole), MODRASTANE™ (trilostane), and METOPIRONE™ (metyrapone); bovine, porcine or human insulin or mixtures thereof; insulin analogs; recombinant human insulin such as HUMULIN™ and NOVOLIN™; oral hypoglycemic agents such as ORAMIDE™ and ORINASE™ (tolbutamide), DIABINESE™ (chlorpropamide), TOLAMIDE™ and TOLINASE™ (tolazamide), DYMELOR™ (acetohexamide), glibenclamide, MICRONASE™, DIBETA™ and GLYNASE™ (glyburide), GLUCOTROL™ (glipizide), and DLIMICRON™ (gliclazide), GLUCOPHAGE™ (metformin), ciglitazone, pioglitazone, and alpha-glucosidase inhibitors; bovine or porcine glucagon; somatostatins such as SANDOSTATIN™ (octreotide); and diazoxides such as PROGLYCEM™ (diazoxide).

[1015] In one embodiment, the Therapeutics of the invention are administered in combination with treatments for uterine motility disorders. Treatments for uterine motility disorders include, but are not limited to, estrogen drugs such as conjugated estrogens (e.g., PREMARIN® and ESTRATAB®), estradiols (e.g., CLIMARA® and ALORA®), estropipate, and chlorotrianisene; progestin drugs (e.g., AMEN® (medroxyprogesterone), MICRONOR® (norethidrone acetate), PROMETRIUM® progesterone, and megestrol acetate); and estrogen/progesterone combination therapies such as, for example, conjugated estrogens/medroxyprogesterone (e.g., PREMPRO™ and PREMPHASE®) and norethindrone acetate/ethinyl estsradiol (e.g., FEMHRT™).

[1016] In an additional embodiment, the Therapeutics of the invention are administered in combination with drugs effective in treating iron deficiency and hypochromic anemias, including but not limited to, ferrous sulfate (iron sulfate, FEOSOL™), ferrous fumarate (e.g., FEOSTAT™), ferrous gluconate (e.g., FERGON™), polysaccharide-iron complex (e.g., NIFEREX™), iron dextran injection (e.g., INFED™), cupric sulfate, pyroxidine, riboflavin, Vitamin B₁₂, cyancobalamin injection (e.g., REDISOL™, RUBRAMIN PC™), hydroxocobalamin, folic acid (e.g., FOLVITE™), leucovorin (folinic acid, 5-CHOH4PteGlu, citrovorum factor) or WELLCOVORIN (Calcium salt of leucovorin), transferrin or ferritin.

[1017] In certain embodiments, the Therapeutics of the invention are administered in combination with agents used to treat psychiatric disorders. Psychiatric drugs that may be administered with the Therapeutics of the invention include, but are not limited to, antipsychotic agents (e.g., chlorpromazine, chlorprothixene, clozapine, fluphenazine, haloperidol, loxapine, mesoridazine, molindone, olanzapine, perphenazine, pimozide, quetiapine, risperidone, thioridazine, thiothixene, trifluoperazine, and triflupromazine), antimanic agents (e.g., carbamazepine, divalproex sodium, lithium carbonate, and lithium citrate), antidepressants (e.g., amitriptyline, amoxapine, bupropion, citalopram, clomipramine, desipramine, doxepin, fluvoxamine, fluoxetine, imipramine, isocarboxazid, maprotiline, mirtazapine, nefazodone, nortriptyline, paroxetine, phenelzine, protriptyline, sertraline, tranylcypromine, trazodone, trimipramine, and venlafaxine), antianxiety agents (e.g., alprazolam, buspirone, chlordiazepoxide, clorazepate, diazepam, halazepam, lorazepam, oxazepam, and prazepam), and stimulants (e.g., d-amphetamine, methylphenidate, and pemoline).

[1018] In other embodiments, the Therapeutics of the invention are administered in combination with agents used to treat neurological disorders. Neurological agents that may be administered with the Therapeutics of the invention include, but are not limited to, antiepileptic agents (e.g., carbamazepine, clonazepam, ethosuximide, phenobarbital, phenytoin, primidone, valproic acid, divalproex sodium, felbamate, gabapentin, lamotrigine, levetiracetam, oxcarbazepine, tiagabine, topiramate, zonisamide, diazepam, lorazepam, and clonazepam), antiparkinsonian agents (e.g., levodopa/carbidopa, selegiline, amantidine, bromocriptine, pergolide, ropinirole, pramipexole, benztropine; biperiden; ethopropazine; procyclidine; trihexyphenidyl, tolcapone), and ALS therapeutics (e.g. riluzole).

[1019] In another embodiment, Therapeutics of the invention are administered in combination with vasodilating agents and/or calcium channel blocking agents. Vasodilating agents that may be administered with the Therapeutics of the invention include, but are not limited to, Angiotensin Converting Enzyme (ACE) inhibitors (e.g., papaverine, isoxsuprine, benazepril, captopril, cilazapril, enalapril, enalaprilat, fosinopril, lisinopril, moexipril, perindopril, quinapril, ramipril, spirapril, trandolapril, and nylidrin), and nitrates (e.g., isosorbide dinitrate, isosorbide mononitrate, and nitroglycerin). Examples of calcium channel blocking agents that may be administered in combination with the Therapeutics of the invention include, but are not limited to amlodipine, bepridil, diltiazem, felodipine, flunarizine, isradipine, nicardipine, nifedipine, nimodipine, and verapamil.

[1020] In certain embodiments, the Therapeutics of the invention are administered in combination with treatments for gastrointestinal disorders. Treatments for gastrointestinal disorders that may be administered with the Therapeutic of the invention include, but are not limited to, H₂ histamine receptor antagonists (e.g., TAGAMET™ (cimetidine), ZANTAC™ (ranitidine), PEPCID™ (famotidine), and AXID™ (nizatidine)); inhibitors of H⁺, K⁺ ATPase (e.g., PREVACID™ (lansoprazole) and PRILOSEC™ (omeprazole)); Bismuth compounds (e.g., PEPTO-BISMOL™ (bismuth subsalicylate) and DE-NOL™ (bismuth subcitrate)); various antacids; sucralfate; prostaglandin analogs (e.g. CYTOTEC™, (misoprostol)); muscarinic cholinergic antagonists; laxatives (e.g., surfactant laxatives, stimulant laxatives, saline and osmotic laxatives); antidiarrheal agents (e.g., LOMOTIL™ (diphenoxylate), MOTOFEN™ (diphenoxin), and IMODIUM™ (loperamide hydrochloride)), synthetic analogs of somatostatin such as SANDOSTATIN™ (octreotide), antiemetic agents (e.g., ZOFRAN™ (ondansetron), KYTRIL™ (granisetron hydrochloride), tropisetron, dolasetron, metoclopramide, chlorpromazine, perphenazine, prochlorperazine, promethazine, thiethylperazine, triflupromazine, domperidone, haloperidol, droperidol, trimethobenzamide, dexamethasone, methylprednisolone, dronabinol, and nabilone); D2 antagonists (e.g., metoclopramide, trimethobenzamide and chlorpromazine); bile salts; chenodeoxycholic acid; ursodeoxycholic acid; and pancreatic enzyme preparations such as pancreatin and pancrelipase.

[1021] In additional embodiments, the Therapeutics of the invention are administered in combination with other therapeutic or prophylactic regimens, such as, for example, radiation therapy.

### Example 14: Method of Treating Decreased Levels of the Polypeptide

[1022] The present invention relates to a method for treating an individual in need of an increased level of a polypeptide of the invention in the body comprising administering to such an individual a composition comprising a therapeutically effective amount of an agonist of the invention (including polypeptides of the invention). Moreover, it will be appreciated that conditions caused by a decrease in the standard or normal expression level of a polypeptide of the present invention in an individual can be treated by administering the agonist or antagonist of the present invention. Thus, the invention also provides a method of treatment of an individual in need of an increased level of the polypeptide comprising administering to such an individual a Therapeutic comprising an amount of the agonist or antagonist to increase the activity level of the polypeptide in such an individual.

[1023] For example, a patient with decreased levels of a polypeptide receives a daily dose 0.1-100 ug/kg of the agonist or antagonist for six consecutive days. The exact details of the dosing scheme, based on administration and formulation, are provided in Example 13.

### Example 15: Method of Treating Increased Levels of the Polypeptide

[1024] The present invention also relates to a method of treating an individual in need of a decreased level of a polypeptide of the invention in the body comprising administering to such an individual a composition comprising a therapeutically effective amount of an antagonist of the invention (including polypeptides and antibodies of the invention).

[1025] In one example, antisense technology is used to inhibit production of a polypeptide of the present invention. This technology is one example of a method of decreasing levels of a polypeptide, due to a variety of etiologies, such as cancer.

[1026] For example, a patient diagnosed with abnormally increased levels of a polypeptide is administered intravenously antisense polynucleotides at 0.5, 1.0, 1.5, 2.0 and 3.0 mg/kg day for 21 days. This treatment is repeated after a 7-day rest period if the treatment was well tolerated. The antisense polynucleotides of the present invention can be formulated using techniques and formulations described herein (e.g. see Example 13), or otherwise known in the art.

### Example 16: Method of Treatment Using Gene Therapy-Ex Vivo

[1027] One method of gene therapy transplants fibroblasts, which are capable of expressing a polypeptide, onto a patient. Generally, fibroblasts are obtained from a subject by skin biopsy. The resulting tissue is placed in tissue-culture medium and separated into small pieces. Small chunks of the tissue are placed on a wet surface of a tissue culture flask, approximately ten pieces are placed in each flask. The flask is turned upside down, closed tight and left at room temperature over night. After 24 hours at room temperature, the flask is inverted and the chunks of tissue remain fixed to the bottom of the flask and fresh media (e.g., Ham's F12 media, with 10% FBS, penicillin and streptomycin) is added. The flasks are then incubated at 37 degree C. for approximately one week.

[1028] At this time, fresh media is added and subsequently changed every several days. After an additional two weeks in culture, a monolayer of fibroblasts emerge. The monolayer is trypsinized and scaled into larger flasks.

[1029] pMV-7 (Kirschmeier, P. T. et al., DNA, 7:219-25 (1988)), flanked by the long terminal repeats of the Moloney murine sarcoma virus, is digested with EcoRI and HindIII and subsequently treated with calf intestinal phosphatase. The linear vector is fractionated on agarose gel and purified, using glass beads.

[1030] The cDNA encoding a polypeptide of the present invention can be amplified using PCR primers which correspond to the 5′ and 3′ end sequences respectively as set forth in Example 1 using primers and having appropriate restriction sites and initiation/stop codons, if necessary. Preferably, the 5′ primer contains an EcoRI site and the 3′ primer includes a HindIII site. Equal quantities of the Moloney murine sarcoma virus linear backbone and the amplified EcoRI and HindIII fragment are added together, in the presence of T4 DNA ligase. The resulting mixture is maintained under conditions appropriate for ligation of the two fragments. The ligation mixture is then used to transform bacteria HB101, which are then plated onto agar containing kanamycin for the purpose of confirming that the vector has the gene of interest properly inserted.

[1031] The amphotropic pA317 or GP+am12 packaging cells are grown in tissue culture to confluent density in Dulbecco's Modified Eagles Medium (DMEM) with 10% calf serum (CS), penicillin and streptomycin. The MSV vector containing the gene is then added to the media and the packaging cells transduced with the vector. The packaging cells now produce infectious viral particles containing the gene (the packaging cells are now referred to as producer cells).

[1032] Fresh media is added to the transduced producer cells, and subsequently, the media is harvested from a 10 cm plate of confluent producer cells. The spent media, containing the infectious viral particles, is filtered through a millipore filter to remove detached producer cells and this media is then used to infect fibroblast cells. Media is removed from a sub-confluent plate of fibroblasts and quickly replaced with the media from the producer cells. This media is removed and replaced with fresh media. If the titer of virus is high, then virtually all fibroblasts will be infected and no selection is required. If the titer is very low, then it is necessary to use a retroviral vector that has a selectable marker, such as neo or his. Once the fibroblasts have been efficiently infected, the fibroblasts are analyzed to determine whether protein is produced.

[1033] The engineered fibroblasts are then transplanted onto the host, either alone or after having been grown to confluence on cytodex 3 microcarrier beads.

### Example 17: Gene Therapy Using Endogenous Genes Corresponding To Polynucleotides of the Invention

[1034] Another method of gene therapy according to the present invention involves operably associating the endogenous polynucleotide sequence of the invention with a promoter via homologous recombination as described, for example, in U.S. Pat. No.: 5,641,670, issued Jun. 24, 1997; International Publication NO: WO 96/29411, published Sep. 26, 1996; International Publication NO: WO 94/12650, published Aug. 4, 1994; Koller et al., Proc. Natl. Acad. Sci. USA, 86:8932-8935 (1989); and Zijlstra et al., Nature, 342:435-438 (1989). This method involves the activation of a gene which is present in the target cells, but which is not expressed in the cells, or is expressed at a lower level than desired.

[1035] Polynucleotide constructs are made which contain a promoter and targeting sequences, which are homologous to the 5′ non-coding sequence of endogenous polynucleotide sequence, flanking the promoter. The targeting sequence will be sufficiently near the 5′ end of the polynucleotide sequence so the promoter will be operably linked to the endogenous sequence upon homologous recombination. The promoter and the targeting sequences can be amplified using PCR. Preferably, the amplified promoter contains distinct restriction enzyme sites on the 5′ and 3′ ends. Preferably, the 3′ end of the first targeting sequence contains the same restriction enzyme site as the 5′ end of the amplified promoter and the 5′ end of the second targeting sequence contains the same restriction site as the 3′ end of the amplified promoter.

[1036] The amplified promoter and the amplified targeting sequences are digested with the appropriate restriction enzymes and subsequently treated with calf intestinal phosphatase. The digested promoter and digested targeting sequences are added together in the presence of T4 DNA ligase. The resulting mixture is maintained under conditions appropriate for ligation of the two fragments. The construct is size fractionated on an agarose gel, then purified by phenol extraction and ethanol precipitation.

[1037] In this Example, the polynucleotide constructs are administered as naked polynucleotides via electroporation. However, the polynucleotide constructs may also be administered with transfection-facilitating agents, such as liposomes, viral sequences, viral particles, precipitating agents, etc. Such methods of delivery are known in the art.

[1038] Once the cells are transfected, homologous recombination will take place which results in the promoter being operably linked to the endogenous polynucleotide sequence. This results in the expression of polynucleotide corresponding to the polynucleotide in the cell. Expression may be detected by immunological staining, or any other method known in the art.

[1039] Fibroblasts are obtained from a subject by skin biopsy. The resulting tissue is placed in DMEM+10% fetal calf serum. Exponentially growing or early stationary phase fibroblasts are trypsinized and rinsed from the plastic surface with nutrient medium. An aliquot of the cell suspension is removed for counting, and the remaining cells are subjected to centrifugation. The supernatant is aspirated and the pellet is resuspended in 5 ml of electroporation buffer (20 mM HEPES pH 7.3, 137 mM NaCl, 5 mM KCl, 0.7 mM Na₂ HPO₄, 6 mM dextrose). The cells are recentrifuged, the supernatant aspirated, and the cells resuspended in electroporation buffer containing 1 mg/ml acetylated bovine serum albumin. The final cell suspension contains approximately 3×10⁶ cells/ml. Electroporation should be performed immediately following resuspension.

[1040] Plasmid DNA is prepared according to standard techniques. For example, to construct a plasmid for targeting to the locus corresponding to the polynucleotide of the invention, plasmid pUC18 (MBI Fermentas, Amherst, N.Y.) is digested with HindIII. The CMV promoter is amplified by PCR with an XbaI site on the 5′ end and a BaniHI site on the 3′ end. Two non-coding sequences are amplified via PCR: one non-coding sequence (fragment 1) is amplified with a HindlII site at the 5′ end and an Xba site at the 3′ end; the other non-coding sequence (fragment 2) is amplified with a BamHI site at the 5′ end and a HindIII site at the 3′ end. The CMV promoter and the fragments (1 and 2) are digested with the appropriate enzymes (CMV promoter-XbaI and BamHI; fragment 1—XbaI; fragment 2—BamHI) and ligated together. The resulting ligation product is digested with HindIII, and ligated with the HindIII-digested pUC18 plasmid.

[1041] Plasmid DNA is added to a sterile cuvette with a 0.4 cm electrode gap (Bio-Rad). The final DNA concentration is generally at least 120 μg/ml. 0.5 ml of the cell suspension (containing approximately 1.5.×10⁶ cells) is then added to the cuvette, and the cell suspension and DNA solutions are gently mixed. Electroporation is performed with a Gene-Pulser apparatus (Bio-Rad). Capacitance and voltage are set at 960 μF and 250-300 V, respectively. As voltage increases, cell survival decreases, but the percentage of surviving cells that stably incorporate the introduced DNA into their genome increases dramatically. Given these parameters, a pulse time of approximately 14-20 mSec should be observed.

[1042] Electroporated cells are maintained at room temperature for approximately 5 min, and the contents of the cuvette are then gently removed with a sterile transfer pipette. The cells are added directly to 10 ml of prewarmed nutrient media (DMEM with 15% calf serum) in a 10 cm dish and incubated at 37 degree C. The following day, the media is aspirated and replaced with 10 ml of fresh media and incubated for a further 16-24 hours.

[1043] The engineered fibroblasts are then injected into the host, either alone or after having been grown to confluence on cytodex 3 microcarrier beads. The fibroblasts now produce the protein product. The fibroblasts can then be introduced into a patient as described above.

### Example 18: Method of Treatment Using Gene Therapy—In Vivo

[1044] Another aspect of the present invention is using in vivo gene therapy methods to treat disorders, diseases and conditions. The gene therapy method relates to the introduction of naked nucleic acid (DNA, RNA, and antisense DNA or RNA) sequences into an animal to increase or decrease the expression of the polypeptide. The polynucleotide of the present invention may be operatively linked to (i.e., associated with) a promoter or any other genetic elements necessary for the expression of the polypeptide by the target tissue. Such gene therapy and delivery techniques and methods are known in the art, see, for example, WO 90/11092, WO 98/11779; U.S. Pat. Nos. 5,693,622, 5,705,151, 5,580,859; Tabata et al., Cardiovasc. Res. 35(3):470-479 (1997); Chao et al., Pharmacol. Res. 35(6):517-522 (1997); Wolff, Neuromuscul. Disord. 7(5):314-318 (1997); Schwart al., Gene Ther. 3(5):405-411 (1996); Tsurumi et al., Circulation 94(12):3281-3290 (1996) (incorporated herein by reference).

[1045] The polynucleotide constructs may be delivered by any method that delivers injectable materials to the cells of an animal, such as, injection into the interstitial space of tissues (heart, muscle, skin, lung, liver, intestine and the like). The polynucleotide constructs can be delivered in a pharmaceutically acceptable liquid or aqueous carrier.

[1046] The term “naked” polynucleotide, DNA or RNA, refers to sequences that are free from any delivery vehicle that acts to assist, promote, or facilitate entry into the cell, including viral sequences, viral particles, liposome formulations, lipofectin or precipitating agents and the like. However, the polynucleotides of the present invention may also be delivered in liposome formulations (such as those taught in Felgner P. L. et al. (1995) Ann. NY Acad. Sci. 772:126-139 and Abdallah B. et al. (1995) Biol. Cell 85(1):1-7) which can be prepared by methods well known to those skilled in the art.

[1047] The polynucleotide vector constructs used in the gene therapy method are preferably constructs that will not integrate into the host genome nor will they contain sequences that allow for replication. Any strong promoter known to those skilled in the art can be used for driving the expression of DNA. Unlike other gene therapy techniques, one major advantage of introducing naked nucleic acid sequences into target cells is the transitory nature of the polynucleotide synthesis in the cells. Studies have shown that non-replicating DNA sequences can be introduced into cells to provide production of the desired polypeptide for periods of up to six months.

[1048] The polynucleotide construct can be delivered to the interstitial space of tissues within an animal, including muscle, skin, brain, lung, liver, spleen, bone marrow, thymus, heart, lymph, blood, bone, cartilage, pancreas, kidney, gall bladder, stomach, intestine, testis, ovary, uterus, rectum, nervous system, eye, gland, and connective tissue. Interstitial space of the tissues comprises the intercellular fluid, mucopolysaccharide matrix among the reticular fibers of organ tissues, elastic fibers in the walls of vessels or chambers, collagen fibers of fibrous tissues, or that same matrix within connective tissue ensheathing muscle cells or in the lacunae of bone. It is similarly the space occupied by the plasma of the circulation and the lymph fluid of the lymphatic channels. Delivery to the interstitial space of muscle tissue is preferred for the reasons discussed below. They may be conveniently delivered by injection into the tissues comprising these cells. They are preferably delivered to and expressed in persistent, non-dividing cells which are differentiated, although delivery and expression may be achieved in non-differentiated or less completely differentiated cells, such as, for example, stem cells of blood or skin fibroblasts. In vivo muscle cells are particularly competent in their ability to take up and express polynucleotides.

[1049] For the naked polynucleotide injection, an effective dosage amount of DNA or RNA will be in the range of from about 0.05 g/kg body weight to about 50 mg/kg body weight. Preferably the dosage will be from about 0.005 mg/kg to about 20 mg/kg and more preferably from about 0.05 mg/kg to about 5 mg/kg. Of course, as the artisan of ordinary skill will appreciate, this dosage will vary according to the tissue site of injection. The appropriate and effective dosage of nucleic acid sequence can readily be determined by those of ordinary skill in the art and may depend on the condition being treated and the route of administration. The preferred route of administration is by the parenteral route of injection into the interstitial space of tissues. However, other parenteral routes may also be used, such as, inhalation of an aerosol formulation particularly for delivery to lungs or bronchial tissues, throat or mucous membranes of the nose. In addition, naked polynucleotide constructs can be delivered to arteries during angioplasty by the catheter used in the procedure.

[1050] The dose response effects of injected polynucleotide in muscle in vivo is determined as follows. Suitable template DNA for production of mRNA coding for polypeptide of the present invention is prepared in accordance with a standard recombinant DNA methodology. The template DNA, which may be either circular or linear, is either used as naked DNA or complexed with liposomes. The quadriceps muscles of mice are then injected with various amounts of the template DNA.

[1051] Five to six week old female and male Balb/C mice are anesthetized by intraperitoneal injection with 0.3 ml of 2.5% Avertin. A 1.5 cm incision is made on the anterior thigh, and the quadriceps muscle is directly visualized. The template DNA is injected in 0.1 ml of carrier in a 1 cc syringe through a 27 gauge needle over one minute, approximately 0.5 cm from the distal insertion site of the muscle into the knee and about 0.2 cm deep. A suture is placed over the injection site for future localization, and the skin is closed with stainless steel clips.

[1052] After an appropriate incubation time (e.g., 7 days) muscle extracts are prepared by excising the entire quadriceps. Every fifth 15 um cross-section of the individual quadriceps muscles is histochemically stained for protein expression. A time course for protein expression may be done in a similar fashion except that quadriceps from different mice are harvested at different times. Persistence of DNA in muscle following injection may be determined by Southern blot analysis after preparing total cellular DNA and HIRT supernatants from injected and control mice. The results of the above experimentation in mice can be used to extrapolate proper dosages and other treatment parameters in humans and other animals using naked DNA.

### Example 19: Transgenic Animals

[1053] The polypeptides of the invention can also be expressed in transgenic animals. Animals of any species, including, but not limited to, mice, rats, rabbits, hamsters, guinea pigs, pigs, micro-pigs, goats, sheep, cows and non-human primates, e.g., baboons, monkeys, and chimpanzees may be used to generate transgenic animals. In a specific embodiment, techniques described herein or otherwise known in the art, are used to express polypeptides of the invention in humans, as part of a gene therapy protocol.

[1054] Any technique known in the art may be used to introduce the transgene (i.e., polynucleotides of the invention) into animals to produce the founder lines of transgenic animals. Such techniques include, but are not limited to, pronuclear microinjection (Paterson et al., Appl. Microbiol. Biotechnol. 40:691-698 (1994); Carver et al., Biotechnology (NY) 11:1263-1270 (1993); Wright et al., Biotechnology (NY) 9:830-834 (1991); and Hoppe et al., U.S. Pat. No. 4,873,191 (1989)); retrovirus mediated gene transfer into germ lines (Van der Putten et al., Proc. Natl. Acad. Sci., USA 82:6148-6152 (1985)), blastocysts or embryos; gene targeting in embryonic stem cells (Thompson et al., Cell 56:313-321 (1989)); electroporation of cells or embryos (Lo, 1983, Mol Cell. Biol. 3:1803-1814 (1983)); introduction of the polynucleotides of the invention using a gene gun (see, e.g., Ulmer et al., Science 259:1745 (1993); introducing nucleic acid constructs into embryonic pleuripotent stem cells and transferring the stem cells back into the blastocyst; and sperm-mediated gene transfer (Lavitrano et al., Cell 57:717-723 (1989); etc. For a review of such techniques, see Gordon, “Transgenic Animals,” Intl. Rev. Cytol. 115:171-229 (1989), which is incorporated by reference herein in its entirety.

[1055] Any technique known in the art may be used to produce transgenic clones containing polynucleotides of the invention, for example, nuclear transfer into enucleated oocytes of nuclei from cultured embryonic, fetal, or adult cells induced to quiescence (Campell et al., Nature 380:64-66 (1996); Wilmut et al., Nature 385:810-813 (1997)).

[1056] The present invention provides for transgenic animals that carry the transgene in all their cells, as well as animals which carry the transgene in some, but not all their cells, i.e., mosaic animals or chimeric. The transgene may be integrated as a single transgene or as multiple copies such as in concatamers, e.g., head-to-head tandems or head-to-tail tandems. The transgene may also be selectively introduced into and activated in a particular cell type by following, for example, the teaching of Lasko et al. (Lasko et al., Proc. Natl. Acad. Sci. USA 89:6232-6236 (1992)). The regulatory sequences required for such a cell-type specific activation will depend upon the particular cell type of interest, and will be apparent to those of skill in the art. When it is desired that the polynucleotide transgene be integrated into the chromosomal site of the endogenous gene, gene targeting is preferred. Briefly, when such a technique is to be utilized, vectors containing some nucleotide sequences homologous to the endogenous gene are designed for the purpose of integrating, via homologous recombination with chromosomal sequences, into and disrupting the function of the nucleotide sequence of the endogenous gene. The transgene may also be selectively introduced into a particular cell type, thus inactivating the endogenous gene in only that cell type, by following, for example, the teaching of Gu et al. (Gu et al., Science 265:103-106 (1994)). The regulatory sequences required for such a cell-type specific inactivation will depend upon the particular cell type of interest, and will be apparent to those of skill in the art.

[1057] Once transgenic animals have been generated, the expression of the recombinant gene may be assayed utilizing standard techniques. Initial screening may be accomplished by Southern blot analysis or PCR techniques to analyze animal tissues to verify that integration of the transgene has taken place. The level of mRNA expression of the transgene in the tissues of the transgenic animals may also be assessed using techniques which include, but are not limited to, Northern blot analysis of tissue samples obtained from the animal, in situ hybridization analysis, and reverse transcriptase-PCR (rt-PCR). Samples of transgenic gene-expressing tissue may also be evaluated immunocytochemically or immunohistochemically using antibodies specific for the transgene product.

[1058] Once the founder animals are produced, they may be bred, inbred, outbred, or crossbred to produce colonies of the particular animal. Examples of such breeding strategies include, but are not limited to: outbreeding of founder animals with more than one integration site in order to establish separate lines; inbreeding of separate lines in order to produce compound transgenics that express the transgene at higher levels because of the effects of additive expression of each transgene; crossing of heterozygous transgenic animals to produce animals homozygous for a given integration site in order to both augment expression and eliminate the need for screening of animals by DNA analysis; crossing of separate homozygous lines to produce compound heterozygous or homozygous lines; and breeding to place the transgene on a distinct background that is appropriate for an experimental model of interest.

[1059] Transgenic animals of the invention have uses which include, but are not limited to, animal model systems useful in elaborating the biological function of polypeptides of the present invention, studying conditions and/or disorders associated with aberrant expression, and in screening for compounds effective in ameliorating such conditions and/or disorders.

### Example 20: Knock-Out Animals

[1060] Endogenous gene expression can also be reduced by inactivating or “knocking out” the gene and/or its promoter using targeted homologous recombination. (e.g., see Smithies et al., Nature 317:230-234 (1985); Thomas & Capecchi, Cell 51:503-512 (1987); Thompson et al., Cell 5:313-321 (1989); each of which is incorporated by reference herein in its entirety). For example, a mutant, non-functional polynucleotide of the invention (or a completely unrelated DNA sequence) flanked by DNA homologous to the endogenous polynucleotide sequence (either the coding regions or regulatory regions of the gene) can be used, with or without a selectable marker and/or a negative selectable marker, to transfect cells that express polypeptides of the invention in vivo. In another embodiment, techniques known in the art are used to generate knockouts in cells that contain, but do not express the gene of interest. Insertion of the DNA construct, via targeted homologous recombination, results in inactivation of the targeted gene. Such approaches are particularly suited in research and agricultural fields where modifications to embryonic stem cells can be used to generate animal offspring with an inactive targeted gene (e.g., see Thomas & Capecchi 1987 and Thompson 1989, supra). However this approach can be routinely adapted for use in humans provided the recombinant DNA constructs are directly administered or targeted to the required site in vivo using appropriate viral vectors that will be apparent to those of skill in the art.

[1061] In further embodiments of the invention, cells that are genetically engineered to express the polypeptides of the invention, or alternatively, that are genetically engineered not to express the polypeptides of the invention (e.g., knockouts) are administered to a patient in vivo. Such cells may be obtained from the patient (i.e., animal, including human) or an MHC compatible donor and can include, but are not limited to fibroblasts, bone marrow cells, blood cells (e.g., lymphocytes), adipocytes, muscle cells, endothelial cells etc. The cells are genetically engineered in vitro using recombinant DNA techniques to introduce the coding sequence of polypeptides of the invention into the cells, or alternatively, to disrupt the coding sequence and/or endogenous regulatory sequence associated with the polypeptides of the invention, e.g., by transduction (using viral vectors, and preferably vectors that integrate the transgene into the cell genome) or transfection procedures, including, but not limited to, the use of plasmids, cosmids, YACs, naked DNA, electroporation, liposomes, etc. The coding sequence of the polypeptides of the invention can be placed under the control of a strong constitutive or inducible promoter or promoter/enhancer to achieve expression, and preferably secretion, of the polypeptides of the invention. The engineered cells which express and preferably secrete the polypeptides of the invention can be introduced into the patient systemically, e.g., in the circulation, or intraperitoneally.

[1062] Alternatively, the cells can be incorporated into a matrix and implanted in the body, e.g., genetically engineered fibroblasts can be implanted as part of a skin graft; genetically engineered endothelial cells can be implanted as part of a lymphatic or vascular graft. (See, for example, Anderson et al. U.S. Pat. No. 5,399,349; and Mulligan & Wilson, U.S. Pat. No. 5,460,959 each of which is incorporated by reference herein in its entirety).

[1063] When the cells to be administered are non-autologous or non-MHC compatible cells, they can be administered using well known techniques which prevent the development of a host immune response against the introduced cells. For example, the cells may be introduced in an encapsulated form which, while allowing for an exchange of components with the immediate extracellular environment, does not allow the introduced cells to be recognized by the host immune system.

[1064] Transgenic and “knock-out” animals of the invention have uses which include, but are not limited to, animal model systems useful in elaborating the biological function of polypeptides of the present invention, studying conditions and/or disorders associated with aberrant expression, and in screening for compounds effective in ameliorating such conditions and/or disorders.

### Example 21: Assays Detecting Stimulation or Inhibition of B cell Proliferation and Differentiation

[1065] Generation of functional humoral immune responses requires both soluble and cognate signaling between B-lineage cells and their microenvironment. Signals may impart a positive stimulus that allows a B-lineage cell to continue its programmed development, or a negative stimulus that instructs the cell to arrest its current developmental pathway. To date, numerous stimulatory and inhibitory signals have been found to influence B cell responsiveness including IL-2, IL-4, IL-5, IL-6, IL-7, IL10, IL-13, IL-14 and IL-15. Interestingly, these signals are by themselves weak effectors but can, in combination with various co-stimulatory proteins, induce activation, proliferation, differentiation, homing, tolerance and death among B cell populations.

[1066] One of the best studied classes of B-cell co-stimulatory proteins is the TNF-superfamily. Within this family CD40, CD27, and CD30 along with their respective ligands CD154, CD70, and CD153 have been found to regulate a variety of immune responses. Assays which allow for the detection and/or observation of the proliferation and differentiation of these B-cell populations and their precursors are valuable tools in determining the effects various proteins may have on these B-cell populations in terms of proliferation and differentiation. Listed below are two assays designed to allow for the detection of the differentiation, proliferation, or inhibition of B-cell populations and their precursors.

[1067] In Vitro Assay-Agonists or antagonists of the invention can be assessed for its ability to induce activation, proliferation, differentiation or inhibition and/or death in B-cell populations and their precursors. The activity of the agonists or antagonists of the invention on purified human tonsillar B cells, measured qualitatively over the dose range from 0.1 to 10,000 ng/mL, is assessed in a standard B-lymphocyte co-stimulation assay in which purified tonsillar B cells are cultured in the presence of either formalin-fixed Staphylococcus aureus Cowan I (SAC) or immobilized anti-human IgM antibody as the priming agent. Second signals such as IL-2 and IL-15 synergize with SAC and IgM crosslinking to elicit B cell proliferation as measured by tritiated-thymidine incorporation. Novel synergizing agents can be readily identified using this assay. The assay involves isolating human tonsillar B cells by magnetic bead (MACS) depletion of CD3-positive cells. The resulting cell population is greater than 95% B cells as assessed by expression of CD45R(B220).

[1068] Various dilutions of each sample are placed into individual wells of a 96-well plate to which are added 10⁵ B-cells suspended in culture medium (RPMI 1640 containing 10% FBS, 5×10⁻⁵M 2ME, 100 U/ml penicillin, 10 ug/ml streptomycin, and 10⁻⁵ dilution of SAC) in a total volume of 150 ul. Proliferation or inhibition is quantitated by a 20 h pulse (1 uCi/well) with 3H-thymidine (6.7 Ci/mM) beginning 72 h post factor addition. The positive and negative controls are IL2 and medium respectively.

[1069] In vivo Assay-BALB/c mice are injected (i.p.) twice per day with buffer only, or 2 mg/Kg of agonists or antagonists of the invention, or truncated forms thereof. Mice receive this treatment for 4 consecutive days, at which time they are sacrificed and various tissues and serum collected for analyses. Comparison of H&E sections from normal spleens and spleens treated with agonists or antagonists of the invention identify the results of the activity of the agonists or antagonists on spleen cells, such as the diffusion of peri-arterial lymphatic sheaths, and/or significant increases in the nucleated cellularity of the red pulp regions, which may indicate the activation of the differentiation and proliferation of B-cell populations. Immunohistochemical studies using a B cell marker, anti-CD45R(B220), are used to determine whether any physiological changes to splenic cells, such as splenic disorganization, are due to increased B-cell representation within loosely defined B-cell zones that infiltrate established T-cell regions.

[1070] Flow cytometric analyses of the spleens from mice treated with agonist or antagonist is used to indicate whether the agonists or antagonists specifically increases the proportion of ThB+, CD45R(B220)dull B cells over that which is observed in control mice.

[1071] Likewise, a predicted consequence of increased mature B-cell representation in vivo is a relative increase in serum Ig titers. Accordingly, serum IgM and IgA levels are compared between buffer and agonists or antagonists-treated mice.

[1072] The studies described in this example tested activity of agonists or antagonists of the invention. However, one skilled in the art could easily modify the exemplified studies to test the activity of polynucleotides or polypeptides of the invention (e.g., gene therapy).

### Example 22: T Cell Proliferation Assay

[1073] A CD3-induced proliferation assay is performed on PBMCs and is measured by the uptake of ³H-thymidine. The assay is performed as follows. Ninety-six well plates are coated with 100 μl/well of mAb to CD3 (HIT3a, Pharmingen) or isotype-matched control mAb (B33.1) overnight at 4 degrees C. (1 μg/ml in 0.05M bicarbonate buffer, pH 9.5), then washed three times with PBS. PBMC are isolated by F/H gradient centrifugation from human peripheral blood and added to quadruplicate wells (5×10⁴/well) of mAb coated plates in RPMI containing 10% FCS and P/S in the presence of varying concentrations of agonists or antagonists of the invention (total volume 200 ul). Relevant protein buffer and medium alone are controls. After 48 hr. culture at 37 degrees C., plates are spun for 2 min. at 1000 rpm and 100 μl of supernatant is removed and stored −20 degrees C. for measurement of IL-2 (or other cytokines) if effect on proliferation is observed. Wells are supplemented with 100 ul of medium containing 0.5 uCi of ³H-thymidine and cultured at 37 degrees C. for 18-24 hr. Wells are harvested and incorporation of ³H-thymidine used as a measure of proliferation. Anti-CD3 alone is the positive control for proliferation. IL-2 (100 U/ml) is also used as a control which enhances proliferation. Control antibody which does not induce proliferation of T cells is used as the negative control for the effects of agonists or antagonists of the invention.

[1074] The studies described in this example tested activity of agonists or antagonists of the invention. However, one skilled in the art could easily modify the exemplified studies to test the activity of polynucleotides or polypeptides of the invention (e.g., gene therapy).

### Example 23: Effect of Agonists or Antagonists of the Invention on the Expression of MHC Class II, Costimulatory and Adhesion Molecules and Cell Differentiation of Monocytes and Monocyte-Derived Human Dendritic Cells

[1075] Dendritic cells are generated by the expansion of proliferating precursors found in the peripheral blood: adherent PBMC or elutriated monocytic fractions are cultured for 7-10 days with GM-CSF (50 ng/ml) and IL-4 (20 ng/ml). These dendritic cells have the characteristic phenotype of immature cells (expression of CD1, CD80, CD86, CD40 and MHC class II antigens). Treatment with activating factors, such as TNF-α, causes a rapid change in surface phenotype (increased expression of MHC class I and II, costimulatory and adhesion molecules, downregulation of FCγRII, upregulation of CD83). These changes correlate with increased antigen-presenting capacity and with functional maturation of the dendritic cells.

[1076] FACS analysis of surface antigens is performed as follows. Cells are treated 1-3 days with increasing concentrations of agonist or antagonist of the invention or LPS (positive control), washed with PBS containing 1% BSA and 0.02 mM sodium azide, and then incubated with 1:20 dilution of appropriate FITC- or PE-labeled monoclonal antibodies for 30 minutes at 4 degrees C. After an additional wash, the labeled cells are analyzed by flow cytometry on a FACScan (Becton Dickinson).

[1077] Effect on the production of cytokines. Cytokines generated by dendritic cells, in particular IL-12, are important in the initiation of T-cell dependent immune responses. IL-12 strongly influences the development of Thl helper T-cell immune response, and induces cytotoxic T and NK cell function. An ELISA is used to measure the IL-12 release as follows. Dendritic cells (10⁶/ml) are treated with increasing concentrations of agonists or antagonists of the invention for 24 hours. LPS (100 ng/ml) is added to the cell culture as positive control. Supernatants from the cell cultures are then collected and analyzed for IL-12 content using commercial ELISA kit (e.g., R & D Systems (Minneapolis, Minn.)). The standard protocols provided with the kits are used.

[1078] Effect on the expression of MHC Class II, costimulatory and adhesion molecules. Three major families of cell surface antigens can be identified on monocytes: adhesion molecules, molecules involved in antigen presentation, and Fc receptor. Modulation of the expression of MHC class II antigens and other costimulatory molecules, such as B7 and ICAM-1, may result in changes in the antigen presenting capacity of monocytes and ability to induce T cell activation. Increased expression of Fc receptors may correlate with improved monocyte cytotoxic activity, cytokine release and phagocytosis.

[1079] FACS analysis is used to examine the surface antigens as follows. Monocytes are treated 1-5 days with increasing concentrations of agonists or antagonists of the invention or LPS (positive control), washed with PBS containing 1% BSA and 0.02 mM sodium azide, and then incubated with 1:20 dilution of appropriate FITC- or PE-labeled monoclonal antibodies for 30 minutes at 4 degrees C. After an additional wash, the labeled cells are analyzed by flow cytometry on a FACScan (Becton Dickinson).

[1080] Monocyte activation and/or increased survival. Assays for molecules that activate (or alternatively, inactivate) monocytes and/or increase monocyte survival (or alternatively, decrease monocyte survival) are known in the art and may routinely be applied to determine whether a molecule of the invention functions as an inhibitor or activator of monocytes. Agonists or antagonists of the invention can be screened using the three assays described below. For each of these assays, Peripheral blood mononuclear cells (PBMC) are purified from single donor leukopacks (American Red Cross, Baltimore, Md.) by centrifugation through a Histopaque gradient (Sigma). Monocytes are isolated from PBMC by counterflow centrifugal elutriation.

[1081] Monocyte Survival Assay. Human peripheral blood monocytes progressively lose viability when cultured in absence of serum or other stimuli. Their death results from internally regulated processes (apoptosis). Addition to the culture of activating factors, such as TNF-alpha dramatically improves cell survival and prevents DNA fragmentation. Propidium iodide (PI) staining is used to measure apoptosis as follows. Monocytes are cultured for 48 hours in polypropylene tubes in serum-free medium (positive control), in the presence of 100 ng/ml TNF-alpha (negative control), and in the presence of varying concentrations of the compound to be tested. Cells are suspended at a concentration of 2×10^{6/}ml in PBS containing PI at a final concentration of 5 μg/ml, and then incubated at room temperature for 5 minutes before FACScan analysis. PI uptake has been demonstrated to correlate with DNA fragmentation in this experimental paradigm.

[1082] Effect on cytokine release. An important function of monocytes/macrophages is their regulatory activity on other cellular populations of the immune system through the release of cytokines after stimulation. An ELISA to measure cytokine release is performed as follows. Human monocytes are incubated at a density of 5×10⁵ cells/ml with increasing concentrations of agonists or antagonists of the invention and under the same conditions, but in the absence of agonists or antagonists. For IL-12 production, the cells are primed overnight with IFN (100 U/ml) in the presence of agonist or antagonist of the invention. LPS (10 ng/ml) is then added. Conditioned media are collected after 24 h and kept frozen until use. Measurement of TNF-alpha, IL-10, MCP-1 and IL-8 is then performed using a commercially available ELISA kit (e.g., R & D Systems (Minneapolis, Minn.)) and applying the standard protocols provided with the kit.

[1083] Oxidative burst. Purified monocytes are plated in 96-w plate at 2-1×10⁵ cell/well. Increasing concentrations of agonists or antagonists of the invention are added to the wells in a total volume of 0.2 ml culture medium (RPMI 1640+10% FCS, glutamine and antibiotics). After 3 days incubation, the plates are centrifuged and the medium is removed from the wells. To the macrophage monolayers, 0.2 ml per well of phenol red solution (140 mM NaCl, 10 mM potassium phosphate buffer pH 7.0, 5.5 mM dextrose, 0.56 mM phenol red and 19 U/ml of HRPO) is added, together with the stimulant (200 nM PMA). The plates are incubated at 37° C. for 2 hours and the reaction is stopped by adding 20 μl IN NaOH per well. The absorbance is read at 610 nm. To calculate the amount of H₂O₂ produced by the macrophages, a standard curve of a H₂O₂ solution of known molarity is performed for each experiment.

[1084] The studies described in this example tested activity of agonists or antagonists of the invention. However, one skilled in the art could easily modify the exemplified studies to test the activity of polynucleotides or polypeptides of the invention (e.g., gene therapy).

### Example 24: Biological Effects of Agonists or Antagonists of the Invention

[1085] Astrocyte and Neuronal Assays

[1086] Agonists or antagonists of the invention, expressed in Escherichia coli and purified as described above, can be tested for activity in promoting the survival, neurite outgrowth, or phenotypic differentiation of cortical neuronal cells and for inducing the proliferation of glial fibrillary acidic protein immunopositive cells, astrocytes. The selection of cortical cells for the bioassay is based on the prevalent expression of FGF-1 and FGF-2 in cortical structures and on the previously reported enhancement of cortical neuronal survival resulting from FGF-2 treatment. A thymidine incorporation assay, for example, can be used to elucidate an agonist or antagonist of the invention's activity on these cells.

[1087] Moreover, previous reports describing the biological effects of FGF-2 (basic FGF) on cortical or hippocampal neurons in vitro have demonstrated increases in both neuron survival and neurite outgrowth (Walicke et al., “Fibroblast growth factor promotes survival of dissociated hippocampal neurons and enhances neurite extension.” Proc. Natl. Acad. Sci. USA 83:3012-3016. (1986), assay herein incorporated by reference in its entirety). However, reports from experiments done on PC-12 cells suggest that these two responses are not necessarily synonymous and may depend on not only which FGF is being tested but also on which receptor(s) are expressed on the target cells. Using the primary cortical neuronal culture paradigm, the ability of an agonist or antagonist of the invention to induce neurite outgrowth can be compared to the response achieved with FGF-2 using, for example, a thymidine incorporation assay.

[1088] Fibroblast and Endothelial Cell Assays

[1089] Human lung fibroblasts are obtained from Clonetics (San Diego, Calif.) and maintained in growth media from Clonetics. Dermal microvascular endothelial cells are obtained from Cell Applications (San Diego, Calif.). For proliferation assays, the human lung fibroblasts and dermal microvascular endothelial cells can be cultured at 5,000 cells/well in a 96-well plate for one day in growth medium. The cells are then incubated for one day in 0.1% BSA basal medium. After replacing the medium with fresh 0.1% BSA medium, the cells are incubated with the test proteins for 3 days. Alamar Blue (Alamar Biosciences, Sacramento, Calif.) is added to each well to a final concentration of 10%. The cells are incubated for 4 hr. Cell viability is measured by reading in a CytoFluor fluorescence reader. For the PGE₂ assays, the human lung fibroblasts are cultured at 5,000 cells/well in a 96-well plate for one day. After a medium change to 0.1% BSA basal medium, the cells are incubated with FGF-2 or agonists or antagonists of the invention with or without IL-1α for 24 hours. The supernatants are collected and assayed for PGE₂ by EIA kit (Cayman, Ann Arbor, Mich.). For the IL-6 assays, the human lung fibroblasts are cultured at 5,000 cells/well in a 96-well plate for one day. After a medium change to 0.1% BSA basal medium, the cells are incubated with FGF-2 or with or without agonists or antagonists of the invention IL-1α for 24 hours. The supernatants are collected and assayed for IL-6 by ELISA kit (Endogen, Cambridge, Mass.).

[1090] Human lung fibroblasts are cultured with FGF-2 or agonists or antagonists of the invention for 3 days in basal medium before the addition of Alamar Blue to assess effects on growth of the fibroblasts. FGF-2 should show a stimulation at 10-2500 ng/ml which can be used to compare stimulation with agonists or antagonists of the invention.

[1091] Parkinson Models

[1092] The loss of motor function in Parkinson's disease is attributed to a deficiency of striatal dopamine resulting from the degeneration of the nigrostriatal dopaminergic projection neurons. An animal model for Parkinson's that has been extensively characterized involves the systemic administration of 1-methyl-4 phenyl 1,2,3,6-tetrahydropyridine (MPTP). In the CNS, MPTP is taken-up by astrocytes and catabolized by monoamine oxidase B to 1-methyl-4-phenyl pyridine (MPP⁺) and released. Subsequently, MPP⁺ is actively accumulated in dopaminergic neurons by the high-affinity reuptake transporter for dopamine. MPP⁺ is then concentrated in mitochondria by the electrochemical gradient and selectively inhibits nicotidamide adenine disphosphate: ubiquinone oxidoreductionase (complex I), thereby interfering with electron transport and eventually generating oxygen radicals.

[1093] It has been demonstrated in tissue culture paradigms that FGF-2 (basic FGF) has trophic activity towards nigral dopaminergic neurons (Ferrari et al., Dev. Biol. 1989). Recently, Dr. Unsicker's group has demonstrated that administering FGF-2 in gel foam implants in the striatum results in the near complete protection of nigral dopaminergic neurons from the toxicity associated with MPTP exposure (Otto and Unsicker, J. Neuroscience, 1990).

[1094] Based on the data with FGF-2, agonists or antagonists of the invention can be evaluated to determine whether it has an action similar to that of FGF-2 in enhancing dopaminergic neuronal survival in vitro and it can also be tested in vivo for protection of dopaminergic neurons in the striatum from the damage associated with MPTP treatment. The potential effect of an agonist or antagonist of the invention is first examined in vitro in a dopaminergic neuronal cell culture paradigm. The cultures are prepared by dissecting the midbrain floor plate from gestation day 14 Wistar rat embryos. The tissue is dissociated with trypsin and seeded at a density of 200,000 cells/cm² on polyorthinine-laminin coated glass coverslips. The cells are maintained in Dulbecco's Modified Eagle's medium and F12 medium containing hormonal supplements (N1). The cultures are fixed with paraformaldehyde after 8 days in vitro and are processed for tyrosine hydroxylase, a specific marker for dopaminergic neurons, immunohistochemical staining. Dissociated cell cultures are prepared from embryonic rats. The culture medium is changed every third day and the factors are also added at that time.

[1095] Since the dopaminergic neurons are isolated from animals at gestation day 14, a developmental time which is past the stage when the dopaminergic precursor cells are proliferating, an increase in the number of tyrosine hydroxylase immunopositive neurons would represent an increase in the number of dopaminergic neurons surviving in vitro. Therefore, if an agonist or antagonist of the invention acts to prolong the survival of dopaminergic neurons, it would suggest that the agonist or antagonist may be involved in Parkinson's Disease.

[1096] The studies described in this example tested activity of agonists or antagonists of the invention. However, one skilled in the art could easily modify the exemplified studies to test the activity of polynucleotides or polypeptides of the invention (e.g., gene therapy).

### Example 25: The Effect of Agonists or Antagonists of the Invention on the Growth of Vascular Endothelial Cells

[1097] On day 1, human umbilical vein endothelial cells (HUVEC) are seeded at 2-5×10⁴ cells/35 mm dish density in M199 medium containing 4% fetal bovine serum (FBS), 16 units/ml heparin, and 50 units/ml endothelial cell growth supplements (ECGS, Biotechnique, Inc.). On day 2, the medium is replaced with M199 containing 10% FBS, 8 units/ml heparin. An agonist or antagonist of the invention, and positive controls, such as VEGF and basic FGF (bFGF) are added, at varying concentrations. On days 4 and 6, the medium is replaced. On day 8, cell number is determined with a Coulter Counter.

[1098] An increase in the number of HUVEC cells indicates that the compound of the invention may proliferate vascular endothelial cells, while a decrease in the number of HUVEC cells indicates that the compound of the invention inhibits vascular endothelial cells.

[1099] The studies described in this example tested activity of a polypeptide of the invention. However, one skilled in the art could easily modify the exemplified studies to test the activity of polynucleotides (e.g., gene therapy), agonists, and/or antagonists of the invention.

### Example 26: Rat Corneal Wound Healing Model

[1100] This animal model shows the effect of an agonist or antagonist of the invention on neovascularization. The experimental protocol includes:

[1101] a) Making a 1-1.5 mm long incision from the center of cornea into the stromal layer.

[1102] b) Inserting a spatula below the lip of the incision facing the outer corner of the eye.

[1103] c) Making a pocket (its base is 1-1.5 mm form the edge of the eye).

[1104] d) Positioning a pellet, containing 50 ng-5 ug of an agonist or antagonist of the invention, within the pocket.

[1105] e) Treatment with an agonist or antagonist of the invention can also be applied topically to the corneal wounds in a dosage range of 20 mg-500 mg (daily treatment for five days).

[1106] The studies described in this example tested activity of agonists or antagonists of the invention. However, one skilled in the art could easily modify the exemplified studies to test the activity of polynucleotides or polypeptides of the invention (e.g., gene therapy).

### Example 27: Diabetic Mouse and Glucocorticoid-Impaired Wound Healing Models

[1107] Diabetic db+/db+Mouse Model

[1108] To demonstrate that an agonist or antagonist of the invention accelerates the healing process, the genetically diabetic mouse model of wound healing is used. The full thickness wound healing model in the db+/db+mouse is a well characterized, clinically relevant and reproducible model of impaired wound healing. Healing of the diabetic wound is dependent on formation of granulation tissue and re-epithelialization rather than contraction (Gartner, M. H. et al., J. Surg. Res. 52:389 (1992); Greenhalgh, D. G. et al, Am. J. Pathol. 136:1235 (1990)).

[1109] The diabetic animals have many of the characteristic features observed in Type II diabetes mellitus. Homozygous (db+/db+) mice are obese in comparison to their normal heterozygous (db+/+m) littermates. Mutant diabetic (db+/db+) mice have a single autosomal recessive mutation on chromosome 4 (db+) (Coleman et al Proc. Natl. Acad. Sci. USA 77:283-293 (1982)). Animals show polyphagia, polydipsia and polyuria. Mutant diabetic mice (db+/db+) have elevated blood glucose, increased or normal insulin levels, and suppressed cell-mediated immunity (Mandel et al., J. Immunol. 120:1375 (1978); Debray-Sachs, M. et al., Clin. Exp. Immunol. 51(1):1-7 (1983); Leiter et al., Am. J. of Pathol 114:46-55 (1985)). Peripheral neuropathy, myocardial complications, and microvascular lesions, basement membrane thickening and glomerular filtration abnormalities have been described in these animals (Norido, F. et al, Exp. Neurol. 83(2):221-232 (1984); Robertson et al., Diabetes 29(1):60-67 (1980); Giacomelli et al., Lab Invest. 40(4):460-473 (1979); Coleman, D. L., Diabetes 31 (Suppl):1-6 (1982)). These homozygous diabetic mice develop hyperglycemia that is resistant to insulin analogous to human type II diabetes (Mandel et al., J. Immunol 120:1375-1377 (1978)).

[1110] The characteristics observed in these animals suggests that healing in this model may be similar to the healing observed in human diabetes (Greenhalgh, et al., Am. J. of Pathol. 136:1235-1246 (1990)).

[1111] Genetically diabetic female C57BL/KsJ (db+/db+) mice and their non-diabetic (db+/+m) heterozygous littermates are used in this study (Jackson Laboratories). The animals are purchased at 6 weeks of age and are 8 weeks old at the beginning of the study. Animals are individually housed and received food and water ad libitum. All manipulations are performed using aseptic techniques. The experiments are conducted according to the rules and guidelines of Human Genome Sciences, Inc. Institutional Animal Care and Use Committee and the Guidelines for the Care and Use of Laboratory Animals.

[1112] Wounding protocol is performed according to previously reported methods (Tsuboi, R. and Rifkin, D. B., J. Exp. Med. 172:245-251 (1990)). Briefly, on the day of wounding, animals are anesthetized with an intraperitoneal injection of Avertin (0.01 mg/mL), 2,2,2-tribromoethanol and 2-methyl-2-butanol dissolved in deionized water. The dorsal region of the animal is shaved and the skin washed with 70% ethanol solution and iodine. The surgical area is dried with sterile gauze prior to wounding. An 8 mm full-thickness wound is then created using a Keyes tissue punch. Immediately following wounding, the surrounding skin is gently stretched to eliminate wound expansion. The wounds are left open for the duration of the experiment. Application of the treatment is given topically for 5 consecutive days commencing on the day of wounding. Prior to treatment, wounds are gently cleansed with sterile saline and gauze sponges.

[1113] Wounds are visually examined and photographed at a fixed distance at the day of surgery and at two day intervals thereafter. Wound closure is determined by daily measurement on days 1-5 and on day 8. Wounds are measured horizontally and vertically using a calibrated Jameson caliper. Wounds are considered healed if granulation tissue is no longer visible and the wound is covered by a continuous epithelium.

[1114] An agonist or antagonist of the invention is administered using at a range different doses, from 4 mg to 500 mg per wound per day for 8 days in vehicle. Vehicle control groups received 50 mL of vehicle solution.

[1115] Animals are euthanized on day 8 with an intraperitoneal injection of sodium pentobarbital (300 mg/kg). The wounds and surrounding skin are then harvested for histology and immunohistochemistry. Tissue specimens are placed in 10% neutral buffered formalin in tissue cassettes between biopsy sponges for further processing.

[1116] Three groups of 10 animals each (5 diabetic and 5 non-diabetic controls) are evaluated: 1) Vehicle placebo control, 2) untreated group, and 3) treated group.

[1117] Wound closure is analyzed by measuring the area in the vertical and horizontal axis and obtaining the total square area of the wound. Contraction is then estimated by establishing the differences between the initial wound area (day 0) and that of post treatment (day 8). The wound area on day 1 is 64 mm², the corresponding size of the dermal punch. Calculations are made using the following formula:

[Open area on day8]−[Open area on day 1]/[Open area on day 1]

[1118] Specimens are fixed in 10% buffered formalin and paraffin embedded blocks are sectioned perpendicular to the wound surface (5 mm) and cut using a Reichert-Jung microtome. Routine hematoxylin-eosin (H&E) staining is performed on cross-sections of bisected wounds. Histologic examination of the wounds are used to assess whether the healing process and the morphologic appearance of the repaired skin is altered by treatment with an agonist or antagonist of the invention. This assessment included verification of the presence of cell accumulation, inflammatory cells, capillaries, fibroblasts, re-epithelialization and epidermal maturity (Greenhalgh, D. G. et al., Am. J. Pathol. 136:1235 (1990)). A calibrated lens micrometer is used by a blinded observer.

[1119] Tissue sections are also stained immunohistochemically with a polyclonal rabbit anti-human keratin antibody using ABC Elite detection system. Human skin is used as a positive tissue control while non-immune IgG is used as a negative control. Keratinocyte growth is determined by evaluating the extent of reepithelialization of the wound using a calibrated lens micrometer.

[1120] Proliferating cell nuclear antigen/cyclin (PCNA) in skin specimens is demonstrated by using anti-PCNA antibody (1:50) with an ABC Elite detection system. Human colon cancer served as a positive tissue control and human brain tissue is used as a negative tissue control. Each specimen included a section with omission of the primary antibody and substitution with non-immune mouse IgG. Ranking of these sections is based on the extent of proliferation on a scale of 0-8, the lower side of the scale reflecting slight proliferation to the higher side reflecting intense proliferation.

[1121] Experimental data are analyzed using an unpaired t test. A p value of <0.05 is considered significant.

[1122] Steroid Impaired Rat Model

[1123] The inhibition of wound healing by steroids has been well documented in various in vitro and in vivo systems (Wahl, Glucocorticoids and Wound healing. In: Anti-Inflammatory Steroid Action: Basic and Clinical Aspects. 280-302 (1989); Wahlet al., J. Immunol. 115: 476-481 (1975); Werb et al., J. Exp. Med. 147:1684-1694 (1978)). Glucocorticoids retard wound healing by inhibiting angiogenesis, decreasing vascular permeability (Ebert et al., An. Intern. Med. 37:701-705 (1952)), fibroblast proliferation, and collagen synthesis (Beck et al., Growth Factors. 5: 295-304 (1991); Haynes et al., J. Clin. Invest. 61: 703-797 (1978)) and producing a transient reduction of circulating monocytes (Haynes et al., J. Clin. Invest. 61: 703-797 (1978); Wahl, “Glucocorticoids and wound healing”, In: Antiinflammatory Steroid Action: Basic and Clinical Aspects, Academic Press, New York, pp. 280-302 (1989)). The systemic administration of steroids to impaired wound healing is a well establish phenomenon in rats (Beck et al., Growth Factors. 5: 295-304 (1991); Haynes et al., J. Clin. Invest. 61: 703-797 (1978); Wahl, “Glucocorticoids and wound healing”, In: Antiinflammatory Steroid Action: Basic and Clinical Aspects, Academic Press, New York, pp. 280-302 (1989); Pierce et al., Proc. Natl. Acad. Sci. USA 86: 2229-2233 (1989)).

[1124] To demonstrate that an agonist or antagonist of the invention can accelerate the healing process, the effects of multiple topical applications of the agonist or antagonist on full thickness excisional skin wounds in rats in which healing has been impaired by the systemic administration of methylprednisolone is assessed.

[1125] Young adult male Sprague Dawley rats weighing 250-300 g (Charles River Laboratories) are used in this example. The animals are purchased at 8 weeks of age and are 9 weeks old at the beginning of the study. The healing response of rats is impaired by the systemic administration of methylprednisolone (17 mg/kg/rat intramuscularly) at the time of wounding. Animals are individually housed and received food and water ad libitum. All manipulations are performed using aseptic techniques. This study is conducted according to the rules and guidelines of Human Genome Sciences, Inc. Institutional Animal Care and Use Committee and the Guidelines for the Care and Use of Laboratory Animals.

[1126] The wounding protocol is followed according to section A, above. On the day of wounding, animals are anesthetized with an intramuscular injection of ketamine (50 mg/kg) and xylazine (5 mg/kg). The dorsal region of the animal is shaved and the skin washed with 70% ethanol and iodine solutions. The surgical area is dried with sterile gauze prior to wounding. An 8 mm full-thickness wound is created using a Keyes tissue punch. The wounds are left open for the duration of the experiment. Applications of the testing materials are given topically once a day for 7 consecutive days commencing on the day of wounding and subsequent to methylprednisolone administration. Prior to treatment, wounds are gently cleansed with sterile saline and gauze sponges.

[1127] Wounds are visually examined and photographed at a fixed distance at the day of wounding and at the end of treatment. Wound closure is determined by daily measurement on days 1-5 and on day 8. Wounds are measured horizontally and vertically using a calibrated Jameson caliper. Wounds are considered healed if granulation tissue is no longer visible and the wound is covered by a continuous epithelium.

[1128] The agonist or antagonist of the invention is administered using at a range different doses, from 4 mg to 500 mg per wound per day for 8 days in vehicle. Vehicle control groups received 50 mL of vehicle solution.

[1129] Animals are euthanized on day 8 with an intraperitoneal injection of sodium pentobarbital (300 mg/kg). The wounds and surrounding skin are then harvested for histology. Tissue specimens are placed in 10% neutral buffered formalin in tissue cassettes between biopsy sponges for further processing.

[1130] Three groups of 10 animals each (5 with methylprednisolone and 5 without glucocorticoid) are evaluated: 1) Untreated group 2) Vehicle placebo control 3) treated groups.

[1131] Wound closure is analyzed by measuring the area in the vertical and horizontal axis and obtaining the total area of the wound. Closure is then estimated by establishing the differences between the initial wound area (day 0) and that of post treatment (day 8). The wound area on day 1 is 64 mm², the corresponding size of the dermal punch. Calculations are made using the following formula:

[Open area on day8]−[Open area on day 1]/[Open area on day 1]

[1132] Specimens are fixed in 10% buffered formalin and paraffin embedded blocks are sectioned perpendicular to the wound surface (5 mm) and cut using an Olympus microtome. Routine hematoxylin-eosin (H&E) staining is performed on cross-sections of bisected wounds. Histologic examination of the wounds allows assessment of whether the healing process and the morphologic appearance of the repaired skin is improved by treatment with an agonist or antagonist of the invention. A calibrated lens micrometer is used by a blinded observer to determine the distance of the wound gap.

[1133] Experimental data are analyzed using an unpaired t test. A p value of <0.05 is considered significant.

[1134] The studies described in this example tested activity of agonists or antagonists of the invention. However, one skilled in the art could easily modify the exemplified studies to test the activity of polynucleotides or polypeptides of the invention (e.g., gene therapy).

### Example 28: Lymphadema Animal Model

[1135] The purpose of this experimental approach is to create an appropriate and consistent lymphedema model for testing the therapeutic effects of an agonist or antagonist of the invention in lymphangiogenesis and re-establishment of the lymphatic circulatory system in the rat hind limb. Effectiveness is measured by swelling volume of the affected limb, quantification of the amount of lymphatic vasculature, total blood plasma protein, and histopathology. Acute lymphedema is observed for 7-10 days. Perhaps more importantly, the chronic progress of the edema is followed for up to 3-4 weeks.

[1136] Prior to beginning surgery, blood sample is drawn for protein concentration analysis. Male rats weighing approximately ˜350 g are dosed with Pentobarbital. Subsequently, the right legs are shaved from knee to hip. The shaved area is swabbed with gauze soaked in 70% EtOH. Blood is drawn for serum total protein testing. Circumference and volumetric measurements are made prior to injecting dye into paws after marking 2 measurement levels (0.5 cm above heel, at mid-pt of dorsal paw). The intradermal dorsum of both right and left paws are injected with 0.05 ml of 1% Evan's Blue. Circumference and volumetric measurements are then made following injection of dye into paws.

[1137] Using the knee joint as a landmark, a mid-leg inguinal incision is made circumferentially allowing the femoral vessels to be located. Forceps and hemostats are used to dissect and separate the skin flaps. After locating the femoral vessels, the lymphatic vessel that runs along side and underneath the vessel(s) is located. The main lymphatic vessels in this area are then electrically coagulated or suture ligated.

[1138] Using a microscope, muscles in back of the leg (near the semitendinosis and adductors) are bluntly dissected. The popliteal lymph node is then located. The 2 proximal and 2 distal lymphatic vessels and distal blood supply of the popliteal node are then ligated by suturing. The popliteal lymph node, and any accompanying adipose tissue, is then removed by cutting connective tissues.

[1139] Care is taken to control any mild bleeding resulting from this procedure. After lymphatics are occluded, the skin flaps are sealed by using liquid skin (Vetbond) (AJ Buck). The separated skin edges are sealed to the underlying muscle tissue while leaving a gap of ˜0.5 cm around the leg. Skin also may be anchored by suturing to underlying muscle when necessary.

[1140] To avoid infection, animals are housed individually with mesh (no bedding). Recovering animals are checked daily through the optimal edematous peak, which typically occurred by day 5-7. The plateau edematous peak are then observed. To evaluate the intensity of the lymphedema, the circumference and volumes of 2 designated places on each paw before operation and daily for 7 days are measured. The effect of plasma proteins on lymphedema is determined and whether protein analysis is a useful testing perimeter is also investigated. The weights of both control and edematous limbs are evaluated at 2 places. Analysis is performed in a blind manner.

[1141] Circumference Measurements: Under brief gas anesthetic to prevent limb movement, a cloth tape is used to measure limb circumference. Measurements are done at the ankle bone and dorsal paw by 2 different people and those 2 readings are averaged. Readings are taken from both control and edematous limbs.

[1142] Volumetric Measurements: On the day of surgery, animals are anesthetized with Pentobarbital and are tested prior to surgery. For daily volumetrics animals are under brief halothane anesthetic (rapid immobilization and quick recovery), and both legs are shaved and equally marked using waterproof marker on legs. Legs are first dipped in water, then dipped into instrument to each marked level then measured by Buxco edema software(Chen/Victor). Data is recorded by one person, while the other is dipping the limb to marked area.

[1143] Blood-plasma protein measurements: Blood is drawn, spun, and serum separated prior to surgery and then at conclusion for total protein and Ca2⁺ comparison.

[1144] Limb Weight Comparison: After drawing blood, the animal is prepared for tissue collection. The limbs are amputated using a quillitine, then both experimental and control legs are cut at the ligature and weighed. A second weighing is done as the tibio-cacaneal joint is disarticulated and the foot is weighed.

[1145] Histological Preparations: The transverse muscle located behind the knee (popliteal) area is dissected and arranged in a metal mold, filled with freezeGel, dipped into cold methylbutane, placed into labeled sample bags at −80EC until sectioning. Upon sectioning, the muscle is observed under fluorescent microscopy for lymphatics.

[1146] The studies described in this example tested activity of agonists or antagonists of the invention. However, one skilled in the art could easily modify the exemplified studies to test the activity of polynucleotides or polypeptides of the invention (e.g., gene therapy).

### Example 29: Suppression of TNF Alpha-induced Adhesion Molecule Expression by an Agonist or Antagonist of the Invention

[1147] The recruitment of lymphocytes to areas of inflammation and angiogenesis involves specific receptor-ligand interactions between cell surface adhesion molecules (CAMs) on lymphocytes and the vascular endothelium. The adhesion process, in both normal and pathological settings, follows a multi-step cascade that involves intercellular adhesion molecule-1 (ICAM-1), vascular cell adhesion molecule-1 (VCAM-1), and endothelial leukocyte adhesion molecule-1 (E-selectin) expression on endothelial cells (EC). The expression of these molecules and others on the vascular endothelium determines the efficiency with which leukocytes may adhere to the local vasculature and extravasate into the local tissue during the development of an inflammatory response. The local concentration of cytokines and growth factor participate in the modulation of the expression of these CAMs.

[1148] Tumor necrosis factor alpha (TNF-a), a potent proinflammatory cytokine, is a stimulator of all three CAMs on endothelial cells and may be involved in a wide variety of inflammatory responses, often resulting in a pathological outcome.

[1149] The potential of an agonist or antagonist of the invention to mediate a suppression of TNF-a induced CAM expression can be examined. A modified ELISA assay which uses ECs as a solid phase absorbent is employed to measure the amount of CAM expression on TNF-a treated ECs when co-stimulated with a member of the FGF family of proteins.

[1150] To perform the experiment, human umbilical vein endothelial cell (HUVEC) cultures are obtained from pooled cord harvests and maintained in growth medium (EGM-2; Clonetics, San Diego, Calif.) supplemented with 10% FCS and 1% penicillin/streptomycin in a 37 degree C. humidified incubator containing 5% CO₂. HUVECs are seeded in 96-well plates at concentrations of 1×10⁴ cells/well in EGM medium at 37 degree C. for 18-24 hrs or until confluent. The monolayers are subsequently washed 3 times with a serum-free solution of RPMI-1640 supplemented with 100 U/ml penicillin and 100 mg/ml streptomycin, and treated with a given cytokine and/or growth factor(s) for 24 h at 37 degree C. Following incubation, the cells are then evaluated for CAM expression.

[1151] Human Umbilical Vein Endothelial cells (HUVECs) are grown in a standard 96 well plate to confluence. Growth medium is removed from the cells and replaced with 90 ul of 199 Medium (10% FBS). Samples for testing and positive or negative controls are added to the plate in triplicate (in 10 ul volumes). Plates are incubated at 37 degree C. for either 5 h (selectin and integrin expression) or 24 h (integrin expression only). Plates are aspirated to remove medium and 100 μl of 0.1% paraformaldehyde-PBS(with Ca++ and Mg++) is added to each well. Plates are held at 4° C. for 30 min.

[1152] Fixative is then removed from the wells and wells are washed 1× with PBS(+Ca,Mg)+0.5% BSA and drained. Do not allow the wells to dry. Add 10 μl of diluted primary antibody to the test and control wells. Anti-ICAM-1-Biotin, Anti-VCAM-1-Biotin and Anti-E-selectin-Biotin are used at a concentration of 10 μg/ml (1:10 dilution of 0.1 mg/ml stock antibody). Cells are incubated at 37° C. for 30 min. in a humidified environment. Wells are washed X3 with PBS(+Ca,Mg)+0.5% BSA.

[1153] Then add 20 μl of diluted ExtrAvidin-Alkaline Phosphotase (1:5,000 dilution) to each well and incubated at 37° C. for 30 min. Wells are washed X3 with PBS(+Ca,Mg)+0.5% BSA. 1 tablet of p-Nitrophenol Phosphate pNPP is dissolved in 5 ml of glycine buffer (pH 10.4). 100 μl of pNPP substrate in glycine buffer is added to each test well. Standard wells in triplicate are prepared from the working dilution of the ExtrAvidin-Alkaline Phosphotase in glycine buffer: 1:5,000 (10⁰)>10^{-0.05}>10⁻¹>10^{-1.5}. 5 μl of each dilution is added to triplicate wells and the resulting AP content in each well is 5.50 ng, 1.74 ng, 0.55 ng, 0.18 ng. 100 μl of pNNP reagent must then be added to each of the standard wells. The plate must be incubated at 37° C. for 4 h. A volume of 50 μl of 3M NaOH is added to all wells. The results are quantified on a plate reader at 405 nm. The background subtraction option is used on blank wells filled with glycine buffer only. The template is set up to indicate the concentration of AP-conjugate in each standard well [5.50 ng; 1.74 ng; 0.55 ng; 0.18 ng]. Results are indicated as amount of bound AP-conjugate in each sample.

[1154] The studies described in this example tested activity of agonists or antagonists of the invention. However, one skilled in the art could easily modify the exemplified studies to test the activity of polynucleotides or polypeptides of the invention (e.g., gene therapy).

### Example 30: Production Of Polypeptide of the Invention For High-Throughput Screening Assays

[1155] The following protocol produces a supernatant containing polypeptide of the present invention to be tested. This supernatant can then be used in the Screening Assays described in Examples 32-41.

[1156] First, dilute Poly-D-Lysine (644 587 Boehringer-Mannheim) stock solution (1 mg/ml in PBS) 1:20 in PBS (w/o calcium or magnesium 17-516F Biowhittaker) for a working solution of 50 ug/ml. Add 200 ul of this solution to each well (24 well plates) and incubate at RT for 20 minutes. Be sure to distribute the solution over each well (note: a 12-channel pipetter may be used with tips on every other channel). Aspirate off the Poly-D-Lysine solution and rinse with 1 ml PBS (Phosphate Buffered Saline). The PBS should remain in the well until just prior to plating the cells and plates may be poly-lysine coated in advance for up to two weeks.

[1157] Plate 293T cells (do not carry cells past P+20) at 2×10⁵ cells/well in 0.5 ml DMEM(Dulbecco's Modified Eagle Medium)(with 4.5 G/L glucose and L-glutamine (12-604F Biowhittaker))/10% heat inactivated FBS(14-503F Biowhittaker)/1× Penstrep(17-602E Biowhittaker). Let the cells grow overnight.

[1158] The next day, mix together in a sterile solution basin: 300 ul Lipofectamine (18324-012 Gibco/BRL) and 5 ml Optimem I (31985070 Gibco/BRL)/96-well plate. With a small volume multi-channel pipetter, aliquot approximately 2 ug of an expression vector containing a polynucleotide insert, produced by the methods described in Examples 8-10, into an appropriately labeled 96-well round bottom plate. With a multi-channel pipetter, add 50 ul of the Lipofectamine/Optimem I mixture to each well. Pipette up and down gently to mix. Incubate at RT 15-45 minutes. After about 20 minutes, use a multi-channel pipetter to add 150 ul Optimem I to each well. As a control, one plate of vector DNA lacking an insert should be transfected with each set of transfections.

[1159] Preferably, the transfection should be performed by tag-teaming the following tasks. By tag-teaming, hands on time is cut in half, and the cells do not spend too much time on PBS. First, person A aspirates off the media from four 24-well plates of cells, and then person B rinses each well with 0.5-1 ml PBS. Person A then aspirates off PBS rinse, and person B, using a 12-channel pipetter with tips on every other channel, adds the 200 ul of DNA/Lipofectamine/Optimem I complex to the odd wells first, then to the even wells, to each row on the 24-well plates. Incubate at 37 degree C. for 6 hours.

[1160] While cells are incubating, prepare appropriate media, either 1% BSA in DMEM with 1× penstrep, or HGS CHO-5 media (116.6 mg/L of CaCl2 (anhyd); 0.00130 mg/L CuSO₄-5H₂O; 0.050 mg/L of Fe(NO₃)₃-9H₂O; 0.417 mg/L of FeSO₄-7H₂O; 311.80 mg/L of Kcl; 28.64 mg/L of MgCl₂; 48.84 mg/L of MgSO₄; 6995.50 mg/L of NaCl; 2400.0 mg/L of NaHCO₃; 62.50 mg/L of NaH₂PO₄-H₂; 71.02 mg/L of Na₂HPO4; 0.4320 mg/L of ZnSO₄-7H₂O; 0.002 mg/L of Arachidonic Acid; 1.022 mg/L of Cholesterol; 0.070 mg/L of DL-alpha-Tocopherol-Acetate; 0.0520 mg/L of Linoleic Acid; 0.010 mg/L of Linolenic Acid; 0.010 mg/L of Myristic Acid; 0.010 mg/L of Oleic Acid; 0.010 mg/L of Palmitric Acid; 0.010 mg/L of Palmitic Acid; 100 mg/L of Pluronic F-68; 0.010 mg/L of Stearic Acid; 2.20 mg/L of Tween 80; 4551 mg/L of D-Glucose; 130.85 mg/ml of L-Alanine; 147.50 mg/ml of L-Arginine-HCL; 7.50 mg/ml of L-Asparagine-H₂0; 6.65 mg/ml of L-Aspartic Acid; 29.56 mg/ml of L-Cystine-2HCL-H₂0; 31.29 mg/ml of L-Cystine-2HCL; 7.35 mg/ml of L-Glutamic Acid; 365.0 mg/ml of L-Glutamine; 18.75 mg/ml of Glycine; 52.48 mg/ml of L-Histidine-HCL-H₂0; 106.97 mg/ml of L-Isoleucine; 111.45 mg/ml of L-Leucine; 163.75 mg/ml of L-Lysine HCL; 32.34 mg/ml of L-Methionine; 68.48 mg/ml of L-Phenylalainine; 40.0 mg/ml of L-Proline; 26.25 mg/ml of L-Serine; 101.05 mg/ml of L-Threonine; 19.22 mg/ml of L-Tryptophan; 91.79 mg/ml of L-Tryrosine-2Na-2H₂0; and 99.65 mg/ml of L-Valine; 0.0035 mg/L of Biotin; 3.24 mg/L of D-Ca Pantothenate; 11.78 mg/L of Choline Chloride; 4.65 mg/L of Folic Acid; 15.60 mg/L of i-Inositol; 3.02 mg/L of Niacinamide; 3.00 mg/L of Pyridoxal HCL; 0.031 mg/L of Pyridoxine HCL; 0.319 mg/L of Riboflavin; 3.17 mg/L of Thiamine HCL; 0.365 mg/L of Thymidine; 0.680 mg/L of Vitamin B₁₂; 25 mM of HEPES Buffer; 2.39 mg/L of Na Hypoxanthine; 0.105 mg/L of Lipoic Acid; 0.081 mg/L of Sodium Putrescine-2HCL; 55.0 mg/L of Sodium Pyruvate; 0.0067 mg/L of Sodium Selenite; 20 uM of Ethanolamine; 0.122 mg/L of Ferric Citrate; 41.70 mg/L of Methyl-B-Cyclodextrin complexed with Linoleic Acid; 33.33 mg/L of Methyl-B-Cyclodextrin complexed with Oleic Acid; 10 mg/L of Methyl-B-Cyclodextrin complexed with Retinal Acetate. Adjust osmolarity to 327 mOsm) with 2 mm glutamine and 1× penstrep. (BSA (81-068-3 Bayer) 100 gm dissolved in 1 L DMEM for a 10% BSA stock solution). Filter the media and collect 50 ul for endotoxin assay in 15 ml polystyrene conical.

[1161] The transfection reaction is terminated, preferably by tag-teaming, at the end of the incubation period. Person A aspirates off the transfection media, while person B adds 1.5 ml appropriate media to each well. Incubate at 37 degree C. for 45 or 72 hours depending on the media used: 1% BSA for 45 hours or CHO-5 for 72 hours.

[1162] On day four, using a 300 ul multichannel pipetter, aliquot 600 ul in one 1 ml deep well plate and the remaining supernatant into a 2 ml deep well. The supernatants from each well can then be used in the assays described in Examples 32-39.

[1163] It is specifically understood that when activity is obtained in any of the assays described below using a supernatant, the activity originates from either the polypeptide of the present invention directly (e.g., as a secreted protein) or by polypeptide of the present invention inducing expression of other proteins, which are then secreted into the supernatant. Thus, the invention further provides a method of identifying the protein in the supernatant characterized by an activity in a particular assay.

### Example 31: Construction of GAS Reporter Construct

[1164] One signal transduction pathway involved in the differentiation and proliferation of cells is called the Jaks-STATs pathway. Activated proteins in the Jaks-STATs pathway bind to gamma activation site “GAS” elements or interferon-sensitive responsive element (“ISRE”), located in the promoter of many genes. The binding of a protein to these elements alter the expression of the associated gene.

[1165] GAS and ISRE elements are recognized by a class of transcription factors called Signal Transducers and Activators of Transcription, or “STATs.” There are six members of the STATs family. Stat1 and Stat3 are present in many cell types, as is Stat2 (as response to IFN-alpha is widespread). Stat4 is more restricted and is not in many cell types though it has been found in T helper class I, cells after treatment with IL-12. Stat5 was originally called mammary growth factor, but has been found at higher concentrations in other cells including myeloid cells. It can be activated in tissue culture cells by many cytokines.

[1166] The STATs are activated to translocate from the cytoplasm to the nucleus upon tyrosine phosphorylation by a set of kinases known as the Janus Kinase (“Jaks”) family. Jaks represent a distinct family of soluble tyrosine kinases and include Tyk2, Jak1, Jak2, and Jak3. These kinases display significant sequence similarity and are generally catalytically inactive in resting cells.

[1167] The Jaks are activated by a wide range of receptors summarized in the Table below. (Adapted from review by Schidler and Darnell, Ann. Rev. Biochem. 64:621-51 (1995)). A cytokine receptor family, capable of activating Jaks, is divided into two groups: (a) Class 1 includes receptors for IL-2, IL-3, IL-4, IL-6, IL-7, IL-9, IL-11, IL-12, IL-15, Epo, PRL, GH, G-CSF, GM-CSF, LIF, CNTF, and thrombopoietin; and (b) Class 2 includes IFN-a, IFN-g, and IL-10. The Class 1 receptors share a conserved cysteine motif (a set of four conserved cysteines and one tryptophan) and a WSXWS motif (a membrane proximal region encoding Trp-Ser-Xaa-Trp-Ser (SEQ ID NO: 2)).

[1168] Thus, on binding of a ligand to a receptor, Jaks are activated, which in turn activate STATs, which then translocate and bind to GAS elements. This entire process is encompassed in the Jaks-STATs signal transduction pathway. Therefore, activation of the Jaks-STATs pathway, reflected by the binding of the GAS or the ISRE element, can be used to indicate proteins involved in the proliferation and differentiation of cells. For example, growth factors and cytokines are known to activate the Jaks-STATs pathway (See Table below). Thus, by using GAS elements linked to reporter molecules, activators of the Jaks-STATs pathway can be identified.

| | JAKs | | | | | |
|---|---|---|---|---|---|---|
| Ligand | tyk2 | Jak1 | Jak2 | Jak3 | STATS | GAS (elements) or ISRE |

IFN family

| | | | | | | |
|---|---|---|---|---|---|---|
| IFN-a/B | + | + | − | − | 1, 2, 3 | ISRE |
| IFN-g | | + | + | − | 1 | GAS (IRF1 > Lys6 > IFP) |
| Il-10 | + | ? | ? | − | 1, 3 | |

gp130 family

| | | | | | | |
|---|---|---|---|---|---|---|
| IL-6 (Pleiotropic) | + | + | + | ? | 1, 3 | GAS (IRF1 > Lys6 > IFP) |
| Il-11 (Pleiotropic) | ? | + | ? | ? | 1, 3 | |
| OnM (Pleiotropic) | ? | + | + | ? | 1, 3 | |
| LIF (Pleiotropic) | ? | + | + | ? | 1, 3 | |
| CNTF (Pleiotropic) | −/+ | + | + | ? | 1, 3 | |
| G-CSF (Pleiotropic) | ? | + | ? | ? | 1, 3 | |
| IL-12 (Pleiotropic) | + | − | + | + | 1, 3 | |

g-C family

| | | | | | | |
|---|---|---|---|---|---|---|
| IL-2 (lymphocytes) | − | + | − | + | 1, 3, 5 | GAS |
| IL-4 (lymph/myeloid) | − | + | − | + | 6 | GAS (IRF1 = IFP >> Ly6)(IgH) |
| IL-7 (lymphocytes) | − | + | − | + | 5 | GAS |
| IL-9 (lymphocytes) | − | + | − | + | 5 | GAS |
| IL-13 (lymphocyte) | − | + | ? | ? | 6 | GAS |
| IL-15 | ? | + | ? | + | 5 | GAS |

gp140 family

| | | | | | | |
|---|---|---|---|---|---|---|
| IL-3 (mycloid) | − | − | + | − | 5 | GAS (IRF1 > IFP >> Ly6) |
| IL-5 (myeloid) | − | − | + | − | 5 | GAS |
| GM-CSF (myeloid) | − | − | + | − | 5 | GAS |

Growth hormone family

| | | | | | | |
|---|---|---|---|---|---|---|
| GH | ? | − | + | − | 5 | |
| PRL | ? | +/− | + | − | 1, 3, 5 | |
| EPO | ? | − | + | − | 5 | GAS (B-CAS > IRF1 = IFP >> Ly6) |

Receptor Tyrosine Kinases

| | | | | | | |
|---|---|---|---|---|---|---|
| EGF | ? | + | + | − | 1, 3 | GAS (IRF1) |
| PDGF | ? | + | + | − | 1, 3 | |
| CSF-1 | ? | + | + | − | 1, 3 | GAS (not IRF1) |

[1169] To construct a synthetic GAS containing promoter element, which is used in the Biological Assays described in Examples 32-33, a PCR based strategy is employed to generate a GAS-SV40 promoter sequence. The 5′ primer contains four tandem copies of the GAS binding site found in the IRF1 promoter and previously demonstrated to bind STATs upon induction with a range of cytokines (Rothman et al., Immunity 1:457-468 (1994).), although other GAS or ISRE elements can be used instead. The 5′ primer also contains 18 bp of sequence complementary to the SV40 early promoter sequence and is flanked with an XhoI site. The sequence of the 5′ primer is:

| | |
|---|---|
| 5′:GCGCCTCGAGATTTCCCCGAAATCTAGATT | (SEQ ID NO: 3) |
| TCCCCGAATGATTTCCCCGAAATGATTTCCCCG | |
| AAATATCTGCCATCTCAATTAG:3′ | |

[1170] The downstream primer is complementary to the SV40 promoter and is flanked with a Hind III site: 5′:GCGGCAAGCTTTTTGCAAAGCCTAGGC:3′ (SEQ ID NO:4)

[1171] PCR amplification is performed using the SV40 promoter template present in the B-gal:promoter plasmid obtained from Clontech. The resulting PCR fragment is digested with XhoI/Hind III and subcloned into BLSK2-. (Stratagene.) Sequencing with forward and reverse primers confirms that the insert contains the following sequence:

| | |
|---|---|
| 5′:CTCGAGATTTCCCCGAAATCTAGATTTCCCCGA | (SEQ ID NO: 5) |
| AATGATTTCCCCGAAATGATTTCCCCGAAATATCTG | |
| CCATCTCAATTAGTCAGCAACCATAGTCCCGCCCCT | |
| AACTCCGCCCATCCCGCCCCTAACTCCGCCCAGTTC | |
| CGCCCATTCTCCGCCCCATGGCTGACTAATTTTTTT | |
| TATTTATGCAGAGGCCGAGGCCGCCTCGGCCTCTGA | |
| GCTATTCCAGAAGTAGTGAGGAGGCTTTTTTGGAGG | |
| CCTAGGCTTTTGCAAAAAGCTT:3′ | |

[1172] With this GAS promoter element linked to the SV40 promoter, a GAS:SEAP2 reporter construct is next engineered. Here, the reporter molecule is a secreted alkaline phosphatase, or “SEAP.” Clearly, however, any reporter molecule can be instead of SEAP, in this or in any of the other Examples. Well known reporter molecules that can be used instead of SEAP include chloramphenicol acetyltransferase (CAT), luciferase, alkaline phosphatase, B-galactosidase, green fluorescent protein (GFP), or any protein detectable by an antibody.

[1173] The above sequence confirmed synthetic GAS-SV40 promoter element is subcloned into the pSEAP-Promoter vector obtained from Clontech using HindIII and XhoI, effectively replacing the SV40 promoter with the amplified GAS:SV40 promoter element, to create the GAS-SEAP vector. However, this vector does not contain a neomycin resistance gene, and therefore, is not preferred for mammalian expression systems.

[1174] Thus, in order to generate mammalian stable cell lines expressing the GAS-SEAP reporter, the GAS-SEAP cassette is removed from the GAS-SEAP vector using SalI and NotI, and inserted into a backbone vector containing the neomycin resistance gene, such as pGFP-1 (Clontech), using these restriction sites in the multiple cloning site, to create the GAS-SEAP/Neo vector. Once this vector is transfected into mammalian cells, this vector can then be used as a reporter molecule for GAS binding as described in Examples 32-33.

[1175] Other constructs can be made using the above description and replacing GAS with a different promoter sequence. For example, construction of reporter molecules containing EGR and NF-KB promoter sequences are described in Examples 34 and 35. However, many other promoters can be substituted using the protocols described in these Examples. For instance, SRE, IL-2, NFAT, or Osteocalcin promoters can be substituted, alone or in combination (e.g., GAS/NF-KB/EGR, GAS/NF-KB, I1-2/NFAT, or NF-KB/GAS). Similarly, other cell lines can be used to test reporter construct activity, such as HELA (epithelial), HUVEC (endothelial), Reh (B-cell), Saos-2 (osteoblast), HUVAC (aortic), or Cardiomyocyte.

### Example 32: High-Throughput Screening Assay for T-cell Activity

[1176] The following protocol is used to assess T-cell activity by identifying factors, and determining whether supermate containing a polypeptide of the invention proliferates and/or differentiates T-cells. T-cell activity is assessed using the GAS/SEAP/Neo construct produced in Example 31. Thus, factors that increase SEAP activity indicate the ability to activate the Jaks-STATS signal transduction pathway. The T-cell used in this assay is Jurkat T-cells (ATCC Accession No. TIB-152), although Molt-3 cells (ATCC Accession No. CRL-1552) and Molt-4 cells (ATCC Accession No. CRL-1582) cells can also be used.

[1177] Jurkat T-cells are lymphoblastic CD4+ Th1 helper cells. In order to generate stable cell lines, approximately 2 million Jurkat cells are transfected with the GAS-SEAP/neo vector using DMRIE-C (Life Technologies)(transfection procedure described below). The transfected cells are seeded to a density of approximately 20,000 cells per well and transfectants resistant to 1 mg/ml genticin selected. Resistant colonies are expanded and then tested for their response to increasing concentrations of interferon gamma. The dose response of a selected clone is demonstrated.

[1178] Specifically, the following protocol will yield sufficient cells for 75 wells containing 200 ul of cells. Thus, it is either scaled up, or performed in multiple to generate sufficient cells for multiple 96 well plates. Jurkat cells are maintained in RPMI+10% serum with 1% Pen-Strep. Combine 2.5 mls of OPTI-MEM (Life Technologies) with 10 ug of plasmid DNA in a T25 flask. Add 2.5 ml OPTI-MEM containing 50 ul of DMRIE-C and incubate at room temperature for 15-45 mins.

[1179] During the incubation period, count cell concentration, spin down the required number of cells (10⁷ per transfection), and resuspend in OPTI-MEM to a final concentration of 10⁷ cells/ml. Then add 1 ml of 1×10⁷ cells in OPTI-MEM to T25 flask and incubate at 37 degree C. for 6 hrs. After the incubation, add 10 ml of RPMI+15% serum.

[1180] The Jurkat:GAS-SEAP stable reporter lines are maintained in RPMI+10% serum, 1 mg/ml Genticin, and 1% Pen-Strep. These cells are treated with supernatants containing polypeptide of the present invention or polypeptide of the present invention induced polypeptides as produced by the protocol described in Example 30.

[1181] On the day of treatment with the supernatant, the cells should be washed and resuspended in fresh RPMI+10% serum to a density of 500,000 cells per ml. The exact number of cells required will depend on the number of supernatants being screened. For one 96 well plate, approximately 10 million cells (for 10 plates, 100 million cells) are required.

[1182] Transfer the cells to a triangular reservoir boat, in order to dispense the cells into a 96 well dish, using a 12 channel pipette. Using a 12 channel pipette, transfer 200 ul of cells into each well (therefore adding 100,000 cells per well).

[1183] After all the plates have been seeded, 50 ul of the supernatants are transferred directly from the 96 well plate containing the supernatants into each well using a 12 channel pipette. In addition, a dose of exogenous interferon gamma (0.1, 1.0, 10 ng) is added to wells H9, H10, and H 11 to serve as additional positive controls for the assay.

[1184] The 96 well dishes containing Jurkat cells treated with supernatants are placed in an incubator for 48 hrs (note: this time is variable between 48-72 hrs). 35 ul samples from each well are then transferred to an opaque 96 well plate using a 12 channel pipette. The opaque plates should be covered (using sellophene covers) and stored at −20 degree C. until SEAP assays are performed according to Example 36. The plates containing the remaining treated cells are placed at 4 degree C. and serve as a source of material for repeating the assay on a specific well if desired.

[1185] As a positive control, 100 Unit/ml interferon gamma can be used which is known to activate Jurkat T cells. Over 30 fold induction is typically observed in the positive control wells.

[1186] The above protocol may be used in the generation of both transient, as well as, stable transfected cells, which would be apparent to those of skill in the art.

### Example 33: High-Throughput Screening Assay Identifying Myeloid Activity

[1187] The following protocol is used to assess myeloid activity of polypeptide of the present invention by determining whether polypeptide of the present invention proliferates and/or differentiates myeloid cells. Myeloid cell activity is assessed using the GAS/SEAP/Neo construct produced in Example 31. Thus, factors that increase SEAP activity indicate the ability to activate the Jaks-STATS signal transduction pathway. The myeloid cell used in this assay is U937, a pre-monocyte cell line, although TF-1, HL60, or KG1 can be used.

[1188] To transiently transfect U937 cells with the GAS/SEAP/Neo construct produced in Example 31, a DEAE-Dextran method (Kharbanda et. al., 1994, Cell Growth & Differentiation, 5:259-265) is used. First, harvest 2×10⁷ U937 cells and wash with PBS. The U937 cells are usually grown in RPMI 1640 medium containing 10% heat-inactivated fetal bovine serum (FBS) supplemented with 100 units/ml penicillin and 100 mg/ml streptomycin.

[1189] Next, suspend the cells in 1 ml of 20 mM Tris-HCl (pH 7.4) buffer containing 0.5 mg/ml DEAE-Dextran, 8 ug GAS-SEAP2 plasmid DNA, 140 mM NaCl, 5 mM KCl, 375 uM Na₂HPO₄.7H₂O, 1 mM MgCl₂, and 675 uM CaCl₂. Incubate at 37 degrees C. for 45 min.

[1190] Wash the cells with RPMI 1640 medium containing 10% FBS and then resuspend in 10 ml complete medium and incubate at 37 degree C. for 36 hr.

[1191] The GAS-SEAPIU937 stable cells are obtained by growing the cells in 400 ug/ml G418. The G418-free medium is used for routine growth but every one to two months, the cells should be re-grown in 400 ug/ml G418 for couple of passages.

[1192] These cells are tested by harvesting 1×10⁸ cells (this is enough for ten 96-well plates assay) and wash with PBS. Suspend the cells in 200 ml above described growth medium, with a final density of 5×10⁵ cells/ml. Plate 200 ul cells per well in the 96-well plate (or 1×10⁵ cells/well).

[1193] Add 50 ul of the supernatant prepared by the protocol described in Example 30. Incubate at 37 degree C. for 48 to 72 hr. As a positive control, 100 Unit/ml interferon gamma can be used which is known to activate U937 cells. Over 30 fold induction is typically observed in the positive control wells. SEAP assay the supernatant according to the protocol described in Example 36.

### Example 34: High-Throughput Screening Assay Identifying Neuronal Activity

[1194] When cells undergo differentiation and proliferation, a group of genes are activated through many different signal transduction pathways. One of these genes, EGR1 (early growth response gene 1), is induced in various tissues and cell types upon activation. The promoter of EGR1 is responsible for such induction. Using the EGR1 promoter linked to reporter molecules, activation of cells can be assessed by polypeptide of the present invention.

[1195] Particularly, the following protocol is used to assess neuronal activity in PC12 cell lines. PC12 cells (rat phenochromocytoma cells) are known to proliferate and/or differentiate by activation with a number of mitogens, such as TPA (tetradecanoyl phorbol acetate), NGF (nerve growth factor), and EGF (epidermal growth factor). The EGR1 gene expression is activated during this treatment. Thus, by stably transfecting PC12 cells with a construct containing an EGR promoter linked to SEAP reporter, activation of PC 12 cells by polypeptide of the present invention can be assessed.

[1196] The EGR/SEAP reporter construct can be assembled by the following protocol. The EGR-1 promoter sequence (−633 to +1)(Sakamoto K et al., Oncogene 6:867-871 (1991)) can be PCR amplified from human genomic DNA using the following primers:

| | |
|---|---|
| 5′GCGCTCGAGGGATGACAGCGATAGAACCCCGG-3′ | (SEQ ID |
| | NO: 6) |
| 5′GCGAAGCTTCGCGACTCCCCGGATCCGCCTC-3′ | (SEQ ID |
| | NO: 7) |

[1197] Using the GAS:SEAP/Neo vector produced in Example 31, EGR1 amplified product can then be inserted into this vector. Linearize the GAS:SEAP/Neo vector using restriction enzymes XhoI/HindIII, removing the GAS/SV40 stuffer. Restrict the EGR1 amplified product with these same enzymes. Ligate the vector and the EGR1 promoter.

[1198] To prepare 96 well-plates for cell culture, two mls of a coating solution (1:30 dilution of collagen type I (Upstate Biotech Inc. Cat#08-115) in 30% ethanol (filter sterilized)) is added per one 10 cm plate or 50 ml per well of the 96-well plate, and allowed to air dry for 2 hr.

[1199] PC12 cells are routinely grown in RPMI-1640 medium (Bio Whittaker) containing 10% horse serum (JRH BIOSCIENCES, Cat. #12449-78P), 5% heat-inactivated fetal bovine serum (FBS) supplemented with 100 units/ml penicillin and 100 ug/ml streptomycin on a precoated 10 cm tissue culture dish. One to four split is done every three to four days. Cells are removed from the plates by scraping and resuspended with pipetting up and down for more than 15 times.

[1200] Transfect the EGR/SEAP/Neo construct into PC12 using the Lipofectamine protocol described in Example 30. EGR-SEAP/PC12 stable cells are obtained by growing the cells in 300 ug/ml G418. The G418-free medium is used for routine growth but every one to two months, the cells should be re-grown in 300 ug/ml G418 for couple of passages.

[1201] To assay for neuronal activity, a 10 cm plate with cells around 70 to 80% confluent is screened by removing the old medium. Wash the cells once with PBS (Phosphate buffered saline). Then starve the cells in low serum medium (RPMI-1640 containing 1% horse serum and 0.5% FBS with antibiotics) overnight.

[1202] The next morning, remove the medium and wash the cells with PBS. Scrape off the cells from the plate, suspend the cells well in 2 ml low serum medium. Count the cell number and add more low serum medium to reach final cell density as 5×10⁵ cells/ml.

[1203] Add 200 ul of the cell suspension to each well of 96-well plate (equivalent to 1×10⁵ cells/well). Add 50 ul supernatant produced by Example 30, 37 degree C. for 48 to 72 hr. As a positive control, a growth factor known to activate PC12 cells through EGR can be used, such as 50 ng/ul of Neuronal Growth Factor (NGF). Over fifty-fold induction of SEAP is typically seen in the positive control wells. SEAP assay the supernatant according to Example 36.

### Example 35: High-Throughput Screening Assay for T-cell Activity

[1204] NF-KB (Nuclear Factor KB) is a transcription factor activated by a wide variety of agents including the inflammatory cytokines IL-1 and TNF, CD30 and CD40, lymphotoxin-alpha and lymphotoxin-beta, by exposure to LPS or thrombin, and by expression of certain viral gene products. As a transcription factor, NF-KB regulates the expression of genes involved in immune cell activation, control of apoptosis (NF-KB appears to shield cells from apoptosis), B and T-cell development, anti-viral and antimicrobial responses, and multiple stress responses.

[1205] In non-stimulated conditions, NF-KB is retained in the cytoplasm with I-KB (Inhibitor KB). However, upon stimulation, I-KB is phosphorylated and degraded, causing NF-KB to shuttle to the nucleus, thereby activating transcription of target genes. Target genes activated by NF-KB include IL-2, IL-6, GM-CSF, ICAM-1 and class 1 MHC.

[1206] Due to its central role and ability to respond to a range of stimuli, reporter constructs utilizing the NF-KB promoter element are used to screen the supernatants produced in Example 30. Activators or inhibitors of NF-KB would be useful in treating, preventing, and/or diagnosing diseases. For example, inhibitors of NF-KB could be used to treat those diseases related to the acute or chronic activation of NF-KB, such as rheumatoid arthritis.

[1207] To construct a vector containing the NF-KB promoter element, a PCR based strategy is employed. The upstream primer contains four tandem copies of the NF-KB binding site (GGGGACTTTCCC) (SEQ ID NO:8), 18 bp of sequence complementary to the 5′ end of the SV40 early promoter sequence, and is flanked with an XhoI site:

| | |
|---|---|
| 5′:GCGGCCTCGAGGGGACTTTCCCGGGGACTTTC | (SEQ ID NO: 9) |
| CCGGGGACTTTCCGGGGACTTTCCATCCTGCCATC | |
| TCAATTAG:3′ | |

[1208] The downstream primer is complementary to the 3′ end of the SV40 promoter and is flanked with a Hind III site:

| | |
|---|---|
| 5′:GCGGCAAGCTTTTTGCAAAGCCTAGGC:3′ | (SEQ ID NO: 4) |

[1209] PCR amplification is performed using the SV40 promoter template present in the pB-gal:promoter plasmid obtained from Clontech. The resulting PCR fragment is digested with XhoI and Hind III and subcloned into BLSK2-. (Stratagene) Sequencing with the T7 and T3 primers confirms the insert contains the following sequence:

| | |
|---|---|
| 5′:CTCGAGGGGACTTTCCCGGGGACTTTCCGGG | (SEQ ID NO: 10) |
| GACTTTCCGGGACTTTCCATCTGCCATCTCAATT | |
| AGTCAGCAACCATAGTCCCGCCCCTAACTCCGCC | |
| CATCCCGCCCCTAACTCCGCCCAGTTCCGCCCAT | |
| TCTCCGCCCCATGGCTGACTAATTTTTTTTATTT | |
| ATGCAGAGGCCGAGGCCGCCTCGGCCTCTGAGCT | |
| ATTCCAGAAGTAGTGAGGAGGCTTTTTTGGAGGC | |
| CTAGGCTTTTGCAAAAAGCTT:3′ | |

[1210] Next, replace the SV40 minimal promoter element present in the pSEAP2-promoter plasmid (Clontech) with this NF-KB/SV40 fragment using XhoI and HindIII. However, this vector does not contain a neomycin resistance gene, and therefore, is not preferred for mammalian expression systems.

[1211] In order to generate stable mammalian cell lines, the NF-KB/SV40/SEAP cassette is removed from the above NF-KB/SEAP vector using restriction enzymes SalI and NotI, and inserted into a vector containing neomycin resistance. Particularly, the NF-KB/SV40/SEAP cassette was inserted into pGFP-1 (Clontech), replacing the GFP gene, after restricting pGFP-1 with SalI and NotI.

[1212] Once NF-KB/SV40/SEAP/Neo vector is created, stable Jurkat T-cells are created and maintained according to the protocol described in Example 32. Similarly, the method for assaying supernatants with these stable Jurkat T-cells is also described in Example 32. As a positive control, exogenous TNF alpha (0.1,1, 10 ng) is added to wells H9, H10, and H11, with a 5-10 fold activation typically observed.

### Example 36: Assay for SEAP Activity

[1213] As a reporter molecule for the assays described in Examples 32-35, SEAP activity is assayed using the Tropix Phospho-light Kit (Cat. BP-400) according to the following general procedure. The Tropix Phospho-light Kit supplies the Dilution, Assay, and Reaction Buffers used below.

[1214] Prime a dispenser with the 2.5× Dilution Buffer and dispense 15 ul of 2.5× dilution buffer into Optiplates containing 35 ul of a supernatant. Seal the plates with a plastic sealer and incubate at 65 degree C. for 30 min. Separate the Optiplates to avoid uneven heating.

[1215] Cool the samples to room temperature for 15 minutes. Empty the dispenser and prime with the Assay Buffer. Add 50 ml Assay Buffer and incubate at room temperature 5 min. Empty the dispenser and prime with the Reaction Buffer (see the Table below). Add 50 ul Reaction Buffer and incubate at room temperature for 20 minutes. Since the intensity of the chemiluminescent signal is time dependent, and it takes about 10 minutes to read 5 plastes on a luminometer, thus one should treat 5 plates at each time and start the second set 10 minutes later.

[1216] Read the relative light unit in the luminometer. Set H12 as blank, and print the results. An increase in chemiluminescence indicates reporter activity.

Reaction Buffer Formulation:

| # of plates | Rxn buffer diluent (ml) | CSPD (ml) |
|---|---|---|
| 10 | 60 | 3 |
| 11 | 65 | 3.25 |
| 12 | 70 | 3.5 |
| 13 | 75 | 3.75 |
| 14 | 80 | 4 |
| 15 | 85 | 4.25 |
| 16 | 90 | 4.5 |
| 17 | 95 | 4.75 |
| 18 | 100 | 5 |
| 19 | 105 | 5.25 |
| 20 | 110 | 5.5 |
| 21 | 115 | 5.75 |
| 22 | 120 | 6 |
| 23 | 125 | 6.25 |
| 24 | 130 | 6.5 |
| 25 | 135 | 6.75 |
| 26 | 140 | 7 |
| 27 | 145 | 7.25 |
| 28 | 150 | 7.5 |
| 29 | 155 | 7.75 |
| 30 | 160 | 8 |
| 31 | 165 | 8.25 |
| 32 | 170 | 8.5 |
| 33 | 175 | 8.75 |
| 34 | 180 | 9 |
| 35 | 185 | 9.25 |
| 36 | 190 | 9.5 |
| 37 | 195 | 9.75 |
| 38 | 200 | 10 |
| 39 | 205 | 10.25 |
| 40 | 210 | 10.5 |
| 41 | 215 | 10.75 |
| 42 | 220 | 11 |
| 43 | 225 | 11.25 |
| 44 | 230 | 11.5 |
| 45 | 235 | 11.75 |
| 46 | 240 | 12 |
| 47 | 245 | 12.25 |
| 48 | 250 | 12.5 |
| 49 | 255 | 12.75 |
| 50 | 260 | 13 |

### Example 37: High-Throughput Screening Assay Identifying Changes in Small Molecule Concentration and Membrane Permeability

[1217] Binding of a ligand to a receptor is known to alter intracellular levels of small molecules, such as calcium, potassium, sodium, and pH, as well as alter membrane potential. These alterations can be measured in an assay to identify supernatants which bind to receptors of a particular cell. Although the following protocol describes an assay for calcium, this protocol can easily be modified to detect changes in potassium, sodium, pH, membrane potential, or any other small molecule which is detectable by a fluorescent probe.

[1218] The following assay uses Fluorometric Imaging Plate Reader (“FLIPR”) to measure changes in fluorescent molecules (Molecular Probes) that bind small molecules. Clearly, any fluorescent molecule detecting a small molecule can be used instead of the calcium fluorescent molecule, fluo-4 (Molecular Probes, Inc.; catalog no. F-14202), used here.

[1219] For adherent cells, seed the cells at 10,000-20,000 cells/well in a Co-star black 96-well plate with clear bottom. The plate is incubated in a CO₂ incubator for 20 hours. The adherent cells are washed two times in Biotek washer with 200 ul of HBSS (Hank's Balanced Salt Solution) leaving 100 ul of buffer after the final wash.

[1220] A stock solution of 1 mg/ml fluo-4 is made in 10% pluronic acid DMSO. To load the cells with fluo-4, 50 ul of 12 ug/ml fluo-4 is added to each well. The plate is incubated at 37 degrees C. in a CO₂ incubator for 60 min. The plate is washed four times in the Biotek washer with HBSS leaving 100 ul of buffer.

[1221] For non-adherent cells, the cells are spun down from culture media. Cells are re-suspended to 2-5×10⁶ cells/ml with HBSS in a 50-ml conical tube. 4 ul of 1 mg/ml fluo-4 solution in 10% pluronic acid DMSO is added to each ml of cell suspension. The tube is then placed in a 37 degrees C. water bath for 30-60 min. The cells are washed twice with HBSS, resuspended to 1×10⁶ cells/ml, and dispensed into a microplate, 100 ul/well. The plate is centrifuged at 1000 rpm for 5 min. The plate is then washed once in Denley Cell Wash with 200 ul, followed by an aspiration step to 100 ul final volume.

[1222] For a non-cell based assay, each well contains a fluorescent molecule, such as fluo-4. The supernatant is added to the well, and a change in fluorescence is detected.

[1223] To measure the fluorescence of intracellular calcium, the FLIPR is set for the following parameters: (1) System gain is 300-800 mW; (2) Exposure time is 0.4 second; (3) Camera F/stop is F/2; (4) Excitation is 488 nm; (5) Emission is 530 nm; and (6) Sample addition is 50 ul. Increased emission at 530 nm indicates an extracellular signaling event caused by the a molecule, either polypeptide of the present invention or a molecule induced by polypeptide of the present invention, which has resulted in an increase in the intracellular Ca⁺⁺ concentration.

### Example 38: High-Throughput Screening Assay Identifying Tyrosine Kinase Activity

[1224] The Protein Tyrosine Kinases (PTK) represent a diverse group of transmembrane and cytoplasmic kinases. Within the Receptor Protein Tyrosine Kinase RPTK) group are receptors for a range of mitogenic and metabolic growth factors including the PDGF, FGF, EGF, NGF, HGF and Insulin receptor subfamilies. In addition there are a large family of RPTKs for which the corresponding ligand is unknown. Ligands for RPTKs include mainly secreted small proteins, but also membrane-bound and extracellular matrix proteins.

[1225] Activation of RPTK by ligands involves ligand-mediated receptor dimerization, resulting in transphosphorylation of the receptor subunits and activation of the cytoplasmic tyrosine kinases. The cytoplasmic tyrosine kinases include receptor associated tyrosine kinases of the src-family (e.g., src, yes, lck, lyn, fyn) and non-receptor linked and cytosolic protein tyrosine kinases, such as the Jak family, members of which mediate signal transduction triggered by the cytokine superfamily of receptors (e.g., the Interleukins, Interferons, GM-CSF, and Leptin).

[1226] Because of the wide range of known factors capable of stimulating tyrosine kinase activity, identifying whether polypeptide of the present invention or a molecule induced by polypeptide of the present invention is capable of activating tyrosine kinase signal transduction pathways is of interest. Therefore, the following protocol is designed to identify such molecules capable of activating the tyrosine kinase signal transduction pathways.

[1227] Seed target cells (e.g., primary keratinocytes) at a density of approximately 25,000 cells per well in a 96 well Loprodyne Silent Screen Plates purchased from Nalge Nunc (Naperville, Ill.). The plates are sterilized with two 30 minute rinses with 100% ethanol, rinsed with water and dried overnight. Some plates are coated for 2 hr with 100 ml of cell culture grade type I collagen (50 mg/ml), gelatin (2%) or polylysine (50 mg/ml), all of which can be purchased from Sigma Chemicals (St. Louis, Mo.) or 10% Matrigel purchased from Becton Dickinson (Bedford, Mass.), or calf serum, rinsed with PBS and stored at 4 degree C. Cell growth on these plates is assayed by seeding 5,000 cells/well in growth medium and indirect quantitation of cell number through use of alamarBlue as described by the manufacturer Alamar Biosciences, Inc. (Sacramento, Calif.) after 48 hr. Falcon plate covers #3071 from Becton Dickinson (Bedford, Mass.) are used to cover the Loprodyne Silent Screen Plates. Falcon Microtest III cell culture plates can also be used in some proliferation experiments.

[1228] To prepare extracts, A431 cells are seeded onto the nylon membranes of Loprodyne plates (20,000/200 ml/well) and cultured overnight in complete medium. Cells are quiesced by incubation in serum-free basal medium for 24 hr. After 5-20 minutes treatment with EGF (60 ng/ml) or 50 ul of the supernatant produced in Example 30, the medium was removed and 100 ml of extraction buffer ((20 mM HEPES pH 7.5, 0.15 M NaCl, 1% Triton X-100, 0.1% SDS, 2 mM Na3VO4, 2 mM Na4P207 and a cocktail of protease inhibitors (#1836170) obtained from Boeheringer Mannheim (Indianapolis, Ind.)) is added to each well and the plate is shaken on a rotating shaker for 5 minutes at 40° C. The plate is then placed in a vacuum transfer manifold and the extract filtered through the 0.45 mm membrane bottoms of each well using house vacuum. Extracts are collected in a 96-well catch/assay plate in the bottom of the vacuum manifold and immediately placed on ice. To obtain extracts clarified by centrifugation, the content of each well, after detergent solubilization for 5 minutes, is removed and centrifuged for 15 minutes at 4 degree C. at 16,000×g.

[1229] Test the filtered extracts for levels of tyrosine kinase activity. Although many methods of detecting tyrosine kinase activity are known, one method is described here.

[1230] Generally, the tyrosine kinase activity of a supernatant is evaluated by determining its ability to phosphorylate a tyrosine residue on a specific substrate (a biotinylated peptide). Biotinylated peptides that can be used for this purpose include PSK1 (corresponding to amino acids 6-20 of the cell division kinase cdc2-p34) and PSK2 (corresponding to amino acids 1-17 of gastrin). Both peptides are substrates for a range of tyrosine kinases and are available from Boehringer Mannheim.

[1231] The tyrosine kinase reaction is set up by adding the following components in order. First, add 10 ul of 5 uM Biotinylated Peptide, then 10 ul ATP/Mg₂₊ (5 mM ATP/50 mM MgCl₂), then 10 ul of 5× Assay Buffer (40 mM imidazole hydrochloride, pH7.3, 40 mM beta-glycerophosphate, 1 mM EGTA, 100 mM MgCl₂, 5 mM MgCl₂, 0.5 mg/ml BSA), then 5 ul of Sodium Vanadate(1 mM), and then 5 ul of water. Mix the components gently and preincubate the reaction mix at 30 degree C. for 2 min. Initial the reaction by adding 10 ul of the control enzyme or the filtered supernatant.

[1232] The tyrosine kinase assay reaction is then terminated by adding 10 ul of 120 mm EDTA and place the reactions on ice.

[1233] Tyrosine kinase activity is determined by transferring 50 ul aliquot of reaction mixture to a microtiter plate (MTP) module and incubating at 37 degree C. for 20 min. This allows the streptavidin coated 96 well plate to associate with the biotinylated peptide. Wash the MTP module with 300 ul/well of PBS four times. Next add 75 ul of anti-phospotyrosine antibody conjugated to horse radish peroxidase(anti-P-Tyr-POD(0.5u/ml)) to each well and incubate at 37 degree C. for one hour. Wash the well as above.

[1234] Next add 1000 ul of peroxidase substrate solution (Boehringer Mannheim) and incubate at room temperature for at least 5 mins (up to 30 min). Measure the absorbance of the sample at 405 nm by using ELISA reader. The level of bound peroxidase activity is quantitated using an ELISA reader and reflects the level of tyrosine kinase activity.

### Example 39: High-Throughput Screening Assay Identifying Phosphorylation Activity

[1235] As a potential alternative and/or complement to the assay of protein tyrosine kinase activity described in Example 38, an assay which detects activation (phosphorylation) of major intracellular signal transduction intermediates can also be used. For example, as described below one particular assay can detect tyrosine phosphorylation of the Erk-1 and Erk-2 kinases. However, phosphorylation of other molecules, such as Raf, JNK, p38 MAP, Map kinase kinase (MEK), MEK kinase, Src, Muscle specific kinase (MuSK), IRAK, Tec, and Janus, as well as any other phosphoserine, phosphotyrosine, or phosphothreonine molecule, can be detected by substituting these molecules for Erk-1 or Erk-2 in the following assay.

[1236] Specifically, assay plates are made by coating the wells of a 96-well ELISA plate with 0.1 ml of protein G (1 ug/ml) for 2 hr at room temp, (RT). The plates are then rinsed with PBS and blocked with 3% BSA/PBS for 1 hr at RT. The protein G plates are then treated with 2 commercial monoclonal antibodies (100 ng/well) against Erk-1 and Erk-2 (1 hr at RT) (Santa Cruz Biotechnology). (To detect other molecules, this step can easily be modified by substituting a monoclonal antibody detecting any of the above described molecules.) After 3-5 rinses with PBS, the plates are stored at 4 degree C. until use.

[1237] A431 cells are seeded at 20,000/well in a 96-well Loprodyne filterplate and cultured overnight in growth medium. The cells are then starved for 48 hr in basal medium (DMEM) and then treated with EGF (6 ng/well) or 50 ul of the supernatants obtained in Example 30 for 5-20 minutes. The cells are then solubilized and extracts filtered directly into the assay plate.

[1238] After incubation with the extract for 1 hr at RT, the wells are again rinsed. As a positive control, a commercial preparation of MAP kinase (10 ng/well) is used in place of A431 extract. Plates are then treated with a commercial polyclonal (rabbit) antibody (1 ug/ml) which specifically recognizes the phosphorylated epitope of the Erk-1 and Erk-2 kinases (1 hr at RT). This antibody is biotinylated by standard procedures. The bound polyclonal antibody is then quantitated by successive incubations with Europium-streptavidin and Europium fluorescence enhancing reagent in the Wallac DELFIA instrument (time-resolved fluorescence). An increased fluorescent signal over background indicates a phosphorylation by polypeptide of the present invention or a molecule induced by polypeptide of the present invention.

### Example 40: Assay for the Stimulation of Bone Marrow CD34+ Cell Proliferation

[1239] This assay is based on the ability of human CD34+ to proliferate in the presence of hematopoietic growth factors and evaluates the ability of isolated polypeptides expressed in mammalian cells to stimulate proliferation of CD34+ cells.

[1240] It has been previously shown that most mature precursors will respond to only a single signal. More immature precursors require at least two signals to respond. Therefore, to test the effect of polypeptides on hematopoictic activity of a wide range of progenitor cells, the assay contains a given polypeptide in the presence or absence of other hematopoietic growth factors. Isolated cells are cultured for 5 days in the presence of Stem Cell Factor (SCF) in combination with tested sample. SCF alone has a very limited effect on the proliferation of bone marrow (BM) cells, acting in such conditions only as a “survival” factor. However, combined with any factor exhibiting stimulatory effect on these cells (e.g., IL-3), SCF will cause a synergistic effect. Therefore, if the tested polypeptide has a stimulatory effect on hematopoietic progenitors, such activity can be easily detected. Since normal BM cells have a low level of cycling cells, it is likely that any inhibitory effect of a given polypeptide, or agonists or antagonists thereof, might not be detected. Accordingly, assays for an inhibitory effect on progenitors is preferably tested in cells that are first subjected to in vitro stimulation with SCF+IL+3, and then contacted with the compound that is being evaluated for inhibition of such induced proliferation.

[1241] Briefly, CD34+ cells are isolated using methods known in the art. The cells are thawed and resuspended in medium (QBSF 60 serum-free medium with 1% L-glutamine (500 ml) Quality Biological, Inc., Gaithersburg, Md. Cat#160-204-101). After several gentle centrifugation steps at 200×g, cells are allowed to rest for one hour. The cell count is adjusted to 2.5×10⁵ cells/ml. During this time, 100 μl of sterile water is added to the peripheral wells of a 96-well plate. The cytokines that can be tested with a given polypeptide in this assay is rhSCF (R&D Systems, Minneapolis, MN, Cat#255-SC) at 50 ng/ml alone and in combination with rhSCF and rhIL-3 (R&D Systems, Minneapolis, Minn., Cat#203-ML) at 30 ng/ml. After one hour, 10 μl of prepared cytokines, 50 μl of the supernatants prepared in Example 30 (supernatants at 1:2 dilution =50 μl) and 20 μl of diluted cells are added to the media which is already present in the wells to allow for a final total volume of 100 μl. The plates are then placed in a 37° C./5% CO₂ incubator for five days.

[1242] Eighteen hours before the assay is harvested, 0.5 μCi/well of [3H] Thymidine is added in a 10 μl volume to each well to determine the proliferation rate. The experiment is terminated by harvesting the cells from each 96-well plate to a filtermat using the Tomtec Harvester 96. After harvesting, the filtermats are dried, trimmed and placed into OmniFilter assemblies consisting of one OmniFilter plate and one OmniFilter Tray. 60 μl Microscint is added to each well and the plate sealed with TopSeal-A press-on sealing film A bar code 15 sticker is affixed to the first plate for counting. The sealed plates are then loaded and the level of radioactivity determined via the Packard Top Count and the printed data collected for analysis. The level of radioactivity reflects the amount of cell proliferation.

[1243] The studies described in this example test the activity of a given polypeptide to stimulate bone marrow CD34+ cell proliferation. One skilled in the art could easily modify the exemplified studies to test the activity of polynucleotides (e.g., gene therapy), antibodies, agonists, and/or antagonists and fragments and variants thereof. As a nonlimiting example, potential antagonists tested in this assay would be expected to inhibit cell proliferation in the presence of cytokines and/or to increase the inhibition of cell proliferation in the presence of cytokines and a given polypeptide. In contrast, potential agonists tested in this assay would be expected to enhance cell proliferation and/or to decrease the inhibition of cell proliferation in the presence of cytokines and a given polypeptide.

[1244] The ability of a gene to stimulate the proliferation of bone marrow CD34+ cells indicates that polynucleotides and polypeptides corresponding to the gene are useful for the diagnosis and treatment of disorders affecting the immune system and hematopoiesis. Representative uses are described in the “Immune Activity” and “Infectious Disease” sections above, and elsewhere herein.

### Example 41: Assay for Extracellular Matrix Enhanced Cell Response (EMECR)

[1245] The objective of the Extracellular Matrix Enhanced Cell Response (EMECR) assay is to identify gene products (e.g., isolated polypeptides) that act on the hematopoietic stem cells in the context of the extracellular matrix (ECM) induced signal.

[1246] Cells respond to the regulatory factors in the context of signal(s) received from the surrounding microenvironment. For example, fibroblasts, and endothelial and epithelial stem cells fail to replicate in the absence of signals from the ECM. Hematopoietic stem cells can undergo self-renewal in the bone marrow, but not in in vitro suspension culture. The ability of stem cells to undergo self-renewal in vitro is dependent upon their interaction with the stromal cells and the ECM protein fibronectin (fn). Adhesion of cells to fn is mediated by the α₅.β₁ and α₄.β₁ integrin receptors, which are expressed by human and mouse hematopoietic stem cells. The factor(s) which integrate with the ECM environment and are responsible for stimulating stem cell self-renewal havea not yet been identified. Discovery of such factors should be of great interest in gene therapy and bone marrow transplant applications

[1247] Briefly, polystyrene, non tissue culture treated, 96-well plates are coated with fin fragment at a coating concentration of 0.2 μg/ cm². Mouse bone marrow cells are plated (1,000 cells/well) in 0.2 ml of serum-free medium. Cells cultured in the presence of IL-3 (5 ng/ml)+SCF (50 ng/ml) would serve as the positive control, conditions under which little self-renewal but pronounced differentiation of the stem cells is to be expected. Gene products of the invention (e.g., including, but not limited to, polynucleotides and polypeptides of the present invention, and supernatants produced in Example 30), are tested with appropriate negative controls in the presence and absence of SCF(5.0 ng/ml), where test factor supernatants represent 10% of the total assay volume. The plated cells are then allowed to grow by incubating in a low oxygen environment ( 5% CO₂, 7% O₂, and 88% N₂) tissue culture incubator for 7 days. The number of proliferating cells within the wells is then quantitated by measuring thymidine incorporation into cellular DNA. Verification of the positive hits in the assay will require phenotypic characterization of the cells, which can be accomplished by scaling up of the culture system and using appropriate antibody reagents against cell surface antigens and FACScan.

[1248] One skilled in the art could easily modify the exemplified studies to test the activity of polynucleotides (e.g., gene therapy), antibodies, agonists, and/or antagonists and fragments and variants thereof.

[1249] If a particular polypeptide of the present invention is found to be a stimulator of hematopoietic progenitors, polynucleotides and polypeptides corresponding to the gene encoding said polypeptide may be useful for the diagnosis and treatment of disorders affecting the immune system and hematopoiesis. Representative uses are described in the “Immune Activity” and “Infectious Disease” sections above, and elsewhere herein. The gene product may also be useful in the expansion of stem cells and committed progenitors of various blood lineages, and in the differentiation and/or proliferation of various cell types.

[1250] Additionally, the polynucleotides and/or polypeptides of the gene of interest and/or agonists and/or antagonists thereof, may also be employed to inhibit the proliferation and differentiation of hematopoietic cells and therefore may be employed to protect bone marrow stem cells from chemotherapeutic agents during chemotherapy. This antiproliferative effect may allow administration of higher doses of chemotherapeutic agents and, therefore, more effective chemotherapeutic treatment.

[1251] Moreover, polynucleotides and polypeptides corresponding to the gene of interest may also be useful for the treatment and diagnosis of hematopoietic related disorders such as, for example, anemia, pancytopenia, leukopenia, thrombocytopenia or leukemia since stromal cells are important in the production of cells of hematopoietic lineages. The uses include bone marrow cell ex-vivo culture, bone marrow transplantation, bone marrow reconstitution, radiotherapy or chemotherapy of neoplasia.

### Example 42: Human Dermal Fibroblast and Aortic Smooth Muscle Cell Proliferation

[1252] The polypeptide of interest is added to cultures of normal human dermal fibroblasts (NHDF) and human aortic smooth muscle cells (AoSMC) and two co-assays are performed with each sample. The first assay examines the effect of the polypeptide of interest on the proliferation of normal human dermal fibroblasts (NHDF) or aortic smooth muscle cells (AoSMC). Aberrant growth of fibroblasts or smooth muscle cells is a part of several pathological processes, including fibrosis, and restenosis. The second assay examines IL6 production by both NHDF and SMC. IL6 production is an indication of functional activation. Activated cells will have increased production of a number of cytokines and other factors, which can result in a proinflammatory or immunomodulatory outcome. Assays are run with and without co-TNFa stimulation, in order to check for costimulatory or inhibitory activity.

[1253] Briefly, on day 1, 96-well black plates are set up with 1000 cells/well (NHDF) or 2000 cells/well (AoSMC) in 100 μl culture media. NHDF culture media contains: Clonetics FB basal media, 1 mg/ml hFGF, 5 mg/ml insulin, 50 mg/ml gentamycin, 2% FBS, while AoSMC culture media contains Clonetics SM basal media, 0.5 μg/ml hEGF, 5 mg/ml insulin, 1 μg/ml hFGF, 50 mg/ml gentamycin, 50 μg/ml Amphotericin B, 5% FBS. After incubation at 37° C. for at least 4-5 hours culture media is aspirated and replaced with growth arrest media. Growth arrest media for NHDF contains fibroblast basal media, 50 mg/ml gentamycin, 2% FBS, while growth arrest media for AoSMC contains SM basal media, 50 mg/ml gentamycin, 50 μg/ml Amphotericin B, 0.4% FBS. Incubate at 37° C. until day 2.

[1254] On day 2, serial dilutions and templates of the polypeptide of interest are designed such that they always include media controls and known-protein controls. For both stimulation and inhibition experiments, proteins are diluted in growth arrest media. For inhibition experiments, TNFa is added to a final concentration of 2 ng/ml (NHDF) or 5 ng/ml (AoSMC). Add ⅓ vol media containing controls or polypeptides of the present invention and incubate at 37 degrees C./5% CO₂ until day 5.

[1255] Transfer 60 μl from each well to another labeled 96-well plate, cover with a plate-sealer, and store at 4 degrees C. until Day 6 (for IL6 ELISA). To the remaining 100 μl in the cell culture plate, aseptically add Alamar Blue in an amount equal to 10% of the culture volume (10 μl). Return plates to incubator for 3 to 4 hours. Then measure fluorescence with excitation at 530 nm and emission at 590 nm using the CytoFluor. This yields the growth stimulation/inhibition data.

[1256] On day 5, the IL6 ELISA is performed by coating a 96 well plate with 50-100 ul/well of Anti-Human IL6 Monoclonal antibody diluted in PBS, pH 7.4, incubate ON at room temperature.

[1257] On day 6, empty the plates into the sink and blot on paper towels. Prepare Assay Buffer containing PBS with 4% BSA. Block the plates with 200 μl/well of Pierce Super Block blocking buffer in PBS for 1-2 hr and then wash plates with wash buffer (PBS, 0.05% Tween-20). Blot plates on paper towels. Then add 50 μl/well of diluted Anti-Human IL-6 Monoclonal, Biotin-labeled antibody at 0.50 mg/ml. Make dilutions of IL-6 stock in media (30, 10, 3, 1, 0.3, 0 ng/ml). Add duplicate samples to top row of plate. Cover the plates and incubate for 2 hours at RT on shaker.

[1258] Plates are washed with wash buffer and blotted on paper towels. Dilute EU-labeled Streptavidin 1:1000 in Assay buffer, and add 100 μl/well. Cover the plate and incubate 1 h at RT. Plates are again washed with wash buffer and blotted on paper towels.

[1259] Add 100 μl/well of Enhancement Solution. Shake for 5 minutes. Read the plate on the Wallac DELFIA Fluorometer. Readings from triplicate samples in each assay were tabulated and averaged.

[1260] A positive result in this assay suggests AoSMC cell proliferation and that the polypeptide of the present invention may be involved in dermal fibroblast proliferation and/or smooth muscle cell proliferation. A positive result also suggests many potential uses of polypeptides, polynucleotides, agonists and/or antagonists of the polynucleotide/polypeptide of the present invention which gives a positive result. For example, inflammation and immune responses, wound healing, and angiogenesis, as detailed throughout this specification. Particularly, polypeptides of the present invention and polynucleotides of the present invention may be used in wound healing and dermal regeneration, as well as the promotion of vasculogenesis, both of the blood vessels and lymphatics. The growth of vessels can be used in the treatment of, for example, cardiovascular diseases. Additionally, antagonists of polypeptides and polynucleotides of the invention may be useful in treating diseases, disorders, and/or conditions which involve angiogenesis by acting as an anti-vascular agent (e.g., anti-angiogenesis). These diseases, disorders, and/or conditions are known in the art and/or are described herein, such as, for example, malignancies, solid tumors, benign tumors, for example hemangiomas, acoustic neuromas, neurofibromas, trachomas, and pyogenic granulomas; artheroscleric plaques; ocular angiogenic diseases, for example, diabetic retinopathy, retinopathy of prematurity, macular degeneration, corneal graft rejection, neovascular glaucoma, retrolental fibroplasia, rubeosis, retinoblastoma, uvietis and Pterygia (abnormal blood vessel growth) of the eye; rheumatoid arthritis; psoriasis; delayed wound healing; endometriosis; vasculogenesis; granulations; hypertrophic scars (keloids); nonunion fractures; scleroderma; trachoma; vascular adhesions; myocardial angiogenesis; coronary collaterals; cerebral collaterals; arteriovenous malformations; ischemic limb angiogenesis; Osler-Webber Syndrome; plaque neovascularization; telangiectasia; hemophiliac joints; angiofibroma; fibromuscular dysplasia; wound granulation; Crohn's disease; and atherosclerosis. Moreover, antagonists of polypeptides and polynucleotides of the invention may be useful in treating anti-hyperproliferative diseases and/or anti-inflammatory known in the art and/or described herein.

[1261] One skilled in the art could easily modify the exemplified studies to test the activity of polynucleotides (e.g., gene therapy), antibodies, agonists, and/or antagonists and fragments and variants thereof.

### Example 43: Cellular Adhesion Molecule (CAM) Expression on Endothelial Cells

[1262] The recruitment of lymphocytes to areas of inflammation and angiogenesis involves specific receptor-ligand interactions between cell surface adhesion molecules (CAMs) on lymphocytes and the vascular endothelium. The adhesion process, in both normal and pathological settings, follows a multi-step cascade that involves intercellular adhesion molecule-1 (ICAM-1), vascular cell adhesion molecule-1 (VCAM-1), and endothelial leukocyte adhesion molecule-1 (E-selectin) expression on endothelial cells (EC). The expression of these molecules and others on the vascular endothelium determines the efficiency with which leukocytes may adhere to the local vasculature and extravasate into the local tissue during the development of an inflammatory response. The local concentration of cytokines and growth factor participate in the modulation of the expression of these CAMs.

[1263] Briefly, endothelial cells (e.g., Human Umbilical Vein Endothelial cells (HUVECs)) are grown in a standard 96 well plate to confluence, growth medium is removed from the cells and replaced with 100 μl of 199 Medium (10% fetal bovine serum (FBS)). Samples for testing and positive or negative controls are added to the plate in triplicate (in 10 μl volumes). Plates are then incubated at 37° C. for either 5 h (selectin and integrin expression) or 24 h (integrin expression only). Plates are aspirated to remove medium and 100 μl of 0.1% paraformaldehyde-PBS(with Ca++ and Mg++) is added to each well. Plates are held at 4° C. for 30 min. Fixative is removed from the wells and wells are washed 1× with PBS(+Ca,Mg)+0.5% BSA and drained. 10 μl of diluted primary antibody is added to the test and control wells. Anti-ICAM-1-Biotin, Anti-VCAM-1-Biotin and Anti-E-selectin-Biotin are used at a concentration of 10 μg/ml (1:10 dilution of 0.1 mg/ml stock antibody). Cells are incubated at 37° C. for 30 min. in a humidified environment. Wells are washed three times with PBS(+Ca,Mg)+0.5% BSA. 20 μl of diluted ExtrAvidin-Alkaline Phosphatase (1:5,000 dilution, referred to herein as the working dilution) are added to each well and incubated at 37° C. for 30 min. Wells are washed three times with PBS(+Ca,Mg)+0.5% BSA. Dissolve 1 tablet of p-Nitrophenol Phosphate pNPP per 5 ml of glycine buffer (pH 10.4). 100 μl of pNPP substrate in glycine buffer is added to each test well. Standard wells in triplicate are prepared from the working dilution of the ExtrAvidin-Alkaline Phosphotase in glycine buffer: 1:5,000 (10⁰)>10^{-0.5}>10⁻¹>10^{-1.5}. 5 μl of each dilution is added to triplicate wells and the resulting AP content in each well is 5.50 ng, 1.74 ng, 0.55 ng, 0.18 ng. 100 μl of pNNP reagent is then added to each of the standard wells. The plate is incubated at 37° C. for 4h. A volume of 50 μl of 3M NaOH is added to all wells. The plate is read on a plate reader at 405 nm using the background subtraction option on blank wells filled with glycine buffer only. Additionally, the template is set up to indicate the concentration of AP-conjugate in each standard well [5.50 ng; 1.74 ng; 0.55 ng; 0.18 ng]. Results are indicated as amount of bound AP-conjugate in each sample.

### Example 44: Alamar Blue Endothelial Cells Proliferation Assay

[1264] This assay may be used to quantitatively determine protein mediated inhibition of bFGF-induced proliferation of Bovine Lymphatic Endothelial Cells (LECs), Bovine Aortic Endothelial Cells (BAECs) or Human Microvascular Uterine Myometrial Cells (UTMECs). This assay incorporates a fluorometric growth indicator based on detection of metabolic activity. A standard Alamar Blue Proliferation Assay is prepared in EGM-2 MV with 10 ng/ml of bFGF added as a source of endothelial cell stimulation. This assay may be used with a variety of endothelial cells with slight changes in growth medium and cell concentration. Dilutions of the protein batches to be tested are diluted as appropriate. Serum-free medium (GIBCO SFM) without bFGF is used as a non-stimulated control and Angiostatin or TSP-1 are included as a known inhibitory controls.

[1265] Briefly, LEC, BAECs or UTMECs are seeded in growth media at a density of 5000 to 2000 cells/well in a 96 well plate and placed at 37 degrees C. overnight. After the overnight incubation of the cells, the growth media is removed and replaced with GIBCO EC-SFM. The cells are treated with the appropriate dilutions of the protein of interest or control protein sample(s) (prepared in SFM) in triplicate wells with additional bFGF to a concentration of 10 ng/ ml. Once the cells have been treated with the samples, the plate(s) is/are placed back in the 37° C. incubator for three days. After three days 10 ml of stock alamar blue (Biosource Cat#DAL 1100) is added to each well and the plate(s) is/are placed back in the 37° C. incubator for four hours. The plate(s) are then read at 530 nm excitation and 590 nm emission using the CytoFluor fluorescence reader. Direct output is recorded in relative fluorescence units.

[1266] Alamar blue is an oxidation-reduction indicator that both fluoresces and changes color in response to chemical reduction of growth medium resulting from cell growth. As cells grow in culture, innate metabolic activity results in a chemical reduction of the immediate surrounding environment. Reduction related to growth causes the indicator to change from oxidized (non-fluorescent blue) form to reduced (fluorescent red) form (i.e., stimulated proliferation will produce a stronger signal and inhibited proliferation will produce a weaker signal and the total signal is proportional to the total number of cells as well as their metabolic activity). The background level of activity is observed with the starvation medium alone. This is compared to the output observed from the positive control samples (bFGF in growth medium) and protein dilutions.

### Example 45: Detection of Inhibition of a Mixed Lymphocyte Reaction

[1267] This assay can be used to detect and evaluate inhibition of a Mixed Lymphocyte Reaction (MLR) by gene products (e.g., isolated polypeptides). Inhibition of a MLR may be due to a direct effect on cell proliferation and viability, modulation of costimulatory molecules on interacting cells, modulation of adhesiveness between lymphocytes and accessory cells, or modulation of cytokine production by accessory cells. Multiple cells may be targeted by these polypeptides since the peripheral blood mononuclear fraction used in this assay includes T, B and natural killer lymphocytes, as well as monocytes and dendritic cells.

[1268] Polypeptides of interest found to inhibit the MLR may find application in diseases associated with lymphocyte and monocyte activation or proliferation. These include, but are not limited to, diseases such as asthma, arthritis, diabetes, inflammatory skin conditions, psoriasis, eczema, systemic lupus erythematosus, multiple sclerosis, glomerulonephritis, inflammatory bowel disease, crohn's disease, ulcerative colitis, arteriosclerosis, cirrhosis, graft vs. host disease, host vs. graft disease, hepatitis, leukemia and lymphoma.

[1269] Briefly, PBMCs from human donors are purified by density gradient centrifugation using Lymphocyte Separation Medium (LSM®, density 1.0770 g/ml, Organon Teknika Corporation, West Chester, Pa.). PBMCs from two donors are adjusted to 2×10⁶ cells/ml in RPMI-1640 (Life Technologies, Grand Island, N.Y.) supplemented with 10% FCS and 2 mM glutamine. PBMCs from a third donor is adjusted to 2×10⁵ cells/ml. Fifty microliters of PBMCs from each donor is added to wells of a 96-well round bottom microtiter plate. Dilutions of test materials (50 μl) is added in triplicate to microtiter wells. Test samples (of the protein of interest) are added for final dilution of 1:4; rhuIL-2 (R&D Systems, Minneapolis, Minn., catalog number 202-IL) is added to a final concentration of 1 μg/ml; anti-CD4 mAb (R&D Systems, clone 34930.11, catalog number MAB379) is added to a final concentration of 10 μg/ml. Cells are cultured for 7-8 days at 37° C. in 5% CO₂, and 1 μC of [³H] thymidine is added to wells for the last 16 hrs of culture. Cells are harvested and thymidine incorporation determined using a Packard TopCount. Data is expressed as the mean and standard deviation of triplicate determinations.

[1270] Samples of the protein of interest are screened in separate experiments and compared to the negative control treatment, anti-CD4 mAb, which inhibits proliferation of lymphocytes and the positive control treatment, IL-2 (either as recombinant material or supernatant), which enhances proliferation of lymphocytes.

[1271] One skilled in the art could easily modify the exemplified studies to test the activity of polynucleotides (e.g., gene therapy), antibodies, agonists, and/or antagonists and fragments and variants thereof.

### Example 46: Assays for Protease Activity

[1272] The following assay may be used to assess protease activity of the polypeptides of the invention.

[1273] Gelatin and casein zymography are performed essentially as described (Heusen et al., Anal. Biochem., 102:196-202 (1980); Wilson et al., Journal of Urology, 149:653-658 (1993)). Samples are run on 10% polyacryamide/0.1% SDS gels containing 1% gelain orcasein, soaked in 2.5% triton at room temperature for 1 hour, and in 0.1M glycine, pH 8.3 at 37° C. 5 to 16 hours. After staining in amido black areas of proteolysis apear as clear areas agains the blue-black background. Trypsin (Sigma T8642) is used as a positive control.

[1274] Protease activity is also determined by monitoring the cleavage of n-a-benzoyl-L-arginine ethyl ester (BAEE) (Sigma B-4500. Reactions are set up in (25 mMNaPO₄,1 mM EDTA, and 1 mM BAEE), pH 7.5. Samples are added and the change in adsorbance at 260 nm is monitored on the Beckman DU-6 spectrophotometer in the time-drive mode. Trypsin is used as a positive control.

[1275] Additional assays based upon the release of acid-soluble peptides from casein or hemoglobin measured as adsorbance at 280 nm or colorimetrically using the Folin method are performed as described in Bergmeyer, et al., Methods of Enzymatic Analysis, 5 (1984). Other assays involve the solubilization of chromogenic substrates (Ward, Applied Science, 251-317 (1983)).

### Example 47: Identifying Serine Protease Substrate Specificity

[1276] Methods known in the art or described herein may be used to determine the substrate specificity of the polypeptides of the present invention having serine protease activity. A preferred method of determining substrate specificity is by the use of positional scanning synthetic combinatorial libraries as described in GB 2 324 529 (incorporated herein in its entirety).

### Example 48: Ligand Binding Assays

[1277] The following assay may be used to assess ligand binding activity of the polypeptides of the invention.

[1278] Ligand binding assays provide a direct method for ascertaining receptor pharmacology and are adaptable to a high throughput format. The purified ligand for a polypeptide is radiolabeled to high specific activity (50-2000 Ci/mmol) for binding studies. A determination is then made that the process of radiolabeling does not diminish the activity of the ligand towards its polypeptide. Assay conditions for buffers, ions, pH and other modulators such as nucleotides are optimized to establish a workable signal to noise ratio for both membrane and whole cell polypeptide sources. For these assays, specific polypeptide binding is defined as total associated radioactivity minus the radioactivity measured in the presence of an excess of unlabeled competing ligand. Where possible, more than one competing ligand is used to define residual nonspecific binding.

### Example 49: Functional Assay in Xenopus Oocytes

[1279] Capped RNA transcripts from linearized plasmid templates encoding the polypeptides of the invention are synthesized in vitro with RNA polymerases in accordance with standard procedures. In vitro transcripts are suspended in water at a final concentration of 0.2 mg/mi. Ovarian lobes are removed from adult female toads, Stage V defolliculated oocytes are obtained, and RNA transcripts (10 ng/oocytc) are injected in a 50 nl bolus using a microinjection apparatus. Two electrode voltage clamps are used to measure the currents from individual Xenopus oocytes in response polypeptides and polypeptide agonist exposure. Recordings are made in Ca2+ free Barth's medium at room temperature. The Xenopus system can be used to screen known ligands and tissue/cell extracts for activating ligands.

### Example 50: Microphysiom etric Assays

[1280] Activation of a wide variety of secondary messenger systems results in extrusion of small amounts of acid from a cell. The acid formed is largely as a result of the increased metabolic activity required to fuel the intracellular signaling process. The pH changes in the media surrounding the cell are very small but are detectable by the CYTOSENSOR microphysiometer (Molecular Devices Ltd., Menlo Park, Calif.). The CYTOSENSOR is thus capable of detecting the activation of polypeptide which is coupled to an energy utilizing intracellular signaling pathway.

### Example 51: Extract/Cell Supernatant Screening

[1281] A large number of mammalian receptors exist for which there remains, as yet, no cognate activating ligand (agonist). Thus, active ligands for these receptors may not be included within the ligands banks as identified to date. Accordingly, the polypeptides of the invention can also be functionally screened (using calcium, cAMP, microphysiometer, oocyte electrophysiology, etc., functional screens) against tissue extracts to identify its natural ligands. Extracts that produce positive functional responses can be sequentially subfractionated until an activating ligand is isolated and identified.

### Example 52: Calcium and cAMP Functional Assays

[1282] Seven transmembrane receptors which are expressed in HEK 293 cells have been shown to be coupled functionally to activation of PLC and calcium mobilization and/or cAMP stimulation or inhibition. Basal calcium levels in the HEK 293 cells in receptor-transfected or vector control cells were observed to be in the normal, 100 nM to 200 nM, range. HEK 293 cells expressing recombinant receptors are loaded with fura 2 and in a single day >150 selected ligands or tissue/cell extracts are evaluated for agonist induced calcium mobilization. Similarly, HEK 293 cells expressing recombinant receptors are evaluated for the stimulation or inhibition of cAMP production using standard cAMP quantitation assays. Agonists presenting a calcium transient or cAMP fluctuation are tested in vector control cells to determine if the response is unique to the transfected cells expressing receptor.

### Example 53: ATP-binding assay

[1283] The following assay may be used to assess ATP-binding activity of polypeptides of the invention.

[1284] ATP-binding activity of the polypeptides of the invention may be detected using the ATP-binding assay described in U.S. Pat. No. 5,858,719, which is herein incorporated by reference in its entirety. Briefly, ATP-binding to polypeptides of the invention is measured via photoaffinity labeling with 8-azido-ATP in a competition assay. Reaction mixtures containing 1 mg/ml of the ABC transport protein of the present invention are incubated with varying concentrations of ATP, or the non-hydrolyzable ATP analog adenyl-5′-imidodiphosphate for 10 minutes at 4° C. A mixture of 8-azido-ATP (Sigma Chem. Corp., St. Louis, Mo.) plus 8-azido-ATP (³²P-ATP) (5 mCi/μmol, ICN, Irvine Calif.) is added to a final concentration of 100 μM and 0.5 ml aliquots are placed in the wells of a porcelain spot plate on ice. The plate is irradiated using a short wave 254 nm UV lamp at a distance of 2.5 cm from the plate for two one-minute intervals with a one-minute cooling interval in between. The reaction is stopped by addition of dithiothreitol to a final concentration of 2 mM. The incubations are subjected to SDS-PAGE electrophoresis, dried, and autoradiographed. Protein bands corresponding to the particular polypeptides of the invention are excised, and the radioactivity quantified. A decrease in radioactivity with increasing ATP or adenly-5′-imidodiphosphate provides a measure of ATP affinity to the polypeptides.

### Example 54: Small Molecule Screening

[1285] This invention is particularly useful for screening therapeutic compounds by using the polypeptides of the invention, or binding fragments thereof, in any of a variety of drug screening techniques. The polypeptide or fragment employed in such a test may be affixed to a solid support, expressed on a cell surface, free in solution, or located intracellularly. One method of drug screening utilizes eukaryotic or prokaryotic host cells which are stably transformed with recombinant nucleic acids expressing the polypeptide or fragment. Drugs are screened against such transformed cells in competitive binding assays. One may measure, for example, the formulation of complexes between the agent being tested and polypeptide of the invention.

[1286] Thus, the present invention provides methods of screening for drugs or any other agents which affect activities mediated by the polypeptides of the invention. These methods comprise contacting such an agent with a polypeptide of the invention or fragment thereof and assaying for the presence of a complex between the agent and the polypeptide or fragment thereof, by methods well known in the art. In such a competitive binding assay, the agents to screen are typically labeled. Following incubation, free agent is separated from that present in bound form, and the amount of free or uncomplexed label is a measure of the ability of a particular agent to bind to the polypeptides of the invention.

[1287] Another technique for drug screening provides high throughput screening for compounds having suitable binding affinity to the polypeptides of the invention, and is described in great detail in European Patent Application 84/03564, published on Sep. 13, 1984, which is herein incorporated by reference in its entirety. Briefly stated, large numbers of different small molecule test compounds are synthesized on a solid substrate, such as plastic pins or some other surface. The test compounds are reacted with polypeptides of the invention and washed. Bound polypeptides are then detected by methods well known in the art. Purified polypeptides are coated directly onto plates for use in the aforementioned drug screening techniques. In addition, non-neutralizing antibodies may be used to capture the peptide and immobilize it on the solid support.

[1288] This invention also contemplates the use of competitive drug screening assays in which neutralizing antibodies capable of binding polypeptides of the invention specifically compete with a test compound for binding to the polypeptides or fragments thereof. In this manner, the antibodies are used to detect the presence of any peptide which shares one or more antigenic epitopes with a polypeptide of the invention.

### Example 55: Phosphorylation Assay

[1289] In order to assay for phosphorylation activity of the polypeptides of the invention, a phosphorylation assay as described in U.S. Pat. No. 5,958,405 (which is herein incorporated by reference) is utilized. Briefly, phosphorylation activity may be measured by phosphorylation of a protein substrate using gamma-labeled ³²P-ATP and quantitation of the incorporated radioactivity using a gamma radioisotope counter. The polypeptides of the invention are incubated with the protein substrate, ³²P-ATP, and a kinase buffer. The ³²p incorporated into the substrate is then separated from free ³²P-ATP by electrophoresis, and the incorporated ³²p is counted and compared to a negative control. Radioactivity counts above the negative control are indicative of phosphorylation activity of the polypeptides of the invention.

### Example 56: Detection of Phosphorylation Activity (Activation) of the Polypeptides of the Invention in the Presence of Polypeptide Ligands

[1290] Methods known in the art or described herein may be used to determine the phosphorylation activity of the polypeptides of the invention. A preferred method of determining phosphorylation activity is by the use of the tyrosine phosphorylation assay as described in U.S. Pat. No. 5,817,471 (incorporated herein by reference).

### Example 57: Identification of Signal Transduction Proteins That Interact with Polypeptides of the Present Invention

[1291] The purified polypeptides of the invention are research tools for the identification, characterization and purification of additional signal transduction pathway proteins or receptor proteins. Briefly, labeled polypeptides of the invention are useful as reagents for the purification of molecules with which it interacts. In one embodiment of affinity purification, polypeptides of the invention are covalently coupled to a chromatography column. Cell-free extract derived from putative target cells, such as carcinoma tissues, is passed over the column, and molecules with appropriate affinity bind to the polypeptides of the invention. The protein complex is recovered from the column, dissociated, and the recovered molecule subjected to N-terminal protein sequencing. This amino acid sequence is then used to identify the captured molecule or to design degenerate oligonucleotide probes for cloning the relevant gene from an appropriate cDNA library.

### Example 58: IL-6 Bioassay

[1292] To test the proliferative effects of the polypeptides of the invention, the IL-6 Bioassay as described by Marz et al. is utilized (Proc. Natl. Acad. Sci., U.S.A., 95:3251-56 (1998), which is herein incorporated by reference). Briefly, IL-6 dependent B9 murine cells are washed three times in IL-6 free medium and plated at a concentration of 5,000 cells per well in 50 μl, and 50 μl of the IL-6-like polypeptide is added. After 68 hrs. at 37° C., the number of viable cells is measured by adding the tetrazolium salt thiazolyl blue (MTT) and incubating for a further 4 hrs. at 37° C. B9 cells are lysed by SDS and optical density is measured at 570 nm. Controls containing IL-6 (positive) and no cytokine (negative) are utilized. Enhanced proliferation in the test sample(s) relative to the negative control is indicative of proliferative effects mediated by polypeptides of the invention.

### Example 59: Support of Chicken Embryo Neuron Survival

[1293] To test whether sympathetic neuronal cell viability is supported by polypeptides of the invention, the chicken embryo neuronal survival assay of Senaldi et al is utilized (Proc. Natl. Acad. Sci., U.S.A., 96:11458-63 (1998), which is herein incorporated by reference). Briefly, motor and sympathetic neurons are isolated from chicken embryos, resuspended in L15 medium (with 10% FCS, glucose, sodium selenite, progesterone, conalbumin, putrescine, and insulin; Life Technologies, Rockville, Md.) and Dulbecco's modified Eagles medium [with 10% FCS, glutamine, penicillin, and 25 mM Hepes buffer (pH 7.2); Life Technologies, Rockville, Md.], respectively, and incubated at 37° C. in 5% CO₂ in the presence of different concentrations of the purified IL-6-like polypeptide, as well as a negative control lacking any cytokine. After 3 days, neuron survival is determined by evaluation of cellular morphology, and through the use of the colorimetric assay of Mosmann (Mosmann, T., J. Immunol. Methods, 65:55-63 (1983)). Enhanced neuronal cell viability as compared to the controls lacking cytokine is indicative of the ability of the inventive purified IL-6-like polypeptide(s) to enhance the survival of neuronal cells.

### Example 60: Assay for Phosphatase Activity

[1294] The following assay may be used to assess serine/threonine phosphatase (PTPase) activity of the polypeptides of the invention.

[1295] In order to assay for serine/threonine phosphatase (PTPase) activity, assays can be utilized which are widely known to those skilled in the art. For example, the serine/threonine phosphatase (PSPase) activity is measured using a PSPase assay kit from New England Biolabs, Inc. Myelin basic protein (MyBP), a substrate for PSPase, is phosphorylated on serine and threonine residues with cAMP-dependent Protein Kinase in the presence of [³²P]ATP. Protein serine/threonine phosphatase activity is then determined by measuring the release of inorganic phosphate from 32P-labeled MyBP.

### Example 61: Interaction of Serine/Threonine Phosphatases with other Proteins

[1296] The polypeptides of the invention with serine/threonine phosphatase activity as determined in Example 60 are research tools for the identification, characterization and purification of additional interacting proteins or receptor proteins, or other signal transduction pathway proteins. Briefly, labeled polypeptide(s) of the invention is useful as a reagent for the purification of molecules with which it interacts. In one embodiment of affinity purification, polypeptide of the invention is covalently coupled to a chromatography column. Cell-free extract derived from putative target cells, such as neural or liver cells, is passed over the column, and molecules with appropriate affinity bind to the polypeptides of the invention. The polypeptides of the invention-complex is recovered from the column, dissociated, and the recovered molecule subjected to N-terminal protein sequencing. This amino acid sequence is then used to identify the captured molecule or to design degenerate oligonucleotide probes for cloning the relevant gene from an appropriate cDNA library.

### Example 62: Assaying for Heparanase Activity

[1297] In order to assay for heparanase activity of the polypeptides of the invention, the heparanase assay described by Vlodavsky et al is utilized (Vlodavsky, I., et al., Nat. Med., 5:793-802 (1999)). Briefly, cell lysates, conditioned media or intact cells (1×10⁶ cells per 35-mm dish) are incubated for 18 hrs at 37° C., pH 6.2-6.6, with ³⁵S-labeled ECM or soluble ECM derived peak I proteoglycans. The incubation medium is centrifuged and the supernatant is analyzed by gel filtration on a Sepharose CL-6B column (0.9×30 cm). Fractions are eluted with PBS and their radioactivity is measured. Degradation fragments of heparan sulfate side chains are eluted from Sepharose 6B at 0.5<Kₐᵥ<0.8 (peak II). Each experiment is done at least three times. Degradation fragments corresponding to “peak II,” as described by Vlodavsky et al., is indicative of the activity of the polypeptides of the invention in cleaving heparan sulfate.

### Example 63: Immobilization of biomolecules

[1298] This example provides a method for the stabilization of polypeptides of the invention in non-host cell lipid bilayer constucts (see, e.g., Bieri et al., Nature Biotech 17:1105-1108 (1999), hereby incorporated by reference in its entirety herein) which can be adapted for the study of polypeptides of the invention in the various functional assays described above. Briefly, carbohydrate-specific chemistry for biotinylation is used to confine a biotin tag to the extracellular domain of the polypeptides of the invention, thus allowing uniform orientation upon immobilization. A 50 uM solution of polypeptides of the invention in washed membranes is incubated with 20 mM NaIO4 and 1.5 mg/ml (4 mM) BACH or 2 mg/ml (7.5 mM) biotin-hydrazide for 1 hr at room temperature (reaction volume, 150 ul). Then the sample is dialyzed (Pierce Slidealizer Cassett, 10 kDa cutoff; Pierce Chemical Co., Rockford Ill.) at 4C first for 5 h, exchanging the buffer after each hour, and finally for 12 h against 500 ml buffer R (0.15 M NaCl, 1 mM MgCl2, 10 mM sodium phosphate, pH7). Just before addition into a cuvette, the sample is diluted 1:5 in buffer ROG50 (Buffer R supplemented with 50 mM octylglucoside).

### Example 64: TAQMAN

[1299] Quantitative PCR (QPCR). Total RNA from cells in culture are extracted by Trizol separation as recommended by the supplier (LifeTechnologies). (Total RNA is treated with DNase I (Life Technologies) to remove any contaminating genomic DNA before reverse transcription.) Total RNA (50 ng) is used in a one-step, 50 ul, RT-QPCR, consisting of Taqman Buffer A (Perkin-Elmer; 50 mM KCl/10 mM Tris, pH 8.3), 5.5 mM MgCl₂, 240 μM each dNTP, 0.4 units RNase inhibitor(Promega), 8% glycerol, 0.012% Tween-20, 0.05% gelatin, 0.3 uM primers, 0.1 uM probe, 0.025 units Amplitaq Gold (Perkin-Elmer) and 2.5 units Superscript II reverse transcriptase (Life Technologies). As a control for genomic contamination, parallel reactions are setup without reverse transcriptase. The relative abundance of (unknown) and 18S RNAs are assessed by using the Applied Biosystems Prism 7700 Sequence Detection System (Livak, K. J., Flood, S. J., Marmaro, J., Giusti, W. & Deetz, K. (1995) PCR Methods Appl. 4, 357-362). Reactions are carried out at 48° C. for 30 min, 95° C. for 10 min, followed by 40 cycles of 95° C. for 15s, 60° C. for 1 min. Reactions are performed in triplicate.

[1300] Primers (f & r) and FRET probes sets are designed using Primer Express Software (Perkin-Elmer). Probes are labeled at the 5′-end with the reporter dye 6-FAM and on the 3′-end with the quencher dye TAMRA (Biosource International, Camarillo, Calif. or Perkin-Elmer).

### Example 65: Assays for Metalloproteinase Activity

[1301] Metalloproteinases (EC 3.4.24.-) are peptide hydrolases which use metal ions, such as Zn²⁺, as the catalytic mechanism. Metalloproteinase activity of polypeptides of the present invention can be assayed according to the following methods.

[1302] Proteolysis of Alpha-2-macroglobulin

[1303] To confirm protease activity, purified polypeptides of the invention are mixed with the substrate alpha-2-macroglobulin (0.2 unit/ml; Boehringer Mannheim, Germany) in 1× assay buffer (50 mM HEPES, pH 7.5, 0.2 M NaCl, 10 mM CaCl₂, 25 μM ZnCl₂ and 0.05% Brij-35) and incubated at 37° C. for 1-5 days. Trypsin is used as positive control. Negative controls contain only alpha-2-macroglobulin in assay buffer. The samples are collected and boiled in SDS-PAGE sample buffer containing 5% 2-mercaptoethanol for 5-min, then loaded onto 8% SDS-polyacrylamide gel. After electrophoresis the proteins are visualized by silver staining. Proteolysis is evident by the appearance of lower molecular weight bands as compared to the negative control.

[1304] Inhibition of Alpha-2-macroglobulin Proteolysis by Inhibitors of Metalloproteinases

[1305] Known metalloproteinase inhibitors (metal chelators (EDTA, EGTA, AND HgCl₂), peptide metalloproteinase inhibitors (TIMP-1 and TIMP-2), and commercial small molecule MMP inhibitors) are used to characterize the proteolytic activity of polypeptides of the invention. The three synthetic MMP inhibitors used are: MMP inhibitor I, [IC₅₀=1.0 μM against MMP-1 and MMP-8; IC₅₀=30 μM against MMP-9; IC₅₀=150 μM against MMP-3]; MMP-3 (stromelysin-1) inhibitor I [IC₅₀=5 μM against MMP-3], and MMP-3 inhibitor II [Kᵢ=130 nM against MMP-3]; inhibitors available through Calbiochem, catalog #444250, 444218, and 444225, respectively). Briefly, different concentrations of the small molecule MMP inhibitors are mixed with purified polypeptides of the invention (50 μg/ml) in 22.9 μl of 1× HEPES buffer (50 mM HEPES, pH 7.5, 0.2 M NaCl, 10 mM CaCl₂, 25 μM ZnCl₂ and 0.05% Brij-35) and incubated at room temperature (24 ° C.) for 2-hr, then 7.1 μl of substrate alpha-2-macroglobulin (0.2 unit/ml) is added and incubated at 37° C. for 20-hr. The reactions are stopped by adding 4× sample buffer and boiled immediately for 5 minutes. After SDS-PAGE, the protein bands are visualized by silver stain.

[1306] Synthetic Fluorogenic Peptide Substrates Cleavage Assay

[1307] The substrate specificity for polypeptides of the invention with demonstrated metalloproteinase activity can be determined using synthetic fluorogenic peptide substrates (purchased from BACHEM Bioscience Inc). Test substrates include, M-1985, M-2225, M-2105, M-2110, and M-2255. The first four are MMP substrates and the last one is a substrate of tumor necrosis factor-α (TNF-α) converting enzyme (TACE). All the substrates are prepared in 1:1 dimethyl sulfoxide (DMSO) and water. The stock solutions are 50-500 μM. Fluorescent assays are performed by using a Perkin Elmer LS 50B luminescence spectrometer equipped with a constant temperature water bath. The excitation λ is 328 nm and the emission λ is 393 nm. Briefly, the assay is carried out by incubating 176 μl 1× HEPES buffer (0.2 M NaCl, 10 mM CaCl₂, 0.05% Brij-35 and 50 mM HEPES, pH 7.5) with 4 μl of substrate solution (50 μM) at 25 ° C. for 15 minutes, and then adding 20 μl of a purified polypeptide of the invention into the assay cuvett. The final concentration of substrate is 1 μM. Initial hydrolysis rates are monitored for 30-min.

### Example 66: Characterization of the cDNA Contained in a Deposited Plasmid

[1308] The size of the cDNA insert contained in a deposited plasmid may be routinely determined using techniques known in the art, such as PCR amplification using synthetic primers hybridizable to the 3′ and 5′ ends of the cDNA sequence. For example, two primers of 17-30 nucleotides derived from each end of the cDNA (i.e., hybridizable to the absolute 5′ nucleotide or the 3′ nucleotide end of the sequence of SEQ ID NO:X, respectively) are synthesized and used to amplify the cDNA using the deposited cDNA plasmid as a template. The polymerase chain reaction is carried out under routine conditions, for instance, in 25 ul of reaction mixture with 0.5 ug of the above cDNA template. A convenient reaction mixture is 1.5-5 mM MgCl₂, 0.01% (w/v) gelatin, 20 uM each of dATP, dCTP, dGTP, dTTP, 25 pmol of each primer and 0.25 Unit of Taq polymerase. Thirty five cycles of PCR (denaturation at 94 degree C. for 1 min; annealing at 55 degree C. for 1 min; elongation at 72 degree C. for 1 min) are performed with a Perkin-Elmer Cetus automated thermal cycler. The amplified product is analyzed by agarose gel electrophoresis. The PCR product is verified to be the selected sequence by subcloning and sequencing the DNA product.

[1309] Use of the above methodologies and/or other methodologies known in the art generates fragments from the clone corresponding to the approximate fragments described in Table 8, below. Accordingly, Table 8 provides a physical characterization of certain clones encompassed by the invention. The first column provides the unique clone identifier, “Clone ID NO:Z”, for cDNA clones of the invention, as described in Table 1A. The second column provides the approximate size of the cDNA insert contained in the corresponding cDNA clone.

TABLE 8

| | cDNA |
|---|---|
| Clone ID | Insert |
| NO: Z | Size: |
| HA5BC03 | 1000 |
| HADCD02 | 900 |
| HBGOG26 | 700 |
| HBGOK19 | 700 |
| HBODN93 | 1800 |
| HE8MO05 | 3100 |
| HEMFK40 | 700 |
| HFIXH90 | 1700 |
| HJTAC77 | 2000 |
| HKAKW19 | 600 |
| HLMIY60 | 800 |
| HMAFD64 | 2300 |
| HMIAL66 | 2400 |
| HPJDO64 | 3000 |
| HPMGN27 | 1400 |
| HTEMK07 | 1000 |
| HTLHB07 | 1400 |
| HUSGT72 | 600 |
| HWAFH10 | 1700 |
| HWLEP57 | 2300 |
| HDQGP59 | 1200 |
| HTEDF22 | 800 |
| HUSIJ74 | 900 |
| HWLDO07 | 300 |
| HWMGS22 | 1100 |
| HDAAQ07 | 2700 |
| HTEBC74 | 2400 |
| H2LAC34 | 1500 |
| H2MBH48 | 1900 |
| HADEU45 | 900 |
| HATEE95 | 900 |
| HBGMT12 | 1200 |
| HBIOS05 | 3100 |
| HBMXV17 | 1400 |
| HBNMF62 | 2000 |
| HCABL26 | 500 |
| HCBAB76 | 900 |
| HCE1Q39 | 2000 |
| HCEDM42 | 1300 |
| HCHBK37 | 3000 |
| HCNBB29 | 1200 |
| HCRBE37 | 2400 |
| HDAAO88 | 1900 |
| HDAAS58 | 3300 |
| HDPNE20 | 800 |
| HDPSD12 | 2100 |
| HDPST56 | 2900 |
| HDPXK10 | 3300 |
| HDQDG05 | 2500 |
| HDQHM27 | 1900 |
| HDTFH41 | 1600 |
| HDTFS83 | 1700 |
| HDTKB09 | 2000 |
| HE2DV73 | 1000 |
| HE8QV82 | 3000 |
| HE8UZ63 | 1800 |
| HE9NO76 | 1800 |
| HE9PI95 | 900 |
| HE9QL92 | 1800 |
| HEMDJ83 | 800 |
| HEORH04 | 1400 |
| HETBU05 | 2300 |
| HFANC50 | 1600 |
| HFKIN35 | 1000 |
| HFKLV78 | 800 |
| HFPEG38 | 1200 |
| HFPFK09 | 1100 |
| HFPFV06 | 700 |
| HHENL35 | 2800 |
| HHESX78 | 600 |
| HHFLI65 | 2400 |
| HHFMH56 | 2700 |
| HHFOS26 | 1700 |
| HHPEF49 | 1000 |
| HHPTA82 | 1700 |
| HHSGB32 | 1500 |
| HKAJU15 | 900 |
| HLFBE30 | 700 |
| HLTIL56 | 2700 |
| HLWAF59 | 1800 |
| HLWAZ29 | 2700 |
| HLWBU16 | 1700 |
| HLYAB58 | 800 |
| HMCDT29 | 2000 |
| HMHBN01 | 2300 |
| HMIBG02 | 1900 |
| HMQDJ89 | 900 |
| HMVCA78 | 2900 |
| HMWEH92 | 2300 |
| HNBVD17 | 900 |
| HNFIX19 | 1000 |
| HNHIR90 | 1200 |
| HNNAD37 | 600 |
| HNNBG60 | 500 |
| HNTAR16 | 1400 |
| HOCMA08 | 1700 |
| HODCT96 | 1300 |
| HODEI81 | 1400 |
| HODEK70 | 1000 |
| HODER91 | 1900 |
| HHFFG94 | 1100 |
| HFXCA19 | 2200 |
| HODFR44 | 600 |
| HOGED11 | 600 |
| HOSEB90 | 600 |
| HOUAA18 | 1500 |
| HOVCM01 | 1000 |
| HOVEK70 | 700 |
| HPDOW30 | 1100 |
| HPIBW01 | 2100 |
| HPJDY61 | 2400 |
| HPMFR38 | 900 |
| HPRBD71 | 2200 |
| HRABN32 | 1300 |
| HRADZ91 | 1700 |
| HRGBG45 | 1100 |
| HS2AC50 | 1600 |
| HSAMK64 | 1200 |
| HSAXS43 | 1100 |
| HSDEF10 | 600 |
| HSDFV12 | 1300 |
| HSKJK41 | 2100 |
| HSOBE61 | 1600 |
| HSSFW37 | 1600 |
| HSSJE32 | 1900 |
| HTAEZ50 | 2300 |
| HTEMR65 | 800 |
| HTGAS31 | 2000 |
| HTLAI85 | 2600 |
| HTLAV59 | 900 |
| HTLDF33 | 700 |
| HTLFE19 | 2200 |
| HTPGS02 | 2300 |
| HTTEP88 | 1800 |
| HTWAA57 | 600 |
| HUCPE28 | 1400 |
| HUFDI79 | 1800 |
| HUTAB12 | 900 |
| HUVDG48 | 2700 |
| HUVGQ16 | 1600 |
| HVANX08 | 700 |
| HWHHR95 | 600 |
| HWLDC02 | 1100 |
| HWLUO25 | 1400 |
| HYAAO40 | 1000 |
| HYACI56 | 1200 |
| HHEUC33 | 1000 |
| HBCAS64 | 800 |
| HE2LQ16 | 900 |
| HHATX12 | 1200 |
| HSDJE71 | 2000 |
| HSYAM42 | 2200 |
| HCE2Y61 | 2900 |
| HNTCU29 | 2400 |
| HSDBK60 | 400 |
| HSDKF80 | 400 |
| HSSJH10 | 1800 |
| HTXGJ96 | 1600 |
| HCHAQ03 | 500 |
| HFXHJ52 | 2000 |
| HHSDC06 | 1100 |
| HMVCT65 | 2700 |
| HUVHA10 | 2200 |
| HWBEX27 | 400 |
| HBJJT12 | 1000 |
| HEAHE27 | 1100 |
| HSRBC02 | 1700 |
| HLTAA06 | 2700 |
| HROBJ60 | 1300 |
| HTEBE47 | 1400 |
| HTELQ83 | 900 |
| HHEDS40 | 2700 |

### Example 67: Identification of Transcription Factor-Interacting Proteins

[1310] The purified transcription factor polypeptides of the invention are research tools useful for the identification, characterization and purification of proteins that interact with transcription factors, or other proteins in the signal transduction pathway in which transcription factors function, such as receptor proteins, or other signal transduction pathway proteins. In one embodiment of affinity purification, transcription factor proteins of the invention are covalently coupled to a chromatography column. A cell-free extract derived from putative target cells, such as liver or kidney cells, is passed over the column. Molecules which bind transcription factors are retained in the column. The transcription factor—protein complex is recovered from the column, dissociated, and the recovered transcription factor interacting protein subjected to N-terminal protein sequencing. This amino acid sequence is then used to identify the captured molecule or to design degenerate oligonucleotide probes for cloning the relevant gene from an appropriate cDNA library.

### Example 68: Yeast Two-Hybrid Analysis of Transcription Factor—Protein Interactions

[1311] The yeast two hybrid system as developed by Fields and Song [Nature, 340:245-247 (1989), herein incorporated by reference in its entirety] may be employed to assay for the interaction of transcription factors of the present invention with other known intracellular regulatory proteins. Briefly, expression vectors for generating two types of fusion proteins are generated: one fusion protein contains the LexA DNA binding domain fused to a regulatory protein of interest (for example, a known transcription factor such as CREB), and the other type of fusion protein contains the B42 trancriptional activation domain fused to a transcription factor polypeptide of the invention. The EGY48 [MATalpha, leu2, trp1 ura3 his3 LEU2::pLexop6-LEU2 (ΔUAS LEU2)] yeast strain (in which the chromosomal LEU2 gene is under the control of Lex-A operators) is successively transformed with the 8H18-34lacZ reporter plasmid (in which lacZ expression is under the control of Lex-A operators), a Lex-A- and a B-42-fusion protein expression vector. The LacZ vector contains the URA3 gene; the Lex-A fusion protein vector contains the HIS3 gene, and the B42 expression vector contains the TRP1 gene. At least two separate colonies from plates containing glucose but lacking uracil, histidine, and tryptophan are selected randomly for each coexpressing strain and used to inoculate liquid media containing galactose to induce expression of the B42 fusion, but not ura, his, or trp. Cultures are assayed for gal, as -gal expression is an indicator of interaction between the regulatory protein of interest and the transcription factor of the present invention. Modifications of this procedure, such as those described by Chien et al. [Proc. Natl. Acad. Sci. 88:9578-82 (1991), herein incorporated by reference in its entirety], allow large-scale screening for interactions between transcription factor polypeptides of the invention and proteins encoded by a cDNA library.

### Example 69: Gel Mobility-Shift Assay

[1312] In order to determine if the transcription factors of the present invention are involved in binding to DNA response elements, the gel mobility-shift assay, such as described by Hassanian et al. [Hassanian et al, Anal. Biochem. 213: 162-7 (1993)], is employed. Briefly, double-stranded oligonucleotides containing the conserved hexameric sequence AGGTCA, such as, for example, the Ec response element (EcRE) from the Drosophila heat shock protein (hsp)27 promoter, are end labeled using [³²P]ATP and kinase. In addition to naturally occurring response elements, it would be clear to one skilled in the art to generate synthetic oligonucleotides containing direct or inverted repeats of the hexameric sequence AGGTCA, separated from between 0-5 bp. transcription factor proteins are preincubated with 20 μl gel shift assay buffer (10 mM Tris, pH 8.0, either 40 or 150 mM KCl, 0.05% NP-40, 10% glycerol, 1 mM dithiothreitol, 2.5 mM MgCl₂, and 5 ng poly-dl-dC) for 10 min. on ice. This mixture is then combined with the indicated labeled probe and incubated for 20 min. at room temperature. The mixtures are analyzed by 6% nondenaturing polyacrylamide gel electrophoresis using 0.5× Tris-borate buffer at 4° C., followed by autoradiography. Migration of the probe incubated with the transcription factor is compared to migration of the untreated probe. Slower migration of the probe incubated with transcription factor is an indicator that the transcription factor binds the DNA response element.

### Example 70: Purification of Transcription Factor Polypeptides by DNA Affinity Chromatography

[1313] Purified preparations of transcription factor polypeptides of the invention can be prepared by exploiting their DNA-binding specificities, as described by Kadonaga et al. [Proc. Natl. Acad. Sci. 83:5889 (1986)]. By this technique, transcription factor polypeptides of the invention are passed over an affinity column containing an immobilized fragment of DNA containing a regulatory binding sequence. Transcription factor polypeptides recognizing the DNA-binding site are retained in the column until eluted with buffers of high ionic strength. In addition to obtaining purified transcription factor polypeptides, affinity column chromatography allows confirmation of the DNA binding specificities of the transcription factors of the invention.

[1314] It will be clear that the invention may be practiced otherwise than as particularly described in the foregoing description and examples. Numerous modifications and variations of the present invention are possible in light of the above teachings and, therefore, are within the scope of the appended claims.

[1315] The entire disclosure of each document cited (including patents, patent applications, journal articles, abstracts, laboratory manuals, books, or other disclosures) in the Background of the Invention, Detailed Description, and Examples is hereby incorporated herein by reference. In addition, the CD-R copy of the sequence listing submitted herewith and the corresponding computer readable form are both incorporated herein by reference in their entireties. The specification and sequence listing of each of the following U.S. applications are herein incorporated by reference in their entirety: application Ser. No. 60/179,065, filed on Jan. 31, 2000; application Ser. No. 60/180,628, filed on Feb. 4, 2000; application Ser. No. 60/214,886, filed on Jun. 28, 2000; application Ser. No. 60/217,487, filed on Jul. 11, 2000; application Ser. No. 60/225,758, filed on Aug. 14, 2000; application Ser. No. 60/220,963, filed on Jul. 26, 2000; application Ser. No. 60/217,496, filed on Jul. 11, 2000; application Ser. No. 60/225,447, filed on Aug. 14, 2000; application Ser. No. 60/218,290, filed on Jul. 14, 2000; application Ser. No. 60/225,757, filed on Aug. 14, 2000; application Ser. No. 60/226,868, filed on Aug. 22, 2000; application Ser. No. 60/216,647, filed on Jul. 7, 2000; application Ser. No. 60/225,267, filed on Aug. 14, 2000; application Ser. No. 60/216,880, filed on Jul. 7, 2000; application Ser. No. 60/225,270, filed on Aug. 14, 2000; application Ser. No. 60/251,869, filed on Dec. 8, 2000; application Ser. No. 60/235,834, filed on Sep. 27, 2000; application Ser. No. 60/234,274, filed on Sep. 21, 2000; application Ser. No. 60/234,223, filed on Sep. 21, 2000; application Ser. No. 60/228,924, filed on 30Aug. 2000; application Ser. No. 60/224,518, filed on Aug. 14, 2000; application Ser. No. 60/236,369, filed on Sep. 29, 2000; application Ser. No. 60/224,519, filed on Aug. 14, 2000; application Ser. No. 60/220,964, filed on Jul. 26, 2000; application Ser. No. 60/241,809, filed on Oct. 20, 2000; application Ser. No. 60/249,299, filed on Nov. 17, 2000; application Ser. No. 60/236,327, filed on Sep. 29, 2000; application Ser. No. 60/241,785, filed on Oct. 20, 2000; application Ser. No. 60/244,617, filed on Nov. 1, 2000; application Ser. No. 60/225,268, filed on Aug. 14, 2000; application Ser. No. 60/236,368, filed on Sep. 29, 2000; application Ser. No. 60/251,856, filed on Dec. 8, 2000; application Ser. No. 60/251,868, filed on 08Dec. 2000; application Ser. No. 60/229,344, filed on Sep. 1, 2000; application Ser. No. 60/234,997, filed on Sep. 25, 2000; application Ser. No. 60/229,343, filed on Sep. 1, 2000; application Ser. No. 60/229,345, filed on Sep. 1, 2000; application Ser. No. 60/229,287, filed on Sep. 1, 2000; application Ser. No. 60/229,513, filed on Sep. 5, 2000; application Ser. No. 60/231,413, filed on Sep. 8, 2000; application Ser. No. 60/229,509, filed on Sep. 5, 2000; application Ser. No. 60/236,367, filed on Sep. 29, 2000; application Ser. No. 60/237,039, filed on Oct. 2, 2000; application Ser. No. 60/237,038, filed on Oct. 2, 2000; application Ser. No. 60/236,370, filed on Sep. 29, 2000; application Ser. No. 60/236,802, filed on Oct. 2, 2000; application Ser. No. 60/237,037, filed on Oct. 2, 2000; application Ser. No. 60/237,040, filed on Oct. 2, 2000; application Ser. No. 60/240,960, filed on Oct. 20, 2000; application Ser. No. 60/239,935, filed on 13Oct. 13, 2000; application Ser. No. 60/239,937, filed on Oct. 13, 2000; application Ser. No. 60/241,787, filed on Oct. 20, 2000; application Ser. No. 60/246,474, filed on Nov. 8, 2000; application Ser. No. 60/246,532, filed on Nov. 8, 2000; application Ser. No. 60/249,216, filed on Nov. 17, 2000; application Ser. No. 60/249,210, filed on Nov. 17, 2000; application Ser. No. 60/226,681, filed on Aug. 26, 2000; application Ser. No. 60/225,759, filed on Aug. 14, 2000; application Ser. No. 60/225,213, filed on Aug. 14, 2000; application Ser. No. 60/227,182, filed on Aug. 22, 2000; application Ser. No. 60/225,214, filed on Aug. 14, 2000; application Ser. No. 60/235,836, filed on Sep. 27, 2000; application Ser. No. 60/230,438, filed on Sep. 6, 2000; application Ser. No. 60/215,135, filed on Jun. 30, 2000; application Ser. No. 60/225,266, filed on Aug. 14, 2000; application Ser. No. 60/249,218, filed on Nov. 17, 2000; application Ser. No. 60/249,208, filed on Nov. 17, 2000; application Ser. No. 60/249,213, filed on Nov. 17, 2000; application Ser. No. 60/249,212, filed on Nov. 17, 2000; application Ser. No. 60/249,207, filed on Nov. 17, 2000; application Ser. No. 60/249,245, filed on Nov. 17, 2000; application Ser. No. 60/249,244, filed on Nov. 17, 2000; application Ser. No. 60/249,217, filed on Nov. 17, 2000; application Ser. No. 60/249,211, filed on Nov. 17, 2000; application Ser. No. 60/249,215, filed on Nov. 17, 2000; application Ser. No. 60/249,264, filed on Nov. 17, 2000; application Ser. No. 60/249,214, filed on Nov. 17, 2000; application Ser. No. 60/249,297, filed on Nov. 17, 2000; application Ser. No. 60/232,400, filed on Sep. 14, 2000; application Ser. No. 60/231,242, filed on Sep. 8, 2000; application Ser. No. 60/232,081, filed on Sep. 8, 2000; application Ser. No. 60/232,080, filed on Sep. 8, 2000; application Ser. No. 60/231,414, filed on Sep. 8, 2000; application Ser. No. 60/231,244, filed on Sep. 8, 2000; application Ser. No. 60/233,064, filed on Sep. 14, 2000; application Ser. No. 60/233,063, filed on Sep. 14, 2000; application Ser. No. 60/232,397, filed on Sep. 14, 2000; application Ser. No. 60/232,399, filed on Sep. 14, 2000; application Ser. No. 60/232,401, filed on Sep. 14, 2000; application Ser. No. 60/241,808, filed on Oct. 20, 2000; application Ser. No. 60/241,826, filed on Oct. 20, 2000; application Ser. No. 60/241,786, filed on Oct. 20, 2000; application Ser. No. 60/241,221, filed on Oct. 20, 2000; application Ser. No. 60/246,475, filed on Nov. 8, 2000; application Ser. No. 60/231,243, filed on Sep. 8, 2000; application Ser. No. 60/233,065, filed on Sep. 14, 2000; application Ser. No. 60/232,398, filed on Sep. 14, 2000; application Ser. No. 60/234,998, filed on Sep. 25, 2000; application Ser. No. 60/246,477, filed on Nov. 8, 2000; application Ser. No. 60/246,528, filed on Nov. 8, 2000; application Ser. No. 60/246,525, filed on Nov. 8, 2000; application Ser. No. 60/246,476, filed on Nov. 8, 2000; application Ser. No. 60/246,526, filed on Nov. 8, 2000; application Ser. No. PT172, filed on Nov. 17, 2000; application Ser. No. 60/246,527, filed on Nov. 8, 2000; application Ser. No. 60/246,523, filed on Nov. 8, 2000; application Ser. No. 60/246,524, filed on Nov. 8, 2000; application Ser. No. 60/246,478, filed on Nov. 8, 2000; application Ser. No. 60/246,609, filed on Nov. 8, 2000; application Ser. No. 60/246,613, filed on Nov. 8, 2000; application Ser. No. 60/249,300, filed on Nov. 17, 2000; application Ser. No. 60/249,265, filed on Nov. 17, 2000; application Ser. No. 60/246,610, filed on Nov. 8, 2000; application Ser. No. 60/246,611, filed on Nov. 8, 2000; application Ser. No. 60/230,437, filed on Sep. 6, 2000; application Ser. No. 60/251,990, filed on Dec. 8, 2000; application Ser. No. 60/251,988, filed on Dec. 5, 2000; application Ser. No. 60/251,030, filed on Dec. 5, 2000; application Ser. No. 60/251,479, filed on Dec. 6, 2000; application Ser. No. PJ005, filed on Dec. 5, 2000; application Ser. No. PJ006, filed on Dec. 1, 2000; application Ser. No. 60/251,989, filed on Dec. 8, 2000; application Ser. No. 60/250,391, filed on Dec. 1, 2000; and application Ser. No. 60/254,097, filed on Dec. 11, 2000.

[1316] Moreover, the microfiche copy and the corresponding computer readable form of the Sequence Listing of U.S. application Ser. No. 60/179,065, and the hard copy of and the corresponding computer readable form of the Sequence Listing of U.S. application Ser. No. 60/180,628 are also incorporated herein by reference in their entireties.

What is claimed is:

1. An isolated nucleic acid molecule comprising a polynucleotide having a nucleotide sequence at least 95% identical to a sequence selected from the group consisting of:
(a) a polynucleotide fragment of SEQ ID NO:X or a polynucleotide fragment of the cDNA sequence contained in Clone ID NO:Z, which is hybridizable to SEQ ID NO:X;
(b) a polynucleotide encoding a polypeptide fragment of SEQ ID NO:Y or a polypeptide fragment encoded by the cDNA sequence contained in cDNA Clone ID NO:Z, which is hybridizable to SEQ ID NO:X;
(c) a polynucleotide encoding a polypeptide fragment of a polypeptide encoded by SEQ ID NO:X or a polypeptide fragment encoded by the cDNA sequence contained in cDNA Clone ID NO:Z, which is hybridizable to SEQ ID NO:X;
(d) a polynucleotide encoding a polypeptide domain of SEQ ID NO:Y or a polypeptide domain encoded by the cDNA sequence contained in cDNA Clone ID NO:Z, which is hybridizable to SEQ ID NO:X;
(e) a polynucleotide encoding a polypeptide epitope of SEQ ID NO:Y or a polypeptide epitope encoded by the cDNA sequence contained in cDNA Clone ID NO:Z, which is hybridizable to SEQ ID NO:X;
(f) a polynucleotide encoding a polypeptide of SEQ ID NO:Y or the cDNA sequence contained in cDNA Clone ID NO:Z, which is hybridizable to SEQ ID NO:X, having biological activity;
(g) a polynucleotide which is a variant of SEQ ID NO:X;
(h) a polynucleotide which is an allelic variant of SEQ ID NO:X;
(i) a polynucleotide which encodes a species homologue of the SEQ ID NO:Y;
(j) a polynucleotide capable of hybridizing under stringent conditions to any one of the polynucleotides specified in (a)-(i), wherein said polynucleotide does not hybridize under stringent conditions to a nucleic acid molecule having a nucleotide sequence of only A residues or of only T residues.

2. The isolated nucleic acid molecule of claim 1, wherein the polynucleotide fragment comprises a nucleotide sequence encoding a protein.

3. The isolated nucleic acid molecule of claim 1, wherein the polynucleotide fragment comprises a nucleotide sequence encoding the sequence identified as SEQ ID NO:Y or the polypeptide encoded by the cDNA sequence contained in cDNA Clone ID NO:Z, which is hybridizable to SEQ ID NO:X.

4. The isolated nucleic acid molecule of claim 1, wherein the polynucleotide fragment comprises the entire nucleotide sequence of SEQ ID NO:X or the cDNA sequence contained in cDNA Clone ID NO:Z, which is hybridizable to SEQ ID NO:X.

5. The isolated nucleic acid molecule of claim 2, wherein the nucleotide sequence comprises sequential nucleotide deletions from either the C-terminus or the N-terminus.

6. The isolated nucleic acid molecule of claim 3, wherein the nucleotide sequence comprises sequential nucleotide deletions from either the C-terminus or the N-terminus.

7. A recombinant vector comprising the isolated nucleic acid molecule of claim 1.

8. A method of making a recombinant host cell comprising the isolated nucleic acid molecule of claim 1.

9. A recombinant host cell produced by the method of claim 8.

10. The recombinant host cell of claim 9 comprising vector sequences.

11. An isolated polypeptide comprising an amino acid sequence at least 90% identical to a sequence selected from the group consisting of:
(a) a polypeptide fragment of SEQ ID NO:Y or the encoded sequence contained in cDNA Clone ID NO:Z;
(b) a polypeptide fragment of SEQ ID NO:Y or the encoded sequence contained in cDNA Clone ID NO:Z, having biological activity;
(c) a polypeptide domain of SEQ ID NO:Y or the encoded sequence contained in cDNA Clone ID NO:Z;
(d) a polypeptide epitope of SEQ ID NO:Y or the encoded sequence contained in cDNA Clone ID NO:Z;
(e) a fill length protein of SEQ ID NO:Y or the encoded sequence contained in cDNA Clone ID NO:Z;
(f) a variant of SEQ ID NO:Y;
(g) an allelic variant of SEQ ID NO:Y; or
(h) a species homologue of the SEQ ID NO:Y.

12. The isolated polypeptide of claim 11, wherein the full length protein comprises sequential amino acid deletions from either the C-terminus or the N-terminus.

13. An isolated antibody that binds specifically to the isolated polypeptide of claim 11.

14. A recombinant host cell that expresses the isolated polypeptide of claim 11.

15. A method of making an isolated polypeptide comprising:
(a) culturing the recombinant host cell of claim 14 under conditions such that said polypeptide is expressed; and
(b) recovering said polypeptide.

16. The polypeptide produced by claim 15.

17. A method for preventing, treating, or ameliorating a medical condition, comprising administering to a mammalian subject a therapeutically effective amount of the polynucleotide of claim 1.

18. A method of diagnosing a pathological condition or a susceptibility to a pathological condition in a subject comprising:
(a) determining the presence or absence of a mutation in the polynucleotide of claim 1; and
(b) diagnosing a pathological condition or a susceptibility to a pathological condition based on the presence or absence of said mutation.

19. A method of diagnosing a pathological condition or a susceptibility to a pathological condition in a subject comprising:
(a) determining the presence or amount of expression of the polypeptide of claim 11 in a biological sample; and
(b) diagnosing a pathological condition or a susceptibility to a pathological condition based on the presence or amount of expression of the polypeptide.

20. A method for identifying a binding partner to the polypeptide of claim 11 comprising:
(a) contacting the polypeptide of claim 11 with a binding partner; and
(b) determining whether the binding partner effects an activity of the polypeptide.

21. The gene corresponding to the cDNA sequence of SEQ ID NO:Y.

22. A method of identifying an activity in a biological assay, wherein the method comprises:
(a) expressing SEQ ID NO:X in a cell;
(b) isolating the supernatant;
(c) detecting an activity in a biological assay; and identifying the protein in the supernatant having the activity.

23. The product produced by the method of claim 20.

24. A method for preventing, treating, or ameliorating a medical condition, comprising administering to a mammalian subject a therapeutically effective amount of the polypeptide of claim 11.

The application's sequence listing, which the Patent Office published only in electronic form, follows.

SEQUENCE LISTING (1792 sequences)

SEQ ID NO: 1 - DNA, 733 bp, Homo sapiens
gggatccggagcccaaatcttctgacaaaactcacacatgcccaccgtgcccagcacctgaattcgagggtgcaccgtcagtcttcctcttccccccaaaacccaaggacaccctcatgatctcccggactcctgaggtcacatgcgtggtggtggacgtaagccacgaagaccctgaggtcaagttcaactggtacgtggacggcgtggaggtgcataatgccaagacaaagccgcgggaggagcagtacaacagcacgtaccgtgtggtcagcgtcctcaccgtcctgcaccaggactggctgaatggcaaggagtacaagtgcaaggtctccaacaaagccctcccaacccccatcgagaaaaccatctccaaagccaaagggcagccccgagaaccacaggtgtacaccctgcccccatcccgggatgagctgaccaagaaccaggtcagcctgacctgcctggtcaaaggcttctatccaagcgacatcgccgtggagtgggagagcaatgggcagccggagaacaactacaagaccacgcctcccgtgctggactccgacggctccttcttcctctacagcaagctcaccgtggacaagagcaggtggcagcaggggaacgtcttctcatgctccgtgatgcatgaggctctgcacaaccactacacgcagaagagcctctccctgtctccgggtaaatgagtgcgacggccgcgactctagaggat

SEQ ID NO: 2 - protein, 5 aa, Homo sapiens
  Site (3): Xaa equals any of the twenty naturally ocurring L-amino acids
WSXWS

SEQ ID NO: 3 - DNA, 86 bp, Artificial Sequence
  Primer_Bind: Synthetic sequence with 4 tandem copies of the GAS binding site found in the IRF1 promoter (Rothman et al., Immunity 1:457-468 (1994)), 18 nucleotides complementary to the SV40 early promoter, and a Xho I restriction site.
gcgcctcgagatttccccgaaatctagatttccccgaaatgatttccccgaaatgatttccccgaaatatctgccatctcaattag

SEQ ID NO: 4 - DNA, 27 bp, Artificial Sequence
  Primer_Bind: Synthetic sequence complementary to the SV40 promter; includes a Hind III restriction site.
gcggcaagctttttgcaaagcctaggc

SEQ ID NO: 5 - DNA, 271 bp, Artificial Sequence
  Protein_Bind: Synthetic promoter for use in biological assays; includes GAS binding sites found in the IRF1 promoter (Rothman et al., Immunity 1:457-468 (1994)).
ctcgagatttccccgaaatctagatttccccgaaatgatttccccgaaatgatttccccgaaatatctgccatctcaattagtcagcaaccatagtcccgcccctaactccgcccatcccgcccctaactccgcccagttccgcccattctccgccccatggctgactaattttttttatttatgcagaggccgaggccgcctcggcctctgagctattccagaagtagtgaggaggcttttttggaggcctaggcttttgcaaaaagctt

SEQ ID NO: 6 - DNA, 32 bp, Artificial Sequence
  Primer_Bind: Synthetic primer complementary to human genomic EGR-1 promoter sequence (Sakamoto et al., Oncogene 6:867-871 (1991)); includes a Xho I restriction site.
gcgctcgagggatgacagcgatagaaccccgg

SEQ ID NO: 7 - DNA, 31 bp, Artificial Sequence
  Primer_Bind: Synthetic primer complementary to human genomic EGR-1 promoter sequence (Sakamoto et al., Oncogene 6:867-871 (1991)); includes a Hind III restriction site.
gcgaagcttcgcgactccccggatccgcctc

SEQ ID NO: 8 - DNA, 12 bp, Homo sapiens
ggggactttccc

SEQ ID NO: 9 - DNA, 73 bp, Artificial Sequence
  Primer_Bind: Synthetic primer with 4 tandem copies of the NF-KB binding site (GGGGACTTTCCC), 18 nucleotides complementary to the 5' end of the SV40 early promoter sequence, and a XhoI restriction site.
gcggcctcgaggggactttcccggggactttccggggactttccgggactttccatcctgccatctcaattag

SEQ ID NO: 10 - DNA, 256 bp, Artificial Sequence
  Protein_Bind: Synthetic promoter for use in biological assays; includes NF-KB binding sites.
ctcgaggggactttcccggggactttccggggactttccgggactttccatctgccatctcaattagtcagcaaccatagtcccgcccctaactccgcccatcccgcccctaactccgcccagttccgcccattctccgccccatggctgactaattttttttatttatgcagaggccgaggccgcctcggcctctgagctattccagaagtagtgaggaggcttttttggaggcctaggcttttgcaaaaagctt

SEQ ID NO: 11 - DNA, 3820 bp, Homo sapiens
  SITE (698): n equals a,t,g, or c
  SITE (2423): n equals a,t,g, or c
  SITE (3223): n equals a,t,g, or c
ggtccgcgccctgtcgggctgagcgagttggcccacagagccggcgcgctcccgcctgcagggggagagcagacgggcgcggggacggccaggcgcggcgggtgctgtttctgtttcactttccttcactctgaggccggcgcgctggcgggcgaggagcggcggcggtggcgstcgtggacatgggaaagcggaaccaccaaaaggagtgatgatcaacgatctcatgataaatctggatgctagttctcatgcctcaggacatcctactgggaacgacacaccagctcctgggatcagactttcatctacttaggacccctctttgcccagactactaaagccagtcttcactagccacgaatggctacccaaaggaaacacttggtgaaagattttaatccttacattacctgctatatctgtaaagggtatctgatcaagccaacaacagtgacggaatgcctccatacattctgtaagacttgtattgttcagcactttgaagatagcaatgattgcccaaggtgtggcaaccaagttcatgagacaaatccattagaaatgttgaggttggacaatacattagaggaaattatatttaagctggtccctggactacgagaacaagaacttgagcgtgaatctgaattttggaagaaaaataagcctcaagaaaatggacaagatgatacttncaaaagctgacaaaccgaaagtagatgaagaaggtgatgaaaatgaagatgataaagattatcacagaagtgacccacaaattgctatctgtctagattgtttacgaaataatgggcaatcaggggacaatgtagtaaagggtttaatgaagaaattcattcgatgttctacacgtgtaactgtgggaactattaaaaaatttctaagtttaaaactaaaacttccaagttcttatgagttggatgtgctgtgcaatggtgaaattatggggaaggatcatactatggaattcatctacatgacaagatggcgactaagaggcgaaaactttcggtgtctgaactgctcagcttcgcaagtctgctctcaggatggccctttgtatcagtcataccctatggtactgcagtatcgaccaagaattgatttcggttagaccaaggggcccagacctcactgagatgaatcctgcactatttgtttactcgtcaacagattgcacagttaacggtgtgtggactagaggaacacaaccagattttcagcatgcaaataaggccattgtctatctctaaattgtcagttgcattcatgttgtttctattaggagcaaaccaagtgccattctgctactgaaccatctgcataaggtatttgtgttgtctcaaagtgtgcaagtcatggtaaaaatcagttagctgtgccgccatgattcacccttctgaatattttgcttgcctgttccaagattgttctaatgtttaattacactagtaaaatggctcaatttttgtggtgttgcagttttcacatacttactcttttattcttgtttaaatagcgkactctacaagaaactaataattatatcttgaaattattttgtatggaartatatttagaaaagtggtttttgagccactgtcttgttcttgataagctttttgtgtgaaaaaaagttcattcttgagtgtgcaagtccttttgccaagaattccaattattctgtaacattagagcacaatataattgtagacattctaagcatctgtccgtgtagtctaccaattgcacaaggaaggcatgttagccctccagattgaaaatgtatgtgacctcttgaactgaagttagattcccaaccattcaaaatgttggcagctgatcacatttacttctgataaaagtaatgtgtaagtaaggttaatcttctttcataatgccttatgacaagcaggtgctgcttcatgaaacgtcattgtatagcccatttcatgtatcattacattgttgctgttatttaatgagtgcattatttctctttttaagttggccttaggtatatgtcattgtggcatgcagagggttatgacgattttaaatattaggatttttagagcacataacattagctattttatggatttcaaaagtctcaaaacagttgtagattaaaactgttagttacctttcacatttccaaactatgtgcataaaatagaataaatgcagtatagaactatgctaaccaaaattaataggttaagggtattttattttaaatcctgtagtaattggggaaatgagaagattattattttatacatgagttcattaagatcagaaatacaaaatgtcctgtattttgcagttttgttaagtcttccattcgttttaggrttagtctgcagtcaargaaagtcttgttaccttaattatatganaactgtcattttaaatcttttaatatttacagttttcaaaaaccttacttggaaattgctttgaaacaaacaagctaacctttgaaacttaggaaaaaatcttgaaagttaggaaaaatatttgagaaatatgacgagcacaatctgtgtgttacacacatttagtttttatactgcatatgtggtaaatgtgtcacattttccagtaaaatgtatcagaaatcaatgccttctgaatttcaaaatgattcttagaaataagatattgtacaactctagcaaacatacaaagtacagctaaatcttaatatatttcactatgtaaaaggctgaaacttcataattatctgttccttctatctttttttgagtcaaaaagtctattaaatttttctgtttgttccaactttggtgaaaaaggttatggcaatactttaactttgttttgttacattgtttttgttcttggaatggctcacaagcagaatttaaaaggcagattttcattaactataaatggctgaaaaaactgaatttactatctagctacagaaattatttttctatggtgtgaaactgttcccagacatccctaagaacttttacaaattattataaatttgtcacacctaggtcagcgattaaaatagtgttttgcaaatggaattttaattaactcaaaatgaattaagagtgcattttaaaaatcacaagtgagactttgatgttttggccccccagccaaaacttaatggtcataaatgaattttatctacaaaatctctttaaatttggctggntgccttgtcatatgtaatttcactattttccaaggaaatatataggaagcaattatgaaactgagaatagttttatatagaattcttttatttactgataatgcattaacatttttattgaaatgcaatggaatatgtgccaaaacacgtgaaaagcttacataaagaaaggcatcagttgtcgtttggagaaaggtacacatttttttgatggtcctaagtgatatggtattactactagaatcacagatttcttcaactgacttattttggtatattcaactacagctttctaaggataggactactttcatgtctagtaatacactgtattccccgttaattatcccttaagtcagattgtagaatttgcaagaaactaggtatagaaaaaatgtacaggcaacttttgtggttagctttataaatttagggtgcttataaaatgataaaatgaattctttaaataacctataggaatcatctgaatctgtaacatcagagactaaaactaaaagttttctttaatctgttgtttcttaagcaataaactgaaagacctttacttccawaaaaaaaaaaaaaaaaaaaaaaaaa

SEQ ID NO: 12 - DNA, 1009 bp, Homo sapiens
ccacgcgtccgggcggcccgctcccggggccccttcccgggggtctccaccgatgacagcgccgtgccgccgccgggaggggcgccccatttcgggcactaccggacgggcggcggggccatggggctgcgcagccgctcggtcagctcggtggcaggcatgggcatggaccccagcacggccgggggggtgccctttggcctctacacccccgcctcccggggcaccggcgactccaagagggcgcccggcggcggagggtctgcgtccgactccacctatgcccatggcaatggttaccaggagacgggcggcggtcaccatagagacgggatgctgtacctgggctcccgagcctcgctggcgaatgctctacctctgcacatcgcacccaggtggttcagctcgcatagtggtttcaagtgccccatttgctccaagtctgtggcttctgacgagatggaaatgcactttataatgtgtttgagcaaacctcgcctctcctacaacgatgatgtgctgactaaagacgcgggtgagtgtgtgatctgcctggaggagctgctgcagggggacacgatagccaggctgccctgcctgtgcatctatcacaaaagctgcatagactcgtggtttgaagtgaacagatcttgtccggaacaccctgcggactgacctgcgggcttgcttgctgactcctctcaaagggacagagcgcccctgctccagggaggaggctcaccggaccctggggcagagctgagcttgggacaccagcgggaacagggcaccccttctgcactgacttccagatcatggttctcccttcctccctgaggacaccaaattggatgagagcaagtttgagagaagaatgaatcaactgctatccttcccctcacccctcagcccaggagggaaagggcattttctttttcatctttgaaaggcattgtgggtctgtctttaaagtgtttacaaaaaaaaattatataaaaaaaaaaaaaaa

SEQ ID NO: 13 - DNA, 931 bp, Homo sapiens
ggaagggggtcaaaggaacggtgattatcacctgtgaggggaaagggggtgctgtcctccctccttcccttttcctcagcctgcaccccctgcaatcccccacctttcggggtctccccctccttgttgctaaggcccggaccgtcatcccagcaacagcctcagtcatgtgaccggcaatggcggcgctgacgagagtcctggtcagctgagtggaaatagaaggatttctgctgccatcatcttccatgggctttccaggtcacacgacctacaagtagggagcagggaaagaagagtgagcctgcatgccaattctaagctcttcaggatcaaaaatggcagcctgtggaggcacctgcaagaacaaagtgactgtgtccaagcccgtgtgggacttcctgagcaaagagaccccagcccggctggcccggcttcgggaggagcaccgtgtgtccatcctcatagatggcgagacttctgacatctatgttctccagctttccccacagggtcctcccccggcccctccaaatgggctctacctagcccggaaggctctcaaggggctgctaaaagaggcagagaaagagctgaagaaagctcagaggcagggggagctgatgggctgcctggctctggggggtggaggggagcaccctgagatgcaccgcgcaggcccaccccctctccgagcagccccacttctgcccccaggagctcgggggctcccccctcctcctccccccctgcccccacctcttcctcctcgccttcgggaggaggcagaagagcaggagagcacctgccccatctgtctgggggagatccagaatgccaagacattggagaagtgccggcattcattctgcgagggctgcatcacccgggctctgcaggtgaaaaaggcctgccccatgtgcggccgctc

SEQ ID NO: 14 - DNA, 2446 bp, Homo sapiens
atttcgagtttccggtcaggttaggccgggggggtgcggtcctggtcggaaggaggtggagagtcgggggtcaccaggcctatccttggcgccacagtcggccaccggggctcgccgccgtcatggagagcggagggcggccctcgctgtgccagttcatcctcctgggcaccacctctgtggtcaccgccgccctgtactccgtgtaccggcagaaggcccgggtctcccaagagctcaagggagctaaaaaagttcatttgggtgaagatttaaagagtattctttcagaagctccaggaaaatgcgtgccttatgctgttatagaaggagctgtgcggtctgttaaagaaacgcttaacagccagtttgtggaaaactgcaagggggtaattcagcggctgacacttcaggagcacaagatggtgtggaatcgaaccacccacctttggaatgattgctcaaagatcattcatcagaggaccaacacagtgccctttgacctggtgccccacgaggatggcgtggatgtggctgtgcgagtgctgaagcccctggactcagtggatctgggtctagagactgtgtatgagaagttccacccctcgattcagtccttcaccgatgtcatcggccactacatcagcggtgagcggcccaaaggcatccaagagaccgaggagatgctgaaggtgggggccaccctcacaggggktggcgaactggtcctggacaacaactctgtccgcctgcagccgcccaaacaaggcatgcagtactatctaagcagccaggacttcgacagcctgctgcagaggcaggagtcgagcgtcaggctctggaaggtgctggcgctggtttttggctttgccacatgtgccaccctcttcttcattctccggaagcagtatctgcagcggcaggagcgcctgcgcctcaagcagatgcaggaggagttccaggagcatgaggcccagctgctgagccgagccaagcctgaggacagggagagtctgaagagcgcctgtgtagtgtgtctgagcagcttcaagtcctgcgtctttctggagtgtgggcacgtttgttcctgcaccgagtgctaccgcgccttgccagagcccaagaagtgccctatctgcagacaggcgatcacccgggtgatacccctgtacaacagctaatagtttggaagccgcacagcttgacctggaagcacccctgcccccttttcagggatttttatctcgaggcctttggaggagcagtggtgggggtagctgtcacctccaggtatgattgagggaggaattgggtagaaactctccagacccatgcctccaatggcaggatgctgcctttcccacctgagaggggaccctgtccatgtgcagcctcatcagagcctcaccctgggaggatgccgtggcgtctcctcccaggagccagatcagtgcgagtgtgactgaaaatgcctcatcacttaagcaccaaagccagtgatcagcagctcttctgttcctgtgtcttctgtttttttctggtgaatcgttgcttgctgtggacttggtggaggactcagagggaggaaaggctgggccccgagtacaacggatgccttgggtgctgcctccgaagagactctgccgcagcttttcttctttttcctcatgccccggkwaacagtctttcttcagaattgtcaggctgggcaggtcaacttgtgttcctttcccctcacctgcttgcctccttaacgcctgcacgtgtgtgtagaggacaaaagaaagtgaagtcagcacatccgcttctgcccagatggtcggggccccgggcaacagattgaagagagatcatgtgaagggcagttggtcaggcaggcctcctggtttcgccactggccctgatttgaactcctgccacttgggagagctcggggtggtccctggttttccctcctggagaatgaggcgcagaggcctcgcctcctgaaggacgcagtgtggatgccactggcctagtgtcctggcctcacagcttccttgcaaggctgtcacaaggaaaagcagccggctggcaccctgagcatatgccctcttggggctccctcatccagcccgtcgcagctttgacatcttggtgtactcatgtcgcttctccttgtgttaccccctcccagtattaccatttgcccctcacctgcccttggtgagccttttagtgcaagacagatggggctgttttcccccacctctgagtagttggaggtcacatacacagctctttttttattgcccttttctgcctctgaatgttcatctctcgtcctcctttgtgcaggcgaggaaggggtgcctcaggggccgacactagtatgatgcagtgtccagtgtgaacagcagaaattaaacatgttgcaaccaaaaaaaaaaaaaaaaaaaaaaaaaaa

SEQ ID NO: 15 - DNA, 1796 bp, Homo sapiens
ggcacgagggagtgtccgctgtgcctggtgcggctgccgcctgagcgggccccgcgcctcctcagctgtccgcaccgctcgtgccgggactgcctccgccactacctgcgcctggagataagcgagagcagggtgcccatcagctgccccgagtgcagcgagcgactcaacccgcacgacatccgcttgctgctcgccgacccgccgcttatgcacaagtacgaggagttcatgctgcgccgctacctagcctcggaccccgactgccgctggtgcccggccccggactgcggttatgctgttattgcctatggctgtgccagctgcccgaagctaacttgtgagagggaaggttgccagactgagttctgctaccactgcaagcagatatggcatccaaatcagacatgcgatatggcccgtcaacagagggcccagactttacgagttcggaccaaacacacttcaggtctcagttatgggcaagaatctggaccagatgacatcaagccatgcccacgatgcagtgcatacattatcaagatgaatgatggaagctgtaatcacatgacctgtgcagtgtgtggctgtgaattctgttggctttgtatgaaagagatctcagacttgcattacctcagcccctctggctgtacattctggggcaagaagccatggagccgtaagaagaaaattctttggcagctgggcacgttgattggtgctccagtggggatttctctcattgctggcattgccattcctgccatggtcattggcattcctgtttatgttggaaggaagattcacagcaggtatgagggaaggaaaacctccaaacacaagaggaatttggctatcactggaggagtgactttgtcggtcattgcatccccagttattgctgcagttagtgttggtattggtgtccccattatgctggcatatgtttatggggttgtgcccatttctctttgtcgtggaggcggctgtggagttagcacagccaacggaaaaggagtgaaaattgaatttgatgaagatgatggtccaatcacagtggcagatgcctggagagccctcaagaatcccagcattggggaaagcagcattgaaggcctgactagtgtattgagcactagtggaagccctacagatggacttagtgttatgcaaggtccttacagcgaaacggccagctttgcagccctctcagggggcacgctgagtggcggcattctctccagtggcaagggaaaatatagcaggttagaagttcaagccgatgtccaaaaggaaattttccccaaagacacagccagtcttggtgcaattagtgacaacgcaagcactcgtgctatggccggttccataatcagttcctacaacccacaggacaggtttagcatgatccatgcatgactcagcaaagtggattttgtctccacagagaatgcaacaatatggaaatccaagtggacattgaagccaaaccaagccactatcagctggtgagtggaarcagcacggaggactcgctccatgttcatgctcagatggcagagaatgaagaagaaggtagtggtggcggaggcagtkaagrggatcccccctgcagacaccaaagctgtgaacagaaagactgcctggccagcaaaccttgggacatcagcctggcccagcctgaaagcatccgcagtgacctagagagttctgatgcacagtcagacgatgtgccagacatcacctcagatgagtgtggctccccccgctcccatactgcaagccctgccccc

SEQ ID NO: 16 - DNA, 1694 bp, Homo sapiens
  SITE (1692): n equals a,t,g, or c
  SITE (1694): n equals a,t,g, or c
gctgttwtcaggacatgaaatctgctgtgatcacgccttgcagtcattttttccatgcaggctgtcttaagaaatggctgtatgtccaggagacctgccctctgtgccactgccatctgaaaaactcctcccagcttccaggattaggaactgagccagttctacagcctcatgctggagctgagcaaaacgtcatgtttcaggaaggtactgaacccccaggccaggagcatactccagggaccaggatacaggaaggttccagggacaataatgagtacattgccagacgaccagataaccaggaaggggcttttgaccccaaagaatatcctcacagtgcgaaagatgaagcacatcctgttgaatcagcctagaggagaagcagcaggaatgatgctttgatactctggaggagaagttaactcaagatggaattcatgttctgatttgaggaatgaaaatgagatgatcaggcaggaaactgacattccaaggatctaatccaggaagtactctcagtggggaccacctgctttcatcccctgacattgtgggagaaattttgcaatgtatgctaatcaaaatgtatttatatgttctctgctgatgttttatagaggtttgtgaagaaaattcaacctcagcaacttcagaaactgcccctgatacgtgtgagagagaaataaaatcagattttgagtgttgaagggactgaggaagtgaggataaagagcatgaggacagcatggaaagaaggaggcagaagtggaactgaactttcactctccatgggacagatcaatctcattatcaagtctgaatagcaaccagccctctcctccaccccgtttctcctcagttaattggagctcagtcaggtgattattgagtcttgtacagcactgaaatgaaatcaaagatgaagaagcattgattgtattcaaagattgaagcacgctcatactttgtatgtgctttagggaaggggtgggtgggcacttgggccttgcgggtgcattcatgtaatctgagactcttgaactttatgacggagtcttcartattttgatgtatatgaaacttttgttaaatatgttgtatacttcgctggctgtgtgaagtaaactaaaactctgatgaacactttggagtctgctttagtgaaggagaccaaagtgggaagggctttagggcactgatagaggccctgggtgtacttttcaatcctgtgtaatgtttaattcttgcaactgaatcaaaacagtgttaaattatggcaatatttgcactttgggaatgagtacataactgtatgatcacactctgcaaatgccacttttaaagctgttaatagactttgcaccttttctttgacaaggatgtgtcatatttaaatttttacattcatcatggctacaggtagaactggggaggggggaatgtaattttttatgggaattttgatatgaaaagaaactagtcatttatttatacaataggcttggctcaaaaagtgtttttcagacctcggtattcctaatgtgggatgtgactttattttatttttagtagcaaatttggatgtagactgacagacatagctgaatgtcttaataaatttaaatttgaagataaaaaaaaaaaaaaaaaaaaaaaaaaaaaaaaaaaaaaaaaaaaaaaaaaaaaaanan

SEQ ID NO: 17 - DNA, 2266 bp, Homo sapiens
ccacgcgtccgagcccctcaaacagaaacaagtagtagacggtgtcagctacctccttcaggagatctatggaattgaaaacaagtacaacacacaagattctaaggtgtctgaagacgaagtgagtgataacagtgccgagtgtgtggtgtgtctctcggatgtccggaacaccttgattctgccctgtcgccacctctgcctctgtaacacctgtgcagacacgctgcgctaccaggccaacaactgccccatctgccgactgcccttccgggcactgcttcagatccgagccatgaggaaaaaattgggccccttgtccccaaccagctttaaccccatcatctcatcccagacatctgactctgaagagcatccatcctcagagaatattccaccaggctatgaagtagtatctcttctggaggccctcaacgggcccctcaccccgtccccagcagttcctccacttcacgtgcttggagatggccacctctcaggaatgctcccttcatatggcagtgatggccacctgccccccgtcaggacgatctcgcctcttgaccgcctgtctgacagcagcagtcagggactcaaactcaaaaagagtctctccaaatccacttcccaaaactcttccgtgctgcatgaagaggaagatgagcattcctgcagcgagtcggagacacagctctctcagagaccgtcggttcagcatctcggagaggaatgtggtgtgactccagaaagtgagaatctcaccttgtcgtcatctggagctattgaccagtcgtcttgcacagggacgcctctgtcatccactatttcctccccagaaggccctgccagcagcagcttggcccagtctgtcatgtccatggcatcctcccagatcagcactgacaccgtctcctccatgtctggctcctacatcgcccctggcactgaagaggagggagaggctctctcttccccccagcctgccagcagggccccctcagaagaaggagaggggctgccagcggagtctccagacagcaactttgctggcctcccagctggagagcaggatgcagagggaaatgatgttatagaggaagaggatggatcacccacgcaggaaggccagaggacgtgcgcatttctaggtatggagtgtgacaataacaatgactttgacatcgcaagcgtgaaagcactggacaataagctgtgctctgaggtctgcttacctggtgcctggcaggctgatgacaatgccgtcagtcggaatgcccagcgccggcgcttgtcatccagcagcctggaggactctgagacgaggccctgtgtgtggggccctttggctgtctgagccccagcctctgcacttgggctcccctcctgccctgcattccatccatcctcactcagctgctgcctactgggcatcctcagcaagatgctggagactttttaccctcctgtgacagctgttacaacctgtaaccacaatccctcacctctcagagggaactggaaccctcctttctccgtgtgacctaaagccactcaatgaactgcagctcacgagaccttttgcagggactctggaatgtcctcacggtatattgatgttcaggtggagctggggtccatgggctaatttcttacacatcttttttctccttagggggtagaacaagaaggcttagagtttggcagctttgttacaaacatccctctggcatttcctggtctctggcacatcataaccaattggaaacctgcagtttggggtagggctggaggatcgctcctgtggaaagggagagccatactgcacggacgtagcgtttccctctacaagcactaggagcacctttctcaaggacaagaaatggtagcaaccaaaaggttggttgaaggaaacaatccttccttctggtggcagagccagtcttctgggcctcacatgcctgtgcggttaagaaggagctcttggccgggcgcggtggctcacgcctgtaatcccagcactttgggaggccgaggcgggtggatcatgagatcaggagatcgagaccatcctggctaacacggcgaaaccccgtctctactaaaaatacaaaaaattagctgggcatggttgcaggcgcctgtagtcccagctacttgggaggctgaggcaggagaatggcctgaacccgggaggcggagcttgcagtgagccgagatcgcgccaatgcactccagcctgggcgacagagaaaaaaaaaaaaaaaaa

SEQ ID NO: 18 - DNA, 781 bp, Homo sapiens
gcacgagcagacacagagatctttgtcaaccaggcctgtgggggggacatgcctgccttggaaggggcaccccataccccgccactgccacggcggccccgtaagggaagctcggagctgggctttccccgcgtggccccagaggatgaggtcattgtgaatcagtacgtgattcggcctggcccctcggcctcggcggcttcttcggcggcggcaggcgagcccctggagtgccccacctgtgggcactcctacaatgtcacccagcggaggccccgcgtgctgtcctgcctgcactctgtgtgtgagcagtgcctgcagattctctacgagtcctgccccaagtacaagttcatctcctgccccacctgccgccgtgagactgtgctcttcaccgactacggcctggccgcgctggctgtcaacacgtccatcctgagccgcctgccgcctgaggcgctgacggccccatccgggggtcagtggggggctgagcccgagggcagctgctaccagaccttccggcagtactgtggggccgcgtgcacctgccacgtgcggaacccactgtccgcctgctccatcatgtagtagcgcctgcctgcccgccactgcccgctgagcctcgctcgctgcttcttcagggacccggccctgccctgccgcccgctgacccttccttccccaccatggcttccggccccaccccgagtggcattgtcgctgcagccaactttgccattaaaactctttgccaaagttaaaaaaaaaaaaaaaaaaa

SEQ ID NO: 19 - DNA, 707 bp, Homo sapiens
gggctgcaggctgcatcggcgagtgcggagtggactctggctttgaggccccacgcctgggtgagcagggcggggactttggctacggcgggtacctctttccgggctatggcgtgggcaagcaggatgtgtactacggcgtggccgagactagccccccgctgtgggcgggccaggagaacgccacgcccacctccgtgctcttctcctctgcctcctcctcctcctcctcttccgccaaggcccgcgctgggcccccgggcgcacaccgctcccctgccacttccgcgggacccgagctggccggactcccgaggcgccccccgggagagccgctccagggcttctctaaacttggtgggggcggcctgcggagccccggcggcgggcgggattgcatggtctgctttgagagcgaagtgactgccgcccttgtgccctgcggacacaacctgttctgcatggagtgtgcagtacgcatctgcgaaaggacggacccagagtgtcccgtctgccacatcacagccacgcaagccatccgaatattctcctaagccccgtgccccatgcctccggggcccactccactgggcccaccctggacctgttttccactaaagccttttggaaagcggtaaaaaaaaaaaaaaaaaaaaaaaaaaaaaaaaaaaaaaaaaaaaaaaaaaaaaaaaaaaaaaaaaaaaaaa

SEQ ID NO: 20 - DNA, 2105 bp, Homo sapiens
tcgacccacgcgtccggcgggcttgggagccggcaggtgcgggccgagggcgggcacagcggccggcggagctgaggcgcgcggcggggaaagctcggccggcctcccgggccccagccttctccagaacccctgctacccacgactaagccccgaacaatctgcccttgggcttgttctcttcgcagttgtcggccctgggccgggagctggagtcccagactcataggtcccggcccagcccccgaagagccgcctcagccggggggagttgctcggactcaaacgtccagtcctcgtgcgaccgcgctgggtcggaagtgagcaggctgaggccaccatggagcagtgtgcgtgcgtggagagagagctggacaaggtcctgcagaagttcctgacctacgggcagcactgtgagcggagcctggaggagctgctgcactacgtgggccagctgcgggctgagctggccagcgcagccctccagggacccctctctcagccaccctctctctggtgatgtcacagtgctgccggaagatcaaagatacggtgcagaaactggcttcggaccataaggacattcacagcagtgtatcccgagtgggcaaagccattgacaggaacttcgactctgagatctgtggtgttgtgtcagatgcggtgtgggacgcgcgggaacagcagcagcagatcctgcagatggccatcgtggaacacctgtatcagcagggcatgctcagcgtggccgaggagctgtgccaggaatcaacgctgaatgtggacttggatttcaagcagcctttcctagagttgaatcgaatcctggaagccctgcacgaacaagacctgggtcctgcgttggaatgggccgtctcccacaggcagcgcctgctggaactcaacagctccctggagttcaagctgcaccgactgcacttcatccgcctcttggcaggaggccccgcgaagcagctggaggccctcagctatgctcggcacttccagccctttgctcggctgcaccagcgggagatccaggtgatgatgggcagcctggtgtacctgcggctgggcttggagaagtcaccctactgccacctgctggacagcagccactgggcagagatctgtgagacctttacccgggacgcctgttccctgcttgggctttctgtggagtccccccttagcgtcagctttgcctctggctgtgtggcgctgcccgtgttgatgaacatcaaggctgtgattgagcagcggcagtgcactggggtctggaatcacaaggacgagttaccgattgagattgaactaggcatgaagtgctggtaccactccgtgttcgcttgccccatcctccgccagcagacgtcagattccaaccctcccatcaagctcatctgtggccatgttatctcccgagatgcactcaataagctcattaatggaggaaagctgaagtgtccctactgtcccatggagcagaacccggcagatgggaaacgcatcatattctgattcctacctggaaggaattttgttgaaaggggttttcacctgtgagccttggtctgtctcggtagggtggtcaacttcagtggactgtggttggtttcagagcgcctggctgaggagttccactgaggggagcactggagcagccctttggcagaggctgaggagggagatggaccagcccacgcctggcacctggctccatggcataaggaaagggagatgctggcctctgtgctcctgctgtcttttcctgtttctgtttgcgtttgacttagtagcaaccgacagagtggcaagggatttggtcttcagcagtagacatccttccacccctgccctcagccaagtctcttgctgccatgccaatgctatgtccacccttgcccctcggcccaagagtgtccagcggtggcccacctcttcctcccactacagcctcaacagtatgtaccatctcccactgtaaatagtcccagttagaacggaatgccgttgttttataactttgaacaaatgtatttactgcccttctcaaaaaaaaaaaaaaaaaaaaaaaaaaaaaaaaaaaaaaaaaaaaaaaaaaa

SEQ ID NO: 21 - DNA, 1781 bp, Homo sapiens
gaaggaagccaacaggatccgacccggtgttttgtgacaaaggcaagacccccaggtctacttagagcaaagttagtagaggaggcagctaggcgtggctctcattccttcccacagaatggattataagtcgagcctgatccaggatgggaatcccatggagaacttggagaagcagctgatctgccctatctgcctggagatgtttaccaagccagtggtcatcttgccgtgccagcacaacctgtgccggaagtgtgccaatgacatcttccaggctgcaaatccctactggaccagccggggcagctcagtgtccatgtctggaggccgtttccgctgccccacctgccgccacgaggtgatcatggatcgtcacggagtttacggcctgcagaggaacctgctggtggagaacatcatcgacatctacaaacaggagtgctccagtcggccgctgcagaagggcagtcaccccatgtgcaaggagcacgaagatgagaaaaataacatctactgtctcacgtgtgaggtgcccacctgctccatgtgcaaggtgtttgggatccacaaggcctgcgaggtggccccattgcagagtgtcttccagggacaaaagactgaactgaataactgtatctccatgctggtggcggggaatgaccgtgtgcagaccatcatcactcagctggaggattcccgtcgagtgaccaaggagaacagtcaccaggtaaaggaagagctgagccagaagtttgacacgttgtatgccatcctggatgagaagaaaagtgagttgctgcagcggatcacgcaggagcaggagaaaaagcttagcttcatcgaggccctcatccagcagtaccaggagcagctggacaagtccacaaagctggtggaaactgccatccagtccctggacgagcctgggggagccaccttcctcttgactgccaagcaactcatcaaaagcattgtggaagcttccaagggctgccagctggggaagacagagcagggctttgagaacatggacttctttactttggatttagagcacatagcagacgccctgagagccattgactttgggacagatgaggaagaggaagaattcattgaagaagaagatcaggaagaggaagagtccacagaagggaaggaagaaggacaccagtaaggagctggatgaatgagaggcccccagatgcagagagactggagagggtggggaggggcccagcggccttggtgacaggcccagggtgggaggggtcggggcccctggaggggcaatggggaggtgatgtcttctctctgctcagagagcagggactagggtaggaccctcaccgctgcgtccagcagacactgaaccagaattggaaacgtgcttgaaacaatcacacaggacacttttctacattggtgcaaaatggaatattttgtacatttttaaaatgtgatttttgtatatacttgtatatgtatgccaatttggtgctttttgtaaaggaacttttgtataataatgcctggtcattgggtgacctgcgattgtcagaaagaggggaaggaagccaggttgatacagctgcccccttcctttcctgagcaggaggatggggtagcactcacagggacgatgtgctgtatttcagtgtctatcccagacatacggggtggtaactgagtttgtgttatatgttgttttaataaatgcccaatgctctcttcctgttcttcaaaaaaaaaaaaaaaaaaaaaaaaaaaaaaaaaaa

SEQ ID NO: 22 - DNA, 1311 bp, Homo sapiens
  SITE (1281): n equals a,t,g, or c
gctatccgggttcggcgcggggcggggatgtgaatcccgatggagcggcccgaggaaggcaagcagtcgccgccgccgcagccctggggacggctcctgcgtctgggcgcggaggagggcgagccgcacgtcctcctgaggaagcgggagtggaccatcgggcggagacgaggttgcgacctttccttccccagcaataaactggtctctggagatcactgtagaattgtagtggatgaaaaatcaggtcaggtgacactggaagataccagcaccagtggaacagtgattaacaarctgaargttgttaagaarcagacatgccctttacagactggggatgtcatctacttggtgtacaggaagaatgaaccggaacacaggtctgggggtggtggcatctcccctaaaggaagtggtccctctgtggcaagtgatgaagtctccagctttgcctcagctctcccagacagaaagactgcgtccttttcgtcgttggaaccccaggatcaggaggatttggagcccgtgaagaagaaaatgagaggagatggggaccttgacctgaacgggcagttgttggtcgcacaaccgcgtagaaatgcccaaaccgtccacgaggacgtcagagcagcggctgggaagccagacaagatggaggagacgctgacatgcatcatctgccaggacctgctgcacgactgcgtgagtttgcagccctgcatgcacacgttctgcgcggcttgctactcgggctggatggagcgctcgtccctgtgtcctacctgccgctgtcccgtggagcggatctgtaaaaaccacatcctcaacaacctcgtggaagcatacctcatccagcatccagacaagagtcgcagtgaagaagatgtgcaaagtatggatgccaggaataaaatcactcaagacatgctgcagcccaaagtcaggcggtctttttctgatgaagaagggagttcagaggacctgctggagctgtcagacgttgacagtgagtcctcagacattagccagccatacgtcgtgtgccggcagtgtcctgagtacagaaggcaggcggcgcagcctccccactgcccagcacccgagggcgagccaggagccccacaggccctgggggatgcacccttcacgtccgtcagcctgacgacagtcaggattacgtgtgccctctgcaaggaagccacgccctgtgcacctgctgcttcagcccatgcccgaccggaragtggaacgcgaacaggaccccgcgtgkcgsccctnaacaagtgtkccggtctgctgcaagccttt

SEQ ID NO: 23 - DNA, 2101 bp, Homo sapiens
tcgacccacgcgtccggccagagagaaaagactgcgaggtggccgcagctgtggccggagaggtgggagtcggagcgaggccctctcgggggagcagggtgaacgccggccactctaggatcctcactcggggagaggaggcatagctcgcggtgtcacctccagccgcaacgtactccgggtcggccttgcgctcggggcctgagaggggcggcggcggggtcaggggccgcacaaagaatgaaccagcagtggaagagaaaatactgtaagctggctgactgctggtgaagaaaatgctttatttttgtggcaggcatctgtgggatctgtaatagaaatgatggctggctgtggtgaaattgatcattcaataaacatgcttcctacaaacaggaaagcgaacgagtcctgttctaatactgcaccttctttaaccgtccctgaatgtgccatttgtctgcaaacatgtgttcatccagtcagtctgccctgtaagcacgttttctgctatctatgtgtaaaaggagcttcatggcttggaaagcggtgtgctctttgtcgacaagaaattcccgaggatttccttgacaagccaaccttgttgtcaccagaagaactcaaggcagcaagtagaggaaatggtgaatatgcatggtattatgaaggaagaaatgggtggtggcagtacgatgagcgcactagtagagagctggaagatgctttttccaaaggtaaaaagaacactgaaatgttaattgctggctttctgtatgtcgctgatcttgaaaacatggttcaatataggagaaatgaacatggacgtcgcaggaagattaagcgagatataatagatataccaaagaagggagtagctggacttaggctagactgtgatgctaataccgtaaacctagcaagagagagctctgctgacggagcggacagtgtatcagcacagagtggagcttctgttcagcccctagtgtcttctgtaaggcccctaacatcagtagatggtcagttaacaagccctgcaacaccatcccctgatgcaagcacttctctggaagactcttttgctcatttacaactcagtggagacaacacagctgaaaggagtcataggggagaaggagaagaagatcatgaatcaccatcttcaggcagggtaccagcaccagacacctccattgaagaaactgaatcagatgccagtagtgatagtgaggatgtatctgcagttgttgcacagcactccttgacccaacagagacttttggtttctaatgcaaaccagacagtacccgatcgatcagatcgatcgggaactgatcgatcagtagcagggggtggaacagtgagtgtcagtgtcagatctagaaggcctgatggacagtgcacagtaactgaagtttaaataaaaatgtcttcagctccatgctcaaggttgaaagggttacctgtaaatttctgcccacataacattatactcatccctagtagtgcattttgggagttggggtgggaaggggtatgggaaggatagactcataattaaaatgtctaacatgtctctgttgagaaatttatttaatgtaaggaacttgggtgttaatagttgagagctgtttagtaataacccagttttcttgaggtctgtttactttatactttttaaaaacttctgtagttcttttggccagtgtgtttgtattatctgtgcattaatggtcctcatctgactcctgcattgtgtcttatttttctgcatggattggcataagaccattactaaaatttggcacctgtgagatgtttgatattatgaacaggaaacataatttaatgtatgaatagatgtgaatttgggatttcaaaatagatgaataacaactattttatagtaaagttattgaaatggaaatgaaaacagccagtaacttatgtttcagaatgtttgtaacacacttcatggtgttcccataggctttgctgtctagtcttatagtttggaggtttttggtctgcatttttctttttgattacaaaatttataattttaataaatactagaggttatcaaaaaaaaaaaaaaaaa

SEQ ID NO: 24 - DNA, 3095 bp, Homo sapiens
ctgcaggaattcggcacgagtgcaagatgaacattcttaaagccctagggatcccgcccaatgccgactgcatggacgacttgcccactgacttcgagggctctctgggaggtccacccaccaaccagatcacaggtgccagcgacacaacagtgaatgaaagttcagtcactttggaccctgctgtccggactgtgggagccttgcaggtggtccaggatacagaccccatcccccaggagggagacgtcatctttactactaacagtgagcaggagccagctgtaagcagtgattctgacatttccttgatcatggcaatggaggttggactgtctgatgtagaactttccactgaccaggactgtgaagaagtgaaatcttgaaacgacaaatccagaagcaaagagatagtaggacccaagggaaaggaagggaagagtgctccaagacttggaccaggcacacacacacctccagatcaccttggcaactccagggcgctccgttcaagaatgctgacgaaaagcaatatccaaagtcttgtcaatcaggatgcagtttctccatcggtatggcagtctgtggccttggcagctgggaagttgaaagctgatttccactcctatgtccatgtagacatacacttcagaagctcctaaaacagagactgaaaggccacctttaggatttcttagtttcatttcaattctttccatgtctcatcattcttgtttttggcatgttgtttgatttctttggcaatttttttaaagattatttgtagtttactttccatctattcctttgtttttcctttgatgcactccagcttttgtataggtttctgtttagaagcaccagttcctgctatgatcagtttgtattccatctctgagatatgtggtcttgacctcccagcatgaagtgtgcatggctttgagaagtgcctcagcaccctgaaatggactaaggccagctttcattaagaatctaagttcttctaagtgggcctttaaaaaccccagctgccagagaccccaacactaagccctaaatctgctgaggccactgctggttattttaagccacatcacacttgcttccacttgccgggcttgattaagggcccacgtgacatgagaagggagctctagggaagccgtttcattcttctgggtcttacagtctttggctgaaattctgaactcagaagtcccctccaaggcatccagtctttggtggttgtagggctggttttaaaaccagataccacattttcttcctattgaaaacaaaatgccagttgcattggtttcccctgggctagaacagtttttttcttacctctgtaagtgggttctgtaaaaaatggaggctttagagaaaagccaatcatttttaagtccaatggcaaacatagtgggggctgcagtagcacctagcttttaccttaatttcgacacacttctgttgaatctcaccagaccatgtgggaggatttaggtgaatccctagcagattgcttcccagggctccctgagtgtgtccagataccaagtgaggaatgaggtgtgatttgctgtatcatttgaaccaaaaagtatgcagcatgagaatttgctagatcgtttatcctgactgaaatagacaaagtaagagggaaaggaaaagaggtatcaagtaaatactgaaacccaatggtgtttttaaactgtttctgtttttattcatcttttgtaactatgacagaaatgtgctattttttcagtgggcaattttgtaatatattcagactatccagatacagagatgactaaggtcattgatagcgtctctgaacaatcagacggatcaccttatctctacacagctggcaaacaccaggctgcggcttggattaaccaggaaagaaagcttttctcactgagttgtttttatgtattgatggggacttttccacctcattagactaatactcattcaaaaagagtttggttctgctgtaaatccttgccgcctgctgaaacatggtgtgcaggtcaacggagaatactagctgctcctttttcaccacctttaccaatttcctatttgatggtttgtaagtagacagtaaggcaaggcagatgattattaccctcagaaaggttgcatctccctaggagtccaatgcttcctgtaatgaaatccactctctatgtgtgggaaaagaggcagggaggaatgaagagagctctgaatcgagaatcctagatgaaccacacgctttactaagcctcggcttcttcatctataatgtgaagggtttaataacatgagtccccaagctcctctggctgtgggaccacagatgagtctttcagaggcaggatccatttttgcagatagctatgacttgtggcaatcaggcttcgtagcttggggaggtagagttacttgacatgtatcatgtaataacagcctttgagacttggcacaactatggtgctgagaatgaaaatctaaatgattgaagttttaagtccaagtaggagttggtttgttttgccttgtttaaaaattgctgttagtcacagagtttgcaatctctggataccttcaaatcctagctctcactgtgggattcttgatctcagaggtgtttatttttcacagtcagcataggcttgcgccactgactcctccttcagtcggctttgcccaaaacaaattttagtattactggtattaagtttagtccagtggaattagaaggataattcaatagcaacagaaatataaattatattccattcccagagagagaatgcgctttggattgtttagtcctctgattaacgagtattttctcttcctgccaagaactaggtgaatcaggaattgattgcatatgcaagccctggccacagctgcacttacaggatgcctcatagacgatgaggggtctgaaaggccaacccgaggctggcagatctgaccccaaggaggtcctgctgcaaaccccctgagcctttgccattcactacttaccaaagtttgtttctggaggattttccctgtagctttgatagtttaaaaaaaaaaaaaaaaaa

SEQ ID NO: 25 - DNA, 664 bp, Homo sapiens
  SITE (521): n equals a,t,g, or c
  SITE (573): n equals a,t,g, or c
ggccgggtgcgcagcgacccgggtggaggaggcctggcctacgccgcttatgccaacgggctgggggcacagctgcctggcttgcagccgtcggacacgtcgggctcctcctcttcgtccagctcctcctccagctcttcatcctcttcctccgggcttcggcgtaaaggcagccgcgactgctccgtgtgcttcgagagcgaagtgattgccgcgctggtgccctgtggccacaacctcttctgcatggagtgcgccaatcgcatctgtgagaagagcgagcccgagtgcccggtctgccacaccgcggtcactcaggccatccgcatcttttcttaaaggcagcgggcgctgctagtgcgcaccgtgctgggggaagggggaacccctccccatcctctttccccagcgctcgcctgctccctgggtgccccccctctcccttctccttcccggccccaccaacactctgagatccgagaggagcttggaaagctgtagtatccgctcatttttaaaanttaatttttaagtaaaggaatttgccaggatatctgcatcaagaagtactgnagcctgggaaacctgaacacctgraatgcatgctctataaataataggaacggggacatttaggaatgataggtttacactggacttaaaa

SEQ ID NO: 26 - DNA, 853 bp, Homo sapiens
gtcgcgccctcgcggaagctcggcagtgcgcgtgcgcccgcacccgcactccaaattagaaaggggacgtctagtgggttgcccgggaggggtggcgggagcggtcctggaaataatctgtcctctgtcgccgggaactggcgaggtagttccttcgcggtggagagacctggaatggccaaatatcaaggtgaagttcaaagtttgaaactggatgatgattcagttatagaaggagtaagcgaccaagtacttgtggcagttgtggtcagtttcgctttgattgctaccctggtatatgcacttttcagaaatgtacatcaaaacattcacccagaaaaccaggagctagtaagggtacttcgagaacagcttcaaacagaacaggatgcacctgctgccactcgacagcagttctacactgacatgtactgtcccatctgcctgcaccaagcctccttcccggtggagaccaactgtggacatcttttttgtggtgcctgcattattgcttactggcgatatggttcatggcttggggcaatcagttgtccaatctgtagacaaacggtaaccttactcctaacagtatttggtgaagatgatcagtctcaggatgttctgagattgcatcaggatattaatgattataaccggagattctcagggcaacccagatctattatggagaraattatggatctacccactttactgaaaggcatgcattcagggaaaatgttttccagtccggggggcctttttggatgttcgcatcaggataatactttgttaattgggggaacctttttttccctatccttaattattccccccccctaaaattttggtt

SEQ ID NO: 27 - DNA, 648 bp, Homo sapiens
gggacgagggcgggcgctgttgagggagtcgggccgcgactgtggacgtttttataccttcccgcgcggacgccggcgctgccaacggaagggcggagacggagtttcgtcatgttggccaagcccatttgagatctttgaagatatcctcaacgtgaggctctgctgccatgaaggtgaagattaagtgctggaacggcgtggccacttggctctgggtggccaacgatgagaactgtggcatctgcaggatggcatttaacggatgctgccctgactgcaaggtgcccggcgacgactgcccgctggtgtggggccagtgctcccactgcttccacatgcattgcatcctcaagtggctgcacgcacagcaggtgcagcagcactgccccatgtgccgccaggaatggaagttcaaggagtgaggcccgacctggctctcgctggaggggcatcctgagactccttcctcatgctggcgccgatggctgctggggacagcgcccctgagctgcaacaaggtggaaacaagggctggagctgcgtttgttttgccatcactatgttgacacttttatccaataagtgaaaactcattaaactactcaaatcttgaaaaaaaaaaaaaaaaaaaaaaaaaaaaaaaaa

SEQ ID NO: 28 - DNA, 615 bp, Homo sapiens
  SITE (607): n equals a,t,g, or c
  SITE (610): n equals a,t,g, or c
  SITE (613): n equals a,t,g, or c
agattccatctttttcccagcggcgccagctgacactctctgccaatgcccaggtgctgagcgacagtgtcccaccggtccctgtgcccagaatggcctgcaccaagaccctgcaacagtcccagcccatctccgcaggagccaccacaaccaccaccgctgtggcccctgctgggggtcattctggctccacagaatgtgacctggagtgtctggtgtgccgggagccctacagctgtccccggttgcccaagctgctggcctgccagcatgccttctgcgccatctgcctgaagctcctgctgtgcgtgcaggacaacacctggtccatcacctgcccgctgtgccgcaaggtcaccgccgtccccgggggcctcatctgcagcctgcgcgaccatgaggcggtggtggggcagctggcccagccatgcacagaggtatcgctctgtcctcaggggctggtggatcctgctgacttggcagcaggacaccccagcttggtgggagaggatggacaggatgaagtaagtgcaaaccacgtggcagcccggcgcctggccgcgcacctactcctgctgccttgctcattatcctcatcgggcccttnatntancc

SEQ ID NO: 29 - DNA, 255 bp, Homo sapiens
gaaaagactgcgaggtggccgcagctgtggccggagagcacaaagaatgaaccagcagtggaagagaaaatactgtaagctggctgactgctggtgaagaaaatgctttatttttgtggcaggcatctgtgggatctgtaatagaaatatattggmgtaattcaagattctgtggttggcccttttgactgctctctctacaggtttaatttgggcatttactcattttcatggctccaaggaccatgtatgtgt

SEQ ID NO: 30 - DNA, 1726 bp, Homo sapiens
ccacgcgtccgcccagttcgagcggtccccgggaggcggacctgcagctccggtatcttcttcctgctcttcttctgcatcttcgtctgcttcttcctcctcttcgtccagctcctcctccagctcttcatcctcttcctccgggcttcggcgtaaaggcagccgcgactgctccgtgtgcttcgagagcgaagtgattgccgcgctggtgccctgtggccacaacctcttctgcatggagtgcgccaatcgcatctgtgagaagagcgagcccgagtgcccggtctgccacaccgcggtcactcaggccatccgcatcttttcttaaaggcagcgggcgctgctagtgcgcaccgtgctgggggaagggggaacccctccccatcctctttccccagcgctcgcctgcctccctgggtgccccccctctcccttctccttcccggccccaccaacactctgagatccgagaggagcttggaaagctgtagtatccgctcatttttaaaatttaatttttaagtaaaggaatttgccaggatatctgcatcaagagtactgtagcctgggaaacctgaacacctgaaatgcatgctctataaataataggaacggcgacattctagtaatgatagtttttacactgtacttaataggaagcttccaaaagaagaaaaccccacaagttttccattttcttaaagtaggaaaaaatgaacagtaataattatgatgaagatgatagtagtgctatgggatgtgtggactgtttagtgtgttcccctttgtgggtgggttcctatgatacttattatagaacacagtggatcctttttgaatgttcgtggaagggccaggagttcctgtgaaaccaggatactgcagctttattaaagttaaagaaactgtaacatatctcttatatattaaaaacgtttaaaagttttaaagagaaattgcattaatacagattgaagtattttattcttttttgacttgaaaaattatatttcatattgcaaagatgtttacaagtattttaatttaagttcagtgaacttttttgtagctgggttaaatctttttattttagtatggccttatggcaaagaacactgtattattttaataatcacacaattgtgacggaattacaaccataaaatgtgtaatgttttgaacagtattctgttgggatggagattttataggttcagacaaatcttctagatctgcttcacccagcatattttctattcagtgatataaagcatattttattctatattattacaaaaacggaaatgtataaacatgtcaaaaagaactgttgatgctttctaacatttgtataaatagaattcagtgcaagttacaaaaattctgttgcaccactctagttttagtatttctattttaatacatttgtttaccacttgtttatgtatatgtaggtgatgttacttgagcttaaatgtactttactgagcaaagtttaaaaaacaaagtatattttattttatgataaagggcctttaacctcatggtcaaatactaatattatatttgctgagacaagatttgaaattgtatcaagagttttatttttctgacatttaaagttctacataataaaggtaaaacttaagtaatggtgctacttcattttttaagtatttctatataaataaaatattgaagaaaatcttaaaaaaaaaaaaaaaaa

SEQ ID NO: 31 - DNA, 3320 bp, Homo sapiens
  SITE (116): n equals a,t,g, or c
  SITE (244): n equals a,t,g, or c
  SITE (293): n equals a,t,g, or c
  SITE (3311): n equals a,t,g, or c
  SITE (3317): n equals a,t,g, or c
ggccaggcccgagtgcctgggcgccctggtggactgcctggtgttcaactaccggctccgccacgggctgggctggagcgcggccccggttgcaggcgctgacggcggcgccgcgnggctcctcagatgcctgggctgccggggcttcctgagcgagccggtgaccgtgccctgtggccacagctactgccgccgctgcctgcggagggaactccgggggcccgtgccgctctgccgggaccgntgccgccgccaccgccagtgccactgatgctgaagggaccgccccgcgnccgccgcctctggcgccgccwtcgccgcttcagacttcagaaccagcgtcgtcctcaaccacctggccgagaagtggtttccgggccagcgcgagcgggcccgggcggccggcaggctcggggagctactgcaccaggggcgctaccgggagccctggccgccgcctgcgaggcgctgcgagcagaacccagtgacttgattgtaaaaatttacagagcggaatcatatgctggtctccaagagtttaaagcagccatagaagatttaaatgcagttctttttcaacttccagattggcctgaggtctacttcaggaaaggaaaagtactctgcgatgctggttttttaggtgatgccttacaactctttcttcagtgcttagcccttgatgaagattttgcacctgcaaagctgcaagtacaaaagattttatgtgatttattattacctgaaaacttaaaagaaggcctgaaggaatcttcctggagttcattaccatgtactaaaaacagaccttttgattttcattcagtgatggaagagtctcagtctctcaatgaacctagcccaaagcagagtgaagaaataccagaggtcacttcagagcctgtcaaaggaagcttaaaccgtgctcagtcagcacagtctataaattcaacagaaatgcctgccagagaggactgtttaaaaagagtgtcctcagaacctgttctgtcagttcaagaaaaaggtgttctgctgaaaagaaagttgtctcttttagaacaggatgtgattgtaaatgaagatggaagaaataagctgaaaaaacaaggagaaactcccaatgaagtctgtatgttttccttagcttatggtgatattccagaagaattaatcgatgtctcagatttcgagtgttctctctgcatgaggttgttttttgagccagtaacaaccccttgcggacattcgttctgtaagaattgtcttgagcgttgtttagatcatgcaccatattgtcctctttgcaaagaaagcttaaaagagtatctagcagataggaggtactgtgtcacacagctgttggaagaattaatagtgaagtatctgcctgatgaactgtctgagagaaaaaaaatatatgatgaagaaactgctgaactctcacacttgaccaagaatgttccaatatttgtttgcactatggcctaccccactgtgccttgccctctccatgtatttgagccaagatacagattgatgattcgaagaagtatacagactggaaccaaacagtttggcatgtgtgtcagtgatacacaaaatagttttgcagattatggttgtatgttacaaattagaaacgtgcatttcttaccggacggaaggtctgtggttgatacagttggaggaaagcggtttagggttttaaaaagaggaatgaaagatggatattgcactgccgacattgaatatctggaagatgttaaggttgagaatgaagatgagattaagaatctcagagagcttcatgatttggtttactctcaagcctgcagctggtttcagaatttaagagacagatttcgaagccaaattcttcagcatttcggatcaatgcccgagagggaggaaaaccttcaggcagcccctaatggacctgcatggtgttggtggcttcttgcagttctccctgtagacccacgataccagctgtcggttttgtcaatgaagtctttgaaagaacggttgaccaagatacagcatatactgacctatttttctagagaccaatctaagtaactaactctttggatctccctttaaagtgaccctaatctggctgcattgatggccagattgtctgctgcctttgcacatctagtgctggtttcagaaatttaatgaaacttttctttttccttcgacctcctgaatcatgtggttctgcaaatgaataccttcaactaggatttagaccactaagaacttgcacagaaaaacacgcattgaatgtgtgtcgaacctctacattgtgaagttgcactatgtaccatactctaaaatgaaataagaactctttatgtctgtgagagagtgtgtgtgtgtgtgtgcgtgcgtgtgtgcttgtgggggttgggtagtgtgtgtgtattttctctggctttaaaattttaaaacaaacaaacaaaaaagccatagagagcagaacttgccgagggtcatttattgcccaagtttacaagagtagcgatacaagtttttgcaaattgaatttgcctcagatatatctgtcctaatgcttatatttgcacaagtatgtaaaatatcgtgttgaggatcattctttgttggaaatactgctcttgctgaactgtcttgaccattgactatgacacagtttcttatttatgtaaatacttgcatcacagtggccgacaggcattggatgcagaacctagagccagttttcaggaacaattgtaaacctgacatggtactgtgcatctattcataaaacactcaaaactgtgaaaatatggtttacatttaattgtacataaaggtaaagggagaactcaattcagtaccagttagtttgtacattttagggggcttttcacattaactgcccatttgtgtaatttatagtttgacatgatgtgtttgttttaaaaaaaaatgcatagtataaacccattaaggatctgggaaaagagaagaagtttaatatagaactaagcttttaaagtttgtttttgtttttaattctggtctcggtgcaaatgttagttatgccttattcatatcacagttagatcaccatgctgcaacatggtttatattcatgctgccctagaaacttttgtaattatttgttgcaaatttgtgactgtccttattaactttcttttatgtaagtaatttgtaaaagtttcttaaaatttttgcttttgcttatttaattttgaataaaagctaaattcctaataaaaaaaaaaaaaaaaaaaaaaaaaaaaaaccccggggggggncccggnccc

SEQ ID NO: 32 - DNA, 2801 bp, Homo sapiens
tcgacccacgcgtccggccgaggcggcagcggctgcgagaggcggcggcacgacgacggtccctcagcccagccaccatgagcaccaagcagatcacttgcaggtattttatgcatggtgtgtgtcgggaaggaagtcagtgcctattctcacatgacttggcaaacagcaaaccgtccaccatctgcaagtactaccagaagggctactgtgcctatggaactcggtgcagatatgaccacacgaggccctctgctgcagctggaggtgctgtgggcaccatggcccacagtgtgccctccccagctttccacagtcctcaccctccttccgaggtcactgcatccattgtgaaaactaactcacatgaacccggaaagcgtgaaaagagaacattggttcttagagaccgaaatctctctggcatggctgaaaggaagacccagccgagcatggtgagtaatccaggcagctgcagcgacccccagcccagccccgagatgaagccgcattcctacctggatgccatcaggagtggccttgatgacgtggaggccaagcagctcctacagcaacgagcagcagctgtgcccctacgcagctgctggggagtgccggtttggggatgcctgtgtctacctgcacgggaggtgtgtgaaatctgtaggctgcaagtcttgcacccattcgacccagagcagaggaaggctcacgaaaagatctgcatgttgacgttcgaacacgagatggaaaaggcctttgccttccaggcaagccaggacaaagtgtgcagtatctgcatggaagtgatcctggagaaggcctctgcttctgagaggagatttgggattctctccaattgcaatcacacgtactgtttgtcctgcatccggcagtggcggtgtgccaaacagtttgaaaacccaatcattaagtcttgtccagaatgccgtgtgatatcagagtttgtaattccaagtgtgtattgggtggaagatcagaataaaaagaacgagttgattgaagctttcaaacaggggatggggaaaaaagcctgtaaatactttgagcaaggcaaggggacctgcccatttggaagcaaatgtctttatcgccatgcttaccccgatgggcggctagcagagcctgagaaacctcggaaacagctcagttctcaaggcactgtgaggttctttaattcagtgcggctctgggatttcatcgagaaccgagaaagccggcatgtccccaacaatgaagatgtcgacatgacagagctcggggacctcttcatgcacctttctggagtggaatcatcagaaccctaaagagtagatggttgccctgcatcttgggctccatcggccgaaactttcccaagccagggtgtgcggagcttccctgtactgcagccaaggtgacgtgtgacttggatttgagtggagttgggcttagccttagtctcattcaatctccattattacagccatggggaagagtgaaagatataaagtaacctaattaaatgtatggaattgctatttttatagctgatatagttacacctcaagcccctcaggggtaacaactaacaaacacccaaactgtttggattgattgctttaaaaaacaaacctggctcttatctttgatcttttcttccccagaaatagtaaacttgcagctgcccctaatgcagcatatttttcttaccaaaggagtcttcagccctataaaaggattcctctatagtgtatttctctagtgtatttagtgtgtcgtcaaaattttgatttatacagagctttcaagaacacacaatgcaaagtgagcgcagcatagctgttaacaaacatacaacttttttctagggctttaagggtggtcatttttttcaagttctctcaagtgtcccaaatcagggtagcaatcttgttgccacatgtgcagcaaacaaagtggaagtatagatcttcttctcccttagggaggctcttgaaggagcaggaggtacagtactgggtagcagtctggccctcctgtcgtctggttggtgttggggcctccagccagggccctctaggggaaccaagcctctgctctcacctgtgggttcttgcccatcagggtaattgtattgagaactcaaatatacgtgcacttacatgtgtggttcgtactcaagtgatctattatctagctgcaaagcctggctttgatttgaaattttgtaaaaatttcatggcacccaaggtttctgattctgacccagcagtggtcctgaagagagctgatggcaagtcttgtagtcattttgattttaattgaagggtgagcataaccttgtgaacagcactagcttgttccaagctggaatttatctaatctatttttgtgtttaaaaaagctgtacctaccaaataaataaatagtttataaaatgtattacttaaggtattagctgagtttagagtactttctgcttaattaatttttatacttaactcttcagtagaggtttacaaagagtacaaaggttaaattacaaattcattcccagcctaggctctgggcacatttcctgttcttgaattctgctcctgaagagggtgaacaaatggggcattcaagttgtgagctcagaattactttaaaaggaggtaacagccagccattacacctaaatttaatttattttattaaaataacataattgagggaccatcagataactgtattttgtcaggtgcaataaaaacaaaattaaaacccacaaaaaaaaaaaaaaaaaaaaaaaaaaa

SEQ ID NO: 33 - DNA, 1492 bp, Homo sapiens
tcgacccacgcgtccgcccacgcgtccggctggaatgagtacctgacaactcggatcgagcagaaccttgttttgaattgcacctgccccattgccgactgccccgcccagcccaccggagccttcattcgtgccatcgtctcctcgccagaggtcatctccaagtatgagaaggcgctcctgcgtggctatgtggagagctgctccaacctgacctggtgcaccaacccccagggctgcgaccgcatcctgtgccgccagggcctgggctgtgggaccacctgctccaagtgtggctgggcctcttgcttcaactgtagcttccctgaggcacactaccctgctagctgtggccatatgtctcagtgggtcgatgacggtggctactatgacggcatgagcgtggaggcgcagagcaagcacctggccaagctcatctccaagcgctgtcccagctgtcaggctcccatcgagaagaacgaggggtgcctgcacatgacctgtgccaaatgtaaccatggattctgctggcgctgcctcaagtcctggaagccaaatcacaaagactattacaactgctctgccatggtaagcaaggcagctcgccaggagaagcggtttcaggactataatgagaggtgcactttccatcaccaggcgcgggagtttgctgtgaacttgcggaaccgggtgtctgccatccatgaagtgcccccgcccagatccttcaccttcctcaatgatgcctgccagggactggagcaggctcggaaggtgctggcctacgcctgcgtgtacagcttctacagccaggacgcagagtacatggatgtggtggagcagcagacagagaacctggagctgcacaccaatgccctgcagatcctcctggaggaaaccctgctgcggtgcagagacctggcctcctccctgcgcctcctgcgggccgactgcctcagcacgggcatggagctgctccggcggatccaggagaggctgcttgccatcctgcagcattctgcccaggatttccgggttggtcttcagagtccatcagtagaggcctgggaggcaaaaggacccaacatgcctggcagtcagccccaggcctcctcagggccagaggcagaagaggaggaggaagacgatgaggatgatgtgcccgagtggcagcaggatgagtttgatgaggagctggacaatgacagcttctcctacgatgagtctgagaacctggaccaagagactttcttctttggtgatgaggaagaggatgaagatgaggcctatgactgagggggcagatgcaggaaacacctagagcagccccagagtcacggggctgagggggcgggagctgcccctgtcatagggagggggagtcccagcgtctgtagtgcttcctgtttgctgaataaaggtctctttctcacaaaaaaaaaaaaaaaaaaaaaaaaaaaaaaaaaaaaaaaaaaaaaaaaaaaaaaaaaaa

SEQ ID NO: 34 - DNA, 1762 bp, Homo sapiens
tcgaccacgcgtccgcccacgcgtccgcaatgtcctccaccaagagaaacgtaaaggacacttgatcacacaatccctggaataatatccaggaaacacttgctggagccactcgcagcacccttccctggcagcacacttggggacagcgaggagatgagcgcatctctgaattacaaatctttttccaaagagcagcagaccatggataacttagagaagcaactcatctgtcccatctgcttagagatgttcacgaaacctgtggtagattctcccttgtcagcacaacctgtgtaggaaatgtgccagtgatattttccaggcctctaacccgtatttgcccacaagaggaggtaccaccatggcatcagggggccgattccgctgcccatcctgtagacatgaagtggttttggatagacatggggtatatggacttcagaggaacctgctggtggaaaatatcattgacatctacaagcaggagtccaccaggccagaaaagaaatccgaccagcccatgtgcgaggaacatgaagaggagcgcatcaacatctactgtctgaactgcgaagtacccacctgctctctgtgcaaggtgtttggtgcacacaaagactgccaggtggctcccctcactcatgtgttccagagacagaagtctgagctcagtgatggcatcgccatcctcgtgggcagcaacgatcgagtccagggagtgatcagccagctggaagacacctgcaaaactatcgaggaatgttgcagaaaacagaaacaagagctttgtgagaagtttgattacctgtatggcattttggaggagaggaagaatgaaatgacccaagtcattacccgaacccaagaggagaaactggaacatgtccgtgctctgatcaaaaagtattctgatcatttggagaacgtctcaaagttggttgagtcaggaattcagtttatggatgagccagaaatggcagtgtttctgcagaatgccaaaaccctgctaaaaaaaatctcagaagcatcaaaggcatttcagatggagaaaatagaacatggctatgagaacatgaaccacttcacagtcaacctcaatagagaagaaaagataatacgtgaaattgacttttacagagaagatgaagatgaagaagaagaagaaggcggagaaggagaaagagaaggagaaggagaagtgggaggagaagcagtagaagtggaagaggtagaaaatgttcaaacagagtttccaggagaagatgaaaacccagaaaaagcttcagagctctctcaggtggagctgcaggctgcccctggggcacttccagtttcctctccagagccacctccagccctgccacctgctgcggatgcccctgtgacacagattggatttgaggctcctcccctccagggacaggctgcagctccagcgagtggcagtggagctgattctgagccagctcgccatatcttctccttttcctggttgaactccctaaatgaatgatattcattccaactgctgcccctctgtctgcctggctgagatgcatgtgggcagcaggaagcccaagtgaaattaatattatgcagatgatgaaagggacctctgaacaggatttctgcaaaaatagccccaaactgcaattccatatgacttatctaacatcttggggggaaagaatattttgagaaaatagttgcagaaagcactggaaataataaacttgatcttatacaaaaaaaaaaaaaa

SEQ ID NO: 35 - DNA, 1740 bp, Homo sapiens
catccagtaccctgcctgactctgacatgcccccagcctcccccagctctgcagggagccctggtsccagagaccttcctcccatttctccctatgggtgcctgacctgagggcagagacatctgagtgtgtataagcacagcaggacaccaggacctggcctgaagacatttcctctcctcccctctggatttctcagagactgttctgcgatgaccacagcaaggtaccggcccacctgggacctggccctcgacccgctggtgtcttgcaagctctgtcttggggagtacccagtggagcagatgacaaccatagcccagtgccaatgcatcttctgtactctgtgcctgaaacagtatgttgagctcttgatcaagaaggattagaaaccgcaattagctgcccagatgctgcctgccctaaacagggccacctacaggagaacgagattgagtgcatggttgcagctgaaattatgcaaagatataaaaagctacaatttgaaagaggtaggtgcctggtatatctgccggttatgattcctgtaatgtgtgaatgtggataattttgtggggagttcttttggtagatatggttatacagcatttgataggagttaaaaagytgatgtaaaataaacttctgaaattaaactgacattctggattctctggaacagcycacagtttgaagaccttgtctagtggatctatttggtagcaggaagaatttatgggaacacaatttgtttataaaggattgaggctcctgggggaggcttaaagttgatggctctcttgaggtattatatttcagccagcttaaggctgagtttgagggctaaactcttggactggcccagaagttaaaagatgcagagtcatggagggaagttgtgagggtaggcatagcagaaattacagtaacccccgtcctaacaacagtccgatggtaggtgtcctgtctgcgcttactcaccactggacacagacctagatagtaggtggtgaatgaataatcaagtcccttatcccagtaagtgtcacaacaactctgcaaagctaatttgtcattatctaataaacggatccccagagaggctaactgacttgccctgatttctaaatatagtgggtgctttgggaccacatcccatgacccttcatcgtgagccctccactgggccctgaatagtccttctggctggagcaggcctgatgcagacccaggggtcctctgggagagcagtgtggcaggtgcacacagagcagaacatgattctcaggataatattgcaaagcattaagccatgtggaatgtccaggagaggtctttagctctgctctctgaaatactccggtgtcatacaatgaaactgtaaagagtctgtgggactctctttggstttgttttcatatctattctgggccccaggcttgtctggtaaagagcagagtgacagatgtgtgcaggcgacactccatatgcagaacatcattgtgtggaccttgcaggcggattctgagtttggattgctggcatctgctctccctctccctgcactgattctcgggttcttgacctgagcagggtctcaccactgagacacagccctggagggtgggcttacatgaaaacatggccggatggggagtggacggcagaggagaccagaggacaatatccagagactcccagtttagctgcatgcagagacctgttgtttgtatatttttg

SEQ ID NO: 36 - DNA, 3374 bp, Homo sapiens
  SITE (12): n equals a,t,g, or c
  SITE (18): n equals a,t,g, or c
  SITE (22): n equals a,t,g, or c
  SITE (3367): n equals a,t,g, or c
gatccacgcgtncgcggnacgntgggttgcatggagcagcattttcagactttgacacataatgccaaattgcttaccaaaagcatgatatgaagttatatcctcctaacaatctaaaagcatcttaagcagacctgtcattatcagtggaccactggacagggttgtggggctgatgctttctttatggttcctctacaggatatggtgcctgtcatagttgattactgccttctgctgcagcgaaaggatcttttatttagtcagatgtatgataaattaagtgagaattcagtggccaaaggagtatttttggagtgccttgagccatatattttaagtgataaattggtgggaatcacaccccaagtaatgaaagacttgattgtwcatttccaagataaaaaattaatggraaatgtggaagcgctcattgtacatatggatatcaccagcctagatattcagcaggtagttctcatgtgttgggaaaatccgtttatatgatgctatgatctatgtctacmacrgaggcmtgaatgaatttattagtccaatggagaaacttttcagagtcattgctcctcctctgaatgcaggaaaaacactaacagatgaacaagttgttatgggcaataagctccttgtatatattagctgttgtctagcaggtcgtgcctatccccttggtgacatccctgaagatctggttcccttggttaaaaaccaggtttttgaatttctaattcgcctgcattcagcagaggcttctcctgaggaagaaatctatccttacattcggactttgctacattttgacacaagagaatttctcaatgtattggcactgacttttgaagattttaaaaatgacaagcaagctgtggaatatcaacagcgaattgtggatattttgttgaaagttatggtggagaattcagactttaccccctcacaagtaggatgtctctttaccttccttgctcggcagcttgcaaagcctgacaacaccttgtttgtaaacagaacactttttgatcaggtccttgaattcctttgtagtcctgacgatgactcccgacactctgaaagacagcaggtccttttagaattgctgcaggctggaggcatagttcaatttgaagagagtcgactcatccggatggcagaaaaagctgagttctatcaaatttgtgaatttatgtatgaaagagaacaccaatatgacaaaattattgattgcyacttacgtgaccctctgcgagaggaagaagtctttaattacattcacaatatcttatccattcccggacacagtgcagaggagaagcagtctgtatggcagaaagcaatggatcatattgaggaacycgtgtccctgaagccttgtaaagctgcggagctggttgccacccacttttctggacatattgaaacggtcattaaaaaacttcagaaccaggttttgcttttcaaatttttgaggagtcttcttgacccaagggaaggtattcatgtaaatcaagaattactgcaaatatctccttgtatcacagagcagttcattgagctgttgtgtcagttcaacccaacccaagttatagagactctgcaagtccttgagtgctaccgtctggaagaaactattcagattactcagaagtatcaacttcatgaagtcaccgcttatctattggaaaagaaaggagatattcatggtgccttcctaataatgttagagagactacaaagcaaacttcaagaggtaacacatcaaggtgaaaataccaaagaggatccctcattgaaggatgttgaagatactatggtggagaccattgctctttgccagagaaattcacataatttgaaccagcagcaacgtgaggccctttggtttccgttattggaggcaatgatggcccctcagaagctgtccagttcagccattcctcatctacactctgaagctctgaagtctttgaccatgcaagttttaaatagcatggcagcatttattgcccttccatcaatcttgcaaagaatcttacaggatccagtttatggaaaaggaaaacttggagaaatccagggacttatcttgggaatgttagatacctttaactatgaacaaaccctgctggaaacaacaaccagccttytaaaccaagatctccattggtcattgtgtaacctgagagcttcggtcaccagaggactgaatcccaaacaagattactgctctatatgtttgcagcagtacaagagacgccaagaaatggctgatgaaataattgtctttagctgtggccatttgtatcactcattctgcctacaaaacaaagaatgcactgtggaatttgagggccaaacaagatggacatgctacaaatgcagttcaagtaacaaagtaggaaaactcagtgaaaattcatctgaaattaaaaagggaaggataaccccatcacaggtaaaaatgtctccatcgtatcatcagtccaaaggggatcccactgctaaaaagggaacctcagaacctgttctggatccacagcaaatccaagcatttgatcagctttgccgtctctaccgaggaagctccaggctggctctcctcacggaactctcccagaatcgcagcagcgagagctataggccattcagtggctcgcagagtgctcctgctttcaacagcatcttccagaatgagaacttccagctgcagctcattcctccacctgtgactgaggattgatgactccatggagcctggcccaggagaaccagagatgatcccgaggcagctggggagaggccccgcctctggtgggcttggcctccaccacctcccatgcttctgagaagaggttccaaattgggctyctgtgcccagagcgtccacagcaccattcccagtgtagactcccagtcttctccacattgctgtcatggcgtcagttcaccagactcattgattttgttttgcttgttaagcaaaggaatgtcacatacctctgtccagctttttaggaaatacatttcgcctattgcgactttttccatttaccctgaagcctagaaagtaggtggaactcacacaaatggcattccagagtctgccatactccgtctcctccagctgctggataatacagaggaacttcaacttctacagggaacagtggttggccaggctgcagtataactgaagcatgccttggagagagcagacactgtgggggccagggccatctccctttaatgtgttcatgttaaaacctatttgagtgtaagacttgccctttctaacaataaatgctcygtgtttaagttcaaaaaaaaaaaaaaaagggsggcccgtacccanttgccct

SEQ ID NO: 37 - DNA, 2036 bp, Homo sapiens
cgccaacagcactggacaagagaaaaccatttgtacaattaccagaatgaagtggatgatgacctagtctgccatatttgccttcaacctctgctgcagccactagacacaccctgtggacatacattctgctacaagtgcctcagaaactttttacaagagaaagatttctgtccgttggaccggaaaagacttcattttaagttgtgcaagaagtctagtattctagttcataaactcctagacaaattattagttttatgtccattttcttcagtgtgcaaagatgtaatgcaacgttgtgatctggaggcacatctcaaaaacagatgtcctggagcttctcatcggagagttgccctggagagaaggaaaactagtagaactcaagcagagattgagaatgaaaatgggcccactctactagatcctgcaggtaccttatctccagaagcagactgtttggggacaggcgcagtgcctgtggagcggcacttgacatcagcgtctcttcccacatggagtgaggagcctggccttgacaaccctgcctttgaggagagcgctggagctgacaccacacaacagccacttagtttaccagaaggagaaatcaccacgattgaaattcatcggtccaatccttacattcagttaggaatcagcattgtgggtggcaacgaaacacctttgattaacattgtcatccaggaggtctatcgggatggggtcattgccagagacgggagacttcttgctggagaccagattcttcaggtcaacaactacaatatcagcaatgtgtcccataactatgcccgagctgtcctttcccagccctgcaacacactgcatcttactgtgcttcgagagaggcgctttggcaaccgagcacacaaccattctgatagtaactctccacgagaagagattttccagtggctcttcataaacgggactctggtgaacagcttggcattaaattggtgcgaaggacagatgagccaggggtttttattcttgacctgttggaaggggggttggctgcccaggacggcaggctaagcagcaatgaccgagtgctggccatcaatgggcacgacctgaagtatggaactccggagcttgctgcccagattattcaggccagtggagagagagtgaatttaacaattgctagaccagggaaaccccagcctggtaacaccattagagaagcaggaaatcatagcagcagcagccagcaccacacaccaccaccgtattatagcagaccaagctcacataaggatcttactcagtgtgttacatgccaagaaaaacacattactgtaaagaggaacccatgaatcccttggcatgaccgttgctgggggcaggggaagtaagagtggtgagctgcccatctttgtgaccagtgtgccaccccatggctgccttgcacgagatggcagaataaagagaggtgatgtgttgctaaatatcaacggcattgatttgaccaatttaagtcacagtgaggcagttgcaatgctgaaagccagtgccgcgtcccctgctgttgcccttaaagcacttgaggtccagattgttgaggaggcgactcagaacgcggaggagcagccgagtactttcagcgaaaatgagtatgatgccagttggtccccatcatgggtcatgtggcttgggcttcccagcacacttcatagctgccacgatatagttttacgaagaagttacttgggaagttggggctttagtatcgttggtggatatgaagagaaccacaccaatcagccttttttcattaaaactattgtcttgggaactcctgcttattatgatggaagattaaagtgagtcttgttctaattaatgatgtgattcatgttgatgacattgaacatgatctagaacaggggtcaggggtcagcaataaaaacaagaaacaaatacaaaataaaaataaagaaacaaaacagaacaaaaacaaaaaaaaaaggaattcgatatcaagcttatcgataccgtcgacc

SEQ ID NO: 38 - DNA, 603 bp, Homo sapiens
ccacgcgtccgcggcgggcgctgttgagggagtcgggccgcgactgtggtcgtttttataccttcccgcgcggacgccggcgctgccaacggaagggcgggtagggcggctctgctgccatgaaggtgaagattaagtgctggaacggcgtggccacttggctctgggtggccaacgatgagaactgtggcatctgcaggatggcatttaacggatgctgccctgactgcaaggtgcccggcgacgactgcccgctggtgtggggccagtgctcccactgcttccacatgcattgcatcctcaagtggctgcacgcacagcaggtgcagcagcactgccccatgtgccgccaggaatggaagttcaaggagtgaggcccgacctggctctcgctggaggggcatcctgagactccttcctcatgctggcgccgatggctgctggggacagcgcccctgagctgcaacaaggtggaaacaagggctggagctgcgtttgttttgccatcactatgttgacacttttatccaataagtgaaaactcattaaactactcaaatcttaaaaaaaaaaaaaaaaaaaaaaaaaaaaaaaaaaaaaagg

SEQ ID NO: 39 - DNA, 836 bp, Homo sapiens
ccgggcggcgccgccatggccgacgtggaagacggagaggaaacctgcgccctggcctctcactccgggagctcaggctccaagtcgggaggcgacaagatgttctccctcaagaagtggaacgcggtggccatgtggagctgggacgtggagtgcgatacgtgcgccatctgcagggtccaggtgatggatgcctgtcttagatgtcaagctgaaaacaaacaagaggactgtgttgtggtctggggagaatgtaatcattccttccacaactgctgcatgtccctgtgggtgaaacagaacaatcgctgccctctctgccagcaggactgggtggtccaaagaatcggcaaatgagagtggttagaaggcttcttagcgcagttgttcagagccctggtggatcttgtaatccagtgccctacaaaggctagaacactacaggggatgaattcttcaaataggagccgatggatctgtggtcctttgggactcatcaaagccttggtttagcattttgtcagttttatcttcagaaattctctgcgattaagaagataatttattaaaggtggtccttcctacctctgtggtgtgtgtcgcgcacacagcttagaagtgctataaaaaaggaaagagctccaaattgaatcacctttataatttacccatttctatacaacaggcagtggaagcagtttcagagaactttttgcatgcttatggttgatcagttaaaaaagaatgttacagtaacaaataaagtgcagtttaaaacccaaaaaaaaaaaaaaaaaaaaaaaaaaaaaaaaaaaaaaaaaaaaaaaaaaaaaaaa

SEQ ID NO: 40 - DNA, 774 bp, Homo sapiens
aattcggcacgagcggaagtcgtctggcctccccgcggccgctcgcagcttgctggcctctcccgcgcctcacgtcggactccgtctccgcggcagggaagcagcatggaagctgaggacatccaggaggagttgacctgccccatctgcctggactatttccaggacccggtgtccatcgagtgcggccacaacttctgccgcggctgcctgcaccgcaactgggcgccgggcggcggcccgttcccctgccccgaatgtcggcacccatcggcgcccgccgcgctgcgacccaactgggccctggccaggctgactgagaagacgcagcgccggcgcctgggccccgtgcccccgggcctgtgcggccgccactgggagccgctgcggctcttctgcgaggacgaccagcggccagtgtgcctggtgtgcagggagtcccaggagcaccagactcacgccatggcacccatcgacgaggccttcgagagctaccgggtgagctggccgtcgcggtgactatgacggggctgtcagtgttgcccgataaagtttacttaatgctcctaaaagagccacgaagtggctgtcattcctactggaagcatgaaaagcccctgaaactcaaagaagttaagcaaaacacgaatttcagagctagggttaaaactggaatgagaggaggggaggtgcaaacctcagcaatcattgtgcagaattttcaataaactggcccttggggagctcataataaagaaaaaaaaaaaaaaaaaa

SEQ ID NO: 41 - DNA, 1273 bp, Homo sapiens
gttgtcccgggagcagcgggatgcactggaggtgcaggtgaagaagctccaggaggagctggagcggctacacgcggggcctgagccccaggccctgcccgccttctctgacctggaggcgctctcactctccaccctctactccctccagaaacaactgcgggcccacctggaacaagtggacaaggccgtgttccacatgcagtcggtgaaatgccttaagtgtcaggaacagaagcgggcagtgctgccgtgccaacacgctgcgctgtgtgagctctgcgctgagggcagcgagtgccccatctgccagcctggccgggcccacaccctccagtcgtgaccctgcaggcctggcccagcctggcccagatcttctcacctaggactttttaaagtatatatatatatatgaatatatatatatatgtgtatgtatgtatgtatatgtatatgattatgtatatgtatacatttycgtatgtatgtatatgtatacatttccgtatgtgtgcaggtatgcgtggtggtgtggacagtgtctgtgtgtatatctgtacatagatatagacacacactttaaaagacttaccaagcactttttaaaagaagaaactattttgcagtcctcccctacccactccctgcccttcccactgcagagatgacatcccctcttctcccactggccttttggcagagaatctggttctgtctcttttttaatgtaggaactaactatttttaacttcttcctggggcctgagcagggaagggtgggactggaaggcactaaggggaagggagaagccctcagggcaggccctgctccccctacctccttgccagggcaagggtggagtgtggaagacgtgggtcccccagagcaggcctggccccagctgtgagggcctcagggaggcccgagggggagtgctgggggtctcagctggcttagctcctaagtttaccaaatgttaatttartcttggggagaacagcaagggctggaggccagtgctgcagggccagccccactcctgacacctgggcccttgaagctccttgaggggcaaggcccaggagttccagccctcaggttcctgagggtccaccctcagtccttccccccgccgcccctccccggactccccacaagagcctccctggccccagggccgcctaccaggctggtactcattctatgaccaccgsccccaaccagctrcccccagctctccctgccccctcccctctctggcaactagcaggg

SEQ ID NO: 42 - DNA, 790 bp, Homo sapiens
  SITE (21): n equals a,t,g, or c
gcggacgcgtggtcggacgcntgggccggacgcgtgggccgcccccagctgctctggttacggttggtgtttgcgaattctctgcggcaccttcttcgctgaactccaccgtcagttccataggcgcgcgcccgcgtcacgtgggccgaggttccggcgcggctgctggccggcggctgagccgggagaaaggagctgcggccaccgttcgccctacttctgcgcctcggggcgggcgcgccggtaaaaatggcgaaatgggggtaggcggcgctggacctgaagagatggggcgcgcaggtggggcggttgtcagagccccctgacgtgggcgccgggcttttatcggcgatttgatctggcgacctcgggccggcgcctaagaggtcagactgcggagcctgcgggtcgccagcggccccgccgagagccggaggcaatggatgaacagagcgtggagagcattgctgaggttttccgatgtttcatttgtatggagaaattgcgggatgcacgcctgtgtcctcattgctccaaactgtgttgtttcagctgtattaggcgctggctgacagagcagagagctcaatgtcctcattgccgtgctccactccagctacgagaactagtaaattgtcgttgggcagaagaagtaacacaacagcttgatactcttcaactctgcagtctcaccaaacatgaagaaaatgaaaaggacaagtatgtcctcaatttctttgttcaatattgaatggattttgcctttgtattgtttaatgacactaaaaaa

SEQ ID NO: 43 - DNA, 2243 bp, Homo sapiens
ctgcaggaattcggcacgagagagagaaaagactgcgaggtggccgcagctgtggccggagaggtgggagtcggagcgaggccctctcgggggagcagggtgaacgccggccactctaggatcctcactcggggagaggaggcatagctcgcggtgtcacctccagccgcaacgtactccgggtcggccttgcgctcggggcctgagaggggcggcggcggggtcaggggccgcacaaagaatgaaccagcagtggaagagaaaatactgtaagctggctgactgctggtgaagaaaatgctttatttttgtggcaggcatctgtgggatctgtaatagaaatgggatcttcaatattcatgttattttctcctttggtcttatatgattgttacctttatgaagctttagtgattacaaagcactttttttgtccatttttacctgagctttgtaaactctgatttgcaggatggctggctgtggtgaaattgatcattcaataaacatgcttcctacaaacaggaaagcgaacgagtcctgttctaatactgcaccttctttaaccgtccctgaatgtgccatttgtctgcaaacatgtgttcatccagtcagtctgccctgtaagcacgttttctgctatctatgtgtaaaaggagcttcatggcttggaaagcggtgtgctctttgtcgacaagaaattcccgaggatttccttgacaagccaaccttgttgtcaccagaagaactcaaggcagcaagtagaggaaatggtgaatatgcatggtattatgaaggaagaaatgggtggtggcagtacgatgagcgcactagtagagagctggaagatgctttttccaaaggtaaaaagaacactgaaatgttaattgctggctttctgtatgtcgctgatcttgaaaacatggttcaatataggagaaatgaacatggacgtcgcaggaagattaagcgagatataatagatataccaaagaagggagtagctggacttaggctagactgtgatgctaataccgtaaacctagcaagagagagctctgctgacggagcggacagtgtatcagcacagagtggagcttctgttcagcccctagtgtcttctgtaaggcccctaacatcagtagatggtcagttaacaagccctgcaacaccatcccctgatgcaagcacttctctggaagactcttttgctcatttacaactcagtggagacaacacagctgaaaggagtcataggggagaaggagaagaagatcatgaatcaccatcttcaggcagggtaccagcaccagacacctccattgaagaaactgaatcagatgccagtagtgatagtgaggatgtatctgcagttgttgcacagcactccttgacccaacagagacttttggtttctaatgcaaaccagacagtacccgatcgatcagatcgatcgggaactgatcgatcagtagcagggggtggaacagtgagtgtcagtgtcagatctagaaggcctgatggacagtgcacagtaactgaagtttaaataaaaatgtcttcagctccatgctcaagggtgaaagggttacctgtaaatttctgcccacataacattatactcatccctagtagtgcattttgggagttggggtgggaaggggtattggaaggataaactcataattaaaatgtctaacatgtctctgttgagaaatttatttaatgtaaggaacttgggtgttaatagttgagagctgtttagtaataacccagttttcttgaggtctgtttactttatactttttaaaaacttctgtagttcttttggccagtgtgtttgtattatctgtgcattaatggtcctcatctgactcctgcattgtgtcttatttttctgcatggattggcataagaccattactaaaatttggcccctgtgagatgtttgatattatgaacaggaaacataatttaatgtatgaatagatgtgaatttgggatttcaaaatagatgaataacaactattttatagtaaagttattgaaatggaaatgaaaacagccagtaacttatgtttcagaataaatgataacacacttcatggtgttcccataggctttgctgtctagtcttatagtttgaggtttttttggtctgcatttttctttttgattacaaaatttataatttaataaatactagagtttatcaaaaaaaaaaaaaaaaaaaaaaaaaaaaa

SEQ ID NO: 44 - DNA, 1567 bp, Homo sapiens
  SITE (1543): n equals a,t,g, or c
cgcgagtggcggccgcggggcccmggacaagggtccgcagagctgcagccttcgagggccagccctctccgagtccggggctgggtcccaccagtgacaaggcggcagcccgcgcacaccaaagagaaggcggctgtggcggcagcggcagccccagccatgctgtgttatgtgacgaggccggacgcggtgctgatggaggtggaggtggaggcgaaagccaacggcgaggactgcctcaaccaggcatatctttttcttgcacatcaaggaggccctcttggcaggccacctcttgtgttccccagagcaggcagtggaactcagtgccctcctggcccagaccaagtttggagactacaaccagaacactgccaagtataactatgaggagctctgtgccaaggagctctcctctgccaccttgaacagcattgttgcaaaacataaggagttggaggggaccagccaggcttcagctgaataccaagttttgcagattgtgtcggcaatggaaaactatggcatagaatggcattctgtgcgggatagcgaagggcagaaactgctcattggggttggacctgaaggaatctcaatttgtaaagatgactttagcccaattaataggatagcttatcctgtggtgcagatggccacccagtcaggaaagaatgtatatttgacggtcaccaaggaatctgggaacagcatcgtgctcttgtttaaaatgatcagcaccagggcggccagcgggctctaccgagcgataacagagacgcacgcattctacaggtgtgacacagtgaccagcgccgtgatgatgcagtatagccgtgacttgaagggccacttggcatctctgtttctgaatgaaaacattaaccttggcaagaaatatgtctttgatattaaaagaacatcaaaggaggtgtatgaccatgccaggagggctctgtacaatgctggcgttgtggacctcgtttcaagaarcaaccagagcccttcacactcgcctctgaagtcctcagaaagcagcatgaactgcagcagctgcgagggcctcagctgccagcagacccgggtgctgcaggagaagctacgcaagctgaaggaagccatgctgtgcatggtgtgctgcgaggaggagatcaactccaccttctgtccctgtggccacactgtgtgctgtgagagctgygccgmccagctacaggtaggggagtcagctgcccacttttgcctgcagcctcacctatccctcctcttaacggggagtaggagccaggtactggctcgctaatgcacagacggggaatgcccatcttyacccggaaagggtctttggatttggtgacctaaaaggcattgccctttagaaacattttagattagcatactattttcaacaacataattactccaaattatgcagtgktttyaaggttctgaaaatgagggctgaraatyctgggkaacatatctaggtagcggsttacctgaggacmagaatccaggscttctgrggcctggccaaggctgnttctctattttaaggtggctccct

SEQ ID NO: 45 - DNA, 2381 bp, Homo sapiens
cagcggctctggcggtcgtggcggtcggagatccgagagctctgcttctctgaaaagcgtgtggctttctggacttgtttcaggccacccacgagccagcgggaaaggattgccagccagagaaagacgaactccgaagtcccaatgcacagatcagcccccagtcaaaccaccaagaggagccgatcgccattttccactactcgtcgtagttgggacgacagcgagagttcgggaaccaacctgaatattgataatgaggactattccaggtatccgccaagagagtacagagcttcgggtagcagaagaggaatggcctatggacatattgactcttatggggcagatgatagtgaggaggagggggctgggcctgttgagcgaccgccagtgagagggaaaactggcaagtttaaagatgataagctgtatgacccagataatggggcaaggtctttggctgggccacctccacatttctctagttttagccgtgatgtgagagaggagcgagacaagttagacccagtccctgcagcaagatgctcagctagcagagctgacttcctgccacaaagtagtgtggcctcacagtcgtcttctgaaggcaagctggctacaaaaggtgacagctcggagagggagagaagggagcaaaatttacctgcacgtcccagcagggctcctgtgagtatttgtggtggtggggaaaacacctcaaagagtgcagaggaacctgtggtcaggcccaaaatcagaaacctggcaagtccaaactgcgtgaaaccaaaaattttttttgatactgatgatgatgacgatatgccacacagtacttccaggtggagggataccgccaatgacaatgagggccactcggatggcctggcaagaagagggagaggcgagagttcaagtggctatcccgagccaaagtaccctgaagacaaacgggaagcgaggagtgaccaagtgaaaccagaaaaggtgccgagacgacgacgcaccatgggcgaccctgacttctggacgcacagtgatgattactacaaatactgcgacgaagactctgacagtgacaaagagtggattgctgctctgcgtcggaaatatcgaagccgagagcaaaccctgtcctccagtggcgaaagctgggagactctgccggggaaagaagagcgggaacctccacaggctaaggtgagtgccagcactggcaccagccctggccccggtgctagtgccagtgccggggctggcgccggggccagtgctggcagcaatggcagcaattaccttgaagaagttcgagaaccatctcttcaggaagagcaggcatccctggaagaaggagaaattccttggctccagtaccatgagaatgacagtagcagtgagggggataatgattctggtcacgagttgatgcaacctggggtattcatgctggatggaaacaacaaccttgaagatgactccagtgtgagcgaagacctagaagtggattggagcctctttgatggatttgcagatgggttaggagtggctgaagccatttcctatgtggaccctcagttcctcacctacatggcacttgaagaacgcctggcccaggcaatggaaactgcccttgcgcacttggagtctctcgcagtggatgtagaggtggccaatccaccagcaagcaaggagagcattgacgctcttcccgagatcctggtcactgaagatcatggcgcagttggtcaggagatgtgctgccccatctgctgtagcgaatatgtgaagggggaggtggcaactgagctgccgtgccaccactatttccacaagccgtgtgtgtccatctggcttcagaagtcaggcacctgccccgtgtgccgctgcatgttccctcccccactctaaagaccaaggccgtttactcctggtctgattattttccccatctgaaatccacaatactgcaggagccctcttgaaattaacaatggaaataaaaccaatcagtcagttagcctaaacctattgattcctcgtgattatttccaatgtgaaaacagttgtgtatgattgcattaaaaatcatatcatcttttagaggttagaaaagggaaaactaaaccttctaaatgctacttgagattgcagtaagaagatacgttttctaacctgaaagttaaatcgcatttttttcttcagtagaatgggaatgtgttgctgttacttgtaatgtcaagtttatctgttaaatatgtccaaaaggcaaaatcatttttgttgcatgttatgggtcgatgttcctgtaattgcagtgccgtaaaagcttattaaagttgttcttttggttttacatggtaaaaaaaaaaaaaaaaaaa

SEQ ID NO: 46 - DNA, 625 bp, Homo sapiens
gagttgcctggtccgcttcctccccgcggaaatgcacaattttgaggaagagttaacttgtcccatatgttatagtatttttgaagatcctcgtgtactgccatgctctcatacattttgtagaaattgtttggaaaacattcttcaggcatctggtaacttttatatatggagacctttacgaattccactcaagtgccctaattgcagaagtattactgaaattgctccaactggcattgaatctttacctgttaattttgcactaagggctattattgaaaagtaccagcaagaagaccatccagatattgtcacctgccctgaacattacaggcaaccattaaatgtttactgtctattagataaaaaattagtttgtggtcattgccttaccataggtcaacatcatggtcatcctatagatgaccttcaaagtgcctatttgaaagaaaaggacactcctcaaaaactgcttgaacagttgactgacacacactggacagatcttacccatcttattgaaaagctgaaagaacaaaaatctcattctgagaaaatgatccaaggcgataaggaagctgttctccagtattttaaggagcttaatgatacattagaacag

SEQ ID NO: 47 - DNA, 798 bp, Homo sapiens
  SITE (732): n equals a,t,g, or c
  SITE (749): n equals a,t,g, or c
  SITE (779): n equals a,t,g, or c
  SITE (797): n equals a,t,g, or c
ctgaacgctgccatggctcagaccgtgcagaatgttacattgtcgctcactctgcccatcacgtgccacatttgcttggggaaggtacgtcagcctgtcatatgcatcaacaaccatgtattttgttcgatttgtattgatttgtggttgaagaataatagccagtgtccagcttgcagagtccccatcactcctgaaaatccttgcaaagaaattataggaggaacaagtgaaagtgaacctatgctaagccatacggtcaggaagcatcttcggaaaactagacttgaattactacacaaagaatatgaggacgaaatagattgtttacagaaagaagtasaagagcttaagagtaaaaatctcagcttggagtcacagatcaaaactattctggatcctttaaccttggtgcagggcaaccaaaatgaagacaaacatctagtcacagataatccaagtaaaattaacccagaaactgtagcagagtggaagaaaaaactcagaacagctaatgaaatctatgaaaaagtgaaagatgatgtggataagctaaaggaggcaaataaaaaattgaaattggaaaatggtggtctggtgagggagaatttacgactgaaggctgaagttgataacagatcacctccaaaagtttggaaggtttgcagttgctgctcttccagtcccaaagtagaacagtatggagcgtggaaacccaattcgccttcaagnaaagcccctgggaacgnagtgttgaaagttattttagaggaactagnattctccagttggcaccng

SEQ ID NO: 48 - DNA, 3050 bp, Homo sapiens
ggcacgagggaatttcgagtggtgttggagcgccggaggctagtgggtggctgacccccagcatcctcgagagcgaccatggactccctggccgagtctcggtggcctccgggcctggcagtcatgaagacaatagatgatttgctgcggtgtggaatttgcttcgagtatttcaacattgcaatgataatacctcagtgttcacataactactgctctctctgtataagaaaatttctgtcctataaaactcagtgtccaacttgctgtgtgactgtcacagagccggatctgaaaaataaccgcatattagatgaactggtaaaaagcttgaattttgcacggaatcatctgctgcagtttgctttagagtcaccagccaaatctcctgcttcttcctcttcaaagaatcttgctgtcaaagtatatactcctgtagcctccagacagtctttaaagcaggggagcaggttaatggataatttcttgatcagagaaatgagtggttctacatcagagttgttgataaaagaaaataaaagcaaattcagccctcaaaaagaggcgagccctgctgcaaagaccaaagagacacgttctgtagaagagatcgctccagatccctcagaggctaagcgtcctgagccaccctcgacatccactttgaaacaagttactaaagtggattgtcctgtttgcggggttaacattccagaaagtcacattaataagcatttagacagctgtttatcacgcgaagagaagaaggaaagcctcagaagttctgttcacaaaaggaagccgctgcccaaaactgtatataatttgctctctgatcgtgatttaaagaaaaagctaaaagagcatggattatctattcaaggaaataaacaacagctcattaaaaggcaccaagaatttgtacacatgtacaatgcccaatgcgatgctttgcatcctaaatcagctgctgaaatagttcaagaaatcgaaaatatagagaagactaggatgcgtcttgaagctagtaaactcaatgaaagtgtaatggtttttacaaaggaccaaacagaaaaggaaatagatgaaatccacagtaaatatcgtaaaaaacataagagtgaatttcagcttctggtggatcaggctagaaaaggatacaagaaaattgctggaatgtcacaaaaaacagtaacaataacaaaagaagatgaatctacagaaaagctatcttctgtatgcatgggacaggaagataatatgacctcagtaacaaaccacttttctcaatcaaagctggactccccagaggaattggaacctgacagagaagaggattcttctagctgtattgatattcaagaagttctttcttcatcagaatcagattcatgcaatagttccagttcagacatcataagagatcttttagaagaagaggaagcctgggaagcatcacataaaaacgatcttcaagacacagaaataagtccaagacagaatcgccgcacaagagccgctgaaagtgctgagattgaaccaagaaacaagcgtaataggaattaatgtgggcttttgctgacttttcaaatgcattgattagaataccgtacttttggttgccacagatagattttctatttataaatgcccaaggaaagatgctaaattctaaatattacggttagctgatattcattcttttctgcttttccagaggggaaaaatgttacaaaatatccttacttggtcagttgcctcctgcctctaaaacatctctctctaaaaatactgacatttcacacaggtaccagctttgcagaggaggtagactctttggcactttggcacagggatttggtttggtttggtttggtttgataattaaatttcagaatgtccttaggccattctccttctcttccatggagaatccagcctcacaaaaggattctttcaacttctttattgcaagaaacagttgagttaaatgtttgtttttggaaaggcgggatgtcagttcacatccttggtgtgtgtaagtaccgatgcacgccaccaccatgcctgtgttacagcagctccatgatggttgttgcccgaggttaatgtagttgtttgttagacctgtgtcttacacatttctcagagtaggatattagtattataatttaaagctacgacagtcacaaagtcacaataacttagaaacattgcgcatattcttctgaaatagcacttaaaaatgattagtgtcagtattttttcacttgggtcaatcaaatctgtaacactgaatccaagctattaaacaaaaagtatgcaatgaatgaattttgtaaatgaatagagagtatcagtttacaataatgttcttaaaacagtatcctctggatagttgagtatgggttagaaatcattgaaatggattggtcagaaattgctatctgtgtaaaatgtctaccagtagccagatgcttccagagttcttaatgcctctctggcatttcagaggcagcatcccccaactcccacccctctgccatcacccagcccaaacacatcagctttcaaatgagatgatagtaaatgcggcaatgttaagacaagaaatttatgatttgccagattcaacatttatgacctccccttccaaagactgtctccgttgaccttgtctttttggtatgccttggggtttctgataatgtgtggagtctcattatggctgagagtttagtgttttcacagtgaagtgcagacatttgatttctttatgagttccctgtgttagaaatggctatagaaaaatttgtcataataatttcatttgcatgaaatcctgaggggtgcattaaggaaactaaaagcaccacttaccaaatctatcggcagaactgatgtgaggtaagtgagcatgtcaaacaaaataggagctcacatggatatatttatgtcactgagttgtcagaaattatgtcaaaatgaaaactgtttgtttcatgacaaattatatagtctataaattaaaaaaaaaaaaaaaaaaaaaa

SEQ ID NO: 49 - DNA, 1397 bp, Homo sapiens
ggcacgagtcagagcctactggctcagtctcaaatcgaaatatggaaagggcagagtcacggagtggaagaggaggttctggtggtggtagtagttctggttccagttcgagttccagttccagttcgagttccagttccagttcaagttccagttccagtcctagttccagttccggtggtgaaagttcagaaactagctcagatttatttgaaggcagtaatgaaggaagctcatcatcaggctcatcaggtgccaggcgagagggtcgacatagggccccagtcacatttgatgaaagtggctctttgcccttccttagcctggctcagtttttcctcttaaatgaggatgatgatgaccaacctagaggactcaccaaagaacagattgacaacttggcaatgagaagttttggtgaaaatgatgcattaaaaacctgtagtgtttgcattacagaatatacagaaggcaacaaacttcgtaaactaccttgttcccatgagtaccatgtccactgcatcgatcgctggttatctgagaattctacctgtcctatttgtcgcagagcagtcttagcttctggtaacagagaaagtgttgtgtaattaagatctgaactctcagctatgtagctgatatagtgatgggcaaacaggaatcacttgcttttatgtccactttttgagtggtacttaaatgtaaagtaacaacctgaattgagtcattgctttctgaaggaatcattgtcctttctccagtttttgttccagaataaaaggaaatattttaaaagccacgttataggacctaaaaatctgatttccgtaccagttaaattggtagcatcactgttactgataatttatcatatacacttgtcaatttttcctttgttatcttaaaagatctgccttagcaatggctcctttttcatgttgatctttaaattttcccacaccataagagaggagcaaaggaaattaccagtttagactaagttacagtatgtgtttcataagtgattaaagctatatcattcccagttattagttaacacaaattcagccacattctgagtattgtttgttcacctttcagacttggtgatactggacatgtcagtgtaaataacactaaggttaggatcttctaagtgtataactgtctcctaagcccatcactgtggcacactgtagagtgagcttatagtttaattgagatatttatcttgtggaaatattaaaaagcctatgcttgtgtaagtgaaaaaaaatcacattcatttgtttaaaaatgtaaagctattttgtagaggctcagtacttttccaatgcactgttgtatgaatgcattaaaaattgtaaagtaccatgcttaaaaaaaaaaaaaaaaaa

SEQ ID NO: 50 - DNA, 780 bp, Homo sapiens
  SITE (49): n equals a,t,g, or c
ggcacgagagatggcggcgcaacagcgggactgcgggggtgctgcgcanctggcggggccggcggcggaggctgaccccctaggacgcttcacgtgtcccgtgtgcttagaggtgtacgagaagccggtacaggtgccctgcggacacgtcttttgctctgcatgcctgcaggaatgtctgaagccgaagaagcctgtctgtggggtgtgtcgcagcgctctggcacctggcgtccgagccgtggagctcgagcggcagatcgagagcacagagacttcttgccatggctgccgtaagaatttcttcctgtccaagatccggtcccacgtggctacttgttccaaataccagaattacatcatggaaggtgtgaaggccaccattaaggatgcatctcttcagccaaggaatgttccaaaccgttacacctttccttgtccttactgtcctgagaagaactttgatcaggaaggacttgtggaacactgcaaattattccatagcacggataccaaatctgtggtttgtccgatatgtgcctcgatgccctggggagaccccaactaccgcagcgccaacttcagagagcacatccagcgccggcaccggttttcttatgacacttttgtggattatgatgttgatgaagaggacatgatgaatcaggtgttgcagcgctccatcatcgaccagtgagcagagtccgtgcttgctatctgtctcatgttacagagcttccattacatattaaacgtgaaatctatgaaaaaaaaaaaaaa

SEQ ID NO: 51 - DNA, 710 bp, Homo sapiens
gggcgcgtcggccggcgagggagcagcaaacggccggcggcgggtgccgcgcggggggcgggcggcgcggagtaggtrgcggcggccatggccgaggcgtcgccgcatcccggacggtacttctgccactgctgctccgtggagatcgtcccgcgcctgccggattatatctgtccaagatgcgagtctggttttatcgaggagcttccggaagagaccaggagcacagaaaatggttctgccccctccacagctcccacagaccagagccggccaccgctggagcacgtggaccagcacctgttcacgctgccgcagggctacggacagtttgctttcggcatcttcgatgacagcttcgagatccccacgttccctcctggggcgcargctgacgacggcagggaccctgagagccggcgggagagagaccatccgtcccggcaccggtacggcgcccgacagccccgcgcccgcctcaccacgcggcgggccaccggccggcacgaaggcgtccccacgctggaagggttgaagaagcctcagcggaggcgatacggcctcctcgccaacactgaggaccccacggagatggcctcgctggacagcgacgaggagacggtctttgagtcccggaatctgagatgatgctgagccagggaggcggcccttccagcagccatgagggaaggacaggagatggggcccac

SEQ ID NO: 52 - DNA, 367 bp, Homo sapiens
  SITE (302): n equals a,t,g, or c
  SITE (305): n equals a,t,g, or c
  SITE (320): n equals a,t,g, or c
agcggcagagttccgctcccgcccaggactgtgcgctcggctcgcggtggggtccggcgggcgcggcttcggcgggcggcacctgcagacgagctgcgggctctgctgccatgaaggtgaagattaagtgctggaacggcgtgrccacttggctctgggtggccaacgatgagaactgtggcatctgcaggatggcatttaacggatgctgccctgactgcaaggtgcccggcgacgactgcccgctggtgtggggccagtgctcccactgcttccacatgcattgcatcctcaagtggctncanggacagcaggttcancagcactgccccatgtgccgccagaatggaagttcaaggattaggcc

SEQ ID NO: 53 - DNA, 616 bp, Homo sapiens
ggcacgagcgctatcgagcagggtccgagggctgtgtcagaaggctgggcagccatggcgtcctatttcgatgaacacgactgcgagccgtcggaccctgagcaggagacgcgaaccaacatgctgctggagctcgcaaggtcacttttcaataggatggactttgaagacttggggttggtagtagattgggaccaccacctgcctccaccagctgccaagactgtggttgagaacctccccaggacagtcatcagaggctctcaggctgagctcaagtgccccgtgtgtcttttggaatttgaggaggaggagactgccattgagatgccttgccatcaccttttccattccagctgcattctgccctggctaagcaagacaaattcctgtcccttgtgccgctatgagctgcccactgatgacgacacttatgaggagcacagacgagataaggctcgaaaacagcagcagcaacaccgactggagaacctccatggagccatgtacacgtgaggaggttggggctgagtgctggccctctgcgtcttccttattaaccttgaatcctcattaaaggtttctttacccaaaaaaaaaaaaaaaaaaaaaaaaa

SEQ ID NO: 54 - DNA, 1078 bp, Homo sapiens
gcacgagccggggcctcggctgcgaagatagcggcggccggacaggaagctcgaggaaagcgctgggccgggtctctacgaacacgtgaaggaaaagcagctccgtccacaacgccgcttcggggctcctagggagtcgggccccgggccgccaccgtcacctcggccgctgccgctgtcgccatcgccttgtttccccatcccccgccatggccgaggacctctctgcggccacgtcctacaccgaagatgatttctactgccccgtctgtcaggaggtgctcaaaacgcccgtgcggaccacggcctgtcagcacgttttctgtagaaaatgtttcctgactgcaatgagggaaagcggagcacattgtcccctatgtcgtggaaatgtgactagaagagagagagcatgtcctgaacgggccttagaccttgaaaatataatgaggaagttttctggtagctgcagatgctgtgcaaaacagattaaattctatcgcatgagacatcattacaaatcttgtaagaagtatcaggatgaatatggtgtttcttctatcattccaaactttcagatctctcaagattcagtagggaacagcaataggagtgaaacatccacatctgataacacagaaacttaccaagagaatacaagttcttctggtcatcctacttttaagtgtcccctgtgtcaagaatcaaattttaccagacagcgtttactggatcactgtaacagtaatcacctatttcagatagttcctgtgacatgtcctatttgtgtgtctcttccttggggagatcctagccagattaccagaaatttcgttagtcatctaaatcagagacatcaatttgattatggagaatttgtgaatcttcagctagatgaagaaacccaataccaaactgctgttgaagaatcttttcaagtaaacatctgaaggctgtagacatctctgcatctttgtacctgcaagtgccatctttaagggggaaactacatgaagtcaccgttacagtaacttgatgtgtatattaataaaagtaattcagtcaaaaaaaaaaaaaaaaa

SEQ ID NO: 55 - DNA, 1458 bp, Homo sapiens
gcggcacgagcagctttcaccttccactgcttgccatcccaaaggttgtaaaattaaagcactgagagccaagacaaacacgtatatcaagactcctgttcgtggtgaagagcccatttttgttgtcactggaaggaaagaagatgttgccatggccaaaagagagatcctctcagctgcagagcacttctccatgattcgtgcatctcgaaacaaaaatgggcctgccctgggaggattatcatgtagtcctaatctgcccggtcaaaccaccgtccaagtcagggtcccttatcgtgtggtaggattagtggttggacccaaaggagcaactattaaaagaattcagcagcagacccacacctacatagtaactccgagcagagataaggaacctgtctttgaagtgacagggatgcctgaaaatgttgaccgagcacgggaagaaatagaaatgcatattgccatgcgtacaggaaactatatagagctcaatgaagagaatgatttccattacaatggtaccgatgtaagctttgaaggtggcactcttggctctgcgtggctctcctccaatcctgttcctcctagccgcgcaagaatgatatccaattatcgaaatgatagttccagttctctaggaagtggctctacagattcctactttggaagcaataggctggctgactttagtccaacaagcccatttagcacaggaaacttctggtttggagatacactaccatctgtaggctcagaagacctagcagttgactctcctgcctttgactctttaccaacatctgctcaaactatctggactccatttgaaccagttaacccactctctggctttgggagtgatccttctggtaacatgaagactcagcgcagaggaagtcagccatctactcctcgtctgtctcctacatttcctgagagcatagaacatccacttgctcggagggttaggagcgacccacctagtacaggcaaccatgttggccttccaatatatatccctgctttttctaatggtaccaatagttactcctcttccaatggtggttccacctctagctcacctccagaatcaagacgaaagcacgactgtgtgatttgctttgagaatgaggttattgctgccctagttccatgtggccacaacctcttctgcatggaatgtgccaacaagatctgtgaaaagagaacgccatcatgtccagtttgccagacagctgttactcaggcaatccaaattcactcttaactatatatatatacataaatactatatctctatatggactcgtaaaggcatgggtataatggtaccccccagtaaacttcctaatgatttcttatgactgttatcaggctttattgggattaggctaaagttgttagtaaacttataaaaggctgctatggcccccctaaaaaaaaaaaaaaaaaaaa

SEQ ID NO: 56 - DNA, 1400 bp, Homo sapiens
gggctgcaggaattcggcacgagagagaaggggcagagaccaggcagtggtgcaggcgtccagctgcacttcccacttctgactctgtgcctgctgttccctgctgggaagaagaaaagccagtgatgctggcttgaggccatagtgggaggcccagtggatcctgagaagctagcccgggcagtgagtgtggatggcttggcaggtgagcctgctggagctggaggactggcttcagtgtcccatctgcctggaggtcttcaaggagtccctaatgctacagtgcggccactcctactgcaagggctgcctggtttccctgtcctaccacctggacaccaaggtgcgctgccccatgtgctggcaggtggtggacggcagcagctccttgcccaacgtctccctggcctgggtgatcgaagccctgaggctccctggggacccggagcccaaggtctgcgtgcaccaccggaacccgctcagccttttctgcgagaaggaccaggagctcatctgtggcctctgcggtctgctgggctcccaccaacaccacccggtcacgcccgtctccaccgtctgcagccgcatgaaggaggagctcgcagccctcttctctgagctgaagcaggagcagaagaaggtggatgagctcatcgccaaactggtgaaaaaccggacccgaatcgtcaatgagtcggatgtcttcagctgggtgatccgccgcgagttccaggagctgcgccacccggtggacgaggagaaggcccgctgcctggaggggatagggggtcacacccgtggcctggtggcctccctggacatgcagctggagcaggcccagggaacccgggagcggctggcccaagccgagtgtgtgctggaacagttcggaaatgaggaccaccatgagttcatctggaagttccactccatggcctccagattgacaaagactgaagaactggagaagaagtggcgaaacgggctcgcagcgtcgcattccctaccccagcaggtgcgcccgcagcgtcgcactccctagcccggcagaacgtgaagcagctgtacgcgctggtgtgcgaaacgcagcgctactccgccgtgctggatgccgtgatctccagcgccggcctcctcagtgcgaagaagctgcagccgcacctggccaagggtaggggcggggcggggaagtgaaccccgacggtcagcgctttgtcatctggtttcagccccgctgccgtgcacggcgggactggagcaagtcgctcacctgaaatgagtatgagcagaccttccctgggttacgaattgagatgggatgaaaatgctttaacttcgagtgttttgaaggattaaataaccgaagtacaaaaaaaaaaaaaaaaaaaaaaaaaaaaaaa

SEQ ID NO: 57 - DNA, 726 bp, Homo sapiens
  SITE (704): n equals a,t,g, or c
gctttcccggccggcggccgagggggcatcatgaagcgggctggcggcgctgccgctcccgggcggccgcgggcgggaggtgcttcccaaggaccgtagatgcctctctagagcatgagctcaggcaagagtgcccgctacaaccgcttctccggggggcccagcaatcttcccaccccagacgtcaccacagggaccagaatggaaacgaccttcggacccgccttttcagccgtcaccaccatcacaaaagctgacgggaccagcacctacaagcagcactgcaggacaccctcctcctccagcacccttgcctactccccgcgggacgaggaggacagcatgccccccatcagcactccccgccgctccgactccgccatctctgtccgctccctgcactcagagtccagcatgtctctgcgctccacattctcactgcccgaggaggaggaggagccggagccactggtgtttgcggagcagccctcggtgaagctgtgctgtcagctctgctgcagcgtcttcaaagaccccgtgatcaccacgtgtgggcacacgttctgtaggagatgcgccttgaagtcagagaagtgtcccgtggacaacgtcaaactgaccgtggtggtgaacaacatcgcggtggccgagcagatcggggagctcttcatccactgccggcagtgccgggtaacgggcaagcnggaaagcccccatctttgaagt

SEQ ID NO: 58 - DNA, 559 bp, Homo sapiens
tcgacccacgcgtccgccgaaaataggattctttttcgtgcaggtgtcgttgtttagtcggctttactaacatattgaaatggctctacccaaagacgccatcccctcgctgtccgagtgccagtgcgggatctgcatggaaatcctcgtggagcccgtcaccctcccgtgtaaccacacgctgtgtaaaccgtgcttccagtcgaccgtcgaaaaggcgagtttatgctgtcccttctgtcgccgccgggtatcgtcgtggactcggtaccatacccgaagaaattctctcgtcaacgtggaactgtggacgataattcaaaaacactatcccagggagtgcaagcttagagcgtctggccaagaatcagaggaagtggctgatgactatcagccagttcgtctgctcagtaaacctggggaactgagaagagaatatgaagaggaaataagcaaggtggcggcagagcgacgggccagcgaggaagaagaaaacaaagccagtgaagaatacatacagaggttgttggcagaggaggaagaagaggaaaaaaaaaaa

SEQ ID NO: 59 - DNA, 1779 bp, Homo sapiens
gctcggccgtcgtgccgaaaaaccaggtggagccctacagtctcacggcccagcagagcagcctcatcagagagacaagagcaacgccaagctgtggaatgaggtcctggcgtcactcaaggaccggccggcgagcggcagcccgttccagttgttcctgagtaaagtggaggagacgttccagtgtatctgctgtcaggagctggtgttccggcccatcacgaccgtgtgccagcacaacgtgtgcaaggactgcctggacagatcctttcgggcacaggtgttcagctgccctgcctgccgctacgacctgggccgcagctatgccatgcaggtgaaccagcctctgcagaccgtcctcaaccagctcttccccggctacggcaatggccggtgatctccaagcacttctcgacaggcgttttgctgaaaacgtgtcggagggctcgttcatcggcactgattttgttcttagtgggcttaacttaaacaggtagtgtttcctccgttccctaaaaaggtttgtcttcctttttttttttatttttatttttcaaatctatacattttcaggaatttatgtattctggctaaaagttggacttctcagtattgtgtttagttctttgaaaacataaaagcctgcaatttctcgacaaaacaacacaagattttttaaagatggaatcagaaactacgtggtgtggaggctgttgatgtttctggtgtcaagttctcagaagttgctgccaccaactctttaagaaggcgacaggatcagtccttctctcgggttctggcccccaaggtcagagcaagcatcttcctgacagcattttgtcatctaaagtccagtgacatggttccccgtggtggcccgtggcagcccgtggcatggcgtggctcagctgtctgttgaagttgttgcaaggaaaagaggaaacatctcgggcctagttcaaacctttgcctcaaagccatcccccaccagactgcttagcgtctgagatccgcgtgaaaagtcctctgcccacgagagcagggagttggggccacgcagaaatggcctcaaggggactctgctccacgtggggccaggcgtgtgactgacgctgtccgacgaaggcggccacggacggacgccagcacacgaagtcacgtgcaagtgcctttgattcgttccttctttctaaagacgacagtctttgttgttagcactgaattattgaaaatgtcaaccagattctagaaactgcggtcatccagttcttcctgacaccggatgggtgcttgggaaccgtttgagccttatagatcatttacattcaatttttttaactcagcaagtgagaacttacaagagggtttttttttaatttttttttctcttaatgaacacattttctaaatgaattttttttgtagttactgtatatgtaccaagaaagatataacgttagggtttggttgtttttgtttttgtattttttttcttttgaaagggtttgttaatttttctaattttaccaaagtttgcagcctatacctcaataaaacagggatattttaaatcacatacctgcagacaaactggagcaatgttatttttaaagggtttttttcacctccttattcttagattattaatgtattagggaagaatgagacaattttgtgtaggctttttctaaagtccagtactttgtccagattttagattctcagaataaatgtttttcacagatagaaaaaaaaaaaaaaaaaaaaaaaaaaaaaaaa

SEQ ID NO: 60 - DNA, 4119 bp, Homo sapiens
ggtgacagcaaccttgatggaacggtgacagaaatggccattcatgctgcagccgtccttctgtgtggacagaatgaactcttggagcccctaaagaatctggccttctccccagccaccatggcgcatgcttttcttccaaccatgcctgaagacttggctcaagctcggaggtggaagggtctggagcgagtccactggtacacttgtcccaacggccatccttgctccgtgggagagtgtggcaggccgatggaacagagcatctgcattgactgccatgcgccgattggaggcattgaccacaaacctcgggacggctttcatctggtcaaagacaaggcagacagaacgcagaccggccatgtgctgggcaacccgcagcggagagacgtggtgacatgtgaccgagggctgcccccagtggtcttcctccttatccggctactcactcacttggctctgcttctgggagcgtcccagagttcccaggctctgataaacatcattaagcctccagtgagggatccaaaaggctttctgcagcagcacatcctgaaggacctggagcagttggccaagatgctgggacacagtgccgacgagaccatcggcgtggtccacctcgtcctgcgcaggsttctccaagagcagcaccagctctctagcagaaggcttttaaattttgacacagaattgtcaactaaagaaatgaggaacaactgggaaaaggaaatcgcagctgtgatttctcctgaactggagcatctagataaaacccttcccaccatgaataatctcatcagccaagataagcgtatcagctctaaccctgtggccaaaataatatatggtgacccagtgaccttcctgccccacctgccccggaaaagtgtggtccattgctctaagatttggagctgcaggaaaagaattacagttgagtacctccagcacattgtggaacagaaaaatggcaaagaaagagtgcccatcctctggcatttcctgcagaaggaagcagagctgaggctggtaaagttcctgcctgagattttggccttgcaaagggatctagtgaagcagttccagaacgtccagcaagttgaatacagctccatcagaggcttcctcagcaagcacagctcagatgggttgaggcagctgcttcacaacaggatcacagtctttctgtccacatggaacaaactgaggagatcgcttgagacgaacggtgagatcaacctacccaaagactactgcagcactgacttggatctggacactgagtttgagatcctcttgccacgccgacggggcctgggcctctgtgctaccgctctcgtcagctacttgattcgcctacacaatgaaattgtctacgccgtggaaaaactctccaaggaaaacaacagctattccgtggatgccgccgaggtcactgaactgcatgtcatcagttatgaagtggagcgggacctgactccactgattctctccaactgccagtaccaggtggaggagggcagagagaccgtgcaggagttcgatctggagaagattcagcggcagatcgtcagccgcttcctccagggcaagccccggctgagcctcaagggaatacccactctggtgtacagacacgactggaactatgaacatctctttatggacatcaagaacaaaatggcacaggactccctccccagctcggtcattagtgccatcagtggacagctgcagtcctacagcgatgcctgtgaagtgctgtctgtcgtagaagtcactctggggtttctgagcacagctggtggggatccaaacatgcagctgaatgtgtatactcaagacatcctgcaaatgggtgatcagacgattcacgtgttaaaggccttaaacagatgccagttaaaacacaccattgccctctggcagttcctgtctgctcataagtctgaacagctgctgcggctgcacaaagagccatttggggaaatcagttcaaggtacaaagcggatctgagcccggaaaatgctaagctcctcagcacattcctaaatcagactggcctagacgccttcctgctagagctgcacgaaatgataatcttgaaactaaagaacccccaaacccaaaccgaggagcgcttccgccctcagtggagcctgagagacactctcgtaagttacatgcaaactaaagaaagtgaaattcttcctgaaatggcatctcagttcccagaagagatactgctcgccagctgtgtctcagtgtggaaaacagctgctgtgctgaaatggaatcgagaaatgagatagaattatttcctcagctatctttggatgactttggagagaagactcctctctcctcgtctgcggcgtggacttgatcatggactggtgcctttgcattcagaaggagagctgtcagcgtagcaccgaattcaagaccaaggcgtgctacctgagctgacagctttttgaaagccgagctgtttctgaaccatgtacatacatgttctgaaactttctcatcattttatgagtactgttcattgagagatgacaatgaagattagatgaaattggaaataaaccaacattgtttacattccaggagacttgtagctcagccacacacgcagtaatgacctgtgcccgttcgcctctggcactgcccacccctctttttttttttcttctaattctgtactcacaaaagagaatctcattttcttctttcttccattcccttaaattctgagtactgtacatatatttctgggttcccacgatgatgtgaaaaactaccagactgttttttgtcttctcacaaagacaagaaaaatcagggcattttgtgagtgccttaagatcaaactaacaagatctgaccctctcccctcacagtgagccactgccccacttcagagggtaagagccaaaagcctcattgtgaaaggcactggacttggaccagggacaccatcagggccttggttttctcacgcataaaatggagagtggattaatcgccaaagattcttctgatctgacattttgaaattgtgagagaaactagatgactgtaaacttggtcacaggcctggttctggcagttctttgcggacttttttctagcattatgccaaataaacatgcagtctcagtgtgctctcgcatgtatgaatatctagtcctttctgtggttctcagccaagacataaaaactaggactcagagcacatacaaaaccagttatgtttcggaaagagggaaaagagtccccgagcccggatcttgtgctgcttttctcactgacgtgttgccttttttctttacaaaatctgctttgatacttaggacctctctggactaatttctcttcctagacagctcagcacagctattgatatgttagaggcagtatccttaatattcattctaaatgagttaacgacttaacttgaaattgggcctaaggagtgagaactacaaaaatacaaaatgcttgtccaggactcagccatgcacaccttgagcagcgccggcaggaggcacggaaggaactgtgctccgttctcctcactgtcatggtgccaccagtgtctgatgaagggcagagtgacccagactgcaggcagtaactgacttcacacagtccctggcatttagtcatctgtgattgttttatcactctggactgtgcagagccacctgccaccgagatctgcattccgactgcctatgaacgggtgtgggggccgggggctggcttgctgaagtcttcaacttgcactcggagctcctttgatacctcagagctggctgtcaggtggcagctcacacccagactcactggccacacctcagcagggggggagtcgagtgtcagtctctttctgtgaaggctttttttttcctttggcctgggaatttttcccatttttatgaaggggttttaaattgtttcattttgtgtgctgtgcttcaaagccttaactgtcaaatcttgcattatcttgtttgtacagaaatatactggcctagcagaggcaaaaaaaaaaaaaaaaaaaaaaaaaaaaaaaaaaaaaaaaaaaaaaaaaaaaactcgag

SEQ ID NO: 61 - DNA, 1681 bp, Homo sapiens
tcgacccacgcgtccgctttaaggaaatctaatcacaactcctgaagacttacctttcttagatctgaaacttaagatcagtgtattataaaatggaatctcttagcagtcacagctacataaattgggattttaatagttgtctgtgctttgaattcttttcctttaaatgtctgtttcttttatgtaaagtttttcagtttggggaacgtgtagtcttcccctcccttttaatttctcaccaggatctaaaccccccttctctgtgaagcttaaatctgcattgtactctccctcctccccccccatcagtatccagcaggttacccttcatataaagaagggaagaagcctaatggacagtcaaagaagcagcccagtggaaccacaaaaaggccaatttcagatgatgactgtccaagtgcctccaaagtgtacaaagcatcagattcagcagaagcaattgaggcttttcaactaactcctcaacagcaacatctcatcagaagaagattgtcaaaaccagaagctgtgggatgaagtgctttcacatcttgtggaaggaccaaattttctgaaaaaattggaacaatcttttatgtgcgtttgctgtcaggagctagtttaccagcctgtgacaactgagtgcttccacaatgtctgtaaagattgcctacagcgctcctttaaggcacaggttttctcctgccctgcttgccggcatgatcttggccagaattacatcatgattcccaatgagattctgcagactctacttgaccttttcttccctggctacagcaaaggacgatgatctgcctgctttcactgtgttgttcatggtggctttttggacaataaagaatctaaaatgggtggggagggtggaagaaatggtggactgtatctctcacgttctgaagcagctaatcctctttcccacatagccatcatcttgtgtgtgtagtaagaggcccatttctcaactgtcttttaaatatctaaaggtagttcctgtaacaactagttttaatgagtaaaaagtcaaagcctcagctctagttgatatccaagttatgatttattttgcaactacctcaggacagaaaagatttatggggattttaaaaatcattgaataactagttaaatgaaattttagctacacactgcctcccaaatattagttgtgcctggttcttgtaatttgattttacagaaaaggaaatgacacttgagatccttggaatgaacacagcttctaaagtgtgcatatacttttttaacgtctcttcttccattacaatgtgtgttttgcaaggacaggttcattttttttagcccactttgtgaactccattgtgcttttttctggtgttttatgcaagttgactactaatgactaatgagaacaataatgaatgcattgttgctgcattagtgtaatgtggtgtggttttgcacttaaaagaggtattcatatgctctagttgtaaatgttcatgaaaatccacttctctactagtcgaactgcttttagtgtctcaccagtggttttacatctgcagagttttgagggctgtgctgacctttgagaggatttgaaattgcttcatattgtgatcctaaattttatattcactatattccctaaagtataccttaataaatattttatgat

SEQ ID NO: 62 - DNA, 1522 bp, Homo sapiens
  SITE (11): n equals a,t,g, or c
  SITE (14): n equals a,t,g, or c
  SITE (1497): n equals a,t,g, or c
  SITE (1517): n equals a,t,g, or c
  SITE (1518): n equals a,t,g, or c
taaaccccatntgnaatacccctcactatagttgaaagctggtacccctgcaggtaccggtccggaattcccgggtcgacccacgcgtccgcgwgaggtggcccattctcggcgggcggccggcggaggcggccccgggggtcccggcggctctggggactttctactcatctacctggccaatctggaggccaagagcaggcaggtggccgcgctgctgcctccccggggccgaaggagtgccaacgacgagctcttccgggcgggctccagactcaggcgacagctggccaagctggccatcatcttcagccacatgcacgcagagctgcacgcactcttccccgggggaaagtactgtggacacatgtaccagctcaccaaggcccccgcccacaccttctggagggaaagttgcggagcccggtgtgtgctgccctgggctgagtttgagtccctcctgggcacctgccaccctgtggaaccaggctgcacagccctggccttgcgcaccaccattgacctcacctgcagcgggcacgtgtccatcttcgagttcgacgtcttcaccaggctctttcagccatggccaacactcctcaagaactggcagctcctggcagtcaaccacccaggctacatggccttcctcacctatgatgaggtccaagagcgtctgcaggcctgcagggacaagccaggcagttacatcttccggcccagctgtactcgcctggggcagtgggccatcggctatgtgagctcagatggcagcatcctgcagaccatccctgccaacaaacccctgtcccaggtgctcctggagggacagaaggacggcttctacctctacccagatggaaagacccacaacccagacctgactgagctcggccaggcagaaccccagcagcgcatccacgtgtcagaggagcagctgcagctctactgggccatggactccacatttgagctctgcaagatctgtgctgagagcaacaaggatgtgaagattgagccgtgcgggcacctgctctgcagctgctgcctggctgcctggcagcactcggacagccagacctgccccttctgccgctgcgagatcaagggctgggaggccgtgagtatctaccagttccacggtcaggctactgctgaggactcagggaacagcagtgaccaggaaggcagggagttggagctggggcaggtgcccctttcggctcctccattgcccccacggccagatctgccccccaggaagcccagaaatgcccagccgaaagtgagactcctaaaggggaactcccctccagctgcgctgggaccccaggaccctgccccggcctgaaggccagggcacccagatgtgctgctcaagggagccccaagggctggaagggggttgtgaaaccgaaataaactgccaagcctggtctgtcaaaaaaaaaaaaaaagggcggccgctctagaggatccaaggttacgtacgcgtgnaagcgaacgtcgaagcgttnnccct

SEQ ID NO: 63 - DNA, 2306 bp, Homo sapiens
ccacgcgtccgctgtaacccgcacacgaatttcacggtgcccacggtttggggaagcaccgtgcaagtctcttggttggccctcatccaacgcggcgggggctgcaccttcgcagacaagatccatctggcttatgagagaggggcgtctggagccgtcatctttaacttccccgggacccgcaatgaggtcatccccatgtctcacccgggtgcagtagacattgttgcaatcatgatcggcaatctgaaaggcacaaaaattctgcaatctattcaaagaggcatacaagtgacaatggtcatagaagtagggaaaaaacatggcccttgggtgaatcactattcaattttttttcgtttctgtgtccttttttattattacggcggcaactgtgggctattttatcttttattctgctcgaaggctacggaatgcaagagctcaaagcaggaagcagaggcaattaaaggcagatgctaaaaaagctattggaaggcttcaactacgcacactgaaacaaggagacaaggaaattggccctgatggagatagttgtgctgtgtgcattgaattgtataaaccaaatgatttggtacgcatcttaacgtgcaaccatattttccataagacatgtgttgacccatggctgttagaacacaggacttgccccatgtgcaaatgtgacatactcaaagctttgggaattgaggtggatgttgaagatggatcagtgtctttacaagtccctgtatccaatgaaatatctaatagtgcctcctcccatgaagaggataatcgcagcgagaccgcatcatctggatatgcttcagtacagggaacagatgaaccgcctctggaggaacacgtgcagtcaacaaatgaaagtctacagctggtaaaccatgaagcaaattctgtggcagtggatgttattcctcatgttgacaacccaacctttgaagaagacgaaactcctaatcaagagactgctgttcgagaaattaaatcttaaaatctgtgtaaatagaaaacttgaaccattagtaataacagaactgccaatcagggcctagtttctattaataaattggataaatttaataaaataagagtgatactgaaagtgctcagatgactaatattatgctatagttaaatggcttaaaatatttaacctgttaacttttttccacaaactcattataatatttttcataggcaagtttcctctcagtagtgataacaacatttttagacattcaaaactgtcttcaagaagtcacgtttttcatttataacaattttcttataaaaacatgttgcttttaaaatgtggagtagctgtaatcactttattttatgatagtatcttaatgaaaaatactacttctttagcttgggctacatgtgtcagggtttttctccaggtgcttatattgatctggaattgtaatgtaaaaagcaatgcaaacttaggcgagtacttcttgaaatgtctatttaagctgctttaagttaatagaaaagattaaagcaaaatattcatttttactttttcttatttttaaaattaggctgaatgtacttcatgtgatttgtcaaccatagtttatcagagattatggacttaattgattggtatattagtgacatcaacttgacacaagattagacaaaaaattccttacaaaaatactgtgtaactatttctcaaacttgtgggatttttcaaaagctcagtatatgaatcatcatactgtttgaaattgctaatgacagagtaagtaacactaatattggtcattgatcttcgttcatgaattagtctacagaaaaaaaatgttctgtaaaattagtctgttgaaaatgttttccaaacaatgttactttgaaaattgagtttatgtttgacctaaatgggctaaaattacattagataaactaaaattctgtccgtgtaactataaattttgtgaatgcattttcctggtgtttgaaaaagaagggggggagaattccaggtgccttaatataaagtttgaagcttcatccaccaaagttaaatagagctatttaaaaatgcactttatttgtactctgtgtggcttttgttttagaattttgttcaaattatagcagaatttaggcaaaaataaaacagacatgtatttttgtttgctgaatggatgaaaccattgcattcttgtacactgatttgaaatgctgtaaatatgtcccaatttgtattgattctctttaaatataaaatgtaaataaaatattccaataaaaaaaaaaaaaaa

SEQ ID NO: 64 - DNA, 497 bp, Homo sapiens
  SITE (281): n equals a,t,g, or c
  SITE (483): n equals a,t,g, or c
  SITE (486): n equals a,t,g, or c
gcgagcgcggtggggccgcwtctgcatcagccgccgcagccgctgcggggccgcgaacaaagaggaggagccgaggcgcgagagcaaagtctgaaatggatgttacatgagtcattttaagggatgcacacaactatgaacatttctgaagattttttctcagtaaagtagataaagatggatgaatcagccttgttggatcttttggagtgtccggtgtgtctagagcgccttgatgcttctgcgaagktcttgccttgccagcatacgttttgcaagcnatgtttgctggggatcgtaggttctcgaaatgaactcagatgtcccgartgcaggactcttgttggctcgggtgtcraggagcttcccagtaacacttgctggtcagacttctggatggcatcaaacagaggccttggaaacctggtcyggtgggggraatggggaccactgcacaatgccattaagtctccagagcagcangtnggccaattgta

SEQ ID NO: 65 - DNA, 1254 bp, Homo sapiens
ccacgcgtccgggggcccggatctcaaacagccgggaagaagcaccgtggctgctattatctgctctccgcgcctgacccctcccaggactcgtgatgccaaggccgctgcgagcggctacgaagagtcggggttgagccccagctgagccgagggctcgcactcttctggtctcccaggcccaacccacctgaagaaatgagtggtggattggctccaagtaagagcacagtgtatgtatccaacttgcctttttccctgacaaacaatgacttgtaccggatattttccaagtatggcaaagttgtaaaggttaccatcatgaaagataaagataccaggaagagtaaaggggttgcatttattttatttttggataaagactctgcacaaaactgtaccagggcaataaacaacaaacagttatttggtagagtgataaaagcaagcattgctattgacaatggaagagcagctgagttcatccgaaggcgaaactactttgataaatctaagtgttatgaatgtggggaaagtggacacttaagttatgcctgtccgaaaaatatgctcggagaacgtgagcctccaaagaagaaagaaaaaaagaaaaaaaagaaagctcctgaaccagaagaagaaattgaggaagtagaagaaagtgaagatgaaggggaggatcctgctcttgacagcctcagtcaggccatagcattccagcaagccaaaattgaagaagaacaaaaaaaatggaaacccagttcaggagtcccctcaacatcagatgattcaagacgcccaaggataaagaaaagcacatatttcagtgatgaggaagaacttagtgattaaaatcttgccccagcacagtaataaaaatcaagatttgttagtaacaatcttgaagagctaattttaataaaaataagaaaaattaatactatcatgttaatactattattgtcatcccaagaaaaaagatattttaaaaatttatttgaaaagttcattataagggctttattcatgcctgatttgtttacatgaggacttctgaaattaatccttaaaacaaacttcctgaagaccgaaaagttgaatgatttattgttacttatattaataaacttttcaagagaattttgtctttaaaaaaaaaaaaaaaaaaaaaaaaaaaaaaaaaaaaaaaaaaaaaaaaaaaaaaaaaaaaaaaaaaaaaaaaaaaaaaaaaaaaaaaaaaaaaaaaaaaaaaaa

SEQ ID NO: 66 - DNA, 1654 bp, Homo sapiens
  SITE (547): n equals a,t,g, or c
  SITE (574): n equals a,t,g, or c
ccccggctcgccaactcggctgctctgggggattcgtgcgcggtgtgtttccattgtagaaaacctggtcatggaattgcagattgccccgccgcccttgaaaatcaagacatgggcactgggatatgttacaggtgtgggtccacagagcacgaaataaccaagtgtaaggctaaagtagacccggctcttggtatgtgtttctttcagttttttgttttgttcatggggaaagccaataaatagcaccttgggtatttttttaacacaatttgttacgagtgtgccacttagtatttggaaatcatatgagattaaattttaagttatgtaaatatattttttattcagagtattttaaaataatgttaattttatgacttgccatatgtattgtcaactgaataggaactgttgatttttacaggcgaatttccttttgcaaaatgttttgtttgtggagaaatggggcacctgtctagatcttgtcctgataatcccaaaggactctatgctgatggtaagtactggtaccctcatatagcanaaatggtgaagtcatcgtgcaagttgngaattaatttacactcaatccagttctttgaataaattcttgaataaattgcaaaaccttkagaattacattatttttatcaagtgctatcatatgtactaggctttttgtgcaatttgacttcagatgttaataaaacaaatcagaaaaaactaaggtgtatatttccaactgtgcttgcttcatcatttgtgagactatgtcatacatttctacttttagacataacagaagcagagagattatatctcaagctaatatgaggtttttaaaatcgtattatatattcagcctcagccagcatatcattttggtggaggggtgggtacagatgattcaatattgtagtaatgtttgcttctgaattttttttcttagttatttgtctggtatgggatcatgtagcttttttctctttaactcgggtaattaaggttcacacagtaaagtctatgcggtctaaagctttaaggcggaggttgttatctgttaatgtgatggctggtgccatcaggctctagacgtttcttgtgtcatgtcctgggtttccctcctggagaagtycagtgaaaaagcatagcttttggagttggcagacttgggytacagcgccagcactgccactcactagctggggggctttggccaactaccaaactctgatctccgtttcctyacctatagagtggagatgataaaactatattttattgattctaagatgcacagtttttcaattttaatctcttggaaatcagaatgtatcttaccgttggtgggtcccatataattgacagctgtttttctttctgagaggtatgtgcaataatgatacatcttataatcagtggtgtcttagagttgatgaattatggtatttgcctaaagaatttttataaggattaaaatgtattattcaagtgcttctctttcactatggcatataaagaggccagggcctggaaaatgctcaggtgcatttcagttttgagcttataaaactgggtagataacatgactagtgagcaaaaatggctttcactggtcaaccaaagtgactagctgtaaaaaaaaaaaaaa

SEQ ID NO: 67 - DNA, 2205 bp, Homo sapiens
gcggcacgaggatggcgactcccatgcatcggctaatagcccggagacaagcattcgacacagagttgcagcctgtcaagaccttttggatcctgattcagccatccatcgttattagtgaagcaaataagcaacatgtaagatgtcagaaatgcttggaatttggacattggacttatgaatgcacaggaaaaagaaaatacctacataggccctcaaggacagcagaactaaagaaagctttaaaagaaaaagaaaacagattattattgcaacaaagcattggagaaaccaatgtagaaagaaaggccaagaaaaaaaggtctaagagtgtaaccagttccagtagcagtagcagtgacagttctgccagtgattcttcatcagagagtgaagaaacatctacctcttcctcctcagaggacagtgacactgatgaaagctcctctagttcctcatcctcagcctcctccacaacctcttcctcctcctctgattcagactcagattccagctcttccagtagcagtagcaccagcacagatagcagctctgacgatgaaccaccaaagaagaagaaaaagaaatagagttgctccattcatattggactgatggactgaaaacattgatgtgattcttgaaagggaatttagaatatgttaaggccaagtaggttaactggtgaacatttctagaattcaaaagtttctaaatgttttacattgtaagagcatagagaatattaataatggcttatagagagagacttttatttgaagggtgaatcttgttttttttatctttaaaatatatctctagaacttaaagctgaaatctgcaaatctgtttgtgtgatgaaactatcttttctctctgtgaaataaatgccatactttgttatatatgttagtggtatgtatcagacatattttcaggatggtgcgtcaggatatctggcagtggatttctaatgcttttggctgtatgttatgtaagatttaatatgttgttactgtaagcttaggagttttcctactattaataaatgtgctctatttttacatttatgttcagaaagttatctgactttttgtcctaagtggtatgttcaaggagcctattaatatatttatagtttttgaatgctgtaagtttcaaattgctgtgttacgtcattcattttcttctggttccttaagtttttcaagttatccttttctgaggaaaattattctagaggaacctaaaaagggacaaaaaaattgaaacttcttaggagtctaatcttggtgccttctgttaaaagtcagtgtatcagaaaagaaagcagccatgtaagaggctaacttaartagaagtgctagaaatatctttgtgtattaacatgcaataaaaggtaccattcaaagcagggggaaaggtaggaagaagaggtaatttttactgaaaattagggcaatgttggtcgccttttattaaaagctttttttaagctttcataaagattgctttttgctatttttgaaaatatggtattatagtttgtatggtaactggtcatatatgacagtctactgcatatatatgaatgactaggattaatctggtgtgtttacataggatatacatagttgaaatctagcatgaaaggttaaaaaggagatactgcacaatatttcttaaaagtaaaatgctgttattgtgatgagtctttggtttaacatcacagtattctgtgatgtctttttaactttttggaaagaggtatcatttgtagaaaaaatttgatttgggttaaatataggtttttaaaactataaatgttgtcttttttatatttttatgaaaaagcagtagaaaattacttttgaagaaaacaggctatttaaatattgaaatatatgtatgttgtgagtttaaggagcctgtaattgtcagttttacaaaaccatctgtgttcaatggttgtaaataaattctcaaaacatcatttcaaaggctgcctacagaatattatcacttgacagatagagttaataaattaccaatcaggcacattttataatgtttgtctctgtaaaggtaatattagcagttaaagaacacggatgagaaaagaatgtgttacataggttgcatcacttgcagttaaataaaactcacaatttgtgctcacaagcttaaaaaaaaaaaaaaaaaaaa

SEQ ID NO: 68 - DNA, 838 bp, Homo sapiens
gagaactagtctcgagtttttttttttttttttttccccacgagtgaccacggctagataggccgccggccagatgtggcgggggagagccggggctttgctccgggtgtgggggttttggccgacaggggttcccagaaggagaccgctaagctgcgatgctgcgtcgcaggcgggaagcaattatccccgctgttggaactgcggcggcccatggggccccgggcgggaggacaggttcttctgcccacagtgccgagcgctgcaggcacctgaccccactcgagactacttcagccttatggactgcaaccgttccttcagagttgatacagcgaagctccagcacaggtaccagcaactgcagcgtcttgtccacccagatttcttcagccagaggtctcagactgaaaaggacttctcagagaagcattcgaccctggtgaatgatgcctataagaccctcctggcccccctgagcagaggactgtaccttgctaaagctccatggaatagagattcctgaaaggacagattatgaaatggacaggcaattcctcatagaaataatggaaatcaatgaaaaactcgcagaagctgaaagtgaagctgccatgaaagagattgaatccattgtcaaagctaaacagaaagaatttactgacaatgtgagcagtgcttttgaacaagatgactttgaagaagccaaggaaattttgacaaagatgagatacttttcaaatatagaagaaaagatcaagttaaagaagattcccctttaattgtggatagtttaaagtttaaaaaataaagttcttgctgggcaaaaaaaaaaaaa

SEQ ID NO: 69 - DNA, 2429 bp, Homo sapiens
  SITE (2299): n equals a,t,g, or c
  SITE (2359): n equals a,t,g, or c
  SITE (2362): n equals a,t,g, or c
  SITE (2386): n equals a,t,g, or c
ggcacaggaccaaagggaagatgaagatggcatggctaatgaagatgagttagacaacacctacactgggtcaggggatgaggacgccctatctgaagaggatgatgagttaggcgactgckaagtatgaagacgtgaaagaatgtggaaaacatgtagaaagagctctcctagtggaacttaataaaataagtctcaaggaagaaaatgtatgtsaagaaaaaaattcacctgtggatcagtctgattttttttatgaattcagtaaacttatcttcaccaaaggcaagtctcctacggtagtgtgcagcttatgcaaacgagagggtcatctaaagaaggactgtcctgaagacttcaaaagaatccagctagaacctctgccaccattaacacccaagtttktaaatatcttagatcaagtctgtatccagtgttataaggrtttttctccaacaattatagaagatcaggctcgtgaacatattcggcaaaacctagaaagtttcataagacaggactttccaggaactaaattgagcctgwttggctcctccaaaaatggatttgggttcaaacagagtgaccttgacgtctgtatgacaattaatggacttgaaactgctgagggattggactgtgtcagaactattgaagaattagcaagagtcctcagaaaacattcaggtctgagaaacatcttacctattacaacagcaaaggtgccaattgtgaagttcttccatttgagaagtggtctggaagtagatatcagtttgtataacacattggcccttcataacacaaggcttttatctgcttattccgccattgatcccagagtgaagtatttgtgctataccatgaaagtatttacaaagatgtgtgatattggtgatgcatctagaggcagcttatcatcgtatgcatatactcttatggtgctatattttctccagcagaggaatccaccagtcattcctgtccttcaagagatatacaaaggtgaaaagaaacctgaaatatttgttgatggctggaatatttatttttttgatcaaatagatgaactgcctacctattggtcagaatgtggaaaaaatacagaatctgttgggcagttatggttgggccttcttcgtttctacacagaggaatttgattttaaagaacatgttattagcatcaggagaaaaagtctgcttacaacttttaagaaacagtggacctcaaaatacattgttattgaagatccctttgatttgaatcataatcttggagctggattatcaaggaaaatgacaaattttataatgaaggcttttatcaatggtagaagagtatttggtattcctgtcaagggatttccaaaggactacccctcaaaaatggaatacttttttgatccagatgtgttaactgaaggagagctggccccaaatgatagatgttgtcgaatttgtggaaaaatcggacacttcatgaaggactgtcctatgaggagaaaagtaagacggcggcgagatcaggaagatgccctgaaccaaagataccctgagaacaaggaaaaaagaacaaagaggacaaagaaattcacaacaagtacacagaaagggaggtgtcaacaaaagaagataagcccatacagtgcacamctcagaaagccaagccaatgcgggcagctgstgacctggggagggagaagatcctcaggccaccagtagaaaaatggaagagacaggatgacaaagacttaagagaaaaacgttgttttatttgtggaagagaagggcacattaaaaaggaatgcccacagtttaaaggctcttcaggtagcctttccagtaaatatatgactcagggaaaagcctcagcgaagaggacccagcaggaatcatgagggaaggaaaatgcagcactctaaatggccactcaggcgttcctattcactcggaaaattaggttcatttcacaggacacagcagtgtagatcaggcttcaacttaacatttaagggaaatgtcagatttttttttaatttaatgaaattgttaatgaggaaaaatttttaatatagtcttatctaccacacatccccatagatttaaggattttaatagaaagwcatgatgtatgtatttaagccacgttaaaagaaaaaatataactatggaccggtattcagtgaatacagtttcatggtttttaattctttcaaagcacattaaaaatggtgtgctgataaaccccaagtaaattaaccctttttccgtataaatccattttttgttttgaagangggaaattatatttattgttgtttactgaatcccgggtggttaaaaccttttcaaatttnttntgaactggctactgctgttacttnccgaatttacgggacatccatttttaattggctaatttggtta

SEQ ID NO: 70 - DNA, 992 bp, Homo sapiens
ggcacgagtgtgtatgcctagcccaccccttctggagcagttgaaaacaggcctcagaagactcaaaggaattcttttaactcctagcagggccacggggtcaatgtcagatttagtcatgctgttattttagcccagtggtccagagagatgactgaaaagtaatacctagcaaatacagaaagagagataaagcaagcaagctgttttgaaagtgtctaatattggctgatgtagagctataggagaagatggtataaactggtccatcagtgacaaagacattgaggcccagatagctaataaccgaacacctggaagatggacccagcggtactattcagccaacaaaaacattatctgtagaaattgtgacaaacgtggtcatttatcaaaaaactgccccttaccacgaaaagttcgtcgctgcttcctgtgctccaggagaggacatctcctgtattcctgtccagcccccctttgcgaatactgtcctgtgcctaagatgttggaccactcatgtcttttcagacattcctgggataaacagtgtgaccgatgtcatatgctaggccactatacagatgcttgcacagaaatctggaggcagtatcacctaacgaccaaacctggaccacccaaaaagccgaagaccccttcaagaccatcagccttagcatattgctatcactgcgcgcaaaaaggccattatggacacgaatgtccagaaagagaagtgtatgacccgtctccagtatctccattcatctgctactatgatgacaaatatgaaattcaggagagagaaaagagactaaaacaaaaaataaaagtactcaagaaaaatggggttatcccagagccatccaagctaccttatataaaagcagcaaatgagaacccccaccatgatataaggaagggccgtgcctcatggaaaagcaacaggtggcctcaagaaaataaagaaacacaaaaaaaaaaaaaaaaaa

SEQ ID NO: 71 - DNA, 641 bp, Homo sapiens
  SITE (5): n equals a,t,g, or c
  SITE (113): n equals a,t,g, or c
ggcanagcaggctccgtcgactgcccagagtccgcgaatcctccgctccgagcccgtccggactcccccgatcccagctttctctcctttgaaatgacaaagaayamtgcacnagaatagcatcactcaagtctctatttatgaggtggacaagcaagattgtcgcaaattttgcactactggcatcgatggagccatgacaatttgggatttcaagaccctcgagtcttccatccagggcctccggataatgtgaagctgagtgagcctccgccatccagcatgacaaactgtggccgaccgcagctgtgccgtggcacgatggcgaggaagccagccccaaggaaacactgaaaacacatatcacgccaatgccgtgtggttttgtttgaatataaaattggtgaaagtgttggtttttttaaggcagtaatttttttgtttgtttttttgcgatttcattccattcttgaccaaagcttctctttaagtagtttattatggaaaattgtcacactaacttaaaagacagggtgagggagatatgtaaattgtccactagaaaattaaataaaagaactgaatgtggaaaaaaaaaaaaaaaaaaacycgrgggggggcccggaacccattcgccctaa

SEQ ID NO: 72 - DNA, 853 bp, Homo sapiens
aattcggcacgagccggggcctccggggccgaggtgggcctgctcattggaagatcgcatcgcagccatgagcagtaaggatttcttcgcgtgtggacactctggccattgggctcggggatgccctagaggaggagctggagggcgaagaggtggaggccatggcagaggttctcaatgtggttccaccaccctatcttacacctgttactgctgtggtgagtccggtcgtaatgctaagaactgtgtccttctcggaaacatctgctacaactgtgggagaagcggccacatcgccaaagactgtaaggatcctaaacgagagagacgccaacactgttatacctgcggcagactaggacatctggctcgtgactgtgatcgtcagaaagagcagaaatgctactcttgcggcaaacttgggcacattcagaaagactgcgcccaggtcaagtgttaccgatgcggcgagattggccacgtggccatcaattgcagcaaggcgaggccaggtcaactgctaccgctgcggcaaatcccggcatctagccaaggaatgtcccagtgaggttaccacttaaatcttcccccccaccccccacccttttgctgattgataattgtattattttctccgaaaacttcactcaccgaaaggtcgatagattgaggctactctcaggcaagtgagctttaattaccatgttaaaggaggaaagagctagaaaaaaaaacctcaaaaaagttaatcattggtagatgccccacaattaacgtgttgcttctgccccacgggcaaatctagttattaaatagtcattctgagcaccaatcaaaaaaaaaaaaaaaaaaa

SEQ ID NO: 73 - DNA, 851 bp, Homo sapiens
tcgacccacgcgtccgcttgtgggtggaaacgcgctggctgactggggtcggcgtttagttcagcgcagcgactcggggacctggagctgacgcctagacacttgtattagctttaatagaagagaaatggaggagccatagaatattaaggatgaattcaggaaggcctgagaccatggaaaacttgcctgctctctacactattttccaaggagaggttgctatggtgacagactatggggcctttatcaaaatcccaggctgtcggaagcaaggtctggtccatcgaactcatatgtcatcctgtcgggtggataagccctctgagatagtagatgttggagataaagtgtgggtgaagcttattggccgagagatgaaaaatgatagaataaaagtatccctctccatgaaggttgtcaatcaagggactgggaaagaccttgatcccaacaatgttatcattgagcaagaagagaggcggaggcgatccttccaggattacactgggcagaagatcccccttgaggctgtcttgaacactacctgcaagaagtgtggctgtaaaggccactttgcaaaagattgtttcatgcaaccaggtgggactaaatactctctgatacctgatgaggaagaggaaaaggaagaggcaaagtcagcagagtttgagaagcctgaccctacaaggaatccttctagaaaaagaaagaaggcgcagaaatcccaccccaatagagatagggagtcatctgactctgacagctcagactctgagagtgatacaggcaagagggcaaggcacacatcaaaagacagcaaggcagcaaagaagaaaaaaaaaaaaaaa

SEQ ID NO: 74 - DNA, 2221 bp, Homo sapiens
tattttactaatttttgccttgataaattggggcaaccgcttctaaatgaaaaccctcagctttccgaaggatgggaaatacccaagtaccatcaagtcttcagccacattgtttctctagaagggcaagaaatacaagtaaaggcaaaaaggccaaagcctcactgtttcaattgtggttctgaagaacaccaaatgaaagattgcccaatgcctcggaatgctgctcgaataagtgaaaagagaaaagagtatatggatgcctgtggagaagcaaacaatcagaatttccagcagcgataccacgcagaagaagtagaagaaagatttggaagattcaagccaggagttattagtgaggaacttcaagatgcactaggtgtgacagacaagagtcttccaccttttatctatcggatgcgccagctagggtacccaccagggtggctcaaagaggctgaattggagaattcggggcttgcactctatgatggaaaagatggcactgatggggaaacagaagttggagaaatacaacagaataaaagtgtcacttacgatctctcaaaattggtcaactatcctggttttaatatatctactcccagaggaattccagacgaatggaggatctttggttccataccaatgcaggcatgtcagcagaaggatgtgtttgccaattaccttacttctaacttccaagcgccaggtgtgaagtctggcaacaagaggtcttcatctcactctagcccaggtagtccaaagaagcagaagaatgaaagcaactcagcgggatctcccgccgacatggagctcgattcagatatggaggtaccacatggttctcagagcagcgaaagttttcagtttcaaccaccattacctcctgacactcctccactcccccggggaactcctccacccgtcttcacccctccactcccaaagggcaccccgccgctgactcccagtgactcaccccagaccagaacagcatctggagctgtggatgaggacgcactgactctagaagaacttgaagaacagcagaggcggatctgggcagctcttgagcaggccgagagcgtaaacagcgactccgacgttcctgtggacacacctttaactggcaattccgttgcctcatcaccttgtccaaatgagctagacctccctgtcccggagggaaaaacatctgaaaagcagacgctggatgagcctgaggtaccagagatttttacaaagaaatcagaagctggacatgcctccagtccagactctgaggtgacatcactttgtcagaaggaaaaagcagagttggctccggtaaacactgaaggtgcccttcttgataatggcagtgtcgtaccaaactgtgacatcagcaatgggggcagccagaagctctttcctgcagacaccagtccttcaacggccactaaaattcatagccctatacctgacatgagcaaatttgcaactggaatcacgccatttgaatttgagaatatggcagaatctactggaatgtacctcaggataagaagcttgttaaagaactcaccccgaaaccagcagaaaaacaaaaaggcctctgaataatggcttgacttagcactgagagctatttaataactttgttccgttaattagtactaattaagtggatagatagaatggttttcctgtttgtccctcccatgtttaaaaatctatccaaggttcatgttccaaagtcaagcctattttaaagaaagactgagctcactagttcagtatattttattctcactgacaaaacttggggggagatgtgaatatgacctggtttagagagggtttgttaaggtttatactatttttggattgtgactatccgtcgagagtgatggtttttatctgtcttttgtacattgttttccctttctacattttgctaattatcctgtatataagtttaatatatcactttttaaaagaaaaaattctaccattttaaattcatgtttcaactcctacaaccaaatgagaaaaatcagggatgagcagctttatcccatttggggtatttttgtaagtgatttacatgtgtcaattttagtaatacttttacttttttgtaacttcatccttcatatatgcttgctatacaggtatgttcatctttgtgtacagaggtttaataaattagttttcatatacataaaaaaaaaaaaaa

SEQ ID NO: 75 - DNA, 302 bp, Homo sapiens
gggtcgacccacgcgtccgcccggctcgccaactcggctgctctgggggattcgtgcgcggtaagaagctgcgcggtagcgcggtgaggtaccactgatgaaattatgaccaggtgggcccgagttagtaccacatataacaagagacccttgcctgcaacatcatgggaggacatgaagaagggatcctttgagggaacaagccaaaacctaccaaagcgtaaacaacttgaagccaataggctatccctcaaaaatgatgcaccccaagcaaaacataaaaagaacaaaaaaaaaaaaaa

SEQ ID NO: 76 - DNA, 1179 bp, Homo sapiens
ccacgcgtccgcccacgcgtccgcccacgcgtccggtcgtgcatgcatccacgctggacagggtgctgaagacagcacagcaaccggccctggtcgtggagaccagcacggccgccacggggacgcccagcacagtcctccacgccgcccgtccgcccatcaaactgctgctgtcgtcatctgttcctgctgattctgccatttctgggcaaacttcctgtcctaataatgtgcaaataagtgtgccccctgcaataataaacccccggactgctctgtacacagccaacaccaaagttgccttttctgcaatgagcagtatgccagtgggccccctgcagggtggcttctgtgcaaacagcaacactgcctctcccagcagccacccctccacgtcctttgccaacatggccacgttgcccagctgcccagcccccagctccagcccggcgctgtcctccgtccctgaaagcagtttctatagcagcagtggcggtggcggctccacaggaaacattcctgcctcgaatccgaaccaccaccaccaccaccaccatcagcagcccccggcacccccgcagcccgccccacccccgccaggctgcattgtgtgcacgtcctgtggctgcagcggcagctgcggctcgagtggcctgactgtcagctacgccaactacttccagcacccgttctccggtccgtccgtgttcaccttccccttcttgcccttcagtcccatgtgcagcagcggctacgtcagcgcccagcagtacggcggcggctccaccttccccgtcgtgcacgccccttacagcagcagcgggaccccagaccctgtcctgagtgggcagtccacgtttgccgtgccacccatgcagaacttcatggcagggacagcaggggtgtaccagacccaaggactggtgggcagtagcaatggttccagtcacaaaaagagcgggaacctatcttgttacaactgcggggccactggtcaccgcgcccaggactgcaaacagccgtccatggacttcaaccggccaggtaagcgcgcgccatggccgcgcccaccaggctcccgcaggaccagtgcacacaaatgcttggtttttatgaagagtaaacttctttctttgtaaagcaaaaaaaaaaaaaaaaaaaaaaaaaaaaaaaaaaaaa

SEQ ID NO: 77 - DNA, 3105 bp, Homo sapiens
  SITE (3013): n equals a,t,g, or c
  SITE (3078): n equals a,t,g, or c
  SITE (3103): n equals a,t,g, or c
gagagcctttgcccgccagcgccttcgctctttggctccctgagttagtccggttgtttgcgatcgccgcggccggggctgcgaaccgaaggctcgctccgcgccgcctgggtctctacctcatccgtaggtgtggccctgatggtgtggcaggctctggactcctaaagctctggagcgaatttaagattttattcatgtgcatggcatagaagatgaattcttccacttccaccatgagtgaagagcctgacgctctatcggtagttaaccagttacgggatctagcagcagatccgttaaacagaagagccatcgtccaggatcagggatgtctgcctggccttattttatttatggacyatcccaaccctccagtcgtccactccgctttgcttgctcttcgatacttggcagaatgccgtgcaaacagagaaaagatgaaaggagaactgggtatgatgttgagcttacaaaatgttataccagaaaactacaactycaggagaaacaaaacttytggcctytgaaatctatgacattcttcagtcctccaatatggcagatggtgatagttttaatgagatgaattcacgtcgaaggaaagctcagttttttctgggaactacaaacaaacgtgccaaaacagtggttttgcatatagatggccttgatgatacgtctcggagaaatctatgtgaagaggctttgttaaaaattaaaggtgttattagctttacttttcaaatggctgttcaaaggtgtgtggtgcgaatccgttcagatttgaaagctgaggctttggcatcagcaatagcatcaaccaaggttatgaaagctcagcaagttgtgaaaagtgaaagtggagaagagatgttggtcccattccaagatactcctgtggaagttgaacagaacacagagctacctgactacctgcctgaggatgagagtcccacaaaggaacaggacaaagcggtgtcccgggtcggctcacacccagaaggtggagctagctggcttagcacagctgcaaactttttatccagatcattttattggtgacttcacttttgggctcaaggactgtgtgaaccaacaaggggccagttttccattgttgtggtgaactgtcaagtgcaatttgcaataagttatcatgaaaagtttttagattacacgatcgcatatgctgcatttcacattttattggacattttaccccactgagtggtaaaaaggacagaggctacagatggagttgctttgtttatgaaagtattttggtttgttttctttcatttaattgcctcatatttaaaaaccatgggtccactgttaaaaccacatgtgtatgtgcagctttacattttattttacgtgaagcatgtgattaggaaaactcattttcttttcaagcctcaggacctacctgaagagaagttttcttgtagctcaagttgtgcatgaattactgaatattttactgtgcttttcttcatgaagggtacatgctttgtactcttcactgaaagctgaaaacatttcttgttaccctcttttgtgcctttttattttgccaaccgtgtttatagaaaggacattactaatgacattttgcagattaaaaacattcatttgaacacagtagtcccctagaaaaacaactctacaaaaattttgcagccttattcattataattttrataaaattaacacaaaatcagtcaagaaggaaacatgtatattagtgaagtgtttttggagactgtttgaatgtgaccaaatgtggttctagttgacttcttttcactttggcttatatcaaytcttgagagttaatgtgatcatgatattgcaaacaactataaatggtctctaggccttactttgtgattatacgttatctcyggctagaaaaaaataatggtagtaaagaaactgacaaactgaaaataagaaaacaaaaatcaaatgcctataataccataatgccagtttggtatagagtccaactttaaaacatgaattgctcgacagagttctattcagtaggtgtttctttgtattgtcttttgtgaatttattatgaaaatgctgcgttgtgttgaatgaaaaagacccaaattactgcttatgaagaaataaagccagcattgatcacttaatcctgtttctcatgtccagccagaaaaaagaacttcagtgaaggtaagataaataaatacatacacatatgtttttttggtagataagtgctaattacatatatgtaatgctttattaaatttctgaaatatttggtaactaaaattttctttttggaaattaataaatccagatacatattaatgttgatatgagtaaaaacaaataggaagaaattgaaatttcttttcatcaacatgtagagctgctattttactatttggagaatatgatgtgaaaattggacctcaaagggtttccttgtgttttcattgtaaaataccatcatcagtgagagtcttgagttcactaacattgtcaccttctggagagagagttaatggggggcattgaggatgatatttttttacatgtgtttggtttctgattcaagtgacacgcacaaactgaaaaaaaaaaaacaaaaaaagcaacaataactttcagggcacctattgctctaaatgcataatataacttgctgccagaaccagatgtgtttaaaaaagaaaataaaaccaccttctttctrtagccattaaagcaaactttactgttctaacaaatttgtattttattttgcattgccacacatctgcttatttaaaaactacatccctttggtagtaatgtttcaggacaagtaggtattacagcttgatgtttgtgtgttctaattctaagagttctttattccagatcatatagagtagttaagacaactgtaacagcattttttgaaatacattgtaaaataataaaaggtaacataattaaaatcgagtggatattatatacttggggnataagcattattgattatttatttttaaattttattttaaggtctgggatacatgtgctgaatgnatcataggtatacatgtgccatggngg

SEQ ID NO: 78 - DNA, 2458 bp, Homo sapiens
  SITE (4): n equals a,t,g, or c
  SITE (6): n equals a,t,g, or c
  SITE (7): n equals a,t,g, or c
  SITE (11): n equals a,t,g, or c
aaantnnagtntacgccagcgcgcaattaaccctcctaaagggaacaaaagctggagctccaccgcggtggcggccgctctagaactagtggatcccccgggctgcaggaattcggcacgagctttgtctagcaaacatgtctgcagagtacaccagtaaagtgcaaatatttgaacatgggggattagagccactcatcagactactgagtagccctgacccggatgtaaagaagaactctatggaatgcatttacaacttggtgcaggattttcagtgtcgagctaaacttcaagaactaaatgcaatacctcctatcttagatctcttgaagtcagaatatccagtgattcagttgttggctctcaaaaccttaggtgttattgcaaatgataaggagtctcgaacaatgctaagagacaatcaaggattggaccatcttattaagatcctagaaactaaggaattgaatgaccttcatatagaagcacttgcagtgatagccaattgccttgaagacatggatactatggtgcagattcagcagacagggggtcttaaaaagctcctgtcatttgcagaaaactctacaattcctgatattcagaagaatgcagcaaaagccattactaaagcagcttatgatcctgaaaatagaaaactttttcatgaacaagaggttgaaaagtgccttgtagcccttttgggttctgaaaatgatggaactaaaattgctgcttcccaagctatttcagcaatgtgtgagaattcaggcagcaaagattttttcaataatcaggggattccacagttaattcagttgctaaaaagtgacaatgaagaggtacgggaagcagcagctctagccctggcaaacctaaccacttgcaaccctgctaatgcaaacgctgctgctgaagctgatggtattgatccattaataaacctcctgtctagtaaacgagatggagccattgccaacgctgctacagtattaacaaacatggccatgcaggagcccctgcgcctgaacatacagaatcacgacatcatgcatgccatcatcagcccactgcgttctgcaaacacagtcgtgcagagcaaagctgctctcgctgtcaccgcaactgcgtgtgacgttgaagcccggactgagttaagaaattctggtggattggagcccctggtagagctgctacgctccaagaatgatgaagtgaggaagcacgccagttgggcagtgatggtctgtgctggtgatgagctgacggccaatgaattatgcaggctcggggctttagatatccttgaagaagttaacgtatcaggaactcggaaaaataaattcagtgaggcagcttataataagttgctcaataacaatctttccctgaaatacagccagactggctatttgtcatcaagtaacataattaacgatggattctatgattatggtcggataaatcccggcaccaaactgttgcctttgaaggagctctgcttacaagaaccaagtgacctacgggctgtactcttaatcamcagtaaatcttacgtttctccaccttcatctatggaagataaatcagatgttggttatggacgaagtatttcttcttcatcttccttaagaagatcaagtaaagaaaagaacaaaaaaaatagttatcattttagtgctggatttggatctcccatagaagacaaatcagagccagcttctggacgaaatactgttctcagcaaaagcgccaccaaagaaaaaggatggaggaaaagcaaaggaaaaaaagaagaggaaaaagtgaaagaggaggaagaggttatggtggtaccaaaatttgttggtgaaggaagctctgacaaagaatggtgtcctccctctgaccctgatttctctatgtatgtgtatgaggtgaccaaatcaatactgccaataaccaatattaaggaacagattgaggatctggcaaagtatgtagcagaaaaaatgggtggtaagattccaaaagagaaactacctgatttcagctgggaacttcacataagtgaactgaaatttcaacttaaatccaatgttataccgattggacatgtcaaaaaaggaatcttctaccatcgagctttgcttttcaaggctctggctgatagaattggcattggttgctccctagttcgcggagagtacggtagagcgtggaatgaagtcatgctgcagaatgactctcggaagggagtgattgggggcctccccgctcctgagatgtacgtgattgacctcatgttccatccaggtggactgatgaagttgagaagtcgagaggctgatctttacagattcatttaagccatcagacgaacacaagagaggctcaaacaagaaattcactgtgtacactctctaagacattctccaaattgattttatctctttaaataaaamctttaaataaa

SEQ ID NO: 79 - DNA, 1572 bp, Homo sapiens
ggcacgagcacctccgcagccatacccaggagaaagtggtagcctgccccacctgtgggggcatgtttgccaacaataccaagttcttagatcacatccgtcgccagacctcattggatcagcagcacttccagtgttctcactgttccaagagatttgccacagagcggctattgcgggaccacatgcgcaaccatgtgaatcactataagtgccctctgtgtgacatgacctgcccgctgccttcctccctccgcaaccacatgcgctttcgtcacagtgaggaccggccctttaaatgtgactgttgtgactacagctgcaagaatcttattgacctccagaagcacctggatacccacagcgaggagccagcctacaggtgtgattttgagaactgcaccttcagtgcccgatccctctgctctatcaagtcccattaccgcaaagtacatgaaggagactctgagccaaggtacaaatgtcatgtgtgtgacaaatgcttcacacggggcaacaacctcaccgtgcaccttcgcaagaagcaccagttcaagtggccctcagggcatccccgttttcggtacaaggaacatgaagatggctatatgcggctgcagctggttcgctacgagagtgtagagctgacacagcaactgctgcggcaaccacaagagggatcgggcctgggaacgtcgctgaacgagagcagcctgcagggcattattctagaaacagtgccaggggagccaggacgtaaggaagaggaagaggagggcaagggtagcgaagggacagccctctcagcctctcaggacaaccccagttctgtcatccacgtggtgaatcagaccaatgcccaaggccagcaagagattgtctactatgtgctgtctgaagccccaggggagcctcccccagcccctgagccaccttcagggggcatcatggaaaagcttcaaggaatagctgaggagccagagatccagatggtttgaaggccgcagagccagaccatttcttccccaggtcctgaagtttgagccaggcaagtggcagtgcccctagtgggcagccgttgccaatggatgcctttaggagtggtgccgagagcagtgtggtccactctggcctgggtttgcatcattctgcagactctaaagacttcccttttctgccagactacattttgtggggagcctgaggactctggattctttgaggggatcctggatgtgtgtgttcttgttaaagaggctgttatcaggcttaaccataaccctcaagatctgcttgacagtgattaaatccttagctcacatccattcccatctttcgggctccttaggcccaaggatggcatgtgactggtccctgcaagggtcctttctttgtcaccagccaaggcattgataaccaagtagccattttcctcttaaggtttcctctacaaccccaaggactttcatgattatcctcagggacaggattggaggcattgagcgtgtttattaacaaattgtttttggtaataaaataaatgcttggactcttaaaaaaaaaaaaaaaaaa

SEQ ID NO: 80 - DNA, 1884 bp, Homo sapiens
acaaatcccaggaatctcatgattttaggagagcccttcccagtgagttaaagctcattgctcatcagcaaactcaaacaggagtgagaccctactgatgcaatcaatgtcaaaaagccttcattacaaattcagggcttgtgtatcatcagaaaactcatcatagagaagggaaagtctgtacatgcagcaaatgtggagaagttttcccttggaagtcagaactcattttatgtcaaagaaatcattcaggagagagaccgttcatttgcaaagtatgtgataaaggctttgtggttaggacacatctcactgtacatcagagagctcacacaggagagaaaccatatgcttgctcagattgtgaaaaagccttctcaaaaaaggctttattcatgattcatcagtgaattcacacaggagagataccctattaatgcattcaatgtcaaacagctttgaagaccagatctgagctcagttatcctcagaaagttcttcatagaaaaggaaaaattctatggatgcagtaaaggggggaaagcttttccttggaagccgaacctcattttgcatctcagaactcattcaggagagagacctttcaggggcaaagtctatcataaagccttcatggttagaacacagttaactatccatcagagaactcacacaggagagaaaccatatgctggcttggattatgagaaagccttcttgaaaaaggctcagcttatgaagcatcagggaattcatacagaaaaaagaccctatggatgcagggaatgtcaagaagctttcatctggaagttggatctcaacaatcataagaaaactcatcatgcagtaaggaaatcccatgaatgcagggaatgtgggaaggttttatcctccaaaaaaaactttgttatacatcagagaacccatacaggggagaaacccttcaaatgcaaggtatgtgataaagccttcacatcaaagggaaatctcattgtgtatcagagaactcatataggaaataaatcatatgaatgctcagactgtgatagggccttctccagtaaggtatatctcatgactcatcagccaattcacacaggagagagaccctatgatgcaatgaaggtcaacaagctttcacccaaaagacaggtctcagtaagcatcgaaaaacttgccatgcaagaatgaaatcttatggatacagtggatgtgggaaggttttgtcctgtaagtcaactctcattatataacagagaacctatacaggtgagaaactcctcaaatgtagcatgtgtaataaagccatcatagttaaatcctgtctcactgtacattagagaattcatacaggagagaaaccatataaatgcagtgattgtaagaaagcattcgctactttgtaaactctcattggtcaccagagaactcacacaggaaagaggccctatagatgcagtgaatgtcaaaaagctttactcagaaatcagctattactaatcatcagaaaccccagcaggaaggaagaaagtccatgcagtgacttggaatatgagagagcttttttgattagtcacatcagctcagacacaatagaagttccatgaatactatgattgtaatgggcccttttggaactcttgtgggagagaaaccttatagatgcaatgaatattttaagccttcttttttgaagatatccctcgtttaccgtagagatctcacaagaagaatcattggccaggcgcattggcccatgcctgttatctcagcactttgggaggctgaagcaggcagatcacttgaggttgggagttcgagaccagcctggccaacatgatgaaaccctgtctctactaaaaatacaaaaaaaaaaaaaaaaaa

SEQ ID NO: 81 - DNA, 526 bp, Homo sapiens
gaaagagttcacactggcgagaaaacttacgaatgtaaagaatgtggtaaagcctttctttattccactcactttcgaatccatgaaagaacccatactagagagaaaccctatgaatgcaaacagtgtggtcgggtcttcatttacttcagtcaccttcgaaggcacgaaagaagtcacactggagtgaaaccatgtgagtgtaagcagtgtggcaaagctttcacttgtttaaattccctgaaagtacacaaaagaattcatactggagaaagaccctttcagtgtagacaatgtggtaaagccttcagttactcaaagtctttgcaygtgcacgaaaggactcatagtagacagaagccctaagraagtaaagtgtggtaatgctgtcagttgtattagttccttttggatgtatgagagtacttacgctggagagaaattcaaggaatgtaaacggtgtgattaagccttcagttgtcctaattccctttgaagacgtgactcatgcggcaatgaaatattt

SEQ ID NO: 82 - DNA, 950 bp, Homo sapiens
ggtgggagggcctttagtcaaggtggacatcttagaattcatcagagagttcatactggcgaaaaaccatataaatgtaaggaatgtgggaagacttttagtaggcgctcaaatcttgttgaacatgggcagtttcatactgatgagaagccatacatatgtgagaaatgtggaaaggcctttagaagaggtcaccagcttactgtacatcagagagttcacactggtaaaaagccatatgagtgtaaagaatgtgggaagggctataccactgcctcatactttcttctacatcagagaattcataaaggtggaaaaccctatgaatgtaaggagtgtaagaaaacctttactttgtatagaaatcttactcggcatcagaatattcatactggtgagaaactttttgaaatgtaaggaatgtgggaagacctttagacgtagttcacaccttactgcacatcagagcattcatgctgataaaaaaccctatgaatgtaaagaatgtggaaaggcctttaaaatgtatggctaccttacccaacatcagaaaattcatactggtggaaaaccttatgaatgtaaagaatgtgggaaggccttcagtcgtgcttcaaaccttgttcaacatgagagaattcatactggtgagaaaccctatgtgtgtaagcagtgtgggaaaaccttcagatatggttcagcccttaaagcccatcagagaattcataggagcataaaagtgtaagaccgtaaagagtatgagcgcgccattcatcatcagacagcccacactggtgagaaatgatggaatgttagtcttataggtatggctttagcaattgagagagttcaaaatgcagatcttgccacattagaaagcattcaatgtcagtcctgttttaatggaatatctgactattcaatggtaaattaagaaaaaaaaaaaaaaa

SEQ ID NO: 83 - DNA, 705 bp, Homo sapiens
ggaaactcgagactacatcttcaaaaaacaactttgcagtatttgaattttacattatactgcccttcatttctgacagccaaataactttattgatatttattgcttttgtagttgttataactaataatttctttgaaaatgtgttgtagtttatgtttttcaaagggttttggtagtgtttgtgatagaatggttttgcatatgattattataggggatatatttatagagctctacttgtatactttgtgacttacattatgaaaacttcaaagttctcaatccatacagttagtatttgtatccagagtgtttaagaaaaaaatctgtcttatatttttagtatataggagccagtgttgcttctatttgttttgaatacaaattccagttttctttgcatattagatcccatatgtaagaaacaaccttaaacaataatttgtatgctggtaatatttggacaagtgccataaattaatgtatattgtactttctgaatagattttctctaatcatagcaaaatttatttcaaaactacmactctttgaattattccgctataataaaatttagttataaaattatgtggcactactgraaatctaaaggataatctgaagaatgagtaagacagatattgatagaaatttttagtattttcagaatgtttgggttcatacacataagtgaaatcattg

SEQ ID NO: 84 - DNA, 1697 bp, Homo sapiens
  SITE (1452): n equals a,t,g, or c
  SITE (1510): n equals a,t,g, or c
ttccttccttccgcccgcccgccggcccgccctaagagttgaccacgccgcaatgaagagcttcttacagtgaaagcaaagtaggtcgagtccactgaaaatgcctttaagggacaaatactgtcagactgaccaccatcatcacggatgctgtgaaccagtttatatcctggaacctggagatcctcctttgttacagcaaccactacagacatccaaatctggtattcaacaaataattgagtgctttcgatcaggaactaaacaacttaagcatattttattaaaagatgtggacactatttttgaatgtaagttatgccgcagtctcttcagaggattaccaaatttaattacccataaaaaattctactgcccaccaagtctccagatggatgacaaccttcctgatgtaaatgataaacaaagccaagccataaatgatctcctagaagccatatatccaagtgtggacaaacgagaatatattattaagctagaacccatagaaactaatcaaaatgcagtatttcaatatatttcgaggactgataatcctattgaagtcacagagtcaagcagtactcctgaacaaaccgaagttcagatacaggaaactagcactgaacagtcaaaaacagtaccggttacagatacagaggtggaaactgtagagccccctcctgttgagattgttacagatgaagttgcacctacatctgatgaacaacctcaggagtcgcaggctgacttggaaacttctgacaattctgattttggtcaccagttgatatgttgtctttgtagaaaagaattcaattctagacgaggtgttcgccgtcacattcgaaaagtacacaagaaaaagatggaagaactaaaaaagtacattgaaacacgaaagaatccaaaccaatcctctaaaggacgcagtaagaatgttctagttccattaagtaggagttgtccagtatgttgtaaatcatttgctacaaaagcgaatgtaaggaggcattttgatgaagttcatagaggactaaggagggattcaattactcctgatatagcaacaaagcctgggcaacctttgttcctggattctatttctcctaaaaaatcttttaagactcgaaaacaaaagtcttcttcaaaggctgaatacaatttaactgcatgcaaatgcctcctttgcaagaggaaatatagttcacaaataatgcttaaaagacatatgcaaattgtccacaagataactctttctggaacaaactctaaaagagaaaaaggccctaataatactgccaacagttcagaaataaaagttaaagttgaaccagcagattctgtagaatcttcacccccttccattacccattctccacagaatgaattaaagggaacaaatcattcaaatgaaaaaaagaacacaccggcagcacagaaaaataaagntaaacaagactctgaaagccctaaatcaactagtccgtcggctgcaggtggccagcanaaaaccagaaaaccaaaactttcagctggctttgactttaagcaactttactgtaaactttgtaaacgtcaggttacttccaaacagaacttgactaaacacatcgagttgcacacagatggaaataacatttatgttaaattctacaagggcctctttgccttatgaaactcgcggaaacgtgatg

SEQ ID NO: 85 - DNA, 969 bp, Homo sapiens
gaggctctctaccggtgagggtttgcggggaagatggagtatcccgcgccggccacggtgcaggccgcggacggcggagcggccgggccttacagcagctcggagttgctggagggccaggagccggacggggtgcgctttgaccgcgagagggcgcgccgcctgtgggaagccgtgtccggtgcccagccggtgggtagagaggaagtggagcacatgatccagaagaaccaatgtctcttcaccaacacccagtgtaaggtttgctgcgccttgcttatttctgagtcccagaagctggcacattaccagagcaaaaaacatgccaacaaagtgaagagatacctagcaatccatggaatggagacattaaagggggaaacgaagaagctagactcagatcagaagagcagcagaagcaaagacaagaaccagtgctgcccatctgtaacatgaccttttcctcccctgtcgtggcccagtcgcactacctggggaagacccacgcaaagaacttaaagctgaagcagcagtccactaaggtggaagccttgcaccagaatagagagatgatagacccagacaagttctgcagcctctgccatgcaactttcaacgaccctgtcatggctcaacaacattatgtgggcaagaaacacagaaaacaggagaccaagctcaaactaatggcacgctatgggcggctggcggaccctgctgtcactgactttccaggtgagggggcctagctcacacccagagctggaccagggtttggccactggggctacccggaccagctgacgttgtgcttttcctccttaggtcttgtaagtagggtttgcgaactcagatggctacagaagccagatgagaaattaaaatgagagccaggaaggggatatggtcagctgaagagtgaatgccattcctactcagctgttaccatatctttcaggttttcttttc

SEQ ID NO: 86 - DNA, 943 bp, Homo sapiens
ggcacgagcaatggcccaaatgcagggagaagagtcgcttgacttgaagagaagacggattcaccaatgtgactttgcaggatgcagcaaagtgtacaccaaaagctctcacctgaaagctcaccgcagaatccatacaggagagaagccttataaatgcacctgggatggctgctcctggaaatttgctcgctcagatgagctcactcgccatttccgcaagcacacaggcatcaagccttttcggtgcacagactgcaaccgcagcttttctcgttctgaccacctgtccctgcatcgccgtcgccatgacaccatgtgagccgcacaggtcacactagagaagctgcgctggtatctttcctggtcgtgtgctgaggttgggacaattttttcctctttgacttcagcttgcatatggggttgaagcagcccactgagccaagttgaggagactggaggaaaagagagctggtctcccgtggggctcttcatattctaccttcacttctccactgtccagacccgtttttttcaacctccacatgggttgaattccagtgtggcacccatggctgccttcccatccccccctgctctgaaataggacatttttcctacagtaacaaaacaggaatcaaactcaaggctgtgaacaaacatacgctgctttattctttccaatttttctcttgttttctagaactcttatccatatgtttttaaaataagtacctaaaagtggtttgatagtgtcctaaacgacttttttaacttcctaaatggaaagagcataacaatgtagttgattggtaagatttacagggatttggtttctgagtttgaggcacattcccagtgaataagctgagtcccataccacactcaaaaggttttaataaatctaatcctatttcttcttaaaaaaaaaaaaaaaaaaaaa

SEQ ID NO: 87 - DNA, 1214 bp, Homo sapiens
ggcacgaggaggaggagcctgggggtctcggtccgcagctgggatgagctcccggatgagaaaagggcagacacctacatcccagtgggcctaggccgcctgctccacgacccccccgaggactgccgcagcgacggcggcagcagcagcggcagcggcagcagcagcgcgggggagcctggaggagcagagagcagctcgtccccgcacgcccccgagagcgaaacccccgagcccggcgacgccgagggccccgatggacacctggcgaccaagcagcgcccggtcgccagatcgaaaatcaagttcaccacaggcacgtgcagcgactcggtggttcacagctgtgacctgtgtggcaagggcttccgtctgcagcgcatgctgaaccgtcacctcaagtgccacaaccaggtgaaaagacacctgtgcaccttctgcggcaagggcttcaacgacaccttcgacctgaagaggcacgtccgcacacacacaggcattcgtccctacaaatgcaacgtctgcaataaagccttcacccagcgctgctctctggagtcccacctgaagaaaatccatggggtgcagcagcagtatgcctataagcagcggcgggacaagctctacgtctgcgaggattgcggctacacgggccccacccaggaggacctgtacctgcacgtgaacagtgcccatccgggcagctcgtttctcaaaaagacatctaaaaaactggcagcccttctgcagggcaagctgacatccgcacaccaggagaataccagcctgagtgaggaggaggagaggaagtgaggagaaggaaggggaggacagacgttcacactgccacgtatgtctacgtggatttttggttttcagcttcccccaccccactggctcttcttaattagaagtgaccagttcacctctgtgtccttttgaaacatcagcagtagggtccattccaagattgtcagttaccgttagtgacgtcaggccctgtaacctgtgtcctgtctggcgcagttgctcacattcaccaaagtttgttttcatgatcctgatggccaagaacaccgtgtgggatttttttttcccccaaggattttcacacacggaaggagaggtattttttagagagatcatccttttatggtgccttgaaataaaaatacttctacttgaaaaaaaaaaaaaaaaaaaaaaaaaaaaaa

SEQ ID NO: 88 - DNA, 743 bp, Homo sapiens
gaaatcttccgctggagggtcaacttcatccggcatctgcggagccgcagggagcaggagaagccgcacgagtgctcggtgtgcggggagctgttcagcgacagcgaggacctggatgggcacctagagagccacgaggcccagaagccttaccggtgtggtgcctgcgggaagagcttccgcctgaactcccacctgctctcccaccggcggatacacctgcagccggacagactccagccggtggagaagagagagcaggcggcatccgaggacgcggacaagggtcccaaagagccgctggaaaacggcaaggccaaactgagcttccagtgctgtgagtgtgggaaggccttccagcggcacgaccacctggctcggcaccgcagccactttcacctgaaggacaaagcccggcccttccagtgccggtactgcgtcaagagcttcacgcagaactatgacctcctccgccacgagcgcctgcacatgaagcgccgttccaagcaggctctgaactcctactgagcctctccgcctggggcggcctcaccctggctggtgctgccccctcaccttggtactgatcagcgcccccacccaggacataccttccccaggatagagagcacacctccctcctgtccttgctctcaggtagtgagcgttcgggtggtgccatgggagcactctccctcccccaggtaatgaaagagtggccaagtgaaaaaaaraaaaaaaaa

SEQ ID NO: 89 - DNA, 3084 bp, Homo sapiens
  SITE (15): n equals a,t,g, or c
  SITE (33): n equals a,t,g, or c
  SITE (46): n equals a,t,g, or c
gttttggcaccaaantcacgggactttcaaaangtcgtacaactcngcccattgacgcaaatggcggtaggcgtgtacggtgggaggtctatataagcagagtcgttagtgaccgcagatcgctggagcgccatccacgctgttttgmcctccatagaagacaccgggaccgatccagcctccggactctagcctaggccgcgggacggatamcaatttcacacaggaamcagctatgaccactaggcttttgcaaaaagctatttaggtgacactatagaaggtacgcctgcaggtaccggtccggaattcccgggtcgacccacgcgtccgcacagacctaatagacacggcctttcctctctgcctctggctttatgtctctttcatcctcctctgcctttcccctgcccttgatcccttctgcaggtcttggctggtttcaggaaacgggtcccatcccatggactcccactctggggagcctgcgctcctgccctgtgggacctgtgacatggttttccgctcctcagctctgttagccacccatactcagcgcttctgcattggccacccgacccaagagatgacatttggagcacaggcatcagttgccactgaaccccagcgggccgcggttgtgccacaagaacaccagggcgtgccacaagaaccccagggcctcccagaccagcaggccagtagatctgctctaaagaggttaacagaggaggtacagctacctaccttcccccagggctcaaaacgttgagcgtcttccccaaacctgtagatcatacttgggacagattctgcccacgcagagatcgcggatcgctgttacctccaggtgcagtggctgcggctatccctacaggaaatgcggccctggataacagaggtccccagggtgttcgcggggccctggacacgttccgaggcgcggcctcagagtcccatgtccgaggcggtgggaagccccagcgagcggctgcgggcgctgttcaggactcgcgcgaggcgcgtggcggagatggaagcgcagagccgggccctgcagctacgcggcgagggtgaaggagatgggggacggggaccaaggacctcctctgccctcgccgtttggcttaagcttgctcgggccggttctgactcggcccgcattccctcagaactgagccgacgcctccaagttgtggcctgtacgcggggcgggatgtcccgcctcttcggcctggagcaggagattcgagaactacaagctgaggccgggaggacgcggggagctctagaggtgttgggggcccgcattcaggagctgcaggcggagccagggaacccgctgagctcccggcgagaggcagaactttattctccagtgcaaaaggccaacccgggaactctggctgccgaaatccgggcgctgcgggaggcctacattcgagacgggggccgggaccccggcgtgctgggccagatatggcagttgcaggtggaggcgtctgcactggagctgcagcggtcgcagacccgcagaggaagggcaggtgccacctcaggggagcttccagtagtggaggctgaaaaccggcgcttggaggcagaaatcttggccttgcaaatgcagaggggtcgggcacccttggggccccaggatctgcgactcctgggggatgccagcctacaaccgaaggggaggagagatcccccactcctcccgccaccggtggcaccactgctgccaccacttccaggcttctcggaggttcagttcttgggtggggcaaaggctgtgaggacacggggtgggttgggggaacaggttggaggcagctctgctytgagcagttgggggaacatgagcagctacaaggctttctggaggagtcagctctcttccccacagccacagcttcctggaacaatgaccagaaacctgggcctggactcacacttcctcctgcccacatcggacatgctgggccctgcaccctatgatcctggggctggcctggtcattttctatgatttcctgcggggccttgaggcttcctggatttgggtgcaactaaggactggcttggcacgcgatggacgggatacaggaaggaccacagcgttgcccccagccctttgcctgcccccacctcctgctcccgggcccatgggcaactgtgccatccttgccagcaggcagcctgtgcccagactaccaccctcatcatcagtatctttggtctgtgagctgcaggtctggcaggggctagcatgggctagggcaccacagccaaaggcttgggtctcacttggactatttgaccaagatcagcgggtgctaagtggccgctggcgcctcccacttcgggcccttcctctggaccccagccttagccttgggcagctgaatgggattcctcaggcaggtcaggctgagctctttctgcggctggtgaatgcaagagatgcagctgtacagacactggcagagatcaatccagcaagtgtccatgagtaccagtacccacctccggtgtccagcacatcttcactggaagccaacttcctcacccccgcagttggctttgctgatcccccacctcgtacagaagagcccctcagtggagtcaaggatagagatgagggtttgggccctcaccacagttctgacttgcccccagtgagtttctgaacccaagtgaatgtggagatgagcatctgaacatgcacaggactggggcctatttccagacctacagctttactactccatgttctgacattggatctagaagcatctagcagttgagtacagaaaaccagttccaaccacagctttaccacctcccgttaagtccttaacttttctgtacctcttctgtttttgtaaaacagattaaggattaaatgagtttgtcaggtaaaaaaaaaaaaaaaaaaaaaaaaaaaaaaaaaaaaaaaaaaaaaaaaaaaaaaaaaaaaaaaaaaaagggsggccgctctagaggatccctcgaggggcccaagcttacgcgtgcatgcgacgtcatagctctctccctatagtgagtcgtattataagtagca

SEQ ID NO: 90 - DNA, 1007 bp, Homo sapiens
  SITE (919): n equals a,t,g, or c
  SITE (985): n equals a,t,g, or c
  SITE (992): n equals a,t,g, or c
aggaagggctataataattgttacagaatcatgataatttttcactgatgttatgggaccgttctgattttcccttgcctgcctgtcttccagatgctctctgtgtgggtatgtgtgtagccatcctccttctttgaagtctcatatgtggaaacatgcaagtgaccaaaattacaactacgaacaagtaaacaaggctattaacgacgcgatttcacaaagtggcagagttctggggaaatcccctggaaagactcaattaaagagcagtgaagagagtgcagatcccgtcactggaagttcggaaaatgcagtgtcatcttcagaactgatgtcccagactcccagtgaagttctgggtaccaacgagaatgagaaactgagccctacaagtaatacctcatatagtttagaaaaaatctccagtctggcccctcctagcatggagtactgcgttttactcttctgctgttgtatttgtggttttgaatcaaccagcaaagaaaacctcttggatcatatgaaagagcacgagggtgaaattgtaaacatcatcctgaataaggaccacaatacagctctaaacacaaattaggtggaataatgactcgagcaggaaagcagtagaagaggattccttcaccacagtttcacctttacgctgtcagacaacttcctgccacagaagaagtcgttgatgtgatttttgaggaaatgacagatgtgactttggaaccaaacttgtaataaaaggaattccaaatggacaagcagtaatgatatttaaatattttgagtgagggggagtgggtcaaagaggaagtagaggtgtaatcctgtattaaccctctgtcaccccttcttagtgtcgagtgtatttattaataaaagcttattagaagtgtagaaaatgccagcnagagttaagaaagggcttttcaggaactattctaaaagtcataaaaagggtcacagtcttaagcanagcttantttcttctcacttgt

SEQ ID NO: 91 - DNA, 1454 bp, Homo sapiens
gggaacaaaagctggagctccaccgcggtggcggccgctctagaactagtggatcccccgggctgcaggaattcggcacgagcggcccgggtgagggccaggctccccctgccttccccgactgtgcagggggcttccttaccactgcagctgacagcgctcgagaggatccccctgcatccactggcatcactgattatggtggtgccgggagagatttccttcgggggactggggtcactgaagatgtgttcccagatagttatgtgtccgcttggcatgaggaaagcagcggagggccagaaagttgtccggtggaaacgtctgctccacccgactgtgccctggctgggcctcgcccaacaggtgtgaagaccccagggccccccgtggctctctttccctttcacttgggtgctcccggccccccagcgccaacacctcctactccatctgggccagcccctgcacccccgcccaccttctaccccacgctccagccagatgcagcccccagtgctcagctgggagaaacgcaggcggtgccagcggcccctgccgctcaggccacagccatctctggcactcctgtgcgcgccccgggtggccaaggtgctgagcaacccgcctatgagtgtagccactgccgcaagacgttcagctcgcggaaaaactacaccaagcacatgttcatccactctggggagaagccacatcagtgcgctgtgtgttggcgatccttctcgctacgcgattacctgctcaagcatatggtcacacacactggcgtgcgagccttccagtgtgcagtgtgtgccaagcgcttcactcagaagagctccctcaacgtgcacatgcgcacacataggcctgagcgtgcgccctgccctgcctgtgggaaagttttctcacaccgtgcactgctggagcgacaccttgcagctcaccctgcaccttgatcgggagccagcttcacactgccggctgctgcagtctaggacttggactaggttcactccaccagatggcttctgctctggagtacggacccttccctttccccaagctgaacctgttttccctgtggacttgggacccagaaccctatttctctcctacacttgcttagcttctctctatgggacagcgagatgcttagggcccctgccacctcagagaccatttccagattgagctgggcaaacacattcttggaacctgatgctggatttgtgactcaccccccgccaggtatggtgtctagaattgtcctctgcccctgtgctgggctagaattctctgacctcaccccccaaagtctggagccacccttccctcattgggcacctatggaggcccagatggacctccctagggattttaggattccaatctaataaaggacattgggccagtaaaaaaaaaaaaaaaaaaaaaaaaaaactcgagggggg

SEQ ID NO: 92 - DNA, 1645 bp, Homo sapiens
agcctagacacagtgccaacataaacctacatcgtaaactgttgaccaaagaactcgatgacatgggcctggactcgtcgcagccctcccttagcaaggacctccgcgatgaatttttggtgaagatatatggtgcccagcaccccatggggctcgatgtcagggaagacgcctcctctcccgcaggactgaagactcccacctgaacgggtatgggagaggcatggcagaggactacatggtccttgacttgagcaccacctccagcctccagtccagcagcagtatccattcctccagagaatccgacgcaggcagcgatgaggggattcttctcgatgacattgacggggcgagtgacagtggggagtcggcacacaaggccgaggcccctgccctccctggcagcctaggggctgaagtttcaggatctcttatgttcagcagcttgtctgggagcaatggtgggatcatgtgcaacatttgccacaaaatgtacagcaacaaggggaccctgagagtgcactacaaaactgtgcatttgagagaaatgcacaagtgcaaagtcccaggttgcaatatgatgttttcctctgtacgaagccgaaatcggcacagtcagaaccctaatctccacaaaaacattcccttcacttcagtagattagtctcagaatggacactacaaatgccagctctcaccagatggcctacgtgtttgaactgccatagtcagtgtgcgcttatgtacttggggtgtgtgtgtgtgtgtgtgtgtgtgtgcatttatgtatgctctgtggctacatatacacacacgtatttccttgagataaacaagataaacactaggtgcttttgaatttttttcacttccctttatagttttgggaaaggagtgggatctttgatttcagggtgaaaacagrgtacccctttaaacacacacacacaccacacacacagtgtgcaactagccccagttttgacagaataattcttggtcttccccaaagagacaatttgttgtacccatgactgttgcctgcaaaaataaaagggaaaaaaaagaaaaaagaaacaaaaaggaacttcttatagttgtcttttgtgaactttaaggttttgaaagaatcttcaattaaagcatggcagattcacctgtaaatatttagccttgaggggccattgatgtaaaacaattgtattratggttgtttaacttttttgtttaatttttacagttacatccagctgttagatatgcaggaaaagatagtttgctggctagctctattcatttatgttagcattaatgcacatttttaaaaaaagaaaaaaacatggtcttgtttttactacctgttagatatagtgctaaagaggtgctggcatgctttacagcacagatctgattttttaaaatgtcctgtactagtacataaatcccgtcatgcactttttttcatacactacaaggggatgtgtaataaccatgcttcttttttatccttaaactattgccatacttcagtaagtgtcttttttaaaaaaaattcacttgtataaaaatggtctggtcagtatagggcacaaaagccaaacaaagtattagtgttaacacaaaactgccaactttgcacaag

SEQ ID NO: 93 - DNA, 1357 bp, Homo sapiens
ggcacgagaaaataaatgggctatgactggttaaatgtccaaaaggtgaattctcatttcattcaaacaaagacagatttgcgcattcactcaagcagaatgtggccatgaatattcagcccctgcatacatacaaagatgtacgcatgattccccccaccaagcacacacacagtcacacacgcacacacacacacatgcacacacgcgcgtgcacacacgcacacatgcacacacacatacgcacacgtaaacacatgcacacatgcacacacgtgcacacatgcacacacgcacacacttgcacaggccctggctcttcaagcataatcatggtagtcatcagtgaaagacatttgaggttaagacagcaagtccttgacaaatatgttcatgtctatttggttctagttctataaaaatatgaacattgggactcagagaaaatggggaaaataaagtggattcaggttatcagtgaaatgatggtatagattacagcaaatctggatatatattgatgttactgcatttgcaaatgtcctcccattaaacagaaaatgtggctaaaatccctggcctggaactgaactagtttaaggcaggtgtaagaatagtgggaggaaagtttgtgaaagtttaaagaatgccctcaatcccatgaacgagagggaggatgttgtctttaattatttagaaggttttttttttccttgtctgttgataattttatggaaggttgctttagatctccattccttaaaaaatattacatgtcagtgtagttagatattatctcttttagttattatacttgctatttttactgtatagtgtggtataatcaacaaaaaataatgccacgggcatgtttacaccttttctgttgcactattaaattcttttcacagtattcatatcaatgctaatttgaatgtgatgccaattaaaaatcttgttcatttatattgtatatggtacaaggacgtagcataagatccaaaaaaaattttgtattgtcatttagcatatcaatttcagccaaatttggaagacttgatcatcttatcttttgctctacacactcaaaacaaatattgcagcagaaatatcaccttaaaaatatcttattttatatttagataatattgaaatcacagtctattaaaattggaaatttaattcaaataaaaatcaaacaaaatagttgtttcaatttatctaaatatctggtcttaagagtgccttaagagtgtctcgtttttaagagtgtcttaaaaaccaatatatgtataagtcaacaaatcatataatattcaataaatagctctgaagttgtaaaaaaaaaaaaaaaaaa

SEQ ID NO: 94 - DNA, 2005 bp, Homo sapiens
gggtcgacccacgcgtccggcagggggtgagagccagagggaagagggaccacagggtgacccagaaacaccctcctttcaaagggagccctgagtaagtttgggaagggtggggtgagttggggagcacagggtagtttgatggaggcaacctctgggtggggaagggagcaatgtctcaggatctagtgtgtctaggttctgaagaatgataaattggactggggctgaggttgccctggggtttgagggaacagggctccctgggtatggctctccagggtaagaggaggagacttcccagttcagcctgactgcttcccccacccctccaggtcctgagcctttgcctccaaaaggtctgcagtatctggtgctcttgtctcatgcccacagccgagagtgcagcctggtgcccgggcttcgggggcctggcggccaagatggggggcttgtgtgggagtgctcagcaggccataccttctcctggggaccctctttgagccctacaccttcagaggcacccaagccagcctcccttccacatactactcggagaagttggtgttccgaggccacgagtgggcaggagcttgcagatttggaatctgagcatgatgagaggactcaagaggccaggttgcccaggagggtgggacccccaccagagaccttcccaccttcaggagaggaagagggtgaggaagaagaggacaatgatgaggatgaagaggagatgctcagtgatgccagcttatggacctacagctcctccccagatgatagtgagcctgatgcccccagactactgccttcccctgtcacctgcacacctaaagagggggagacaccaccagcccctgcagcactctccagtcctcttgctgtgccggccttgtcagcatcctcattgagttccagagctcctccacctgcagaagtcagggtgcagccacagctcatcaggacccctcaagcggcccagcagactgaggccctggccaggtaacctgatggctgagacagaaagggcaggggcgtcctgggatgtggccctccctcgaggccctctgctccctctttgctgcccgtagcactgggagacaggcccagtctgctccaaccccggcctgggatgaggacactgcacaaattggccccaagagaattaggaaagctgccaaaagagagctgatgccttgtgacttccctggctgtggaaggatcttctccaaccggcagtatttgaatcaccacaaaaagtaccagcacatccaccagaagtctttctcctgcccagagccagcctgtgggaagtctttcaactttaagaaacacctgaaggagcacatgaagctgcacagtgacacccgggactacatctgtgagttctgcgcccggtctttccgcactagcagcaaccttgtcatccacagacgtatccacactggagaaaaacccctgcagtgtgagatatgcgggtttacctgccgccagaaggcttccctgaactggcaccagcgcaagcatgcagagacggtggctgccttgcgcttcccctgtgaattctgcggcaagcgctttgagaagccagacagtgttgcagcccaccgtagcaaaagtcacccagccctgcttctagcccctcaagagtcacccagtggtcccctagagccctgtcccagcatctctgcccctgggcctctgggatccagcgaggggtccaggccctctgcatctcctcaggctccaaccctgcttcctcagcaatgagctctcctccagctttggctttgggaagccagactccagggactgaaaaggagcaacaaggagagggtctgcttgagaaatgccagatgcttggtccccaggaactaaggcgacagagtgcagggtgggggcaagactgggctgtaggggagctggactactttagtcttcctaaaggacaaaataaacagtattttatgcaggcaaaaaaaaaaaaaaaaaaaaaaaaaaa

SEQ ID NO: 95 - DNA, 825 bp, Homo sapiens
tcgagactagttctctctctctctctctctctgcctttaagttcttggctgcaaagtggacattaacacctttctgttgaattctaccttgctacgtggagtactgtcatccgcatgtttcatcagtgaggcgccctccctcggccaagaagcctcctgcaccagaccatgtacagaagccctggctgtgcctgcctctccaggaggtgcagtcggtaggtggcttaccttcatgtgggatttgagattgtccttgcgaacacaccggaatggacagagcggacactgatgactttttaaacctgtgtgaatcaccawgtgccgsttccagtamctcttcctwttaataaccaaaccacatattggacactggaaaggstttccactttcctcttctgaggcttkgaagaaggagaaagaaaggaccattaaggaaaacaaaaaggtacactgcatctggcattaattcacatacactgccatataaaaagcactaaaaatgatttgggtttttttcttgacaattccgagattttayccataagaaagttttagtactgcttttcttcaggtagaaacccatattcacctagttacttccatctgggctccattttccaaaatctgatcatcctgccttgtgaaagtctgacttccaaaggccatccaacactaaggaagacatcggcaaaggctcgcccagcctgtcctaactcagggcccaagggcaccatgcacagtcagagaagtctgaatgcaggggctttgttcctgaaggaaactgtcagactcaagtccatgtctgaattcctgaactttgaaaac

SEQ ID NO: 96 - DNA, 3353 bp, Homo sapiens
gggacaatatggagctcatagtgaagcagatttctgatgactctgaatcacactgggtggcgccagaacacaccgaaaggagcgttcctcaggatccagactttgcagaagtcagtgaccttaaaggcatggtacaaaggtggcaggtcaaccccactgtggggaaatcaaggcagaatccttcccagaaaagggatctggatgcaatcacagacatcagccctaagcaaagcacacatggcgagagagggcacagatgcagcgattgtggcaaattcttcctccaagcctcaaactttattcagcatcggcgcatccacactggagaaaaaccgtttaagtgcggagaatgtgggaagagctacaatcagcgggtgcacctcacccagcaccagcgcgtccacacaggggagaaaccctacaaatgtcaggtgtgcggaaaggctttccgggtgagttcccacctggttcagcaccacagtgtccacagcggagagaggccctatggctgcaatgagtgtgggaagaacttcggtcgccattcgcatctgatcgaacacctaaaacgccacttcagggagaaatcccagagatgcagtgacaaaagaagtaagaacacaaaattaagtgttaagaagaaaatttcagaatattcagaagcagacatggaactatctggaaaaacccaaagaaatgtttctcaagttcaagattttggagaaggctgtgagtttcaaggcaagctggatagaaagcagggaattcccatgaaagagatactaggacaaccatcttcaaagaggatgaactacagtgaagtcccatatgtccacaaaaaatcctccactggagagagaccacataaatgtaacgagtgtgggaaaagcttcattcagagtgcacatcttattcaacatcaaagaatacacactggggagaaaccattcaggtgtgaggaatgtgggaaaagctacaaccaacgcgtgcacctaactcagcatcagcgcgtccacacaggtgagaagccctacacctgtcccttatgtgggaaagccttcagagtgaggtcccaccttgttcagcatcagagcgtgcacagtggggagagacccttcaagtgtaacgaatgtgggaaaggctttgggaggcgttcccacctggctggacatcttcgactccactcccgagagaaatcccatcagtgtcgtgaatgtggggaaatcttttttcagtacgttagcctaattgaacatcaggtgctccacatgggtcagaaaaatgaaaaaaatggcatctgtgaggaagcatatagttggaacttgacagtgattgaagacaagaagattgagttacaagagcagccttatcagtgtgatatctgtggaaaagcctttggttatagctcagacctcattcagcattacagaactcatacagcagagaagccctatcaatgtgatatatgtagagaaaatgttggccagtgttcccacaccaaacaacatcaaaaaatctactccagcacaaaatcccatcaatgtcatgaatgtggcagaggcttcactctgaagtcacatcttaatcaacatcagagaatccatactggtgagaaaccttttcaatgtaaagaatgtggaatgaatttcagctggagttgtagcctctttaaacacctgagaagccatgagaggacagatcccataaataccttaagtgtagaggggtctctgttgtagaatagctcttaattttagagaaaccttcctggagggaaaccatactcctataatgagcaaagtaacaacttcaagcatttttccagcgttaccatcaaactcacaaataggttgaaatcctttagttataactcagcctttaggaacaccggagaacccacaataatagaaatcttttcgtgttccccattgagaaatgctttagttagcatcttcatgcttggaaatctagacaagaagagaatccatggatggacatggtcgaggaattcggaaagcctgcagttgacattcagtcttcacttgaaactcaaaactgacactaggaacagcttcatgagttcagtagaagtaagctttatttgtagcttctgccttgtttgacggcgtatctattcagggaagcgcacagtaaaagaattccttagcatgatgtctgttttggtacctcagcaatgaaccttttctagaaattattattccaaccactagaataccctagtcactattcccactttgagcattaacccctttgaaaagaaatggacttaaagtatctctgttttggcaaaattcaggttcaggggctggatggtatgtgtttctgctgccttattcaatccaccacttctctgtgaaacactctaccttgtttttggtttgattctactgatgtcagggtttagccggtagaaggagtagttcagtttgtcaattcaggagaaactgtactggtcagtcacatcttacggcgaagggagagggaccttaggggagcagagaagacaggcaaagttgtggactgtttgatcttgtattacccacaggaatgagggcagctaaacccatagaaggagttggaccaaggcgaattacgagtcctggtcccagcagtatgtgtgctgacttctgggtgccccagaaatagacctctcctgtagagtggtgatatacagaatgagtttcagtttgcattgcagctgggattgaaagtaatcagtcrtgagcaggcaggcaggaggtcctgttagccctgccttccaggaaggttggggtgggagttttgagtgggaaagaggatgacatgtgtgagagagttctgagcctgtttgctagggagagtgagtgagtgctcttgggcactgctcaggccgtttctgctgacttgcctggcttacaataaatgcccaataaatatttgttgaccatatgtgttgtacactgtggtgccctgtccagtcccctctaccaagctgagacccccatccccagctgctctgagtttgggctgcaagtgctcacagctcttgttctccagaaactggagaattgccctcaggagatgagagccatctcacctcacccaggagtcacttcctctctacaccccaacacctggttcatttgattaaagcggagaaaactccagggtgctatgactgctctggcacccttggatcaggccaagctagactttttctgagccttcatccgtgctaagctctctcccttctctatcctgtttcattccctccctcaaaggcgtttcccaaataaatcacactgtcaatcaaaaaaaaaaaaaaaaaaaaaaaaaaaaaaaaaaaaaaaaaaaag

SEQ ID NO: 97 - DNA, 431 bp, Homo sapiens
gggctgcaggaattcggcacgaggctcccctcaccccgcctctctccccctcccccagcccctcctctcctcaccccacccggcctccctccctccctcgcccgcccggcgctcgcagaaccgacaccaggggggctctcgatgtagcaccatgacaggcatcgccgccgcctccttcttctccaatacctgccgattcgggggctgcggactccacttccccaccctggccgacctcatcgagcacatcgaggacaaccacatcgatacagatccacgggttttagaaaaacaagaattacagcagccaacctatgttgccctgagttacataaatagattcatgacagatgctgcccgccgagagcaggagtccctaaagaagaagattcagccgaagctctcgctgactctgtccagctcagtgtctc

SEQ ID NO: 98 - DNA, 834 bp, Homo sapiens
aattcggcacgagggaacctgtaggcagcgcttgagggtagcgggatagcagctgcaagcgcgcgtgggaggcgggggctctgggcggaacaaaaatcacaggatgtcagaggatgtttcccgggaagaactgggataaaggaagggtcccagcaccatggaggacccgaaccctgaagagaacatgaagcagcaggattcacccaaggagagaagtccccagagcccaggaggcaacatctgccacctgggggccccgaagtgcacccgctgcctcatcaccttcgcagattccaagttccaggagcgtcacatgaagcgggagcacccagcggacttcgtggcccagaagctgcagggggtcctcttcatctgcttcacctgcgcccgctccttcccctcctccaaagccctaatcacccaccagcgcagccacggtccagccgccaagcccaccctgccggttgcaaccactactgcccagcccaccttcccttgtcctgactgtggcaagacctttgggcaggctgtttctctgaggcggcaccgccagatgcatgaggtccgtgcccctcctggcaccttcgcctgcacagagtgcggtcaggactttgctcaggaagcagggctgcatcaacactacattcggcatgcccggggggagctctgagtgcagcttaagcctctccacggtgacgggtggctctgtggctggtaggactcacccatgatatggggtgcaggaactctgggggccctgaaggatttgcttccctcccctgggaaggcagagggctcttaataaagaggacccagaaaaaaaaaaaaaaaaaa

SEQ ID NO: 99 - DNA, 1995 bp, Homo sapiens
gggctgcaggattcgttacgaggtcccccagcctccaccccagcccgaacccagatcagtcccccagcccggagccggagcccggagcccgaacgtgaggcaaccccgaccccagctcctgccgtcccgaggagcccccagcgcctccggagttccgctgccaahtgtgcggccagagctttacacagtcttggttcttaagggccacatgcgtaagcacaaggccttcttcgatcatgcgtgtccggtgtgcggccgctgcttcaaggagccctggttccttaagaaccacatgaaggtgcacgccagcaagctgggcccactgcgtgccccggggcctgcctccgggcctgcccgcgccccccagcctcctgacctcggcctgctggcctatgagccgttgggcccagcgctcctcttggtcccggctcccaccccggccgagcgccgtgagcccccgagcctcttgggctacctgagcctgcgagctggcgagggccggcccaacggcgagggtgctgagcccggtcccggccgcagcttcggaggcttccgcccgctgtcctctgctctcccggcccgggctcgccggcaccgtgcggaggagcctgaggaagaagaggaggtggtggaggccgaggaggaaacctgggcccggggcaggtcgctgggctctctggcttccctgcacccgcgcccgggtgagggaccggggcactctgcctctgctgctggggcccaggcaagatcgaccgccacgcaggaagagaatgggctgttggttggagggacccggcctgaagggggccggggcgccaccggcaaggattgtcctttctgcggaaaatctttccgctcagcacattcacctcaaagtgcatctgcgagtgcacacaggcgagcggccctacaagtgtccgcactgcgactacgcgggcacccagtccggctcgctcaagtatcacctacagcgccaccaccgggagcagaggagcggggccggccccgggccacccccggagccaccgcctccttcccagcggggttcggccccgcaatctggagccaagccgtctccgcagcctgcgacctgggtggagggcgcctcaagtccccggcctccttctagcggtgctgggccggggtcccgtcggaagcccgccagccctgggaggaccctgcgcaacggtcgaggcggtgaggccgaacccctggacctgtccttgcgggcagggccgggaggcgaggccgggcctgggggtgccctccaccgctgcctcttctgcccgttcgccactggagccccagagctcatggccttgcaccttcaagtgcaccacagccgccgggctaggggccgccggccaccccaggctgacgcgtccccgccctatgcccgagtaccatcaggagagacccctcccagtccttcgcaggaaggggaggagggctccgggctgtccagacccggagaggcagggctgggggggcaagaacggtagtgggccctcaggggcgattagcttagtgagcttaccccgccggagcgggggagcgctagaggtagttgggtagagaagccagcagggggcagcgtgggacccatatcccagccccaggcggaccagaggtggaaggcgcggcgggcgtaggagggtgggctggcggtacccacccagcccaagggagtcacagtgccttagaagtggcagaggtgagggtcaaagaacggggtccctgggctggcagagaaggtttgtgtccctgttgaggagccactctgccagtctttgctggtccataggcgtgagagtttatttttgtacaaggggtgagggtggggggcactgtacccttctagccccatcaggggccctgtagacgtcgctatttttggtacgattcctgtcatccctattgcagagtcgtgtccccaataaacaggtgtcttgaggcacagggccctgtgtctgtctgccaaaaaaaaaaaaaaaa

SEQ ID NO: 100 - DNA, 2014 bp, Homo sapiens
  SITE (15): n equals a,t,g, or c
cgggccccccctcgngttttttttttttttttttgagatggtcttaccatatcatccaggctggagtgcagtggcgtgatctgagctcactgcagcttccgcctcccgggttcaagcaattctgcctcaacctctcgagtagctgggattacaggcacgtaccaccatgcctggctaatttttgtatttttagtagagatggggtttcaccacgttggccaggctggtctcgaactcctgacctcaaatgatccactcgcttcggcctttcaaagtgctgggattacaggaatgagccactgcacccagcctaaaattgttttaaagactagggaagtgtagtagtgacaaatgggggaaagagtggaactcctcaataataaagagttccatctgtaaccgtgaacaattgagataactcaggatcttcagaccagctagatatttttattaatgatatataacctctttaaaacatgtatatttaccaaaagcattctgatatggcattcctctagtgtgactttttgcatgtaaattaatacagcctttttgaccttccatacagtcaggttcctcttcagtgtggatgtttcctaacgaccaagttcaagggctttccaacatctctttcactcatgggacttctcaatgtgtgctttgacatgttcccaaagtggaagctaaaaacaaagaagaatctccacacattttacattcataagatttttcacacttgtgagatcacagctgaatattaaggtataaggcagagygaaaggtttcaacacattccttacagccagaggacgtgcatttatatccaatgtgctcacaagctcagtaaggcccgaggaaaataatgaaagcttttccaccttcctcacattcatagcatttctctccagcatgagttcaaacagactcagtaagatgtaagcatcgacaggtttcctacgttcagtttgtttcctaggatgcacagacacatgaatagtaaggcctatggaaggagccaagattttcccacattccttacattcatatgtcttctcttctattggaattgttaagatctgagacaccaaggaaggcttcccacattccttatgactgtgtacattgccactatgaatgagtacatgttcagtaagtgtgaggaagtagtggctttaccacattctttccaagtatcagccccaattcacacacattcagtaaggcatgaggaattactaaaggtttgcccacattccttatatggtttctccacactatgacttcttagatgtcgaataagatatgtggaccgagtaaaggctttcccacattcctgacattcaaagggccgttcaccagtgtgagttctcatgtgtactgtaaggcctgatgagatactgaaggcttgcccacacttttgacatttatatggcctctcccctgtatgtawtcttttatgttgactaaggtgcgaggagtatctaaaggctttcccacattcctcacattcaaaaggcctttctgcactgtgacttctcaaatgtcgaataagaaatgaggatcraatgaaggctttcccacactgttgacagtcatagggttttacaccaggatgagtctgcatgtgacttttaaaggaagaggaattaataaaggcttttccacattccttacattgataaggcttctcaccagtgtgagttctcatatgtacagtaagatgtgaagagttagcaaaagctttcccacattccttacattcataaggcytttcyccagtgtgagttcgcctgtgttttataagrcctgatgaatcagtgaaggctttcccacatttgttgcactcatacggtttttctccagtgtgaacccttatgtgaatgttgagttttgagaaacaagtaaattctttgccacattcattacaaacatagtgttttcctctagttctaagtcttatatgtttagcaagatctggggaaaaagcaaaggctttgccaaatttcctcgtgct

SEQ ID NO: 101 - DNA, 1244 bp, Homo sapiens
aattcggcacgagctctcccttcggcttctctctttcggccggcgccgccagttcctggggcacacccagaggtccccttctcgccgccgcctgcaactgcgagggtagcccggggccgcttggagtcgcccggacctgagaggctgctgcactgggcctcagccagccctccggatgctggtgctgccatccccctgccctcagcctctggcattttcctccgttgagaccatggagggccctccccgtcggacttgccgctccccagaacctggaccttcctcctccatcggatctccccaggcttcatctcctccaaggcccaaccactacctgcttattgacactcagggtgtcccctacacagtgctggtggacgaggagtcacagagggagccaggggccagtggggctccaggccagaaaaagtgctacagctgccccgtgtgctcaagggtcttcgagtacatgtcctaccttcagcgacacagcatcacccactcggaggtaaagcccttcgagtgtgacatctgtgggaaggcattcaagcgcgccagccacttggcacggcaccattccattcacctggcgggtggtgggcggccccacggctgcccgctctgccctcgccgcttccgggatgcgggtgagctggcccagcacagccgggtgcactctggggaacgcccgtttcagtgtccacactgccctcgccgctttatggagcagaacacactgcagaaacacacgcggtggaagcatccatgagccgggctgccgggtgccccaggtaccacaggactttgcagggagcctggactcctgtccagacacctggtgagagcctgaggctggtgttcagggccctggacacagacacagagcagccgcatctcaaaggcagagccctgcctgaaggaggaatccgtgagtaatcttcaggtcctccgtgttctggagctgagatgggaatgagcccctacacagaatggagtcctctagcctaaagatatcagctgttccatggcagagccttgactggatggaggtggggagtgtggtgtgtaaagtctctggcctcataaaaggtggctgtgggtcgtcaggaatctgcgccatcttcctggggcttctgcgctgttgttggggaagggaccccagtcctgccttccaccccccaaccaggcctgagactgatcaaacaataaacacgttttcccactctgaaaaaaaaaaaaaaaaa

SEQ ID NO: 102 - DNA, 458 bp, Homo sapiens
  SITE (111): n equals a,t,g, or c
  SITE (431): n equals a,t,g, or c
  SITE (443): n equals a,t,g, or c
gccccagcgtggccccggcccatctacagtgtggggactgtggcttcacctgtaaacagagccgttgcatgcagcagcaccggmggctcaagcacgagggggtgaagcccnatcagtgccccttctgtgacttttcgaccaccagacggtaccggttagaggctcaccagtcccgacacacaggcattggccgcatcccctgcagctcttgcccccagacgtttggtaccaactcgaaactgcgcttgcaccggttaagggtacatgacaaaacacctacccacttctgtccactttgtgactatagtggctaccttcgccatgacatcactcgtcatgtcaacagctgccaccaaggcaccccagcctttgcctgctcccagtgtgaagcccagttcagctcagagacagcacttaagcagcatgctctncgccgacaaccngaggctgcaaaggct

SEQ ID NO: 103 - DNA, 2504 bp, Homo sapiens
  SITE (936): n equals a,t,g, or c
  SITE (940): n equals a,t,g, or c
ccaggccgaagccgggcggsaagcgggcgagggtgcagttgcggmggyggcggcggccttggsccccagcggcttcctcggcctcccggcgcccttyagcgaggaagatgaggacgatgtgcacagatgcggccgctgccaggcagagttcaccgccttggaggattttgttcagcacaagattcagaaggcctgccagcgggcccctccggaggccctgcctgccacccctgccaccacagcgttgctgggccaggaggtggtgccggcagcaccaggcccagaggagcccatcactgtggcccacatcgtggtggaggcggcctctctggcagcagacatcagccacgcatctgaccttgttggtggtgggcacatcaaagaggtcatcgtggctgctgaggcggagctgggagacggtgagatggccgaggccccgggcagcccccaccagcaggggctggggctcgcaggggagggtgagcaggcccaggtgaagctactggtgaacaaggatggccgctatgtgtgtgcgctgtgccacaagaccttcaagacgggcagcatcctcaaggcccacatggtcactcacagcagccgcaaggaccacgagtgcaagctctgtggggcctccttccgcaccaagggctcactcatccggcaccaccggcggcacacggatgagcgcccctacaagtgctccaagtgtggaaagagcttccgggagtcgggtgcactgacccggcacctcaagtctctcaccccctgcacagagaaaatccgcttcagtgtgagcaaggacgtggttgtcagcaaagaggacgcacgtgcaggttctggagctggagctgccggcttggggacagccacatcatcggtgacaggcgagcctatagagacttcacccgtgattcacctggtgacagatgccaaggnaccntcatccacgaagtccacgtccagatgcaggagctgtccctgggcatgaaagccctggccccagagccccccgtctcccaggagctcccctgctccagcgagggcagccgtgagaacctgctgcaccaggccatgcagaactccggcatcgtccttgagcgcgctgctggggaggagggtgccctggagccagctctgctccgggtccagtccccagcccctggcagtggcagccccgcagctgccggtactggaagtgcagccgctggagacacaggtggccagcgaggcctcagcggtgcccaggacccacccatgtcctcagtgcagtgagaccttcccgacagcagccaccctggaggcccacaagaggggccacaccgggccgaggccgttcgcctgcgcscatgtggcaaggccttccccaaggcctacctgctcaagaagcaccaggaggtgmacgtgcgtgagcgccgcttccgctgtggcgactgcgggaagctctacaagaccattgcccatgtgcgtggccaccggcgcgtccactcagacgagcggccctacccttgtcccaagtgtggcaagcgctacaagactaagaacgcacagcaggtgcacttcaggacacacctggaggagaagccgcacgtgtgccagttctgcagccgtggcttccgagagaagggctcactggtgcggcacgtgcgacaccacacaggcgagaagccgttcaagtgctacaagtgcggccgtggcttcgccgagcacggcacgctgaaccggcacctgcgcaccaaagggggctgcctgctggaggtggaggagttgctggtgtctgaggacagccccgcggcagccaccaccgtcctcacggaagacccgcacacagtgttggtggagttctcgtccgtggtagctgacacccaggagtatatcatcgaggccactgcggacgatgcggagaccagwgaggccacggagatcatcgagggcacccagacagaggtggacagccacatcatgaaggtggtgcagcagatcgtgcaccaggctagcgccggccaccagatcatcgtgcagaacgtcaccatggacgaggagacggcgctgggcccagaggcggctgccgccgacaccatcaccattgccacccccgagagcctgacagagcaggtggccatgacgctggcctcggccatcagcgagggcactgtgcttgccgcccgggcagggacaagtggcactgaacaggccactgtgaccatggtgtcatcagaggacatcgagatcctggagcatgcaggcgagctggtcatcgcctcgccggagggccagctggaggtgcagacggtcatcgtctagcatgaggtctgcggggtcctggccgggcagggacagggcagaggactctgagcgccccacccatgcctgcctggcctggtagagaagatggcacaggatggaggcgccccaagacggacagtgtacataagagtttcttgttgctttacaataaaacatgagaacctgcaaaaaaaaaaaaaaaaaaaaaaaaaaaaaaaaaa

SEQ ID NO: 104 - DNA, 2911 bp, Homo sapiens
gcctactgtgctcacatctcggagagacagctcttcccacgaggagacccccggctcccaccccctgtacggacacggagagtgcaagtggccaggctgtgagaccctgtgtgaagacctgggccagtttatcaaacacctcaacacagagcacgccctggatgaccggagtacagcccagtgccgggtacagatgcaggtggtgcagcagctggagatccagctcgccaaggagagcgagcggctgcaggccatgatggcccacctgcacatgcggccctcggagcccaagcccttcagccagccactgaacccggtccccggctcctcctcattctccaaggtgaccgtctctgcagcagactcattcccagatggtctcgtgcaccccccgacctcggccgcagcccctgtcacccctctacggccccctggcctgggctctgcctccctgcatggtgggggcccagcccgtcggagaagcagtgacaagttctgctcccccatctcctcagagctggcccagaatcatgagttctacaagaacgccgacgtccggccccccttcacctacgcctccctcatccgccaggccatcctggaaacccctgacaggcagctgaccctgaatgagatctataactggttcaccaggatgttcgcctatttccgcagaaacactgccacctggaagaacgccgtgcgccacaacctcagcctgcacaagtgcttcgtccgcgtggagaacgtcaagggtgccgtgtggactgtggacgagcgggagtatcagaagcggagaccgccaaagatgacagggagccccaccctggtgaagaacatgatctctggcctcagctatggagcacttaatgccagctaccaggccgccctggccgagagcagcttccccctcctcaacagccctggcatgctgaaccctggctccgccagcagcctgctgcccctcagccacgatgacgtgggtgcccccgtggagccgctgcccagcaacggcagcagcagccctcctcgcctctccccgccccagtacagccaccaggtgcaggtgaaggaggagccagcagaggcagaggaagacaggcagcccgggcctcccctgggcgcccctaaccccagcgcctcggggcctccggaagacagggacctggaggaggagctgccgggagaagaactgtcctaagggcctgtagtgaccggcagggctggggtgagacccctcccttccagaatccaggccccatctcccccaactccacagcccctcccgagcctcaaggcaagtccaggactcagaccggggaggcccgggccagcagctcccagtgtgacctgacaaaaacacgtaggggcagggacggtccccacccccagggacacaacccctggtcttggaccagtagaggacacggagggttcagacccctcctcagaccctccccacatctgaaactgcctccccccaaccaccagcagcagcagggccctcctcccccaccagctctccccacagggcccctcagcatcatggagacccgcaggcggggcttagccacccctcaaacccagggccccctggcacctggctctggccgtgttttctggccagaggcccccactttcctaactcgtgctcccttccgccttcttttccgtactgtgaagaaagaactctccaccccagctcccaccctgccctggcctgggtggaggaactgtgcctccatccccagaagaaacagccccctctgctgctggggtgggactgtctgtgtgccctgtgggggtccgtgtgagcaggcccacctggctccagacccgcccccaacctgagacagaaccaggctgagccaggcctccacccccacccccgtttgctgggggctcctccagccgcccccatgggaagaggcctggtaccgcctcacccacagaggtctgtgccaggtgcgcttctgcaggtggagccaagctctccctgaggccagaggcggggcctgggccgggagcccaggggaaggccaggctggaccccggctccacacccacatccagcctgcaggcctctctgcagtcctctcaccctccctcagctccccttcctctgcagtcaccctcagctccccttccttgcccgcctctccccccgccgccccaccagttaaacggatgaccaaagacctttcttatgccggaagcaaaaaccaaaactttttgttggctttttcctttgtcgcctccccagcacctgccctcccagtctcccaccccggccccaggctggaagccctccctccacttaagttattgttttaaaccaaagtttacagtgtctgttggtggccaagaccttctctctccacccctcctccatccaccctgaggaccctggggctcagtggaggcagggccctgcccccctcccttccgctcctgcccagcctgggggaaggagaaaggaggggagaaagcgggctctcaccccctcaggagtgggcacgggagcccttctccctgaccctgggctgcttcctgggggctctccagacccctctctaggaccaagtcacccatcgtgctgggagtgtggattctagcaaaagagctggaaaaaagtcagactctccacagaccccctatgggggacccccaactcaaggccaaggactgggcgtatcggatgctcataacacccctggcctggcccctttactgagaagactccttggatatttcccaagaaccccccacatacacccctcacaagccacccctcctgagaggcagggggccctccgccccctccccatgtattccccacctgtgttccgtttgaccagcacagaaatattaaacgtcctctattcaccgggaaaaaaaaaaaaaaaaaaaa

SEQ ID NO: 105 - DNA, 1155 bp, Homo sapiens
ctgccgtccagcccagcccctttccagcaggaagcccagccctcgaacttgagagggggactgcacccggctttactcacctgagccctggccgcggctggggcctctgaagagctgacagcccagcttcttgtggtccatgaaggcagtgatggcctccaacgggaaggtctgcaggcagcggccgcaggtctggcggcttctctgttgacaactcagctggttccacaccctggcaattgtgaagagttggccaaatgtttgtccactgagctgatctcctctctggagcaccgaggccaccaggagggagccaagacaatgcaaactccagtgaacattcccgtgcctgtgctccggctgccccggggccctgatggcttcagccgtggctttgcccctgatggacgcagagcccccttgaggccagaggttcctgaaatccaggagtgtcccatagctcaagaatccctggaatcccaggagcagcgggcacgagccgcccttcgggagcgttacctccgcagcctgctggccatggtgggtcatcaggtgagcttcacgttgcacgagggtgtgcgtgtggccgcccactttggagccaccgacctggatgtggccaacttctacgtgtcacagctgcagactcccataggtgtgcaagcagaggcgctgctccgatgtagtgacattatttcatataccttcaagccataaagatattgtgttcacttttctgcttgaggctaaggcactgtatcccaggcctcccaatgttcccgagccaggaactctgggccccatggagttatgagctcccttggaattttgagccaagctttaagcaagtctggactcctgagacctcctgggtctagtcagtaaaattctgcaactctaggaattttaagatcccattggaaggaatgctctacctcacagaactctgaaccctacagaaatatgggcctgctgccatttcctgaagaccggggcatcgggtggggtgataaaggatacaacctgcacagggggaagttattaaagaggctgcaaagtccagccaccctgaagatactccccagtgctcccctcctgctaaagaaccagttaccccaggaaaaaaaaaaaaaaaaaaaaaaaaaaaaaaaaaaa

SEQ ID NO: 106 - DNA, 2471 bp, Homo sapiens
ggcacgaggcgaactcatacaggagagagaccctttgagtgtcctgaatgtggaaaagccttcagagaaaagtcaactgtcatcatacattacaggactcacacaggagaaaaaccttatgaatgtaatgaatgtggaaaagccttcactcagaagtccaacctcattgtccatcagaaaacccacactggagagaaaacctatgaatgcactaaatgtggagaatctttcatacagaagcttgatctaattatacatcatagtacccatacaggaaagaaaccccatgaatgtaatgagtgtaagaaaactttcagtgataagtcaactctcattatacaccagagaactcatacgggagagaaacctcataaatgtactgaatgtgggaagtctttcaatgagaagtcaaccctcattgtgcatcaaagaactcatacaggagagaaaccctatgaatgtgatgtgtgtggaaaaaccttcacgcaaaagtcaaaccttggtgtacatcagagaactcattcaggagagaaaccctttgaatgtaatgaatgtgagaaagccttctctcagaagtcctacctcatgctgcatcagagaggtcatacaggagagaaaccttacgagtgcaatgaatgtgaaaaagcattttcacagaaatcatatctcattatacatcaaagaactcatacagaagaaaaaccctataaatgtaatgaatgtggcaaagccttcagagaaaagtcaaagctcattatacatcagagaattcatacaggagagaaaccttatgaatgtcctgtgtgttggaaagcttttagccagaagtcacagctcataatacatcagagaacgcacacgggagagaaaccctatgcatgcactgagtgtggcaaagccttccgagaaaagtcaacattcactgtacatcaaagaactcatactggagagaaaccctataaatgtacagaatgtgggaaagcctttacccaaaaatcaaaccttattgtacatcagcgaacccatgcaggaaagaaagcccatggaagaggccacactcggaagtcaaagttcatggcacattagagagctaatcagcagtatctattatggacactgaaagaaagttgtgtcaattttactcacattttaaaagtatattttgacttgtggtttaaatatgggagtaaattcagcctttcttcttttcatctcagtcataacccaaaagctacgggagaaaaagcagaagtgtaatctctgtatctgacaaaattaggagacagctgcaaccctaatgagagggctgccacaggcagaggaaatgaagcactggtgcaggagatttcagagtgagagtgctcaaggctgcaggtgcaagacagcactggtaaggactcttagctgaggttcgggatataccccgaggcgcggaaccatagatataacagtggtaacagtgcgtgggcaggtaggaggtaggatgtttcctagaccatttggggtctgaggagaaacaggctggggcctcgagaaggagtcactcagacaagccatatttttagaaagtagtctactgatgggagcaacagttatggcatgctgggggaagagaagggacttttccttgtgaagagccctacagctgcccctatttactgacttgggagaagtaaagtcagaaagaacgaacagctgtggggggaaaaaattctcagttgtcaaaaaaaaaaaaaaactgatctgcttagaatgtggccctggtttcttttcccacatgaacctccagcaaatagcaagtccaggaaaaactcttctcattcaaagaggaattattcaaaagtaatcaaaaccacaaatgcatttggtttttgggccagcaattccacttctaggaatgtacatactcacacatgtacaaaatgatgaacatacagaagtattcattaatgcagcgtttgtgaaaacaaaagattggaagctgtttaaatgacaccatatcagggttctggttccctaaattgtggtatattcatacagcctactcctgggtagacaacaatgaataaataaggagaacttggaaaccatttatgtagtgatgtgggataaccttcagtttatgttattaggtaggaaaaataaggttgaggacagtgactgccatttgtatataaaaaggagaaaaatggtaagtacataattgtgaattcataagttatctctggaaagagacatgagaacctggtaaccctgattaccttgggaggggaaggggcagtggtggctggggggatgggaattgagagggagacaactgtatcctttcatagcttttgaaaatgtgggtgtactatgtactatgtggatgtactaccttttcaaaaataaaactttaaaaagctaaaaaaaaaaaaaaaaaaaaaaaaaaaaaaaaaaaaaaaaaaaaaaaaaaaaaaaaaaaaaaaaaa

SEQ ID NO: 107 - DNA, 972 bp, Homo sapiens
gcacgctatgctagccacacttccggcaagagcagctagaatcgttccggtgcatattgaataggcgcagaaagggagaaaaagattctacagccctggccacagtactttggtgacacttttcgtggggctctctggaggacttttcccaaggcagatggagaaaacttcgtgaaacccactccttgctattaaaggaaatgttgtggaatataattggacttaggttttgcagagcttgagcatggcctttttgtcctcccaccttctggttcttgaagacattgccggtgacctggccccagactaacacaaggcgggcgtataccgtcagcctgcctggcgtccccttgcctcagcacacacagagacctcttgcaagatgcttctctgccgccataggtggargttccccgggaactttcccttccttcctagctgaggaagatccctcacttccgctcgccgcgccaccggtcccacctccccgccccccgctgggtcctagcgccggcccctgtttggcagggtccgggctccgtcggtgcgaggagccgacgccgacgccacggagtcagcacaagtctcatcagagaaaccccgttcaccaaggccatggaagtggaggctgcagaggcccggtccccagcccccggctacaagcgctcgggccgccgctacaagtgcctgtcctgtaccaagacatttccaaacgcgcccagggcagcgcgccacgctgccacacatgggccggcagactgctctgaagaggtggccgaggtgaagccaaagccagagacagaagctaaggcagaggaagccagtggggagaaggtgtcaggctccgcggccaagcctaggccctatgcgtgtccgctatgccccaaggcctacaagacggcacccgagctgcgcagccacgggcgcagccacacgggggagaagccctttccgtgccccgagtgcggccgc

SEQ ID NO: 108 - DNA, 1871 bp, Homo sapiens
ggggccaaggtgttggaagttcctaattctttcctcggttaactgtgaaactctgcgtattgggaaggcctggcctcagtcatcaggccaggagaggtactggacgccgcgcacgcactcgtctgccagcgaggcccaaaggggaagcctagcggagctcagtgtggcagctgctggcctctgggccggttgtgcatctaatcatccaaaaaattcagctcaaaacctgactaaagatagtactttaaaacatgaaggcttctattcagagaacttaactgaatctagaaaattcctgaaaagtagggaaaaacagtccagcctgaccgaaataaaaggatctgtttatgaaacaacatacagtcctcctgaatgtccattctgtggaaaaatagaggagcacagtgaagatatggaaactcatgtgaaaacaaagcatgccaatcttttagacattccattggaagactgtgatcaaccactctatgattgtcctatgtgtgggctcatatgtacaaattaccatattcttcaggaacatgttgacttgcatttggaagaaaacagctttcagcaaggcatggatagagtccagtgttctggtgatctacaattggctcaccagcttcagcaagaagaagacagaaagaggagatctgaagaatcaagacaagaaatagaagaatttcagaagctgcagagacaatatggtttagataattctggaggatacaaacaacaacaactacgaaatatggagatagaagtaaataggggaagaatgcctccatctgaatttcataggagaaaagctgatatgatggaatcattagctcttggttttgacgatggaaaaacaaaaacttccggaattattgaagcacttcataggtattatcagaatgctgccacagatgtgagacgggtgtggctttcttcagtggtggatcactttcattcatctttaggcgacaaaggttggggttgtggttacagaaatttccaaatgctactttcatcattattacaaaatgatgcttacaacgattgcttaaaaggtatgttgattccttgcattccaaaaattcaatctatgattgaagatgcatggaaggaaggttttgatcctcagggggcctctcaacttaataacaggttacagggaacaaaggcctggattggagcatgtgaagtatatatactcctgacctccctaagggtaaagtgtcatattgttgattttcacaaatcaactggtcctttgggtacacaccctcgcttatttgaatggatattgaactattattcttcagagggagaagggagtccaaaggtagtgtgtacatctaaacctcctatctatcttcagcatcaaggtcacagtcgaactgttattggaattgaagagaaaaaaaaccgaacattatgcttactaatacttgatcctggatgtccttctcgagaaatgcagaaattattaaagcaagacatagaggctagcagtctcaagcaacttcggaaatctatgggaaatttaaaacataagcaataccagatattggcagtagagggtgctctttctctagaggagaaacttgccaggagacaagcttctcaagtctttacagccgagaagattccttgaagaatcaagcatttaagcatttcagtgattgagaacaatactttgttttctaaatgtagatattgaactccttaatacaattatgaatctgtgaattctcttaagtcttaacatataatttaatttctaaaatgcctgtgttaattgaattatacctatcatacttcattgtttggtaaattatttcaataaaatgtcttgtttttgcaaaaaaaaaaaaaaaaaa

SEQ ID NO: 109 - DNA, 3299 bp, Homo sapiens
gcgggcgggcggagaggagagagtggcgcgcagtccagcgagggcgggggttggctatgtggggggtggtgcaccccgcagtctagacagtctgatccgggctgggggcgtgtacactcggcgcacctgcgagactacagagcctcgggccggcacgtgtggggagtgtggacacgtctgctgcgccccgcttctcgctgctgaggggaagggagggggcgggcaggtgcagcggccgggctagtgggagggggcggcggccatggagcgggtgaacgacgcttcgtgcggcccgtctggctgctacacataccaggtgagcagacacagcacggagatgctgcacaacctgaaccagcagcgcaaaaacggcgggcgcttctgcgacgtgctcttgcgggtaggcgacgagagcttcccagcgcaccgcgccgtgctggccgcctgcagcgagtactttgagtcggtgttcagcgcccagttgggcgacggcggagctgcggacgggggtccggctgatgtagggggcgcgacggcagcaccaggcggcggggccgggggcagccgggagctggagatgcacactatcagctccaaggtatttggggacattctggacttcgcctacacttcccgcatcggggggcgcttggagagctttcccgaactcatgacggccgccaagttcctgctgatgaggccggttatcgagatctgccaggaagtcatcaaacagttcaacgtacagatcctggtaccccctgcccgcgccgatataatgctctttcgcccccctgggacctcggacttgggcttccctttggacatgaccaacggggcagccttggcagccaacagcaatggcatcgccggcagcatgcagccagaggaggaggcagctcgggcggctggtgcagccattgcaggccaagcctctttgcctgtgttacctggggtggaccgcttgcccatggtggctggacccctatccccccaactgctgacttccccattccccagtgtggcatccagtgcccctcccctgactggcaagcgaggccggggccgcccaaggaaggccaacctgctggactcaatgtttgggtccccagggggcctgagggaggcaggcatccttccatgcggtctatgtggtaaggtgttcactgatgccaaccggctccggcagcacgaggcccagcacggtgtcaccagcctccagctgggctacatcgaccttcctcctccgaggctgggtgagaatgggctacccatctctgaagaccccgacggcccccgaaagaggagccggaccggaagaggtggcttgtgagatctgcggcaagatcttccgtgatgtgtatcatcttaaccggcacaagctgtcccactctggggagaagccctactcctgccctgtgtgtgggttgcggttcaagagaaaagaccgcatgtcctaccatgtgcggtcccatgatgggtccgtgggcaagccttacatctgccagagctgtgggaaaggcttctccaggcctgatcacttgaacggacatatcaagcaggtgcacacttctgagcggcctcacaagtgtcagacctgcaatgcttcttttgccacccgagaccgtctgcgctcccacctggcctgtcatgaagacaaggtgccctgccaggtgtgtgggaagtacttgcgggcagcatacatggcagaccacctgaagaagcacagcgaggggcccagcaacttctgcagtatctgtaaccgagaaggccagaaatgctcacatcaggatccgattgagagctctgactcctatggtgacctctcagatgccagcgacctgaagacgccagagaagcagagtgccaatggctctttctcctgcgacatggcagtccccaaaaacaaaatggagtctgatggggagaagaagtacccatgccctgaatgtgggagcttcttccgctctaagtcctacttgaacaaacacatccagaaggtgcatgtccgggctctcgggggccccctgggggacctgggccctgcccttggctcacctttctctcctcagcagaacatgtctctcctcgagtcctttgggtttcagattgttcagtcggcatttgcgtcatctttagtagatcctgaggttgaccagcagcccatggggcctgaagggaaatgaggcagctgctgtgtccccacggaaacaaccatctggggactgctgggaaatgctgtgaatgcggagggaagtgatgtttgggttctgtagctgagagatttttattcatttttaactgccccccaaccccactccaactccttctccaccacccattctcccaatggtctttagaaatagattttcatctgatattctgcagaaatatcaatgagacttggtatgggacaggggcagaaaacactacataggcctccaaggcaaaaccagtcccagtttctttaatgggaagaagctggaattcctggtgctcaattcttagtgaccccaatcctatacccaaatctatgatattctgggacctcagtgattttggtcccctcccacttctctagttcgtcatcctcccttcccatatccttcaaaagaaccacactagggtctccacctacttatacaatgcggatgcccaactgtttttaaggaagccagaagcatcccatggaccatggggtgagtgtcctccaagagccccctgagctcagccctctgcctggagggctccagacctttctgagccctgcttggaggcgagcattttcactgctaggacaagctcagctgttgaggacacccccaccccaaatttcagttcttacgtgattttaaccattcaacatgctgttgggttttaattctctaattattattattattgttattattttttaggaccagttgtagtgaattgctactgaaagctatcccaggtgatacagagctctttgtaaaccgcagtcacacattagggttagtattaaactttgtttagatgtaccataattaacttggctagttgattgtttgaagtctatggaagaaatagttttatgcaaaattttaaaaaatgccagtctggtcagggaagtagggggtttcaatgctgttgggaaccaggaaggtgggacagccggcaggtagggacattgtgtacctcagttgtgtcacatgtgagcaagcccaggttgaccttgtgatgtgaattgatctgatcagactgtattaaaaatgttagtccattaaaaaaaaaaaaaaaaaaaaaaaaaaaaaaaa

SEQ ID NO: 110 - DNA, 672 bp, Homo sapiens
gagcaggcctccgggcccggcgccgccgcccgcaggctcagtagatgaaggcgtttctgagggcttgcctacacttcaaagcacgtctagcactaatgctcctccggatgatgatgatcgattggaaaatgttcagtatccctaccaactctacattgctccttccaccagcagtacagagcgaccaagtccaaatggtcccgacagaccttttcagtgtccaacctgcggggtgcgattcacccgtattcagaacctaaagcagcacatgctcatccactcaggaattaaaccatttcagtgtgaccgctgtgggaaaaagttcaccagggcttactcgctaaagatgcatcgcctaaagcatgaagtgatttcctagtaccggactacttaaaccaggaacaagaagagacccttgttcaatatgatcttggagaacacggttttgaaagcaactcctctgttcaaatgcctgtcatttcacaggtytcctcaacccagaattgtgaaagcccttttcccttkgggtytcttggtgggstggcagaaaaaaaggaagaagtgccagagcagccaaagagcagggcttgtgttgaggcaaccagagatgaccccccaaaatcagagctgtttttttttaaaaagaaaaaaaaaaaaaaaacaaaaaaaaaa

SEQ ID NO: 111 - DNA, 1259 bp, Homo sapiens
  SITE (1046): n equals a,t,g, or c
tcgacccacgcgtccgacggaagtgtaacgttgaggcccttcttgtgtatctggagaaaatagaggttctgactcctcaggagcaaaaaacataacctgaagagggaggaagtggatttggggttcaccatttcttggggcacacttgattgaaaactgagacttctgaagagaaggccagaagatacaaagacagaccatcccagttgaatgctgtcttccaagaacagaagaaaatgatccaggcccaggaatccataacactggaggatgtggctgtggacttcacttgggaggagtggcaactcctgggcgctgctcagaaggacctgtaccgggaygtgatgttggagaactacagcaacctggtggcagtggggtatcaagccagcaaaccggatgcactcttcaagttggaacaaggagaacaacygtggacaattgaagatggaatccacagtggarcctgttcagacatatggaaagttgatcatgtgctggagcgcttgcagagtgaaagcctggtgaacagaaggaaaccatgtcatgaacatgatgcatttgaaaatattgttcattgcrgcaaaagtcagtttctgttagggcaaaatcatgatatatttgacttacgtggaaaaagtttgaaatccaatttaactttagttaaccagagcaaaggctatgaaataaagaactctgttgagtttactggaaatggggactcctttcttcatgctaaccatgaacgacttcatactgcaattaaattccctgcaagtcaaaaactcatcagcactaagtcccaattcatcagtcccaagcatcagaaaacacgaaaattagagaagcatcatgtgtgcagtgaatgtgggaaagccttcatcaagaagtcttggctaactgatcaccaggtaatgcatacaggagagaaaccccacagatgyagtctatgtgagaaagccttctccagaaagttcatgcttactgaacatcagcgaactcatacaggagaaaaaccttatgaatgccctgaatgtggcaaagcntttytcaagaaatcacggctcaacatacatcagaraacacataccggrgrgaaaccctwtwtatgcagtgaatgtggaaaaggyttcatccrgaarggaatytcattgtacaccgcgaattcatacaggtgagaaacttatatatgcaatgaatgtggaaaggcttcattcagaagacgtgtctcatagcacatcagagatttcacacggaaa

SEQ ID NO: 112 - DNA, 1450 bp, Homo sapiens
  SITE (1404): n equals a,t,g, or c
gcggacgcgtggkcgattgccccgagacacatgggccaaggaggggtcagcggcgaattctttcggcctgttggggacccctcgtgtccccacgccagactggacctcccgtatgaacttctcttcgcatcggcggcggcttccgtcacctccgctcccccgatcctattcccagtcgtatgccagcttggagagtcacgtgagagcaagagagtagctttctggttgtcctggtgccctgctcaggcaaactgactgccattctctgaggatggcagctctgtcccccacatttgccacgtccacccaggattccacctgtctccaggactcagaatttcctgtttcttcaaaagaccattcctgtccccagaatttggacctgttcgtgtgcagtggtctggagcctcacacacccagtgttggttcccaggaatcggtgactttccaagatgtcgctgtggactttaccgagaaggagtggcccttgctggattcttctcagagaaaactgtacaaagatgtaatgctggagaactacagcaacctcacttcactggggtatcaggtcggcaaacccagcctcatctcacacttggagcaggaggaggagccgaggacagaggagaggggcgctcaccagggcgcttgtgcagattgggagactccatctaaaaccaagtggtcacttcttatggaagatatttttgggaaggaaacgcccagtggtgtgacgatggaaagagccggtcttggagagaagtccactgaatacgctcacttgttcgaagtctttggcatggaccctcatctcactcagccaatgggaaggcacgctggcaagaggccctatcaccgccgcgactatggggtagcgttcaagggcaggccgcacctcactcagcacatgagcatgtacgacgggagaaaaatgcatgaatgtcatcagtgccaaaaagccttcaccacgagcgcgtccctcacacggcacaggagaatccacaccggggagaagccttacgagtgcagcgactgcgggaaagccttcaacgacccttcagcccttaggagccacgcaagaactcacctcaaagagaagccctttgactgcagtcagtgtggaaatgcattccggaccctctcggccctgaaaatccacatgcgagttcacactggcgagaggccttacaagtgtgatcagtgcgggaaggcttacggccggagctgccacctcatcgcacacaagagaacgcacaccggagagaggccctacgagtgtcacgactgtgggaaagctttccagcacccctcccacctcaaagagcacgtgaggaatcacacgggggagaagccctacgcgtgcacgcagtggacaaaagccttccgctggaagtccaactttantttgcacaagaagaaccacatggtgggagaagaccttacgattgtt

SEQ ID NO: 113 - DNA, 3850 bp, Homo sapiens
gtgaaattattaaaactgctatgaattctcaaatacttgaggtaaaaagtggatctcagggtgctggtgaaacttcacaaaatgctcaaataaattataacattcagcttccttcagtaaacactgtgcaaaataacaaattacccgattcttctccgttttcctcctttataagtgtcatgccaacaaaaagtaacattcctcagtctgaagtatcacataaggaggatcaaatacaggaaattttagaaggcttacagaaattaaaattagaaaatgacctatccactccagcatcccaatgtgtactgataaatacatcagtgacactgactcccacgcctgttaaatcaactgcagatatcacagttattcagccagtttctgaaatgataaacattcaatttaatgacaaagttaataaaccctttgtgtgtcaaaaccaaggctgtaactacwgtgctatgacaaaggatgcactatttaagcactatggtaaaattcatcaatacactccagaaatgattcttgaaattaagaagaatcaattgaaatttgctccctttaaatgtgtagtacctacatgtacaaaaacatttacaagaaattctaacctccgggcacactgtcagttggtgcatcattttacaactgaagaaatggtaaagttaaaaattaaaaggccttatggaagaaaatctcagagtgaaaatgtgccggcctcacgaagtacacaagtgaaaaaacagctagctatgacagaggaaaataaaaaggaatctcagcctgctttagaattgagagcagagacccaaaatacccacagtaatgtagcagtgatcccagaaaaacaacttgtagaaaaaaaaagtcctgacaaaacagaaagttctttacaagtgattacagttacttcagaacaatgtaatacaaatgcactcacaaacacacaaaccaaaggacggaagattaggaggcataaaaaagaaaaggaggagaaaaaacgaaagaagccagtttcccaatcccttgagtttccaacaagatacagtccttacagaccttatcgatgtgttcaccagggatgctttgctgcctttacgatacagcaaaayttgattctccattaccaggctgtacacaaatcagatctacctgcattttcagcagaggtcgaagaggaaagtgaagctggtaaagaaagtgaagaaactgaaactaaacaaactttgaaagaatttcgatgtcaggtaagtgactgttctcgaattttccaagcaattactggcctaatacaacactacatgaaacttcatgaaatgactcctggaagaaattgaaagtatgactgcttcagtggatgttgggaagtttccatgtgaccagttagagtgtaaatcttcatttactacatatttgaactatgttgttcatctagaggcagaccacgggattggactaagggcaagtaaaacagaagaagatggtgtatacaaatgtgattgtgaaggctgtgaccgtatatatgcaacccggtcgaatctcctccgacacatttttaataagcataatgacaaacataaggctcatttgattcgtccaagaagattaacaccaggccaggaaaatatgtcaagcaaggcaaaccaagaaaaatcaaagtctaaacatcgggggacgaagcacagcagatgtggaaaggaaggaataaaaatgcccaagaccaaacgaaagaaaaaaaataatttagaaaacaagaatgcaaagattgtgcagattgaagaaaataagccttattctctgaaacgtgggaagcatgtatattctataaaggctagaaatgatgccctgtctgagtgtacaagcagatttgtaacccagtatccatgtatgataaagggatgtacttcagttgttacaagtgaaagcaatataattagacattataagtgccataaattatctaaggcatttacatcacaacaccgaaatcttcttattgtattcaaacggtgttgcaactcacaagtaaaggaaacgtctgagcaagaaggtgctaagaatgatgtgaaagattctgacacgtgtgtatcagagagcaatgataattcaagaacaacagctacagtttcacaaaaggaagttgaaaaaaatgaaaaagatgaaatggatgaactaacagaattgtttattacaaaattaataaatgaagatagcacaagtgtagagacccaagctaatacttcttcaaatgtaagtaatgattttcaggaagataacctctgccagtcagaaagacaaaaagcaagtaatttgaagagagttaataaggaaaaaaatgtctcacaaaataaaaaaaggaaagttgaaaaagctgaaccagcatcagcagctgagttaagtagcgtgcgtaaagaagaagaaactgctgttgccattcaaaccattgaggagcatcctgcatcttttgactggagctcttttaagccaatgggatttgaagtatcatttctgaagtttcttgaggagtctgcagtgaagcagaagaaaaatactgacaaagaccatccgaatactggaaacaaaaaaggatcccattcaaattcaagaaaaaatattgataagactgctgtgactagtggaaatcatgtatgtccttgtaaagaaagcgaaacgtttgtacagtttgccaatccatcacagcttcagtgcagtgataatgtaaaaattgttttagacaagaatcttaaagattgcactgagcttgtcttaaagcaacttcaggaaatgaaacctaccgtcagtctgaaaaaacttgaagtacattcaaatgatccagatatgtctgttatgaaagatatcagtataggtaaagccacaggcagaggtcagtactgataattaatgtagtataaatacatcatttaccattttattttaaataggaagccatcaagcatgctagaattgtgaaactttcattatatttttttgttgttgacatgaattaacctggccaaaaacaaaaaagaaaaaaaaaacatgacatttgkcatgtaaaacttttttttatcctatgggacttgaggaacagaatcagtacttcagttattgtaaatagtgagctaaacctcaaatttctatcacccagttgcccttttcatgaactaaacaattatctgtgtgattggtatgtttcaccaggtcactgctcatgtataacagtactctttatttgtagataccttttttgtatatatttattattgtaaatcatgtgctgccaccagcagtctgtaagtctaaactattaaatgacacatttatatttggaattttaatttttaactaagcgatcaagttttttaaattgttcttttattgttttaaattaagaactttttgaactaaaaccagaaactctgccatagttcattgatttttacatgaaacatttatttacaagatgatatcaagattacttttcacaaaataggcacattatatcaacactttgctctgctttgtaaatttgccatccaggattttggggtggtattcatgtgaaattaaagcagattctctagcagtttcctatagctacagtttttttttttcattgcttctaattggatatagttactatgagtccatgaaatacaatggaaatgtgaataaagaatttactacattgaagattttaaacatttggtattaaaaaaaaatcctttgtgaatgtgatagaaaactagtagtgtggagcagtgtaaatatttgaggtggtgatttgtgaagtagcccagtattgccttaaataaaatcacatttcatttcttgttttaaaaaaaaa

SEQ ID NO: 114 - DNA, 1014 bp, Homo sapiens
  SITE (768): n equals a,t,g, or c
  SITE (791): n equals a,t,g, or c
gaaacatgggtggaagctgggccagggattgggaaaatctcttcaggggagaacagatcccattccaatcgttgtcaagtatgatgtcatgggcatgggtcgcatggaaatggagcttgattatgctgaagatgctaccgaacggcgccgtgtcctagaagtagaaaaagaagacacagaagagctgagacaaaagtacaaggattatgttgacaaagagaaggcaattgccaaagccttggaagacctcagagccaacttttattgtgaactgtgtgataagcaatatcagaaacatcaggaatttgataaccatatcaactcctatgatcatgcacacaagcagagattaaaagatctgaagcagagagagtttgctcgaaatgtctcttcaagatcccgcmaggatgagaaaaaacaggaaaaagcccttcggcggctccatgagttggcmgagcmaagaaaacmagctgaatgtgcacctggaagtggtcccatgttcaaaccaaccacagtggctgtagatgaagaaggtggagaagatgataaagatgawtcagctacaaatagtggcacaggtgccaytgyttcttgtggcctgggatctgaattctccacagataaaggagsccctttcactgcagtacaaatcactaatacccactggactggcccaggttcttgggttagcttcccaaggcatcagctttggcattaagaataatctggggaccccattgcaaaaattgggagtgtcattttcttttnccaaaaaggctcctgtcaaactngaatcaatagcatcagttttcaaggaccatgcggaggaagggacctctgaagatggaacaaaacccgatgagaagagttctgaccaaggactgcagaaggtaggagactctgatgggagcagtaatcttgatggtaaaaaagaggatgaagaccctcaggatggagggtcccttgcctcaacattatccaaattaaaaaggatgaaacgagaagaaggagctg

SEQ ID NO: 115 - DNA, 496 bp, Homo sapiens
  SITE (472): n equals a,t,g, or c
  SITE (478): n equals a,t,g, or c
gcgcgcttgactgacaggcggcggcggcgcagttgcgagtgcaggctccttgccagaggcctccactcactccagacccctatagcccgtcgctgtcagctgtcaacaaaggatgcgaatgctggccgcttcctgtgggcttcgtgtcacccagaggtgagcccaggccaggatgggggactccagggacctttgccctcaccttgactccataggagaggtgaccaaagaggacttgctgctcaaatctaagggaacctgtcagtcgtgtggggtcaccggaccaaacctatgggcctgtctgcaggttgcctgcccctatgttggctgcggagaatccttcgctgaccamagcaccattcatgcacaggcaaaaaagcacaayttgaccgtgaactgaccacttccgayttggtgtamgccctgtgagaaggagattcytgarcacggtggcatgcccctatgcttgggntcctcnttcaaagatctctgaaca

SEQ ID NO: 116 - DNA, 774 bp, Homo sapiens
ccacgcgtccgcgaattcattcaggagagaaaccctatgaatgtagtaaatgtggaaaagtcttctctcggatgtcaaacctcactgtccactacagaagccattcaggagagaaaccctatgaatgtaatgaatgtgggaaagtcttttctcagaagtcatacctcactgtacactatagaactcattcaggagagaaaccctatgaatgtaatgagtgtgggaaaaaattccaccacagatcagccttcaatagccatcagagaattcatagaagaggaaatatgaacgtacttgatgtggaaaatctctgaagtcagatctcaatttttagaaaactctctgaatataatgaatatggggaatccaataggaagtcaaagcgtttatctgagagttcgtgttcctgaacggtgagaagcatttaggcattagagtcattttaatccaaattttcacagagaagaatcccgaagaatgtaacaagaagcaaagccttcagcaagatcatacgactcatcggacactaatttatataggagtgaagttttataaatatttaatatttattttggattcaaattgtatttacatatcagggaatcatacaaaggcaaaatctgtcaatatggtgaatgtggaaaatatattgtcttggaaatttgttgtaaaagccatatttctaatggaaaatcaggtgtttacaggaaagatctcagaggctatgagctctgaataaatcttcattgtataaaaaaaaaaaaaaaaaaaaaa

SEQ ID NO: 117 - DNA, 717 bp, Homo sapiens
  SITE (653): n equals a,t,g, or c
  SITE (710): n equals a,t,g, or c
attgctctggagccagcaggkkaagtgtgtacactatgtgcactgagggtgacacttctgagtgtgggggccctggctagggagtgggactggcaggcttgggtggggttcccaagctttaatcttcctaccccacagaatgttttctctgcccttcaggcagcctgagccgggcagggcccctgcctctgctacggcagcccccgatcatgcagcccccactggacctcaagcagatcctgcccttcccactcgagccagcccctacccttggcctcttcagcaactacagcacyatggaccctgtgcagaaggctgtgctctcccacacttttgggggacccttgctcaagaccaagcggcccgtcatttcctgtaatatctgtcaaatccgcttcaattctcagagccaggctgargcgcactacaaaggtaatcgccacgcccgacgagtcaaaggcattgaggctgcaagaccagaggcagggagcctggcgtccgagaacctggagayccagctcccccaggcagcaccccaacaaatggggatggtgtagcaccccgtccagkttccatggagaatggactggggccagccccaggatccccagagaaacagcctggctccccatcccctcccagcattccggagnctggtcagggtgtaaccaagggtgaaggggggactccagccccggcttccttgcctnggggtag

SEQ ID NO: 118 - DNA, 781 bp, Homo sapiens
  SITE (727): n equals a,t,g, or c
  SITE (747): n equals a,t,g, or c
  SITE (767): n equals a,t,g, or c
gcggacgcgtgggcggacgcgtgggcgaaacactgtccctgcgagttctttaagttccctgcaatctgtacacaagagaaagagggagagagagagggagagagacagagagagcagggatcaggtaaaggagtggggctgctgcagccattcagacctcaggagctggaaaattgccaaggatgcagaaggaaatgaagatgatcaaagacgaggatgtgcatttcgacttggctgtgaagaagaccccctcctttccccactgcctgcagccagtggcttctcggggaaaggctccccaaagacaccccttcccggaagctctccgagggccattttcccagtttcggtatgaacctcccccaggagacctagatgggttccccggggtcttcgaaggagcagggtctaggaaacggaagagcatgcccacaaagatgccctataaccaccctgcagaagaagtcaccctcgccctccactcagaggagaacaaaaaccacggccttcccaacctccctttgctgttcccgcagcccccgcgccccaagtatgactctcagatgatcgacctgtgcaagtgggcttccaattctaccgcagcctgggaacactttgggggcaagcccgtcaagcaggaacccattaagcccagcgccgtgtggccccagccaacgcccaytccattcctgcccacgccytamccctattamcccaaattccaccngggcttcatgtttccccttntttgtggccttgttcttggnctttccctttcaac

SEQ ID NO: 119 - DNA, 611 bp, Homo sapiens
agaagagcaactttaagtgcagcatttgcgagaaggcgtttctgtatgagaagagcttcctgaagcacagcaagcaccgccacggcgtggccaccgaggtggtgtaccgctgcgacacctgcggccagaccttcgccaaccgctgcaacctgaagagccaccagcgccacgtgcacagcagcgagcgccatttcccatgcgagctgtgcgggaagaagttcaagcgcaagaaggacgtgaagcggcacgtgctgcaggtgcatgagggcggcggcgacggcaccgtgcggccagtgcggcaagggcytgagttccaagacagcgctgcgctgcacgagcgcacacacacgggagaccggccctacggctgcaccgagtcggcgccaggttctcgcagccgtccgcgctcaagacgcacatgagaattcatacaggggaaaaaccttttgtctgtgatgaatgtggtgcaagattcactcagaaccacatgctgatttatcataaaaggtgtcacacaggtgaaagaccttttatgtgtgaacatgtggcaagagttttgcttctaaggagtacttaaacaccacaatagaatccatactggatccaaaccc

SEQ ID NO: 120 - DNA, 252 bp, Homo sapiens
gtcgacccacgcgtccggctccaggcgccacggtgtgtgcaccgactgtgctggccgcggcatggccgggcccctggaccatggcggcggaggcggcgagggctctccagaggcgctgttcccaggcgacgggccctatctggaggaccctgaggacccacgaggggaggcggaggagctgggcgaggacgacgagggcctggcccctgaggatgcgctgttggcggacgacaaggatgaggaagactcgcc

SEQ ID NO: 121 - DNA, 2107 bp, Homo sapiens
ccacgcgtccggaaagagggagagagagagggagagagacagagagagcagggatcaggtaaaggagtggggctgctgcagccattcagacctcaggagctgggtgtgaaggagcataagtgtgggatttgtgggcgggagttcaccctgctggccaacatgaagcgacacgtgctgatccacaccaacatccgcgcctaccagtgtcacctctgctacaagagcttcgtgcagaagcagaccctcaaggcacacatgatcgtccactctgacgtgaagcctttcaaatgcaagctttgtgggaaggaattcaaccggatgcacaacctgatgggccacatgcacctgcactcagacagcaaacccttcaagtgcctctattgcccaagcaaattcaccctgaaggggaacctgacacgccacatgaaagtcaagcatggagtcatggagcggggccttcattcccaaggtctgggaagggggagaatcgccctggcacagacagccggtgtcctgaggagtctggagcaggaggagccctttgacctctctcagaagcgccgggccaaggtgccggtgttccagtcagacggggagagtgcccagggcagccactgccacgaggaggaagaggaggataactgctacgaggtggagccctacagccctggcctggccccccagagccagcagctctgcacacccgaggatctgtccaccaagtcggagcacgcccccgaggtgctggaggacgcctgcaaggaggagaaggaggatgcatccaagggagaatgggagaagaggagcaagggtgaccttggggcagagggcggccaggagagagactgtgccggcagagatgagtgtctcagtctcagggcttttcagagtacccggcggggcccctctttttctgattacttatacttcaagcacagagatgagagtttgaaagaattactggagaggaaaatggaaaaacaagcagtgcttttaggtatctaagtggacagttttaaaattacatttggaaaatgagaacgaggcagttcaaatatagctttctgcatgaactgtcattttctggagactggcgaatagtaccaatctctacaaatggcttagactaaatgagcagggatgtaggtaatggaaagccttctcaggtcattcacggggcccttgatacccttcacacatgtgcagggtcttcatcagtggcgttttatgcattgccagtataataaactgtgagtattcttccagatatctaattgtaagctgatgctgaggtgcttttagaaattctactttcctttgattcatatgcaatacatggtaaatttctaattgcaaaaatatggtgcttgaggtgtcaccttattaataactatttaggtgaatttgtgaaggttataatattttccatatagatgaaaatattagtcatcatatatataaaaatagcctttattctataaccaaaaatgtcagaaatggcacaggaggatgagctattgaagagaatgctctccagtagttgctgcagatataaggtaaaatttcaggagaagaataattttgactaagggaaactggtgacctagaatacttagattctcttgttctgtgtcggctgtcttcatcagattgagcatttggagcattatttttcagatgatatgatgatgtttggggccctggctcctcagacaaaccctcacttctcgagcacggctccctcctggagaccattgctgtcttgctctgaggcctcatgccccataagacagatgcaggggccgggcgcagaggctcacgcctgtaatcccagcactttgggaggccgaggcaggcagatcacttgaggtcaggagtttgagaccaacctggccaacgtggcaaaaccccttctctactaaaaatacaaaaattagccaggcatgatggcaggagcctgtagttccagctactcgggaggctgaagcaggagaatcgtttgaacccaggcagtggagattgcagtgagctgagctgagatcacgctactgcactacagcctgggtgacagagtgagactctgcctcaaaaaaaaaaaaaaaaaaaa

SEQ ID NO: 122 - DNA, 2926 bp, Homo sapiens
gggagggaaaccttacacatgtagccaatgtgggaaagccttcatcaagaagtgtcggctcatttatcatcaacgaactcatacaggagagaaaccccatggatgcagtgtatgtgggaaggccttctctacaaagttcagtctcactacacatcagaaaactcatacaggagaaaaaccttatatatgtagtgaatgtggaaaaggcttcattgagaagaggcgtcttattgcacatcatcgaactcatactggtgagaaaccctttatatgcaataaatgtgggaaaggcttcaccttgaagaacagtcttatcacacatcagcaaactcatacaggagagaaattatatacatgtagtgaatgtggaaaaggcttttcaatgaagcactgtctcatggtacatcaacgaactcatactggagagaaaccttataaatgcaatgagtgtggaaagggcttcgctttgaagagcccactcatcagacatcagcgaacacatactggagagaaaccctatgtatgcaccgaatgtcgaaaaggtttcaccatgaagagtgacctcattgtacatcagcgaactcatactgcagagaagccatatatatgcaatgattgtggaaaaggcttcactgtgaagagccgccttattgtgcatcagcgaactcatactggagaaaaaccctatgtatgtggtgagtgtggaaaaggctttccagcaaagatccggctaatgggacatcaacgaactcatacaggagagaaaccttatatttgcaatgagtgtggaaaaggcttcactgagaagagtcatctcaatgtacatcggcgcactcatacaggagagaaaccctatgtatgcagtgaatgtggcaaaggcttaactgggaaaagcatgctcattgcacatcagcgaactcatactggggagaaaccttatatatgcaatgaatgtggaaagggcttcaccatgaagagtactctcagtatacatcagcaaactcatactggagagaagccatacaaatgcaatgaatgtgataaaaccttcacgaagaagacatgcctcatacaacatcagcgatttcacacaggaaagacttcctttgcatgtactgaatgtggaaaattctctttgcgcaaaaatgatcttattacacatcagagaattcacacaggagagaaaccgtacaaatgcagtgactgcgggaaagccttcactacaaaatcagggctcaatgttcatcaaagaaaacatacaggagagaggccctatggatgtagtgattgtgggaaagcttttgcgcacttgtctatccttgttaaacacaagagaattcacaggtagtcattttgggaaagcctcttgccagatgtaggcccttaagatatctgcaaagaagagtaatttcatgaatgcagactacatggttgattatttagagatcagctacttcatgttttgtgtcagagaaaacatgtacaaaacatttgagaaaatattttaggacattatgtctaaaaattgtatactgagaaaaatcctatgaatgtggcagactataaaagcctttggtgggaagataaaccccctcagaagtgatcatagatcatgaataaactactaattcgtggaaatgtaataattataggaacgtctttgcccaaaaataaaacctcaacagattgagagagttcacactggagaaatactttcctctggcagtgaatgtggcagggttttcagtaaaatgttttgcctcatcgtgtgctaggaaataatgcagaaaaaaactaatgaaaacattcaatgtagaagacttttaggaaaacaacagagaatttaatgaaggaaagaagccttggcaaaatgatggatgagagctttctgtcacaattctaaccttaacagataatatgcctcatgtgcatttgggaacaggatagcttgagccatattcctagttgccttgtcactgattttatacattttaaattgtgacttcctctaatcacgaactaaaatttaatattgtatataataccggagtattttatgcctgcctcattttattatatgattagctcctgcatttctttagttctaagtttgtgttatttcagaataactaaagtacttcagaatgaaactggatacagtatattcaattcataagtgtaattgaccatacttgaatgtttaagtttataagtaacatcaggtgttatgaaattaatataaataagatgtttcttgtaagtcttttattttgaaataagtttagattcacaaaatcttaccaaaatattccagagttcttgaatgcccttaacccagccttcttccaaagataacaacttacataagcatggttcgttaccaaatacaggaaagtgaaattgttacaatactgttaactacagaatttatttggaaatcaccagttttaacatgcatgcatttttgtttgttttttatatgtagctttaagaaatcttaacacatatattgattcatgtcaccaccaccgtaatcgagattcagaatgttgcatcaatgcaaactccctcatgctccttgtttatagtcacaacctctcctcagccctaacccttggcaatcagaaatcttttcatctttagttttgtcattagtagcatgttataaaaatggaatcatacagcatgtacccttttggtattggctatttcaactaaagcagattaacctgaaatccatccaagttgttctgcatatcattgttctgtttttattggccactaataatctatgatacgaatataccactatttgtttattcacccactgaaggacattagttttgttcccggtttttcttactgttacaaataaaaatcctatgaacatttgtacacacaaaaaaaaaaaaaaaaaaaaaaaaaa

SEQ ID NO: 123 - DNA, 3293 bp, Homo sapiens
gggggccgtgctcggtgcgcttctgcaccggtgacgcaaccgctgtgtctccgccagtccgcgcaggccagcatccttcagaaaaagcatccccgaggaggaagacgaatcgttaaacatcttaggtcagctttaccagtgaggaaaccgacactgtgagctctagcctctcggaatttgtcttcttcagtggaaaccccgagaagactgatcagttcttcagttctaaaacaatggcccagggtttggtgacgttcgccgacgtagccatagacttttctcaggaggagtgggcctgtctgaactctgctcagagggacctgtactgggacgtgatgctggagaactacagtaacttggtctcactggatttggagtcagcatatgaaaataagagtttacctacagaaaaaaacattcatgaaataagggcttccaaaaggaattcagatagaagaagtaaatcccttggccgtaactggatatgtgaaggtacgcttgaaagacccagcgctccagagggaggtatgtcaatcagatgatcatcaattatgtcaaaaggcctgctactagagaaggcacccctcctagaacacatcagagacatcataaggagaattcctttgaatgtaaggactgtgggaaggcctttagtcgtggctatcaacttagtcaacatcagaaaatccatactggcgagaaaccttatgaatgtaaagaatgtaagaaggccttccgttggggcaatcagcttactcaacatcaaaaaattcatactggggagaagccctacgaatgtaaagactgtgggaaggcttttcgatggggctcaagcctcgttattcataagaggattcatactgggaaaaaccctatgaatgtaaagactgtggaaaggcctttcggcgtggtgatgagctcactcagcaccagagattccacactggggagaaagactacgaatgcaaagactgtgggaagacctttagccgtgtgtataaacttattcagcacaagagaattcatagtggggagaagccttacgagtgtaaagactgtgggaaggcttttatttgtggttcaagcctcattcagcataaaagaattcacacaggtgagaaaccctatgaatgtcaagaatgtgggaaggcctttactcgagtcaattaccttactcagcatcagaagatccacactggtgagaagcctcacgaatgtaaggagtgtgggaaggcctttcgctggggttcgagcctcgttaagcacgagaggatacatacgggcgagaagccgtacaagtgcacagaatgtgggaaggccttcaattgtggctatcacctcactcagcacgagagaatccacacaggcgaaaccccgtataaatgtaaggagtgtgggaaggctttcatttatgggtcgagcctcgtgaaacatgagagaattcataccggggtgaaaccctatgggtgtacagaatgtgggaagagctttagtcacggccatcagcttacacaacatcagaaaacgcacagtggggcgaaatcctacgaatgtaaggagtgcgggaaggcatgtaaccacctaaaccatctccgagaacatcagaggatccacaacagttgaagagccttttgaacgcagtagcccgctcgtatctatggtttcgctttccacagtttgttacctgcagtcaactgcagttcaaaaatattaaatggaaaattccagaaataaagaattttaagtctcaaatggtgtgcccttctgagtagcgtgatgaaatctctcgctgtccggctccagccggccggggatgtgagtcatcccttggtccagcacatccacgctgtatacgccacccaccctgctagtgacttagtagccgtcttggtgatcagatcaactatcccagcatcacagtgcctgtgcccaagtagtcctcactttgcttaacagtggccccagagagcaggagtagtgatgctggtgattcggatatgccaaagagaagccacaaagtgcttccttttaaatgaaaaggtgaaagttctcaacttaaaaaagaaaagaaaaaaatcatatactgaggttgctaagatctacatgacaataagatattttgggagagagatacgttcacataattttattacatatattgttacaattgttctattttgttagttactgttggtaatctcttactgtgcctaatttataaattaaactttagatatgtatgtacaggaaaaaatgtagtatatagtatcgtatatatgtacaggaaaaaaacgtactatctgtggtttcaggtatccactgcgggtcttcgaacgtacccccctcaggtgagaggggactgctgtacaaagaatataggaaggcctctagactacatccattccttcctcaacaggaggaaaattcctggtacagtttaacgtaaggcttcactgatcactgttgtttttgtttttgtttttgtttttttgagacagagtctcactcttgcccaggctggagtgcagtggcacggtcttggctcactgcaacctccacctcccaggttccagcaattctcctgcctcagcctccccagtagctgggattacagacatgcaccaccacacctggctaatttttgtatttttagtagagacagttttcaccatgttgtccaggctggtctcaactcctgacctcaggtgatccacccaccttgccctcccaaagtgctaggattacaggcgtgagccactgcacctagcccactgatcactcttctgcttacagaatatcagaagtcattctagaggcaaatttgaagagtggaaaaatcactttttctgaatgatcttgtttttggtgtagatgtttttattgtgtgggttagtttaatgaatacataaagactaccagtaccattctgtctttactccgtggcatctgtggaataaccctgctaatgtaacacgtgagaaagcctttggtcatgccacccactctaccagttgtccccaccatcccccgccctcctccctgtgagacactgggccaaaggctcactacccctgtgcgttgtcccccacacagacactatgtgcattatttgtacataaggataatcacatctacctgagactgctatcatggaaattaaatgtttggtacatgtaaagtctttgaaagtgtaactggaatattgtgtaattttaataaataataactattgttgtttttatgatcattctaccaaaaaaaaaaaaaaaaaaaaaaaaaaaaaaaaaaaaaaa

SEQ ID NO: 124 - DNA, 2481 bp, Homo sapiens
tcgacccacgcgtccgactgccgcaaactttatagtttactcaagcatcttaaactctgccatagcagatttatcttcaactatgtttatcatccaaaaggtgctaggatagatgtttctatcaatgagtgttatgatggctcctatgcaggaaatcctcaggatattcatcgccaacctggatttgcttttagtcgcaacggaccagttaagagaacacctatcacacatattcttgtgtgcaggccaaaacgaacaaaagcaagcatgtctgaatttcttgaatctgaagatggggaagtagaacagcaaagaacatatagtagtggccacaatcgtctgtatttccatagtgatacctgcttacctctccgtccacaagaaatggaagtagatagtgaagatgaaaaggatcctgaatggctaagagaaaaaaccattacacaaattgaagagttttctgatgttaatgaaggagagaaagaagtgatgaaactctggaatctccatgtcatgaagcatgggtttattgctgacaatcaaatgaatcatgcctgtatgctgtttgtagaaaattatggacagaaaataattaagaagaatttatgtcgaaacttcatgcttcatctagtcagcatgcatgactttaatcttattagcataatgtcaatagataaagctgttaccaagctccgtgaaatgcagcaaaaattagaaaagggggaatctgcttcccctgcaaacgaagaaataactgaagaacaaaatgggacagcaaatggatttagtgaaattaactcaaaagagaaagctttggaaacagatagtgtctcaggggtttcaaaacagagcaaaaaacaaaaactctgaaaagctctaaccccatgttatggacaaacactgaaattacattttagggaattcatcctctaagaattatgtttttgtttttaatcatatgttccaaacaggcactgttagatgaagtaaatgatttcaacaaggatatttgtatcagggttctacttcacttcattatgcagcattacatgtatatcacttttattgatgtcattaaaacattctgtactttaagcatgaaaagcaatatttcaaagtatttttaaactcaacaaatgtcatcaaatatgttgaattgatctagaaattatttcatatataaatcagaatttttttgcatttatgaacggctgtttttctactttgtaattgtgagacattttcttggggagggaaaattggaatggttcccttttttagaaattgaagtggtcttcatatgtcaactacagaaaaggaaaaaaatagaaattgaaggatttttatgaaattatattgcattactatttgcagtcaaactttgatccttgtttttgaaatcatttgtcaattcggaatgaaaaattataatgtaattttacattacataagttccttttacaattaaaaaatagcacttcttcatcttatgcctgtttgagaagatattaaattttcacattgttgacagtgaaatgctatgttgtttataagattacagaccatttgttttcatgtggataattttagtgcattgctcacccggtatgttttttttttttaacttgaacattttgcttgttttgtttttcttttttaattagataatcacacggaaaattaagctgttcatatctttaaattaggattgcaaaccaaggaaagaacgcatttgagattttaagatgtcacttataaggggagaagtgttcttaaaaagtcaaccagaaaactgttatgccttttatttgtttgcaaggatgtctttgtaatgtgtttcatgaatagaatatccaatagagataagctgacttgaatcattttgagcaattttgcagttggattttctccaacagaaagtggattcactactggcacattaacaagcaccaataggtttttattccaactccgagcactgtggttgagtaacatcacctcaattttttattatccttaaagatattgcattttcatattctttatttataaaggatcaatgctgctgtaaatacaggtatttttaattttaaaatttcattccaccaccatcagatgcagttccctattttgtttaatgaagggatatataagctttctaatggtgtcttcagaaatttataaaatgtaaatactgatttgactggtctttaagatgtgtttaactgtgaggctatttaacgaatagtgtggatgtgatttgtcatccagtattaagttcttagtcattgatttttgtgtttaaaaaaaaataggaaagagggaaactgcagctttcattacagattccttgattggtaagctctccaaatgatgagttctagtaaactctgatttttgcctctggatagtagatctcgagcgtttatctcgggctttaatttgctaaagctgtgcacatatgtaaaaaaaaaaaaaaaa

SEQ ID NO: 125 - DNA, 1841 bp, Homo sapiens
cgacccacgcgtccgccaaaacaaaagctttctaaaaaacagaagaaaaagaaacagaaaccagcacagaattatgatgacaatttcaatgtaaatggacctggagaaggagtaaaggttgatccagaagatactaacttaaatcaagacagtgccaaagaattggaagatagtccccaggaaaatgtcagtgtcacagagatcattaaaccatgtgatgatccaaaaagtgaagctaaaagtgttcctaaacccaaaggaaagaaaaccaaagatatgaaaaaacctgtcagagtacctgctgaaccacaaacaatgagtgttcttatcagctgtacaacctgccatagtgaatttccatctcggaataaactttttgaccatctaaaggccacaggtcatgcaagagcaccttcatcatcgtctttaaacagcgcaacaagtagtcaaagcaagaaagagaaacgtaaaaacagatagagattctgcctgtgcttttgtttgactgtctctagattttgaaaccaaaaaactgaactgaaatcatctaaagagttaaaatttcagtgatctgcaattaattacattgtggaagattattttttatcttgtaaaaacacttttttggtttaatatatatttttaaaacatttcactagtgattgaattctacttttgccatctgaattgacttgaatgtcttaaaacaggtaaatactgtaaagtgtgtattcttgatgtttattggctcatgtggacagaaatgtacagggagaattacattattttaacacacagaagtgcaactttctgctttattttctgaatttcacattacttttacttaatgcttttgtgttttgttaatacttcataatatgtgaaaaactcggatcttttaaaaagcatcatagatcatttttccatatgacactggttccgattttaaaaattatttttaaataaccgattattgattactgtattttttttctcaagaacagcgataggtagaaactaattgaacatttggtagtctttcaagaatagtgtctcttcaaggttttacttgatttaatttgatattttactgggttaccagcaaggtgtattgttcagtttttttgctccgatttgaattgtggaggtggaagcaaattagtttacatggcatgtcctccctaggcacagtgacagctgtaaagtatgacggaacaaggtagcagatggtacagaatttatactatttaagaagagatgtggggttcttcattgagtttttttcttcactattttcagaagtttttgttctttttttttttccatcactcagtggagaaaagctttgttaatgaaagattttgtgatagagctgatgcttatacatctattctataacagtgatgaatattaacacaaaggaaatatggagaactgttataactgagtgttagaacagtcgtgtacattgatcagtattgagtccatttttaggatggattagtcagttcttttcattggtcttgaaagtaattttggctggtcgcggtggctcacgcctgtaatcccagcactttgggaggccgaggcgggcggatcacgaggtcaggagatcgagaccatcccggctaaaacggtgaaaccccgtctctactaaaaatacaaaaaattagccgggcgtagtggcgggcgcctgtagtcccagctacttgggaggctgaggcaggagaatggcgtgaacccgggaggcggagcttgcagtgagccgagatcccgccactgcactccagcctgggcgacagagcgagactccgtctcaaaaaaaaaaaaaaaaaaaaaaa

SEQ ID NO: 126 - DNA, 1624 bp, Homo sapiens
ccacgcgtccgataaaaacagatttggatgcgatggatattaagggccaggaatcaagcagtgatcaagagcaggttgatgtggaatccattgattttagcaaagagaacaaaatggacatgactagtccagagcagtctagaaatgtgctacagtttactgaagaaaaagaagcttttatctctgaagaggagattgcaaaatacatgaagcgtggaaaaggaaagtattattgcaaaatttgttgctgtcgtgctatgaaaaaaggtgctgttttgcatcatttggttaataagcataatgttcatagcccttacaaatgcacaatctgtggaaaggcttttcttttggaatctctccttaaaaatcatgtagcagcccatgggcaaagtttacttaaatgtccacgttgtaattttgaatcaaatttcccaagaggttttaagaaacatttaactcattgtcaaagccggcataatgaagaggcaaataaaaagctaatggaagctcttgaaccgccactggaggagcagcaaatttgataacacagtgtgaatatttgttctacaaaggtgtttgttggaaccattctttgtaagtatagcttatcagatagcatagttggatcagtagatgacatgtatggtgtaccgtgtttcactgtctcagttgtgttactaagaatgagcatttgatcatttttttctggtctctgtctatgtgactatcttgtaagtcaataaatttctgtatagtccagatggattaaacttctcatttcttttaaatatgtatgaataataatacaaggaagtaggcattccatttaataatcaagagcaagttgtactcaaagcattcagttaaagtgtatctgtgtgtggaactaatttcagacaatagaaaatattagttgaaatgtttaagaattaggcatgaaaaataaatttgagaaattttgtttccttacatgtatttttaaatcataagagttattttctatctgatgtaaaattagtttataaatcttaatcagcttctagatgtttattagcttttatgacatgaaatgttggagtctcagggttgctgattttctgctaatgggaaaaattgactaagtctttaaaatagtttgcagccttctcccacaggagacaagtgaaagataagtgtgattttagatctttcttgtccatagttgttttcagtggagtcttccattctgtatcttaccctaagatctggttcttccctccccatccccaccccccacccaccgcctgccagctcacactaatagatgattcttaattgccaaatgtgttagagtttgtatatcctactcctgggccttacatgtcgcctgttggggcttaagaccaggttgataagtaggaactgaaagtcttccagattcacagtagaaaattttatagacatttctgttaaagaaatatatcgattttatgtttttcaattatgttactgtaaataccttgtacctgttcatggattattttattctaaaatattttgtcaaatgtgtatcaaccaaattaaaaagaaaggttttcatgtcaaaaaaaaaaaaaaaaaaaaaaaaaaaaaaaaaaaaaaaaaa

SEQ ID NO: 127 - DNA, 1722 bp, Homo sapiens
attcccgggtcgacccacgcgtccgcttcagtcgaagctccagccttattcagcatgagagaattcacactggagagaagccccataaatgcaatcagtgtgggaaggccttcagtcagagctcaagccttttcctccatcatcgggttcatactggagagaaaccctatgtatgtaatgaatgcggcagagcctttggttttaactctcatcttactgaacacgtaaggattcacacaggagaaaaaccctatgtttgtaatgagtgcggcaaagcctttcgtcggagttccactcttgttcagcatcgaagagttcacactggggagaagccctaccagtgcgttgaatgtgggaaagctttcagccagagctcccagctcaccctacatcagcgagttcacactggagagaagccctatgactgtggtgactgtgggaaggccttcagccggaggtcaaccctcattcagcatcagaaagttcacagcggagagactcgtaagtgcagaaaacatggtctagcctttgttcatggctccagcctcacagcagatggacagattcccactggagagaagcacggcagagcctttaaccatggtgcaaatctcattctgcgctggacagttcacactggtgagaaatcctttggatgtaatgaatatggaaaagctttcagtcccacctcacgacccactgaagatcagataatgcatgctggggaaaagccctataaatgtcaagaatgtggaaacgccttcagtggaaagtcaacccttattcaacatcaggtaactcacactggtcagaaaccatgtcattgcagtgtgtatgggaaagccttcagccagagttcacagctcacaccacctcagcagactcgtgttggagagaaacctgctttaaatgatggctctaaaagatactttattcatatcaagaagattttccaagaaagacatttttaatgtgataaatgcagaagacagtttagcaactgttcacttgacattagaagataagatggcataatgaaagatatataaggtctaaatattactggcaaagtaaaataaatagttcagatgactactaaagtcaaagtcattaaatctggaagtaaacacgagaattcattctgggaaatcaggctgtctgtgtaaaggttactgctgtgctcaggagttgaaccgtgtggtgctgtatccggatactcatgacgaatggatggagggcgtgaaaagtgagcccagctggtgctctgggtctaccctacctgacatccttccagtcttatcctttgtttcctatccaggcccaggcttgtggctgagaacatccactttcagtcccatatacctgcctccaagtgtggtacagagaacttgggcctgctgggggcgcttagccttactctctccaccacctctcccaccaacccccagatgaactgcaggtagacgtttcttccttgcttggagccccagtttttgcatttcattttcattaaaatgaaaggtggtttggttttggttctaaggagctctacagtttaacagagagagggaccttaggggccaagaaagcaggggcctaccaagtatctccacttttgaaaattgtaattactgataaaaaattttttaaaggcaggtttattgaagcataatttataaacaataaaatttactctttttagtgtaaaaaaaaaaaaaaaaa

SEQ ID NO: 128 - DNA, 1183 bp, Homo sapiens
  SITE (821): n equals a,t,g, or c
  SITE (1131): n equals a,t,g, or c
caagctctgaggaagtagacagaatttccaagagggcagaaaccccagggtttggagcagtcacgtttggggagtgtgcactagcttttaaccagaagtcaaacctgttcagacagaaggcagtcacagcagaaaaatcttcagacaaaaggcagtcacaggtgtgcagggagtgtgggcgaggctttarcaggaagtcacagctcatcatacaccagaggacacacacaggrggaaaagccttatgtctgcggagagtktgggcgaggctttatagttgagtcaktcytccgcaaccacctgagtacacaytccggggrgaaaccttatgtgtgcagccattgtgggcgaggctttagctgcaagccatacctcatcagacatcagaggacacacacaagggagaaatcgtttatgtgcacagtgtgtgggcgaggctttcgtgaaaagtcagagctcattaagcaccagagaattcacacgggggataagccttatgtgtgcagagattgaggccgaggctttgtaaggagatcatgkctyaacacacaccagaggatwcattcagatgagaagccttttgtttgcaragagtgtgggcgaggctttcgtgctaaatcaactctcctcctacaccagtggacacattcagaggtgaacctcacgtgtgtgargagtgtgggcatggatttarccagaagtcgtcgctcaaatcacatcggagaacacactcaggggagaagccttatgtgtktggggaatgtgggcggggatttagccsgaggatagtcctcaatggacactggaggacacacacgggngagaagccttacacgtgctttgagtgtgggcgaaactttagcctcaagtccgctcttagtgtacatcagaggatacactckggggagaagccttatgcatgcacggagtgtgggcaaggctttatcacgaaatcacagctcatcagacaccagaggacacacacaggagaaaagccttatgtctkcggagagtgtgggcgaggctttatagctcagtcaaccctccactaccaccggagtacacaattcaaggaaaaaccttatgtgtgcagccagtttgggcgaggctttttgtgataaatcaactttnctcgcacaagggcagacacattcagggaggagccttatgtgttttggggaat

SEQ ID NO: 129 - DNA, 744 bp, Homo sapiens
  SITE (603): n equals a,t,g, or c
  SITE (608): n equals a,t,g, or c
  SITE (639): n equals a,t,g, or c
  SITE (680): n equals a,t,g, or c
  SITE (689): n equals a,t,g, or c
  SITE (711): n equals a,t,g, or c
  SITE (721): n equals a,t,g, or c
gcccacgcgtccggacccacgcgtccggacccacgcgtccggcgatccacactggakagaaacatttcaaatgtaatgaatgtggcaaactcttccgcgacaattcatatcttgtacgtcatcagagatttcatgccggaaagaaatctaacacatgtaattaatgtggcagagtgttcagttagcattaaagccttgtaagacatacaataatttatactggagaaaaactttgcaagtataatgaatgtagcagagcctttagtttttgttcaaggcttaataaccgttagctagaccatagaggacagaaactttactaatgtactgaatgtggcaaggtcttaaggtaaaatctgagaccaggattcttcaaagaattcttgctggtgagaaacctaacaaatgtaatgaatgtggcaaggtcttctggcacaattctcacattgtacaatattgcaaaaattcatgcttgagagaaacaaaaacactgagagtgggaaaccattatgacttyaaacattcatcaacatcagagaatccatactaaagagcatttataataattatatgtgatagagattttccgcaggccaaagtctnactangcatcaaaaacttttttgatgaaaccatacnaatgtaacgtgcatgcttaagcttttaccaggcattaaaancggaacatnacagggtttatacttggagagnaactacccanaggataatggaataaagcccttt

SEQ ID NO: 130 - DNA, 2057 bp, Homo sapiens
ccacgcgtccgtcgacccacgcgtccgcccacgcgtccgcccacgcgtccggcgaactcatactggggagaaaccttatatatgcaatgaatgtggaaagggcttcaccatgaagagtactctcagtatacatcagcaaactcatactggagagaagccatacaaatgcaatgaatgtgataaaaccttcaggaagaagacatgcctcatacaacatcagcgatttcacacaggaaagacttcctttgcatgtactgaatgtggaaaattctctttgcgcaaaaatgatcttattacacatcagagaattcacacaggagagaaaccgtacaaatgcagtgactgcgggaaagccttcactacaaaatcagggctcaatgttcatcaaagaaaacatacaggagagaggccctatggatgtagtgattgtgggaaagcttttgcgcacttgtctatccttgttaaacacaggagaattcacaggtagtcattttgggaaagcctcttgccagatgtaggcccttaagatatctgcaaagaagagtaatttcatgaatgcagactacatggttgtttatttagtgatcagttacttcatgttttgtgtcagagaaaacatgtacaaaacatttgagaaaatattttaggacattatgtctaaaaattgtatactgagaaaaatcctatgaatgtggcagactataaaagcctttggtgggaagataaaccccctcagaagtgatcatagatcatgaataaactactaattcgtggaaatgtaataattataggaacgtctttgcccaaaaataaaacttcaacagattgagagagttcacactggagaaatactttcctctggcaaacccctgtggcagggttttcagtaaaatgttttgcctcatcgtgtgctaggaaataatgcagaaaaaacttatgaaaacattcaatgtagaagacttttaggaaaatatcagagaatttaatgaaggaaagaagccttggcaaaatgatggatgagagctttctgtcacaattctaaccttaacagataatatgcctcatgtgcatttgggaacaggatagcttgagccatattcctagttgccttgtcactgattttatacattttaaattgtgacttcctctaatcacgaactaaaatttaatattgtatataataccggagtattttatgcctgcctcattttattatatgattagctcctgcatttctttggttctaagtttgtgttatttcagaataactaaagtacttcagaatgaaactggatacagtatattcagttcataagtgtaattgaccatacttgaatatgtttaagtttataagtaacatcaggtgttatgaaattaatataaataagatgtttttgtaagtttttattttgaaataagtttagattcacaaaatcttaccaaaatattccagagttcttgcccttaacccagcttcttccaaagataacaacttacataagcatagttcattaccaaatacaggaaagtgaaattgttacaatactgttaactacagaatttatttggaaatcaccagttttaacatgcatgcatttttgtttgttttttatatgtagctttaagaaatcttaacacatatattgattcatgtcaccaccaccgtaatcgagattcagaatgttgcatcaatgcaaactccctcatgctccttgtttatagtcacaacctctcctcagccctaacccttggcaatcagaaatcttttcatctttagttttgtcattagtagcatgttataaaaatggaatcatacagcatgtacccttttggtattggctatttcaactaaagcagattaacctgaaatccatccaagttgttctgcatatcattgttctgtttttattggccactaataatctatgatacgaatataccactatttgtttattcacccactgaaggacattagttttgttcccggtttttcttactgttacaaataaaaatcctatgaacatttgtaaaaaaaaaaaaaaaaaaaaaaaaaaaaa

SEQ ID NO: 131 - DNA, 668 bp, Homo sapiens
  SITE (9): n equals a,t,g, or c
  SITE (12): n equals a,t,g, or c
  SITE (31): n equals a,t,g, or c
  SITE (623): n equals a,t,g, or c
aaaaaaacnctnctgatcctcttacctattnaaggtacgcctgcaggtaccggtccggaattcccgggatatgaatgttctgtctgcggaaaaggcttcagtcacagctatgtcctaatagaacatcagaggactcacactggagaaaaaccttataagtgccctgattgtgggaagagttttagtcagagttccagcctcattcgccaccagcggacacacacaggtgagaagccctacaaatgtcttgagtgtgaaaaaagctttggttgtaattctactctaataaaacatcagagaatacatacaggagaaaagccttatcaatgtccagaatgtgggaagaattttagtcgtagttcaaaccttatacacaccagaaaatgcacacaggagagaaatcctatgaaagttctgaatatgaggaaagtttgggtcagaactgcaatgtgatagaagaatgcagaatccagttaggagagaaaccatatagatgttgtgaatgtgggaagagttttggccttagctcccatctcattagacatcagagaacacatacagggagaaaaaccttacagatgttctgagtgctggaaaactttcagtcagagttccaccctggngattcaccaaaggcacatcaggagagaaaccttataaatggcctg

SEQ ID NO: 132 - DNA, 962 bp, Homo sapiens
aattcggcacgagaagaactcatacaggtgagaagccatacaaatgtgaattgtgtgataaaggatttgctcagaaatgtcagctagtcttccatagtcgcatgcatcatggtgaagaaaaaccctataaatgtgatgtatgcaacttacagtttgcaacttctagcaatctcaagattcatgcaaggaagcatagtggagagaagccatatgtctgtgataggtgtggacagagatttgctcaagccagcacactgacctatcatgtccgtaggcatactggagaaaagccttatgtatgtgatacctgtgggaaggcatttgctgtctctagttctcttatcactcattctcgaaaacatacaggtgaaaaaccatacatatgtggtatttgtgggaaaagttttatttcctcaggagagctcaacaaacactttcggtcccatacaggagaaagacctttatctgcgaattatgtggaaattcttacacagatattaaaaatttaaagaagcacaaaacaaaagtccattctggtgcagataaaactctagactccagtgcagaggatcatactttgagtgaacaggattccatacaaaaaagtcctttatcagaaactatggatgtgaagccttctgatatgactttaccattagctcttccacttgggactgaggaccatcacatgcttctgcctgtcacggatactcagtctcctacatcagatacattgttgaggtcaactgtgaatgggtattcagaaccacagttgatttttttacaacaattatactgactttgtaaggaatatggaattgctaagatatcattggtagcaaacatctctggtaaggtgcatatattcatattaaattcccattcatttgagttgtgaccattatttttcattcactgaagtaaaagcacctgatgctgcatcacaaaaaaaaaaaaaaaaa

SEQ ID NO: 133 - DNA, 1737 bp, Homo sapiens
ggcacgagggaagtcggcgtgtcgagtggctcttcctggctgctgaggcgggttaaggtctgagggtcttgtggggccacggcgctgatcaccaggagtttggcttggtcggttcttatttctcgcctggcaatggcgacgtacacctgcataacttgccgggtggcgttccgcgacgcggacatgcagcgggcccactataagacggactggcaccgctacaacctgcggcggaaggtggccagcatggccccagtgaccgccgagggcttccaggagcgagtgcgggcgcagcgggccgtcgcggaggaggagagcaagggctcggccacctactgcaccgtttgcagtaagaagtttgcctctttcaacgcctacgagaaccacctcaagtcccggcgtcacgttgagctggagaagaaggccgtgcaggcagtgaatcggaaagtggagatgatgaatgaaaagaacttggagaaaggactgggcgtggacagtgtggacaaggatgccatgaacgcggccatccagcaggccatcaaggcccagccgtccatgtctcccaagaaggcgcccccagcgcctgcaaaggaggccaggaatgtcgtggccgtgggtactggtggccgtgggacccacgaccgagacccgagtgagaaaccaccccggctccagtggtttgaacagcaggcgaagaagttggcaaagcagcaggaggaggacagcgaggaggaggaagaggacctggatggagacgattgggaagatattgattctgatgaagaattggaatgtgaggatactgaagcaatggacgatgtggtggagcagatgcagaggaggaataggctgaggaaggcccaccccttgttgccatccctatcacggactgcttattttgttcccatcattccagctcgctgatgaagaatgtggctcacatgaccaaagaccacagtttctttattcctgatatagaatatctttcagatattaagggactgattaaatacttgggagagaaagttggtgttggcaagatttgcttgtggtgcaacgagaaagggaagtccttctactccacagaagctgtacaggcacatatgaatgacaaaagccactgtaagctcttcacagatggcgatgctgctttggaatttgcagacttctatgattttaggagtagctatccagatcacaaggaaggggaggaccccaataaggctgaggagttgccctcagaaaagaacttggaatatgatgatgaaaccatggaattgattctgccttctggtgccagagtgggtcatcgctccttgatgagatactacaaacagcgatttggcttgtcaagagctgtggcagttgccaaaaatcggaaggccgtgggccgagtacttcagcagtacagagccctgggatggactggcagcacaggagcggctcttatgcgagagcgagacatgcagtatgtccaaaggatgaaatcaaaatggatgctgaagacaggaatgaagaacaatgccaccaagcagatgcactttcgggtccaagtgagattctgagagtctgctgggattgagcaatcatctcctgcccaagtttcctccttgccctgaggaccagtgaaagacagatcataggagagacccttttgctgctacttcattcgttctgacctaataataaaagttagaaccaaaaaaaaaaaaaaaaaaaaaaaaaaaaaaaaaaaaa

SEQ ID NO: 134 - DNA, 469 bp, Homo sapiens
  SITE (84): n equals a,t,g, or c
  SITE (131): n equals a,t,g, or c
  SITE (143): n equals a,t,g, or c
agaaagccttccaaaaggacactgttttttttaatcacatggaagaaaagccctataagtggaatggttctgaaatagcctttntccagatgtcggacctcactgtacatcagacatctcatatggaaatnaagccctatgantgcagwgaatgtgggaaatccttctgtaaaaagtcaaaatttattatacatcagaggactcacacaggagagaaaccttacgaatgtaatcagtgtgggaaatccttctgccagaagggtaaccctttactgtgcatcagagaacacacacaggggagtaagccctatgtaatgtaatgatatgtgggtaagaacttttaccagaagttacacctcattcagcatcagagaactcactcaggwgagaagccctatgaatgtagttattgtggaaaatccwttwgccagaagacacacctcacacaacatcagagaacacattcagg

SEQ ID NO: 135 - DNA, 470 bp, Homo sapiens
  SITE (27): n equals a,t,g, or c
  SITE (171): n equals a,t,g, or c
  SITE (247): n equals a,t,g, or c
  SITE (325): n equals a,t,g, or c
  SITE (384): n equals a,t,g, or c
caacatggcacccaccgaaaacttttntttgcccgttttggaccacaatggtgattgtgactggttcttcaaggccccaatcccagcctgagcccaacaaagtaaaccacatcgtcaccacaaaagacgacaacgtgttcagtgattcttcagaacaagttaacttgactngaagattcctcttgtcttcccgaagaccttagtctttccaaggcaactgaaaatccaagtcaaagaggagcctgtngaggaggctgaagaagaggcacccgaggccagcacagcccccaaagaagcgggtcctagcaaagaagccagcctgtgnccctgcgagaagtgttggaagatgttcacggtgcataagcagcttgagcgtcaccaggngcttctgtgctctgtgaaaccatttatttgtcacgtgtgcaacaaagcttttcgcactaattttcgactctggagtcacttccaat

SEQ ID NO: 136 - DNA, 897 bp, Homo sapiens
  SITE (788): n equals a,t,g, or c
  SITE (892): n equals a,t,g, or c
  SITE (896): n equals a,t,g, or c
gacatctcttaagatgatgcaggcagtaggaggtgcacctgcacgtcccactggagaatatatctgtaatcaatgtggtgctaagtacacatccctagacagctttcagactcacctaaaaactcatctcgacactgtgcttccaaaattgacctgtcctcagtgcaacaaggaattccccaaccaagaatccttgctgaagcatgttaccattcactttatgatcacttcaacgtattacatctgtgagagttgtgacaagcaattcacatcagtggatgaccttcagaaacacctgctggacatgcacacctttgtcttctttcgctgcaccctctgccaggaagtttttgactcaaaagtctccattcagctccacttggctgtgaagcacagtaacgaaaagaaagtctataggtgcacatcttgcaactgggacttyccgcaacgaaactgacttgcagstccatgtgaaacacaaccacckggaaaaccaagggaaagtgcataagtgcattttctgcggtgagtcctttggcaccgaggtggagctgcaatgccacatcaccactcacagtaagaagtacaactgcagttctgtagcaaagccttccatgcgatcattttgttagaaaaacacttgcgagaaaaacactgtgtattcgaaaccaagacacccaactktggaacaaatggagcttccgagcaagtgcagaaagaggaagtggagctgcagactttgctgaccaacagccaggagtcccacaacagtcacgatggggagcgangaagacgttgacacctctgagcctatgtacggctgcgacatttgtgggggcagcctacactatgggaactttgctgccaaattcaccagttccggggccacaanttcng

SEQ ID NO: 137 - DNA, 2044 bp, Homo sapiens
ggccaacgtgaaataccagcttcgaaggacaggtggaacaaagttcctcaaaaacttggacactggccaccccgtcttcttttgtaacgattgtgcgtcccaaatcaggactccttccacgtacatcagtcacctagagtcacacttaggcttccggctacgggacttatccaaactgtccaccgaacagattaacagtcagatagcacaaaccaagtcaccgtcagaaaaaatggtgacgtcctcccccgaggaagacctggggacttcctatcagtgcaaactttgcaatcggacctttgccarcaagcacgctgttaaacttcaccttagcaaaacacacgggaaatctccggaagaccaccttctgtatgtctctgagttagagaagcagtagcatttgcttttgatagaaaggactgcagtttgctttgagggaaactgtggaaggcaccttcaggccccctctgacttgttgttcttggcacatgttcttattttaactgcagagaatcactctgggctggactgttttgtataactgtacagtgtttaatagaggtgcataatcagctgttgttactggtaaaatatgaaggttaaaatgcagtggtaagtgtttggaactttgtgtaaacgggatttagttgtgagcatcctcccgatgcttcaagctgcatgcattaacagacagtttaattaagcatttataacggaatcaggcacaccttttccacgagactcgagtgtgctggcatttctcaccctttcatctttagccctctgagtactttgaagcacttttgcattaatttggttaaaaaataaaataaaataataataatgtatgaagctctgttttttaaactccttaccagcttagttataatgaataatatgaacctccatttatgcaggtctgcaggggtataacacgccttgaaatttaaaagaatattattttcacattgaaacatagatgtatatattgtatagatttcagactctcttatgaaaaaaaatgtgattgtggttaaatgacctttttcttgcatttatagcaacagtgttttatgcacctgctatgctctgggcataagctgtgcctatgtatagtgtatatttctttttttcttttttttaaggtctatgggttttgttttttacatgcaaacattgtaaattatacagaagataccacagatagcatttataaagtatacagaaacattatctgaaagcaaagtatgatagtttgttttgctatacagtacatctatattgatagaggttcatgtttaaattatacatatttattagcatcatattgtcatttgttttgagcagtctgaataaacgagaccgggaaagacatccctggcaggcatcagaactattttgcacatgatttttaaaggtatttattagaaatcaaagaacactcaaaataaactcagtgctcaaagggttaagtctatttgaaaaggttaaaaaaaagaacaamaaaaaaaaaagaacttgtactgtatttcctaaacattgataaagcctttaaaatgtttgtactgtaatactttgcttaaaagtcatgaggcattctgtgatccaacctctttcacttatttataagccctcttggttgctattccatattgtaggatgcctttctatttcaattggtaactttctgttttgttcttcctaattattctcccaagatcccacactgcagctttatctttaggcttatgaaaggtaacccgtggttaccggctctccaagtgattctgttcttctccatttttggcagttaatttgcagaagtaactgacagctgacaccatatgagaacctttgtataaaatattggcatgtaaacagcacagacaccgtaacacactctgtgccctgtttggttgttgacaatgaagcaccattatgtgactcttcatataacccttttttctacggcagcattaaaattgtctttttgctataaaaaaaaaaaaaaaaaaaaaaaaaaaaaaaaaaaaagagggggggg

SEQ ID NO: 138 - DNA, 963 bp, Homo sapiens
  SITE (596): n equals a,t,g, or c
  SITE (599): n equals a,t,g, or c
  SITE (611): n equals a,t,g, or c
  SITE (689): n equals a,t,g, or c
gggagactatgtatccatttattgtaactttagaggggaatgctctccagggtcccattttgcaaaaagactatgtacagttagaaaatcaatgggaaacccccccagaggatttacagacagatttagcaaaactggtagatcagcagaaccccactctgggagagacacctgagaactccaacttggaagaacctctcaaccctaaaccccacaagaaaaagagtccaggagagaaacctcaccgatgtcctcagtgtggaaaatgttttgctcggaagtcacaacttactgggcatcagagaattcattcaggagaagaacctcacaaatgccctgaatgtgggaaaagattccttcgtagttcagacctttatagrcaccaacgacttcatacaggggagagaccctatgaatgcactgtatgtaaaaagcgattcactcggcggtcacatcttatagggcaccagagaacccattctgaagaagaaacatataaatgtcttgagtgtgggaaaagtttttgtcatggatcaagtcttaaaagacatctgaaaactcatacaggtgaaaaacctcatagatgtcataattgnggnaaaagttttagncgactgacagctcttactttgcaccagagaacgcatactgaagagagaccttttaaatgtaattattgtgggaaaagntttagacagagaccaagcctcgktattcatttaagaatccacacaggggagaagccatacaagtgtactcattgttctaaaagcttcagacagagagccggccttattatgcaccaggtcactcactttagaggacttatttaagaattgctaagggaaacaggtcttacacaaattgacactaactcaaaaaaaatcttaacctgcagcaggctgtttgtctttggaagcttttgtttgagcttataagaacatagacagctttttttttaac

SEQ ID NO: 139 - DNA, 1056 bp, Homo sapiens
ggtcaactccattgttgtcctcaatggaaagtgtcataaatccaaatataacttctcaggataaaaatgaacaaggtggtatgttatgttcccaaatggaaaatttacctagtactgccttgccagcacaaatggaagatctaaccaaaacagttctgcctttgaatattgacagtggctcagatcctttccttcctttacctgcagaaagtagttcaatgtctctcttcccttcaccagcagatagtgggactaattctgttttttcccaactggaaaataatacaaatcattattcctcacagattgaaggaaacactaattcctcctttctaaaggggggtaatggtgaaaatgcagtttttccttcacaagtgaatgttgcaaataacttcagtagcaccaatgcccaacagtctgcacctgaaaaagttaaaaaagaccgtgggcggggcccaaatgggaaggaaagaaaacctaagcacaacaaaagggctaaatggcctgcaattatcagagatgggaaatttatctgtagcaggtgttacagggcttttactaatcccagatcactgggtgggcacttatccaagcgatcttactgtaaaccactggatggagccgaaattgctcaagaacttctacagagtaatggacagccttctcttcttgccagcatgattctctccacaaatgcagtaaatttgcagcagccacaacaatctaccttcaatccagaagcatgttttaaagatccatcatttctacagcttcttgctgaaaatcgctcgccagcatttttaccaaatacatttcctcgatctggtgtgactaactttaataccagtgtcagtcaagaaggtagtgaaattattaaacaggctttggaaactgctggcattcccagtacatttgagggtgccgaaatgctttctcawgtttcaacaggttgkgkctctgatgcatcacaagtaaatgcaacggtgatgccaaatccaactgtaccacccctgttgcacactgtatgccatccaaacaccttgctgaccaaccaga

SEQ ID NO: 140 - DNA, 1711 bp, Homo sapiens
  SITE (604): n equals a,t,g, or c
ggtttccactcctgttcctccccctcctcccggggaggagaccaatctggaagcatcttcctccgatgagcagcctgcgtccctcacaatagcccacgtcaagccaagcatcatgaagaggaatgggagctttccaaagtactatgcctgccacctgtgtggacggcgcttcactctccggagcagcttacgtgaacacctccagatccacacaggagtacctttcacatctagccaacagggagaaagtcgcgtccccctgactctctgtagcaatgcagctgacctcgggaaagatgccatggaagtgcctgaagccgggatgataagtgacagtgagctgcagcacatctctgattctcccatcatcgatgggcagcagcagtcggaaaccccacccccctcagacattgctgacattgacarccwgsagcaggccgaccaggagagggaggtgaagaggcggaagtacgagtgcacaatatgtggacgcaaatttatccagaaaagccactggagggaacacatgtacatacacaccgggaagcctttcaagtgcagcacttgtgacaaaagcttttgcagggccaaccaggctgsccgncacgtgtgcctcaaccagagcatcgacacttacaccatggtggacaaacagactctggaactctgcacatttgaagaagggagtcagatggacaacatgctggtgcaaacaaacaaaccctacaaatgcaacttgtgtgacaaaacattctccactcccaatgaggttgttaaacattcatgccaaaaccagaactcggatgtttttgccctagacgaagggcgatccattctcctgggcagtggggactcggaagtaacggagcctgaccacccagtgttagcttccatcaaaaaggaacaagaaaccgtcttactagactgaatgtcacttatctttttaaaaaactctcatttttacaaagactatcttccctcccttccctgaattcagaactgtagttctccatggcatgatacaaacaggtccttgttctcttctcctcttccccttttccacatcccagccccacctctgtaaaggctttgtgcattataaacctggaatgtatcgactttctttcaggggatattggaaagataatggtcattatacttataaactcaaattttgagaggttttagattattcagaagcatacttggaactaatgaagggtatataataaaacaactggaatccaatttggtaagctaaaattatgactttccctgggtaaaaagtcttctcagaaaaacaatgtcagaaaataacagcgtgctgcttagaaatacggctgggctctgtactatgcaaaatctagaaagtgtggggaaactttaaacccaagaaaacgttcttagtattcatcctccaggtgtcttacttcagaatgcatcctttgagattatgtccacttaagagaaatcatcagttaagaaatctactttaacaaaacaaaaaggagaaaaagtaataatgtgatggcaatcttaatttttgggtacaacatgacaagctgtgagtttgtgtgtttgtaaragaaaaatgtgtgggtacttgctaataaacaggtgaattaatgcmcatccttatctcattgctggcttctttccaagttkagcaacaacmaaatgctggtttgagttctgacaatttgttttaaaa

SEQ ID NO: 141 - DNA, 2921 bp, Homo sapiens
  SITE (2800): n equals a,t,g, or c
ggcacgagccttctccagggtaatgataggttccccaaggggaggagccagtaactttccttactaccgccgcatagctcccaaaatgccagttgtaacttccgtcaggagctcacagatcccagaaaactctaccagttctcagctaatgatgaatggagctacgtcctcatttgaaaatggccatccttcccagcctggccctccacagttgaccagggcatctgcagatgttctgtcaaagtgcaagaaggccttatcagagcacaatgttttggttgtagagggagctcgcaagtatgcctgcaaaatctgctgcaaaacttttctgactttgacagattgcaagaagcacatccgtgttcacacaggtgaaaagccttacgcctgcctgaagtgtggcaagaggtttagtcagtccagccacctgtataagcactcaaagactacctgcctgcgctggcagagcagcaatcttcccagcactttgctctagctgtttgtccttacaagacaacgctgaggccagttgtcagactgaatttcttttggtaagcagttaatgcctttgggttcgaggcttccagctgcccagtggctcttaaacagtttagcaactaataaccggagaactaacatgtagtatttgtgctgctgcatttctgagtgaagtgcacgtcttgggaaagggatgcaatccctgaaaccaggtgcttccttggggttgagtaatgcagtcagaaagtagtttgtaattgatattaaaagtggcacatttaaaaatttaaaaattgaagtgcaaaaaaaaattttttagcaatttttgtaaaactgtgtagcatttaaatttcctataccttctgatgggagtattatatccctgtatagtgatgcaaaatgcacttatgtgtaaccagtggtgatttggtgcctgtcttaaaggaaggcctttgaggacacacctgtctgccacaaatgctttaaagtgtatcatgagctagtcctaggcctcaaagtactgtattttttatttttacctgatttgcagtcataaacactgcactttggtgctgacactgggtccagagtgagcattctcttggactattagatgtatatacttttgaatacatcactgttggatagatgttttaacagttttttctggtttaaaaaccaaattgtaaatggagtgtgtacttgtagagagtgacaaggtattgtttgtttccctatgtgctgtttgagcagtattttaaccaacttgtattacagatgttacagttccatgttaggaagtcagaaaagacttgtgtttgtctttgttctgctgatgtggagtcatgttttgtggggtcttccatggcacatttacctgttgctccgtccagatgttgagggccagtctaggctgacacatcctacccgaggacaagcctgttctccatttcttcactctcccctccccatatagcaactctcccaggtttagattaccgttttcgacgacagattaaccaaaaatgccccacacaggttttattactgttatatactatacttttaacagtacagaccctaaattttattatttgttgctcccccaatctgataccaaatgtttaaagttgtttgaaatccaaacatggtagtgttcatgggtaaatattttctaggctatgtaagagttagcagcccatagcatagaagtaatcaagtagcatctgagactgttggaggcactagggcctctctgggccctacagcctcacttccccagcctcaccttgctgtcctctgacactgccatcagggctgttagtggcacctgtatgaggccaagtgtgcgtccaggggaacagcacaggttaatgcgtctccctagaactcatgaagtcagtttaattcatgcatgaacatgagttcattttatgttttatatagctttcttagacataccaaaccatcattcataaatcagataaattattcagtttttgtgtttagaaagctaagtatgtgtagctggaaacaaaaatgagcgtgttttctctcctgttaatctagagtgtgcagttacacatgtgtggataatttcatgttccaggggcgcttggcatctcccatggactgattcccaggaagaaaagcccaaagggaaacccacgattcctttcgagtagatgtgggaaagagcccattggaggatatgaggtcctgtgaaattcagttgtgtgtgtggctccttgttagcagtcatgttgacatggtgttaggaggctccccatccaccctttacatgatgtagggaccagtgtcttgtgagattaaccttgggacacagtgggttagcctggagaaaatgagaggccctgcctggacccagggagaggagccagtgacacaggcagagcggtgcagccctccttcccttccatttggaggaggtggtgccaggagcctgcccgcttacctctgctgaagcataagtggactttgcttttggggcttatctctgatacatgctggagccctgcctctccactgctagatggaacctggaatctctcatctacctcttagtctgtcagtttctacgtgtgagaagcaagcttgtgggccagtgtccttgtacatgctgtagcacttaaaaaataattccagggttccctggaaaaccagtcccagggttcctatgatctgtagtttctacctggattataactggttttgggtacctgaattttgattggttagccttaattatagtctggcgtgatcatgtagaatcttttctggntgaacagatcataaagttctatcaaggagttctatcaaggcatccatgtcagtggtgctatgctggttacaacttgagatttttgaaataaaaaatttgtcataaaaaaaaaaaaaaaaaa

SEQ ID NO: 142 - DNA, 1730 bp, Homo sapiens
ggcacgagctagactccggacccgccagtggtatggctgagccgactagtgatttcgagactcctatcgggtggcatgcgtctcccgagctgactcccacgttagggcccctgagcgacactgccccgccgcgggacaggtggatgttctgggcaatgctgccgccaccgccaccaccacttacgtcctcgcttcccgcagccgggtcaaagccttcctctgagtcgcagccccccatggaggcccagtctctccccggggctccgccccccttcgacgcccagattcttcccggggcgcaaccccccttcgacgcccagtctccccttgattctcagcctcaacccagcggccagccttggaatttccatgcttccacatcgtggtattggagacagtcttctgataggtttcctcggcatcagaagtccttcaaccctgcagttaaaaattcttattatccacgaaagtatgatgcaaaattcacagacttcagcttacctcccagtagaaaacagaaaaaaaaagaaaagaaaggaaccagtttttcactttttttgtgatacctgtgatcgtggttttaaaaatcaagaaaagtatgacaaacacatgtctgaacatacaaaatgccctgaattagattgctcttttactgcacacgagaagattgtccagttccattggagaaatatgcatgctcctggcatgaagaagatcaagttagacactccagaggaaattgcacggtggagggaagaaagaaggaaaaactatccaactctggccaatattgaaaggaagaagaagttaaaacttgaaaaggagaagagaggagcagtattgacaacaacacaatatggcaagatgaaggggatgtccagacattcacaaatggcaaagatcagaagtcctggcaagaatcacaaatggaaaaacgacaattctagacagagagcagtcactggatcaggcagtcacttgtgtgatttgaagctagaaggtccaccggaggcaaatgcagatcctcttggtgttttgataaacagtgattctgagtctgataaggaggagaaaccacaacattctgtgatacccaaggaagtgacaccagccctatgctcactaatgagtagctatggcagtctttcagggtcagagagtgagccagaagaaactcccatcaagactgaagcagacgttttggcagaaaaccaggttcttgatagcagtgctcctaagagtccaagtcaagatgttaaagcaactgttagaaatttttcagaagccaagagtgagaaccgaaagaaaagctttgaaaaaacaaaccctaagaggaaaaaagattatcacaactatcaaacgttattcgaaccaagaacacaccatccatatctcttggaaatgcttctagctccggacattcgacatgaaagaaatgtgattttgcagtgtgttcggtacatcatcaaaaaagacttttttggactggatactaattctgcgaaaagtaaagatgtataggcatctggtgtttcagcatacataactgaagcatgtgaaacagtatcatcctcgttagtagaggaaaaccaaaacccttttttccgtcaaaattggatttgtaattaaattgtaagcctcgtaggatgtatgttggaattttaagtctttcctttggttctatcgcaagataaacaaaataactgttttttaaaaaaaaaaaaaaaaaa

SEQ ID NO: 143 - DNA, 585 bp, Homo sapiens
  SITE (488): n equals a,t,g, or c
  SITE (519): n equals a,t,g, or c
  SITE (556): n equals a,t,g, or c
aaaatcttcagtgactggttatcctttaatcaacacaaggaaattcacaccaaatgtaaatcatatggaagtcatctatttgattatgcctttatccaaaactctgcccttagaccacacagtgtgactcacactagagagataacattggaatgtcgtgtgtgtgggraaacctttagcaaaaattctaatcttaggcgacatgagatgattcacactggagagamaccacacggatgtcatmtatgtgggraagcctttactcattgctctgatcttcgaaaacatgagagaactcacactggagagaagccatatggatgtcatctatgtgggaaagccttcagtaaaagttctaaccttagacgacatgagatgattcacactwgagaaaaagcacagatatgccatctatgtgggraagccttcactcattgctctgaccttagaaaacatgagagaactcacttaggagataaaccatatgngatgtctcctatgtgggaaggctttcagtancaggttcttacccttagacaccatgaaggactcacantggagagaaaccttatgaatgtcatctat

SEQ ID NO: 144 - DNA, 3545 bp, Homo sapiens
gaagtcttactcgttgctatttagagtgactcgtccaggaagaagagagtttaatggaatgattaatggagaaaccaatgaaaatattgatgtcaatgaagagcttccagccagaagaaaacgaaatcgtgaggatggggaaaagacatttgttgcacaaatgacagtatttgataaaaacaggcgcttacagcttttagatggggaatatgaagtagccatgcaggaaatggaagaatgtccaataagcaagaaaagagcaacatgggagactattcttgatgggaagaggctgcctccattcgaaacattttcttagggacctacgttgcagttcactcttcgttggacaggagagaccaatgataaatctacggctcctattgccaaacctcttgccactagaaattcagagagtctccatcaggaaaacaagcctggttcagttaaacctactcaaactattgctgttaaagaatcattgactacagatctacaaacaagaaaagaaaaggatactccaaatgaaaaccgacaaaaattaagaatattttatcagtttctctataacaacaatacaaggcaacaaactgaagcaagagatgacctgcattgcccttggtgtactctgaactgccgcaaactttatagtttactcaagcatcttaaactctgccatagcagatttatcttcaactatgtttatcatccaaaaggtgctaggatagatgtttctatcaatgagggttatgatggctcctatgcaggaaatcctcaggatattcatcgccaacctggatttgcttttagtcgcaacggaccagttaagagaacacctatcacacatattcttgtgtgcaggccaaaacgaacaaaagcaagcatgtctgaatttcttgaatctgaagatggggaagtagaacagcaaagaacatatagtagtggccacaatcgtctgtatttccatagagatacctgcttacctctccgtccacaagaaatggaagtagatagtgaagatgaaaaggatcctgaatggctaagagaaaaaaccattacacaaattgaagagttttctgatgttaatgaaggagagaaagaagtgatgaaactctggaatctccatgtcatgaagcatgggtttattgctgacaatcaaatgaatcatgcctgtatgctgtttgtagaaaattatggacagaaaataattaagaagaatttatgtcgaaacttcatgcttcatctagtcagcatgcatgactttaatcttattagcataatgtcaatagataaagctgttaccaagctccgtgaaatgcagcaaaaattagaaaagggggaatctgcttcccctgcaaacgaagaaataactgaagaacaaaatgggacagcaaatggatttagtgaaattaactcaaaagagaaagctttggaaacagatagtgtctcaggggtttcaaaacagagcaaaaaacaaaaactctgaaaagctctaaccccatgttatggacaaacactgaaattacattttagggaattcatcctctaagaattatgtttttgtttttaatcatatgttccaaacaggcactgttagatgaagtaaatgatttcaacaaggatatttgtatcagggttctacttcacttcattatgcagcattacatgtatatcacttttattgatgtcattaaaacattctgtactttaagcatgaaaagcaatatttcaaagtatttttaaactcaacaaatgtcatcaaatatgttgaattgatctagaaattatttcatatataaatcagaatttttttgcatttatgaacggctgtttttctactttgtaattgtgagacattttcttggggagggaaaattggaatggttcccttttttagaaattgaagtggtcttcatatgtcaactacagaaaaggaaaaaaatagaaattgaaggatttttatgaaattatattgcattactatttgcagtcaaactttgatccttgtttttgaaatcatttgtcaattcggaatgaaaaattataatgtaattttacattacataagttccttttacaattaaaaaatagcacttcttcatcttatgcctgtttgagaagatattaaattttcacattgttgacagtgaaatgctatgttggtttataagattacagaccatttgttttcatgtggataattttagtgcattgctcacccggtatgttttttttttttaacttgaacattttgcttgttttgtttttcttttttaattagataatcacacggaaaattaagctgttcatatctttaaattaggattgcaaaccaaggaaagaacgcatttgagattttaagatgtcacttataaggggagaagtgttcttaaaaagtcaaccagaaaactgttatgccttttatttgtttgcaaggatgtctttgtaatgtgtttcatgaatagaatatccaatagagataagctgacttgaatcattttgagcaattttgccctgtgttatatgtgtttcacgcacatatttgcagttggattttctccaacagaaagtggattcactactggcacattaacaagcaccaataggtttttattccaactccgagcactgtggttgagtaacatcacctcaattttttattatccttaaagatattgcattttcatattctttatttataaaggatcaatgctgctgtaaatacaggtatttttaattttaaaatttcattccaccaccatcagatgcagttccctattttgtttaatgaagggatatataagctttctaatggtgtcttcagaaatttataaaatgtaaatactgatttgactggtctttaagatgtgtttaactgtgaggctatttaacgaatagtgtggatgtgatttgtcatccagtattaagttcttagtcattgatttttgtgtttaaaaaaaataggaaagagggaaactgcagctttcattacagattccttgattggtaagctctccaaatgatgagttctagtaaactctgatttttgcctctggatagtagatctcgagcgtttatctcgggctttaatttgctaaagctgtgcacatatgtaaaaaaaaaaaaaaaaagattattttaggggagatgtaggtgtagaattattgcttatgtcatttcttaagcagttatgctcttaatgcttaaaagaaggctagcattgtttgcacaaaaagttggtgattcccaccccaaatagtaataaaattacttctgttgagtaaactttttatgtcatcgtaaaagctgaaaaaatccctttgtttctatttataaaaaaagtgcttttctatatgtacccttgataacagattttgaagaaatcctgtaagatgataaagcatttgaatggtacagtagatgtaaaaaaaattcagtttaaaagaacatttgtttttacattaaatgtttatttgaaatcaaatgattttgtacataaagttcaataatataaaagctgtttctgaaaaaaaaaaaaaaaaaaa

SEQ ID NO: 145 - DNA, 1795 bp, Homo sapiens
ctcgtgccgtttgaatgtactgaatgtgggaaatcattcagctggagctcccatcttattgcccatatgagaatgcatactggagagaaaccctttaaatgtgatgaatgtgaaaaagcttttagggactactcagcccttagtaaacatgaaagaactcattctggagcaaaaccatataaatgtactgaatgtggaaaatccttcagctggagctcccatcttattgcccatcagagaactcacacgggagagaaaccatataactgtcaggaatgtggcaaagcattcagagaacgctcagccctcactaaacatgagataattcattctggaattaagccctatgaatgtaataaatgtggaaaatcctgtagccagatggctcaccttgttagacatcaaaggactcatactggagaaaaaccctatgaatgcaataaatgtggaaaatccttcagtcagagctgtcaccttgttgctcatcggagaattcacactggtgagaaaccctataaatgtaatcagtgtgaaagatcctttaactgtagttctcacctcattgcacaccggagaactcatactggagagaaaccatacaggtgtaatgaatgtgggaaagcatttaatgagagttcatcccttattgtacacctaagaaaccatactggagaaaagccctacaaatgtaatcattgtgaaaaagcattttgtaagaattcttcccttattattcatcagagaatgcatagtggagagaaacgctttatatgcagtgaatgtggaaaagcctttagtggtcactcagccctacttcaacaccagagaaatcacagtgaagagaaactgaattgaatttatgcgagtttttcgtttcttgtacatttgacaacacattgaggaaaaccctataaacataatcaagaggggacatttttcattaagagttcagtaagacttctcccacattatttactagaaaatatcatcttagaagaaaccccatgaaggaaaagaatagggaaaagctttcagcagttatttagcccttactcaaaatcagataattaacaatgaaggaaactctaaactccccttatggtctaccagtaattcatacttgaggaccatgactgtggggaatgaggcatcttttagcaagagctctcaccaattgtagattggtgtgaattgctaagggaaaaaccttatgcagagaaaagtttttgactggaaatacactgttttgcatcaagctggagtactggatggaaaactctacaataacattttgtgcataattgtagaaatacagattttgttgttataaggggagggtctgggtgcccaggagtagaatatgaagtgctaaatctgaatgtaagaaaaataatagtattgaatggggtatttactgttgattaacctccttagagaaaattaatgaatgagatgactaacggtagaaaagttattgcctaggagtgtgagactgatgttgctggacagaaagtgatccttagcccagtgtgtcagcgtccattgttactcatcactgcattgttgggcaattagtttgtaatttgttttaggcaatcactataaattataattatggacactgcatcagtatacataacatgaaggaataaaaaggatacagaattgtatatacatacttactgtaacacatctaaaaaaatgtatatgggtaaggacctgaaagatccatggaaaagttaacccagttgagatttttaaaaagttttacaaatacaaaaaaaaaaaaaaaaaa

SEQ ID NO: 146 - DNA, 2857 bp, Homo sapiens
ggcacagaaacaacttcgttcactggcagggatgaagtatcatgtcatggcaaatcataatagtttgcccattttgaaagccggagatgaaatagatgagccaagtgagagggaaaggctccgaacagttctaaagagactgggaaagctcaggtgcatgcgtgagagttgctccagtagcttcaccagcatcatgggatatctctaccatgtcagaaaatgtggcaaaggggctgcagagctggaaaagatgaccctgaaatgtcaccactgtggaaaaccatataggtcgaaggctggacttgcatatcacctgaggtcagagcatgggcctatatccttctttccagagtcaggacagccagagtgcttaaaggagatgaacctagagtcaaagagtgggggcccgagttcagagaccgttctgccaagatagctgtataccacctacaggagctggcctctgctgaactggccaaggaatggcccaagaggaaggtgcttcaggacctggtacctgatgatcgaaagttaaaatatactcgtccagggctacctaccttcagccaggaagtactacataaatggaagacagatatcaagaaatatcatcgtattcagtgtcctaaccagggctgtgaggctgtctacagcagtgtatctggccttaaagctcacctgggctcttgtacattgggaaactttgtggctggaaaatacaaatgtcttctatgtcagaaagaatttgtgtcagagagtggtgtcaagtatcacatcaactccgtccatgctgaggactggttcgttgtaaacccaacaacaaccaaaagctttgaaaagctgatgaagataaagcagcggcagcaagaagaagaaaagcggaggcagcagcacaggagcagaaggtctctaagaaggcggcagcagcctggcattgagcttcccgagacagagctgagtcttagagtagggaaggatcagaggaggaataatgaggaactggtagtgtcagcctcctgtaaggaaccagagcaggagccagtgccagcacagttccagaaagtaaagcccccaaagactaatcataaacgaggaaggaaataggcagtcagtgtaaaagtgctcctaggaaagcagatgtgatgctgttgtcacggggacctgtgctgggaggactgagtgaagattctttcagctgtttgtgtaaggctgtgactttctcagctccttcctcctgtgtaaatttcactgtcttcccttcttacattttgattcccccctccccttttagtaggttttcctgctattcctcgtcaagtcctcttgtttttttatcttgcccaaagagctccctctcaaggccaactataggctcctcttgccctgtacaaaactaagaaacctctttggttgtcctttccttcctggggtatagaatgttcttggaagctccattgatttagtagctgctccatcatctagcttgtgaaaccattccaaactaattttttaaaaccataactgatttgtcattttgtatttgtgatataacaagtctagaagttagaactgttgtcattcacataataagattactctgtctccttgggaaaaaaactttatggaggctgtttgtcctctcaatatggttttaagattgaaagtaagaaaacggatttaggatgaaaactctagaactaccctatgctgtttatactgggaaatgctttgtaccaagtagcagtgactagacccacagacatgaaaagcaaccttaggagtaaagtgacccaaacattaaaatgacaggaaagagaaagtagaagcagcaataaatactgccccaactttcctggagcccgaggcctcatccatagctatgatcacttgccctctgaagcttatttttgcttctttggttttaagaattgagaaatatcacattgcccctgatgttttgacagtctcctagtgctcctggtagtgccactaagggaaaaccaaggtgcgcattccttctccctggactttaccttacttgttagtctacgccccactgtttccacccatccccttagccaacctctgtctttttgaattttctgagaatattgtcctatcctcttttatatatggagttctctcctctttatatcctgagactttgacaccagatgtagatatttatctggagctggaaagaaaaattctttttctgtacctcatgcctatctggtaatgtttaatgggttatttctctttgagggtggctttctctggaacattggttagagcagctttgttgtcgtgtttctggattctcttccccattttgcgtaaatattggtcttatatattcttgcctattttgtggcatatgccacataaaaaatgaacctgatatagacaagtactaccttttcaaattctgaaaggctattaccactttaactctttgtgctcctccaaatagctttaaaatgtgggcttttgtgaagaccactttcaaacaagggagcactgaaacctgaattggatactgccagaataggtagttttgaaacaagttaaggacatggtatatgcactctgcattttcattggcagtgtgcccttaaagccctttcagtagatgagggttgtcagggaggagaaatgaagaagctatgttaatttctggtgagtaagacctggggaatgtttggcaatgacaaaagaaataaatgactctcagaaagatgtttctagtgttctttgacgccgacctgctgcatgactccttgacactgtatgggggtaagaagatggctagagatgggggtgagtttgaaataaattccacatgcagttgtctcag

SEQ ID NO: 147 - DNA, 863 bp, Homo sapiens
gggctgcaggaattcggcacgagctcacattcactgcactcataaggcctatcaccagtgtgaatgctgcggtgtcgaatgaggttagagaattgtctaaaggatttcccacattctctgcattcataaggtctttctccactgtgaattctctggtgttgaatgagttccgatttgcagctaaaagatttcccacaatcactgcactgataaggcatttctccagtgtgaactcttctatgtcgaatgagattgaagatttgtctaaaggatttcccacactcacagcactgataaggcctttctccagagtgaactctctggtgtcgaaaaaggctagagctttgtctaaaggatttcccgcactcgccacattcataaggcctttctccagtgtgaactctctggtgttcaatgaggttagatttgtagctaaaggttttcctacattcaccacactcatgacgcactcctccagtgtgacgtctctggtggtgaatgaattcagatttatggataaaggctttctcacgatcactgcattcataaggcctttctccagtgtgaattatcttgtgtaagattaggtggcactttttgctaaaggattcctcacattcactacactcaaacatcttttgtccagtgtgaatttgctggtgctgaacaagtgtgttcttgcaagtgaaggctttctcacatttgctacactcataaagccctccttcagaacagacactctgatgctgaacaagtgtgtgtttgtggcttgaagcttttctgtattcaccccacttgtaataactttttgcattgaaaaatgcctgtataaaaaaaaaaaaaaaaaaaaaaaaaaaaaaaaa

SEQ ID NO: 148 - DNA, 1768 bp, Homo sapiens
cagaaatcacccctcattatacatcagagaatacatactggggaaaaaccctatgaatgtagagagtgtgggaaggccttttcccagaagtcacagctgattatacaccacagagctcatactggagagaagccgtatgagtgtaccgaatgtgggaaagccttctgtgagaagtcccacctcattatacataaaagaattcacactggtgagaaaccctacaaatgtgctcaatgtgaggaagccttcagcaggaagacagaactcattacacatcagttagttcatactggggaaaaaccttatgaatgtactgaatgtggaaagacattctcccgcaagtcacagctcatcatacatcagagaacacatactggagaaaaaccctataaatgtagtgaatgtggcaaagccttctgccagaagtcacatctcactggacatcagagaattcacacaggagaaaaaccttatatatgtactgaatgtgggaaagccttctctcagaagtcccaccttccgggacaccagcgaattcatacaggagagaaaccttacatatgtgctgaatgtggaaaggccttttctcagaagtcagaccttgttttacatcagaggattcatactggggaaagaccctatcaatgtgctatatgtgggaaggccttcatccagaagtcacaactaactgtacaccagagaattcacacagtggtaaaatcataatgaactggccacagaaaagccttagtattagctcaagccttaataattactagaaacccaattaatttgataagcttggggacaacatcccaatagataaaaatttttaagggaatttgtttctagtttggtgatgcctaacttttccagcaaagatgatggaaaatagttatataaatgaagaacatttttaatatggcatgtaaagcttttaaagttatgaactcagtgatcagcacagcaagttaagcatacagaatattgtcaagttgcatattccttatactacaaaatgataatcagccattgtgaaactgctaatattagcttgtcataattatggccataaactaatttttctataaaagacgtggaagaaagcttaagtaaacaataaaataaaacctatacactattttaagaaggggcttgagcatgacccctaaagctacatgtaaagttcttgtacaaaaaatggaatgataggttgatcagattcagtaaagttgatctgtatgcattttcccatctcaagcatataagttgacctgcatctctggaaggaccttgagattgatgcattttgagcaggtctcccttttactcttcccaactgggaacttggagctgaaaaacattggcactgaggccagatggccttgggtttaatcctggctcagtgcctcacagattgtgtgactttaggcaaacatacttctcctagctgagtattttttatcagtaagtacaaatacaatgcagagctcattttcagttaatattagtactttttaaatctttactctctatcttgaagcattagatgttaagactaatgtgtaaaaaccacgtctgagcttgcttttccctctggacactctgcttttgattgcctatccctataagtggctcattttactgtcttctgatcctggtggccttatttttgctatgttaaggttgtgttttttaatacttggatttattttcatatacttacataaaccgtggtgattgcacataaaaaaaaaaaaaaaaaaaa

SEQ ID NO: 149 - DNA, 727 bp, Homo sapiens
  SITE (726): n equals a,t,g, or c
gcaaactggtcccctccaccaaaaagcgggcgcttcaggacctggcgcccccctgctcccctgagccagcaggaatggccgcagaggtggccctgagtgagtcagccaaggatcagaaagcagcgaacccgtacgtcacgcccaataaccgctatggctaccagaatggcgccagctacacctggcagtttgaggcccgcaaggcgcagatcctcaagtgcatggagtgtggcagctcccacgacacgctgcagcagctcaccgcccacatgatggtcaccgggcacttcctgaaagtgaccacctcggcttctaagaagggcaagcagttggtgctggaccctgtggtggaagagaagatccagtccatcccactaccgcccaccacccacacgcggctgccggcctccagcatcaaaaagcagcccgactctcccgcggggtccacgacttctgaagaaaagaaagagccagagaaggagaagccgcctgtggctggcgacgcggagaagatcaaggaggagagtgaggacagcttggagaaatttgagcccagcaccctgtacccgtacctgcgtgaggaggacctggacgacagccccaagggagggctggacattctcaagtccctggagaataccgtctccacggcattacaaagctmaaatggtgcgccctcatggggtggstaccccagcatcatgcagctacagytccsggcaccgng

SEQ ID NO: 150 - DNA, 824 bp, Homo sapiens
ggcacgagcgctggtgtaccccacgcacccgctgcacggtgtgcactcctcgctaacggccgccgcggctgctggcgccacaccgccctccctggccggccaccccctctacccctacggctttatgctccctaacgacccactcccccacatctgcaactgggtgtcggccaacgggccgtgcgacaagcgcttcgccacgtccgaagagctgctgagccacttgcggacccatacggcatttcccgggacagacaaactgctgtcgggctaccccagctcgtcgtctctggccagcgctgccgcggccgccatggcttgccacatgcacatccccacctcgggcgcaccgggcagccctgggacgctggcgctgcgcagcccccaccacgcgctgggactcagcagccgctaccacccctactccaagagcccgcttcccacgcctggcgcccccgtgccggtgcccgccgccaccggaccgtactactccccctacgccctctacggacagagactgaccaccgcctcggcgctggggtatcagtgagggcggccgggagggcgagcgagggagaggagggagagggggaggggaggagtccagggagaggcgggatcacggcccaggctgctgacacccgcgcgtggggaggactcgggccacgaaaggaaagaaatgtataccgtatctatctacccgacagcagcgaccgagacccggtgggacactccccttctccccactttcacctccccacccaaactttataaaagttgaaaaaatatcatttgactttttatagaaaaaaaaaaaaaaaaaa

SEQ ID NO: 151 - DNA, 659 bp, Homo sapiens
  SITE (640): n equals a,t,g, or c
  SITE (648): n equals a,t,g, or c
  SITE (651): n equals a,t,g, or c
  SITE (659): n equals a,t,g, or c
cattgaggcacaaattgacctccaggctttctggtggccagagttagaacagagtcaggttcacccatcatcagaataacaccatcacgctcaagaggagcttaattctctcaagcagacacggcatccggcgcaactcatcaaacagctcggggacacaagcgsgtttaccagtgcaatatctgcagcaagatcttccagaacagcagcaacctgagcaggcacgtgcgctcgcatggtgacaagctgtttaagtgcgaagagtgtgcaaaattgttcagccgcaaagagagcctaaagcaacacgtttcctacaagcacagcaggaacgaggtggacggcgagtacaggtaccgctgcggcacttgtgaraaramcttccgcatcgaragcgcgctggagttccacaactgcaggacagatgacaagacgttccaatgtgagatgtgtttcagattcttctccaccaacagcaacctctccaagcacaagaagaagcacggcgacaagaagtttgcctgtgaggtctgcagcaagatgttctaccgcaaggacgtcatgctggaccaccagcgccggcacctggaaggagtgcggcgagtgaacgagaggacctggagccggtggggaraacctggtncgttcaanaangagccttn

SEQ ID NO: 152 - DNA, 1377 bp, Homo sapiens
gggtcgacccacgcgtccgcaaagtttataggataattttagactattttacttcctaaaattttcttactccttagtagttaaagcacaatatcctagtgtaggtgaaagttagttagagtagcggactcattaaaatcccaagattgctttggtatttttttttaagtaagttgtggttaatctttggggaaactgtatctagaaagtagataaagaagggaacaaagtagctatttgctttaagaaatatttgtatggtactctgtttttattccagtgcttggactagttgtcacattaatgaaaaaatgaccaactgtgtggctaaagaaacaagaattaaaagtgaagtaagcctcttgaactaagccttttatatgtttcacagatgaatcagcagatggctggcatgagtatcagtagtgcaacccctactgcaggttttggccagccctccagcacaacagcaggatggtctggaagctcatcaggtcagactctcagcacacaactgtggaaatgaaaactgcaatacaagtttcatccagaactaccacctgacattccttgctgaaacgcatctagttcccctgtttattcatatgcatattttttttctttttacccatttgttcatattaagaatgatctgattgaccgtgttggtctgtactgattcaatttgatgtggtgaaaagcaggttgataaatcattttatgtcaagggcagctttgctcatatttcccatgatttcatgtactgcattatttgagaagctgctcaacttgcaaaatcagttttcctctcaataaaattatagctctaatgtttgcatataagggaagtagttatcatgttagtaatacctctaatagtataaaccccaccccaaaattagccagtaatcctgtaggaaggtactgtatgatcaaatgtttaatcatataaatagaatgtaaatgtctcactgagcactgttttctagtgtatcaaaatgctcttatttcatcattcacttcactgtgctgttgttatgatgtgcttaacagggaacgtgattagtgaaaggaagataaacgtggatgttactccaaaacttcgtttaatgaatgcttaaagaattcaaattttatctgcctctcttgtaatttggatctcttcttaatgtacatagtgctaacatgaagacctttttctgcactatatgcaaacagggtaactaactaaaacaaagccactttcaatcttcaatccttgaaggtatatctaggtttatgacagtaattgtgtttacattttatggtgcctagtattgacaaaatgttatttccctacattaaacatgactccataaaaaaaaaaaaaaaaaaaaa

SEQ ID NO: 153 - DNA, 2244 bp, Homo sapiens
ggcacgagctgagccctgctcagaaggacctgtaccgggatgtgatgttggagaactacagcaaccttgtgtcagtggggtatcaagccggcaaacctgatgccctcaccaagttggaacaaggagaaccactatggacactagaagatgaaatccacagtccagcccacccagaaattgagaaagctgatgatcatctgcagcagcccttgcaaaaccaaaaaatactgaagaggacgggacaacgctatgaacacggaagaactttgaaatcatatttaggtttaaccaaccagagcagaagatacaacagaaaggagcctgctgagtttaatggagatggagcttttctccatgataatcgtgaacaaatgcctacggaaattgaattccctgaaagtagaaaacccatcagcaccaagtcacaattccttaaacatcagcaaacacacaacatagagaaagcccatgaatgcactgactgtgggaaagctttcctcaagaagtctcagctcactgagcataagagaattcatacaggaaagaaaccccacgtgtgtagcttgtgtgggaaagccttctacaagaagtacaggctcactgaacacgagagagctcacagaggagagaaaccccacgggtgtagcttgtgtgggaaagccttctacaagaggtacaggctcactgaacacgagagagctcacaaaggagagaaaccatacgggtgcagtgaatgtgggaaagccttccccaggaaatctgagcttactgaacatcaaaggattcacacgggaattaagccccatcaatgcagcgaatgtgggagagctttctccagaaaatcactactcgttgtacatcagcgaactcatacaggagagaagcctcatacatgcagtgaatgtggaaaaggcttcattcagaagggcaatctcaacatacatcaacgaactcacactggagagaaaccttatggatgcattgactgtggcaaggccttcagccagaagtcttgccttgtagcacatcagagatatcatacaggaaagactccctttgtatgtcctgaatgtgggcaaccctgttcacagaagtcaggactcattagacatcaaaaaattcactcaggagagaaaccctataaatgcagtgactgtgggaaagccttccttacaaagacaatgctcattgtacatcacagaactcacacgggagagagaccctatggctgtgatgagtgtgagaaagcttacttctatatgtcttgccttgttaaacataagagaatacactcaagggagaaacggggggattcagtgaaggtggaaaatccttccacagcaagtcacagcttaagtcctagtgaacatgtgcaggggaaaagccctgttaatatggtaactgtggcaatggtggcagggcagtgtgagtttgcccacatcctgcattcatgataaacagtttgctgtttgatcatatagcctccagcggaatgctgagtttgtcatgtcccatgggcctttggctccctgcactaatatgtatagtagggtttacaagatatgaaatatattttacttttttatatcttataaacctcactacccctcccacaatattgtttttcatttactatcttgatcatagagtttggctggggaggggggcagttttagaggcttccacttggtgttcctcagaatgatatctcttactccgggggccaaggtaggggttagcttttgttctctttgtagtttagattgtatctcttgccttgttcaagttcacaaatctttttgtgtatacacatatgtacatgaaaatgatgttcatgctttttattattttacccttcattatttcattttttatagttctcatagctatgtctttcagttcactaatcttttttccacagtgtttaatctgtcattaatcccatccaaagtatgttttctctcagaaattgtaatttttaacctctaataatttgacatgggtttttccctgttatatctttcatatctttatttatcatggttttacttttaacctatttatgctttcatatttaaagtgggtgtttagtgggcaacatacagttgggccttccttttttatccagttaacaatctctgtctttttactggggtatttagatcatttacgttcaatgtattgatgtttttaggtttaaattactaacttactatttgttgtttaaaaaaaaaaaaaaaaaaa

SEQ ID NO: 154 - DNA, 1594 bp, Homo sapiens
ggcacgagggaaatcatttaatgtgcgtggacagcttaatcggcataaaacaatccatactggtataaaaccttttgcatgtaaggtgtgtgagaaggcttttagttatagtggtgacctcagagtacattctagaattcatactggagagaaaccatatgaatgtaaggaatgcgggaaagcctttatgcttcgttcagtccttactgaacatcagagacttcatactggtgtgaagccctacgaatgtaaggaatgtgggaagacctttcgagttcgttctcaaattagtctacataagaaaattcatactgatgtgaagccctacaaatgtgtacgatgtgggaagacctttagatttggtttctaccttactgaacaccagagaattcacactggtgaaaagccctataaatgtaaagaatgtggaaaggcctttattcgtagagggaatcttaaagaacatctgaaaattcattctggtttaaaaccctatgactgtaaagaatgtgggaagtcctttagtcggcgtgggcagttcactgaacatcagaaaattcatacgggtgtaaaaccatacaaatgtaaagaatgtgggaaggcctttagtcgtagtgtagaccttagaatacatcaaagaattcatactggtgagaaaccctatgagtgtaaacaatgtgggaaggcctttagacaatattcacatctttatcaacatcagaaaactcatactgtaatttaatatataaaaaggtttccatgtcatgctctatttatagaatatcaaaatatttatggccagaagttctgtcaatgtgttgatgtttttttacacatattaacttaataaatgtatgagtcttaaatacctcttagttctcattaaatttaggaaaattcacactagaaaataaagctgttaatgtaacagttgtggaaaagtgttctagcaacagcatatacttatcatcattgcctttccactactctactatctgtgtgatattagacaaaatatttgcttcttggtacctcagctgtaaaatgaaacacacctaaaagtgtggttgtttccaacatgtataatacagcaacaactatctggcccaaactgctttggattaatattggatattactgtttttattatcatcaacattattattagtggatttcttaataggaagatgcaatggagatgacaaatttggaaaaaccactcatcacttacatttcatgaagtacttctttgataaaatctgttatgggctgaatgtttgtgttcccgtaacaattcctatgttgaaacacgaatcccaaggtgatggtatttgaaggtagggcctttaggaggaaattaggtcatgagggtggagccttcatgagtggaattactgcctttataagaagaagccaaagagccagctagctctttcaaccacatgaggttacagcaagaagtcagcagtctacagtgcaaaagagggccttcaccagaacccaagcatgctggcaccttgaccttggactttcagcctccaaaactgtgagaaataaacctcagttgtttataaaaaaaaaaaaaaaaaaaaaa

SEQ ID NO: 155 - DNA, 922 bp, Homo sapiens
gggctgcaggaattcggcacgaggcacagcggggagatgcctttctcctgtgagtgcggcaagggctttgtgaaacactcaaagctcatcgagcacatcagaacgcacacgggagagaagccttttcagtgtcccaagtgtgacaagagtttccgcctgaaggcgcagctgctcagccatcagggcctgcacacaggggagaggccttttcactgccctgagtgtgacaagaacttccgggaaaggggacacatgctgaggcaccagcgcatccacaggcccgagaggccctttgcctgtggcgattgtgggaagggcttcatttacaagtctaagcttgcggagcacatcagagtacacacaaaatcctgtcctgctccaaatgaactggacattaagaaaaggctcagccaactgtttgcaatgatagaggccgattggagttgaggcagagtgggacatccaaagcgttgagcaggattggtattgcccaggaatccacagcaacagtagccagacccgctggtagacgggttttaggagcaggtatccttctttgagcaagagtgtcatgcaagttaggaatatgaagaaccacaaaggattttctcttcagaagcatcaccaattatatttctttctttttttttttttttccaagatggagttttgctctgtcacccaggctggagtgcagtggcgtgatcccagctatattggaaaagacagcattataaaacaaggacataattttatgaaaaaggaggcatctgcaaacgaaaacaatttctacgaggttatatgtgattgttaacatttttaagaaaaggtgcacacagaaatccagataagatgtgattacctttgtgcatttgtataaaaatatatgtgtgtaattataaggaaaaaaaaaaaaaaaaaa

SEQ ID NO: 156 - DNA, 864 bp, Homo sapiens
ggcacgagctcaagtcccaccagcgcacccacacgggtgagcgccctttctcctgcgactggctcgactgcgacaagaagtttacgcgttccgacgagctggcccgccactacaggacgcacacgggcgagaagcgcttctcctgccccctctgccccaagcagttctcccggagcgaccacctgaccaagcatgctcgccgccacccaacctatcatccagatatgatcgagtaccggggacgtcgtcgaactccccgcatcgacccgccactcaccagcgaggtggaaagctccgcctccggctccggtcccggcccggcgccccgcttcaccacctgcctgtaggacagtcattgctgtcagtcttaccctcaaggatgatcccccaggccgttgtccctgctttctctctgcccatccttctttcccagagtcattacaccaaggcacagactggttcctctgctctgagggtgggtccaggcagacatgtggactctggggaggtactgggggccggaaaatagcgggaattcttgcaacgtgtatatcatcctaaaagtgggggttgcctcaagacagcccccaggaactgataagaagggatgaactcccgtactctccagagtactgaagattctcccctccctggaaccagggatgtgaaactggaattctcagatgcctgaggagctcccagtctcaaaggactctggtgtctcacccatccaccagggcggaccttggagagggtgtcaggggtggcagtcttggaaatgtccaggactgggatggtgagaggcctttggaaacagaaatgatttctatttctgtaaaaaaaaaaaaaaaaaaaaaaaaaaaa

SEQ ID NO: 157 - DNA, 1138 bp, Homo sapiens
gaaaccctcaccagcaacctgaggatgcctctgaccttgaccagcaacacgcaggtcattggcacagctggcaacacctacctgccagccctcttcactacccagcccgcgggcagtggccccaagcctttcctcttcagcctgccacagcccctggcaggccagcagacccagtttgtgacagtgtcccagcccggtctgtcgacctttactgcacagctgccagcgccacagcccctggcctcatccgcaggccacagcacagccagtgggcaaggcgaaaaaaagccttatgagtgcactctctgcaacaagactttcaccgccaaacagaactacgtcaagcacatgttcgtacacacaggtgagaagccccaccaatgcagcatctgttggcgctccttctccttaaaggattaccttatcaagcacatggtgacacacacaggagtgagggcataccagtgtagtatctgcaacaagcgcttcacccagaagagctccctcaacgtgcacatgcgcctccaccggggagagaagtcctacgagtgctacatctgcaaaaagaagttctctcacaagaccctcctggagcgacacgtggccctgcacagtgccagcaatgggaccccccctgcaggcacacccccaggtgcccgcgctggccccccaggcgtggtggcctgcacggaggggaccacttacgtctgctccgtctgcccagcaaagtttgaccaaatcgagcagttcaacgaccacatgaggatgcatgtgtctgacggataagtagtatctttctctctttcttatgaacaaaacaaaacaacaacaaaaaacaaacaaacaaaaaagctatggcactagaatttaagaaatgttttggtttcatttttactttctgtttttgtttttgtttcgtttcattttgtactacatgaagaactgttttttgcctgctggtacattacatttccggaggcttgggtgaataatagttttcccagtctccctcggatggtggccttaaggcctggtagtgcttcaagaggtccactggttggatctctagctactggcctctaaatacaacccttctttacaaaaaaatcttttaaaaaaaaaaaaaaaaaaaaaaaaa

SEQ ID NO: 158 - DNA, 1115 bp, Homo sapiens
ggagaaaccatatgaatgtaatgaatgtggtaaatcattcagtcaaaagacaaatctcaatctacatcagagaattcatacaggggagaaaccctatgtttgtaatgaatgtgggaagtcctttcgccagaaagcaaccctcactgtacatcagaaaatacataccggccagaaatcctatgaatgtcctcagtgtgggaaagcctttagcaggaagtcatatctcattcatcatcaaagaactcatacgggagagaaaccatataaatgtagtgaatgtggaaagtgcttccgccagaagacaaatcttattgtacatcagagaactcacacaggtgagaaaccctatgtttgtaatgagtgtggtaagtctttcagttataagagaaacctcattgtccatcaaagaactcacaagggagaaaacattgaaatgcaataaatgatgtggtttcttatatgaattctttacaagctgttgtaaacatttagttttaaaaagaaaagcatgctgaaacatgttaatgtaattttaaatcacaagtctaataattattaaagtaccatacggaataactgtctactgtttactagcatataaaataagtatgatcattattattgaactctatcagctatgaagctaaattttaaagtcaactgctcttcctactgactcaaatagtttattttttaaaaatacttatataatacatgcagagacaagatacacaatgattataagtattaatctccataagagaaaatatttatgaactatatttctcattgcactctgtaataaaaagcagttagttgttacttacctaagagtttccacttccgtagcctataacatcaaaacgtagtttttgcatgttttcaattttataaatatatattttatcagacatcatgaattattttgtgtcttgcttatttcactcaattttttaagatctgtacattattgcatgtggcagtagtgtattttcattttgcatactattccattttaagaatatattgctgtttatcctattgatggatatttgtattttttatacttttgtgtaataataaaaatactgctgtaaaaaaaaaaaaaaaaaaaa

SEQ ID NO: 159 - DNA, 717 bp, Homo sapiens
ggcacgagaaaagcccaacgacagccactggcaatagctcatgtccttctactgagaccgaggaagaaaaggcaaaacggcttctttactgttcgctatgcaaggttgctgtcaactctgcctcgcagctggaggcgcacaacagtggtactaagcacaaaaccatgttagaagcccggaatggaagtggcactatcaaagcctttcctagggcaggagtgaaaggcaaaggacctgttaataaaggaaacacaggcctccaaaataaaacatttcactgtgaaatctgtgatgtgcacgtcaactcggaaacgcaacttaaacagcacattagcagtagaaggcacaaagacagagctgctgggaagcccccgaaacctaaatacagtccttacaacaaactacagaagacagcacatccactgggggtaaaattagtattttcaaaagaaccttcaaagccattggctccacgaattctaccaaatcctctagcagctgcagcagccgcagcagcagtggcagtgagttcccccttcagtcttcgaactgctccagcagcaacactgttccagacttccgcgcttcctccggcactcctgcggccagctcctggacccattcggaccgcccacactcctgtgctgtttgctccttactaaattccaaataggagtaattgtactgcaataatttttcaaaaaaaaaaaaaaaaaa

SEQ ID NO: 160 - DNA, 2760 bp, Homo sapiens
ggcacgagggactttaaaaaaagctttttttgtattttttttctgtgagcaaagggtatgcatatgtgtgtgtgtgaatatgaatgtatataaatgtatacatgaatatataactgagacatacttttgataaactcattattatgtaagactattactagaatatttcagttgtactgtttcttctctctaaatgcattcgaagccataacagtttttatactgtattgactaatacaacatcaatgcatatttcaggttgttgctgatgagttcttaagctttatttcaatttgtgggtttatttacaaattttaacaatctcatatgctatgcaaatatgactttctgaaagcattttctttttgatcaatttccagttgtccaatgaatggacaagcaaaactttccataaatgaactactcttgtagtttctccatcatttttcttttgaaacaggtgaaaaacctcatcgatgtcatctttgtccatttgcatctgcttatgagcgtcatctggaagcccatatgcgttctcatactggagaaaaaccatacaaatgtgaattatgttccttccgctgcagtgatcgaagtaacttgtcccatcatcgaaggcgcaagcataaaatggtaccaattaaaggtactaggtcttccttaagcagcaagaaaatgtggggggttttacagaagaaaacaagcaatctgggctatagcagaagagcactaatcaacttaagtccaccttccatggtggttcagaaaccagactaccttaacgattttacccacgaaatcccaaatatccagactgactcctatgaaagtatggcaaaaaccacaccaactggtggccttccaagggacccccaagaactcatggttgataaccctttgaatcagctctcgactctagcagggcagttgtccagtctgccacccgaaaaccaaaaccctgcatcccctgatgtagttccctgccctgatgaaaagcctttcatgattcagcagccctctacccaagcagtagtttctgccgtatcagcaagtattcctcagagctcctctcccacaagcccagaacctcggccatcccatagtcaaaggaactatagtccagtggcaggtccaagcagtgagccaagtgcccacacgagcactcccagcataggaaacagccagccaagcaccccagccccagccctgccggtccaggaccctcagcttctgcaccactgccagcactgtgatatgtactttgcagacaacatcctttacactattcatatgggatgtcatgggtatgaaaatccttttcagtgtaatatatgtggatgcaaatgtaaaaacaagtatgattttgcctgtcattttgcaagagggcaacataaccaacattgattgaaaatagtcatattttacttagttttgctgtttttgtggtttggttttttttgttttttgttttggtcatccctaataaagtgtctgctaattcaaggcttatacattatatttatagaatataaatttgtcagtggaataaaatttcccctttttttcataaaaatctggtcagggtcatttatatattagaacagttagacacattggtgtctcttttttcctttcctttcgacattggagaattggagtgcagtcataatcttacaagatgttcatttgaatttctcacatttatggtccataaaaacttcaaggcttatccatacttttgatgtttcaatatgcattgaactggatgttatttctgccatatttcaaaatggtagaataaattacagaatttattactactcatttcagtgtttagtacagaaattgccttaaaaattgctattaattgaaatatcatttagttcacattccttaagttgaatcggtagtttcatttcaactgataatagtaaagctatttcagtttagtaaaaattttcttttttcccaagaggaaatgtaaaacagttaagacttgaaattgaaaattcttttaatatttaaaataacttgtttattcaatgtctaaacacatgtcagttttccactggatttttattttcacaggtaaatacactagagtgctagatgcctttttcccctgtcagtttgactttcatttaaatccttcattctgatatcattactgttaggtgaggtggataactataatgagaatctcttattcttcctattcctttgatgaccaaagagataaagtgaagtcatccttattattaaaatgcagcctccaaacaaatttctcaagattccttttccttccttctatccattttctgcccataatttccaagaaaaggtgggtatggaaacacatgagagaatgtgatagtgaagtcatatttacaaaactgagaacatgtccaaaatggattcttgtctcctcttcagaattagccatttaaaatattttctgtgacttcaaattgtaattcttatttgcagttttaccagtcttcatgtacagtgacgaaactgtgtagaaactaaatcatcgctttagtaagaaaggataaaaaggtgtggaaatgaatataaaatgcatctaaacatgacatttaatcttgtctctataaaaataagacttactaaatatagagtaattcattttgaataggaggctattgtctttctatattgtgtaataactcacgtactctgaagagagcttggtcaaacaataaaatacattgttactaaaaaaaaaaaaaaaaaaaa

SEQ ID NO: 161 - DNA, 1180 bp, Homo sapiens
  SITE (1123): n equals a,t,g, or c
  SITE (1135): n equals a,t,g, or c
  SITE (1169): n equals a,t,g, or c
  SITE (1171): n equals a,t,g, or c
tgagtgaccccgaggcccccagcatggagtccccggagcctgtcaagccggaacagggcttcgtgtggcaggaggccagtgagttcgaggctgacacggcgggttcgaccgtggaacgccacaagaaggcccagctggatcggctggacatcaacgtgcagattgacgactcctatctggtggagcgggcgaccgccagaagcgctggcagtgccgcatgtgcgagaagtcctacacgtccaagtacaacctggtgacgcacatcctgggccacaacggcatcaagccacactcgtgcccacactgcagcaagctcttcaagcagcccagccacctgcagacgcacctgctgacgcaccagggcacccggccccacaagtgccaggtatgccacaaggccttcacgcagaccagccacctcaagcgccacatgctgctgcactcggaggtcaagccctacagctgccacttctgcggccgcggcttcgcctaccccagcgagctcaaggcccacgaagtgaagcatgagagtggccgctgccatgtctgcgtcgagtgcggcctggacttctccaccctgacccagctcaagcgccacctggcctcccaccagggccccaccctctaccagtgcctcgagtgtgacaagtccttccactaccgcagccagttgcagaaccacatgctcaagcaccagaacgtgcgacccttcgtgtgcactgaatgcggcatggagttcagccagattcaccacctcaagcagcactccctcacccacaagggcgtgaaggagttcaagtgcgaggtgtgtggccgggagttcaccctacaggcgaacatgaagcggcacatgctgatccacaccagcgtccggccctaccagtgccacatctgcttcaagacctttgtacagaagcagactctcaagacccacatgattgtacactcgcccgtgaagccattcaaatgcaaggtgtgcgggaagtccttcaaccgcatgtacaacctgctgggccacatgcacctgcacgccggcagcaagcccttcaagtgcccctactgctccagcaagtttaatctcaagggcaacctgagccggcacatgaaggtcaagcatggcgtnatggacatcggnctggacagccaagaccccatgatggagctgacangnctgaccctt

SEQ ID NO: 162 - DNA, 572 bp, Homo sapiens
  SITE (550): n equals a,t,g, or c
  SITE (566): n equals a,t,g, or c
ttttttgcagattccatgtgttgaattatttcacctgtggggaggccttcccagcccccacggacctactccaacacgaagccactcccagtggtgaggagccacacagtagcagcagcaagcatatacaggcatttttcaatgcaaaaagttattacaagtggggtgaatacagaaaagcttcaagccacaaacacacacttgttcagcatcagagtgtctgtyctgaaggagggctttatgagtgtagcaaatgtgagaaagccttcacttgcaagaacacacttgttcagcaccagcaaattcacactggacaaaagatgtttgagtgtagtgaatgtgaggaatcctttagcaaaaagtgccacctaatcttacacaagataattcacactggagaaaggccttatgaatgcagtgatcgtgagaaagcctttatccataaatctgawttcattcaccaccagagacgtcacactggaggagtgcgtcatgagtgtggtgaatgtaggaaaacctttagctacmaatctaacctcattkgacacangtgagttcacactggngaaagg

SEQ ID NO: 163 - DNA, 715 bp, Homo sapiens
  SITE (2): n equals a,t,g, or c
  SITE (621): n equals a,t,g, or c
gngcccagccwtaattattaagtttttttwaawaaaaatccagccatggatgttgtaggcatgaagaaactgggattcctgttttttttttttttttcttaatttaccattgaatagtcagatattccattaaaacaggactgacattgaatgctttctaatgtggcaagatctgcattttgaactctctcaattgctaaagccatacctataagactaacattccatcatttctcaccagtgtgggctgtctgatgatgaatggcgcgctcatactctttacggtcttacacttttatgctcctatgaattctctgatgggctttaagggctgaaccatatctgaaggttttcccacactgcttacacacatagggtttctcaccagtatgaattctctcatgttgaacaaggtttgaagcacgactgaaggccttcccacattctttacattcataaggttttccaccagtatgaattttctgatgttgggtaaggtagccatacattttaaaggcctttccacattctttacattcatagggttttttatcagcatgaatgctctgatgtgcagtaaggtgtgaactacgtctaaaggtcttcccacattccttacantcaaaaggtttctcatcagtatgaatactttgatgtagagtaagatttctatagaaagtaaaggtttttctacataccttacattcatagggtt

SEQ ID NO: 164 - DNA, 637 bp, Homo sapiens
gggtcgacccacgcgtccgagaccctatggctgcagtgaatgtgggaaatcctacagcagtagatcttaccttgctgttcataagagaatccacaatggggagaaaccctatgaatgcaatgactgtgggaaaaccttcagcagcagatcttaccttactgttcataagagaatccacaatggggagaaaccctacgaatgcagtgactgtgggaaaaccttcagcaattcctcatacctcagaccgcacttgagaattcacactggagaaaaaccgtacaaatgtaaccagtgttttcgtgagttccgcactcagtcaatcttcacaaggcacaagagagttcatacgggggagggtcattatgtatgtaatcagtgtggaaaggctttcggcacgaggtcatctctttcttcgcactatagcattcatacaggggagtacccttacgaatgccacgattgtgggagaaccttcaggaggaggtcgaatctgacacagcacataagaactcatactggagaaaaacctacacatgtaatgagtgtgggaaatcctttaccaatagcttttctcttacaattcacaggagaatacataatggagagaaatcctaaaaaaaaaaaaaaaaaaaaaaaa

SEQ ID NO: 165 - DNA, 387 bp, Homo sapiens
ccacgcgtccgagcgaactcacataaaaaacaccacgtaaagtaaatataacaaattgttattagtgattgggcttttcagtatctgtatggtgggaagcagttactgtatatgtcccaggcaatgtgctaagcactttacacacattcccatgtaatacttaattctcagcacaaccttgatttaggcagtatcatttccattttataagtagggatgcaaaatccgtgtcactaaactagtgaatgaacccaggatttgaactcagttactgtacaactgtgagccagaagaagatacacaacttttgtttaaattcaattttcattaaaatgaaggctcttgctaaagttaaaaaaaaaaaaaaaaaaaaaaaaaaaaaaaagg

SEQ ID NO: 166 - DNA, 600 bp, Homo sapiens
gggtcgacccacgcgtccgcaacagttcccaagagcttcatccgcaagcaccacctcctggaacaccggcgcatccacacaggcgagcggccctaccactgcgccgagtgcggcaagcgcttcacgcagaagcatcacctgctggagcaccagcgcgcgcacacgggcgagcggccctacccctgcacgcactgcgccaagtgcttccgctacaagcagtcgctcaagtaccacctgcggacccacacgggcgagtgagcgcgcgccccgccgccgccgcccggccaggtgcgcgggccgtgccccccctcggacaccgccaggcccgagcccagcgggcgggggcggggcgccccccagcccctttgccgtgagctccccctctcctctcgtccctcctcccaaggacatgggggcagtgagaccaggtcccttgctgccgcgtttccccgggggccccaggggggagggcgcggacctggggaaccctttcgggctgttaatttccttgacaataaaatggatgaaaccaatccaaaaaaaaaaaaaaaaaaaaaaaaaaaaaaaaaaaaaaaaaaaaaaaaaaaaaaaaaaaaaaaa

SEQ ID NO: 167 - DNA, 2784 bp, Homo sapiens
gcctcgcagagttgggagaaggcagggtggggggtgtggaaaaataaaaggaaaagtccttgcaccatgtagatcagcgtcccccactttggcatcccggccggccggggacctcccagtctgcggccatgaacgcgagcagcgagggcgagagcttcgcgggctcggtgcaaattccaggtggcacaacggtgctggtggagctgactcctgacatccatatctgcggcatctgcaagcagcagtttaacaacctggatgcctttgtagctcacaagcaaagtggctgccagctgacaggcacatccgcagcagcccccagcacggtccagtttgtatcagaggaaacagtgcctgccacccagactcagaccaccaccagaaccatcacctcggagacccagacaatcacagtttcagctccagaatttgtttttgaacatggctatcaaacttacctgcccacggaaagtaatgaaaaccagacagccactgtcatctctctccctgccaagtcacgcaccaaaaagcccacaacaccacctgctcagaaaaggcttaactgttgctatccaggttgccaattcaagactgcttatggcatgaaggacatggagcggcatttaaaaattcacacgggagacaaaccccataagtgtgaagtctgtggcaagtgctttagccggaaagacaagctgaaaactcacatgcggtgccacacgggcgtgaagccctacaagtgtaagacgtgtgactacgccgctgccgacagcagcagcctcaacaagcacctgaggatccactcggacgagcggcccttcaaatgccagatctgcccctacgccagccgcaactccagccagctcactgtccacctgcgatcccacacgggggacgcccccttccagtgctggctctgtagcgccaagttcaaaatcagctcggacttgaaaaggcacatgcgggtgcactcgggggagaagcctttcaagtgcgagttctgcaatgtccgctgcaccatgaaggggaamctcaagtcgcacatccgtatcaagcacagcgggaataacttcaagtgtcctcattgcgacttcctgggtgacagcaaagccaccctccggaagcacagccgcgtgcaccagtcggagcatcctgagaagtgctcggaatgcagctactcctgctccagcaaggccgccctgcgcatccacgagcgtatccactgcaccgaccgccctttcaagtgcaactactgcagcttcgacaccaaacagcccagcaacctgagcaagcacatgaagaagttccatggggacatggttaagactgaggctctagagaggaaggacaccggcaggcagagcagccggcaggtggccaagctggatgccaagaagagtttccactgcgatatatgcgatgcctccttcatgcgggaggactcgctccgcagccacaagagacagcacagtgagtacagtgagagtaagaactcggacgtgaccgttctccagtttcagatcgaccccagcaagcagcccgccacgcccctcactgtgggacacctccaggtgcccctccagcccagccaagtgccccagttcagcgagggaagagtcaaaatcatcgttgggcatcaggtgccccaggcgaacaccatcgtccaggctgccgccgctgcagtgaacatcgtcccgcctgccttggtggcccagaacccagaggaactcccagggaacagccggctgcagatcctgcgccaggtcagtctgatcgccccccctcagccctcgcggtgtccgagcgaggcgggcgcaatgacccagccggctgtcctgctgaccacccacgagcagacggacggagccactctgcaccagactctcatccccacggcctcaggtggcccccaggaaggctctggcaatcaaactttcattaccagttcgggtattacttgcactgactttgaaggcctaaacgccttgattcaggaggggacagcagaagtgacagtggtgagcgatggaggccagaacatcgcagtggccaccacagcgccaccggtcttctcctcctcttcccagcaagaactacccaagcagacctactccatcattcaaggggcagcccatccagctttgctctgtcccgccgactccattccagattagtgcttaaaaaaacaaaaggagtgggggaaaggaattgagaaaaagaaatcttaagtagaattctctaaaaggtttgctcttaatgttttctttgttttgttttgtttttgagacggagtctcgctctgtttcccaggctggagtgcagtggcgctatcttggctcactgcaacgtccgcctcccaggttcaagcgattctcatgcctcagccctccgagtagctgggaccacaggtgtacgacatcatgactggctaatttttgtatatttagtagagacggggtttcatcatgttgaactcctgacctcaagtgatctgcccacctcagcctcccaaagtgctgggattacaggtgtgagcccccatgcctggccgtggtttgctcttaatgtttttaaggatggttgtgaatccccctggccccataataaattgtaattttatactgcttactataatttttttaaccctgtaacaactttgagaccccctctgaatcgtcgcattataactgttgtagaatcttaaatgttaccaagatgattccaatgaggggttggaattaaatgccttaagtagtgaaaaaaaaaaaaaaaaaaaaaaaaaaa

SEQ ID NO: 168 - DNA, 614 bp, Homo sapiens
ccacgcgtccgctcagacctcattaaacaccagagaatccacactggggaaaaaccatataaatgcagtgagtgcaggaaggctttcagtcagtgctcagctcttaccctacaccagagaatccacactgggaagaaaccaaatccatgtgatgagtgtggcaaaagctttagtcggcgttctgatctcattaaccatcaaaaaatacacactggtgaaaagccgtataagtgtgatgcatgtgggaaagccttcagcacatgtactgatcttattgaacaccagaaaacccatgctgaggagaaaccctaccagtgtgttcagtgcagcagaagttgtagccaactctctgaacttactattcatgaggaagtccattgtggagaagacagtcaaaatgtgatgaatgtgagaaaacctttagtgtgtacaccaactctattcagtaccagagacactgtaccagaaaaaaatctaatgaatgctgttgattattgatgagtatgaaaaaggttttaatcagtgttcaactcttatgctacattaaaaccgcactggatccggaaaaaaaaaaaaaaaaaaaaaaaaaaaaaaaaaaaaaaaaaaaaaaaagg

SEQ ID NO: 169 - DNA, 1346 bp, Homo sapiens
  SITE (19): n equals a,t,g, or c
  SITE (90): n equals a,t,g, or c
aaccgctcaacctttgtgnaatgcgccggttgcaacctgcaatgaasttctctgtgctgaaamaacttcttgcaactcgctgcamtctanaccccggcggcgggcaagggcccgcaagggaatgctgtaacaatgcttccaagggctgctggaagaggcaaactggtgcacgaagttgcccgtggggctcgaggggcagggggctccttagcccaggacctctcccagcccagcagctgcatgggccgcctcgtgtgcctgcagtcgagcagctgagcccactttcttgccacaggtgccacactcaaagcgccgtggggcctggsagcagcggctgcacagcggtgctcccggagccgcagtgaggaggggaaggcagccccacaggatgggcagcggktggtggcgcccggcatggaccacgagctggtgcacctccagcagccgacgcagcaagaaggagcgggggcactcgcgacacttgtaggggtattcacctgtgtgatggtagcggtgcatgagcaggcggtaaggacggtgaaaacgcaccccacattcctggcagcggtaggggaagtgctgggcatgcaccaagcggtgctgcctcagtgtggagctttgcgtgaaagccttgccacagtccccacaccggtagggccgctctcctgtgtgtgtgagccggtggcgggccaggttggcaggtgagttgaagggcttggagcagtcagggcaggggaagggccgctcccctgtgtgtgtgcgcaggtggttacgcacgtgagacttcttcttgaacatcttgccacaaatgctgcatttatggcgccgctccagccgatgcacaaaacgttggtgccgggtcagctgcaaggcctttccaaattcacggctgcacaggaggcagcggtaggtgcctggggcagcgggccctgctgaggtctcctcagacacagggggctcaggggcctctggctctccagtctctgctggggctggctcagggaaaccaatgacaggttcctctggtgggactggtgttgtgggcagagggacaccccctaccccatgagtacgccggtgataaaggaacttggtaaggttgacaaaggtcttcccacatggacatgaatgcagaggattcggggtgtgggctcgccggtgggccaggaggagggcctctgtgccgaaggccaggccacagtctacacacaggaagtgtgactcgctgctatggtctccaaggtgctggtccagactggaagggctagggaagacacgactgcacagggggcacttaaasacgccctcccggtgactccgcaggtgctgctgtagctgctcgtgcc

SEQ ID NO: 170 - DNA, 2415 bp, Homo sapiens
ctgcaggaattcggcacgagcactatgtgtgcgagagctgcgacaagcaattttcctcggtggatgacctgcagaagcacctgctggacatgcacacctttgtgttgtaccactgcaccctgtgtcaggaggtcttcgactccaaggtgtccatccaggtgcacctggcggtgaagcacagcaatgagaagaagatgtaccgctgcacggcctgcaactgggacttccgcaaggaggctgacctgcaggtgcacgtcaaacacagccacctgggcaacccggccaaggctcacaagtgcatcttctgtggggagaccttcagcaccgaggtggagctgcagtgccacatcaccacacacagcaagaagtataactgtaagttctgcagcaaggccttccacgccatcatcctgctggagaagcacctgcgggagaagcactgtgtgtttgatgctgcgaccgagaacggcacggccaatggggtacccccaatggccaccaagaaagctgagcctgctgacctgcagggcatgctgcttaagaaccctgaggcacctaacagccatgaggccagcgaggatgacgtggacgcgtcggagcccatgtacggctgtgacatctgtggggcggcctacaccatggaggtgctgctgcagaatcaccggctgcgggaccacaatatccggccgggcgaggatgatggctcacgcaagaaggctgagtttatcaagggcagtcacaagtgcaacgtttgttcacggactttcttctcggagaacgggctacgggagcacctgcagacgcaccggggccctgccaagcactacatgtgtcccatctgtggtgagcgcttcccttcgctgctgacgctcaccgaacacaaggtgacccacagcaagagcctggacacgggcacctgtcgcatctgcaagatgcccctgcagagcgaggaggagtttattgagcactgccagatgcaccctgacctgcgcaactcactcacgggcttccgctgtgtggtctgcatgcagacagtcacttccacgcttgagctcaagatccatggcaccttccacatgcagaagctggcgggcagctcagcggcgtcctcccccaatggccaggggctgcagaagctctacaagtgcgccctgtgcctcaaggagttccgcagcaagcaggacctggtgaagcttgacgtcaatgggctgccctacggcctctgcgccggctgcatggcccgcagcgccaacggacaggtgggtggcctggccccgcccgagcccgccgaccggccctgtgccggcctccgttgccccgagtgcagtgtcaagtttgagagtgccgaagacctggagagccacatgcaggtggaccaccgtgacctcacgccggagaccagtgggccccggaaaggcacccagacatcgccagtgccccggaaaaagacataccagtgcatcaagtgccagatgaccttcgagaacgagagagagatccaaatccacgttgccaaccacatgattgaggaaggcatcaaccacgagtgtaagctgtgcaaccagatgttcgactccccggccaagctcctctgtcacctcattgagcacagcttcgagggcatgggcggcaccttcaaatgccccgtgtgtttcacagtcttcgtccaggccaacaagttgcagcagcacatctttgccgtgcacgggcaggaggacaagatctacgactgctcacagtgccctcagaagttcttcttccagaccgagctgcagaaccacacgatgagccagcacgcacagtgagggatcgctcaacaggacacctctccgcagaaggcttgccggagacgccgtggggagggccatttgaacattacatccaatcaaagtgtcatttgcaacccagatgtaaaactctaatgatttggccatgaggcgctgctattataagcagctggaaatgaatattaatggcagagattaaaagtattccatgctcagtattttttattgtcctgctacagctagtgtgcttttagactttccgccgcagactacatttctagagttagagaaacctgctttttaaggctattgtcctttgttccttcaggtattatattgatagtttttaaaaaagaattagtgtgattttttttctttgcttctttttttctttcttgttttcttcccccccacccccccacccccttcggttaactactttttaattgcaattctaggtaattgtgcatcgtgatgtgattgcttggctattgtctgaatatttccttttaattttttaattaaagactaatgctttgattggatttgccagttcaccggacagtgattaaaactatgtaatgaatataatcggtttcagtgcaactgaaaaaaaaaaaaaaaaaaa

SEQ ID NO: 171 - DNA, 2773 bp, Homo sapiens
ggcacgagcccaattgaggaaagaggcgatctctttggaaaagcacttaatctgaacacagactttgtttctttaagacaagtaccttataaatatgacttatatgaaaaaactttgaaatataattcagacttgcttaatagtaatagaagctatgcaggaaagcagactgatgagtgtaatgaatttggaaaagcacttctctacctgaagcaagagaaaacccacagtggagtagaatattctgaatacaataaaagtggaaaagccctcagccataaagcagccatttttaaacatcagaaaataaaaaacttggttcaacctttcatttgtacttactgtgacaaggctttctcctttaagtcactcctcattagtcataagagaatacatactggagaaaagccatatgaatgcaatgtatgtaagaaaaccttctcccataaggccaacctcatcaaacatcagagaattcacactggggagaaacctttcgagtgtccggaatgtggaaaagctttcacccaccagtcaaacctcattgtacaccagagagcacatatggagaagaagccctatgagtgcagtgaatgtggaaagacatttgcccaaaagtttgaactcaccacacaccagagaattcatacaggagagcgaccctatgagtgtaacgaatgtgcaaaaaccttctttaagaagtcaaaccttatcatacatcagaagattcacacgggggagaaacgctatgagtgcagtgaatgtggaaaatcctttatccagaactcacagctcatcatacacatgagaactcatacaggagagaaaccctatgaatgtactgagtgcggcaaaactttcagccagaggtcaactcttagattacacttgcgaatccacacaggagagaaaccatatgagtgttccgaatgtgggaaggcctttagcaggaagtcccgactcagtgtccatcagagagttcacatcggggagaaaccctgaaactccagccaggtcttactgtggaaaactcctgccagaactcttcaagcgggtgaaaaacctcatgacagtattgagggaacatgggaattcatactgagatgcaatctctcaactcaaaaatgtattaaaaataggatcccatgagaacattatactggaagttacatgtgatacccagctaaagaatacatatcagaatatatccagttgtaaatagccatacccagttgtactacaatgagctttttaaaatcttgaatgaattgagtattctagacagcagcataagaaatatacaaacagtatcctatgaatttagtggttttatgtggatatgccacaaaacacaagtggtatgctttagatctgcacatgtgaatttagcataatcactgggaatttgaaattcttgtcctctgtgataattaggacataacaagattttccatactaaacatcacatgtgtttttcagtatctctgcaatccagtatgcattccaaatgaaatgtgtaacatttaaagtagcatggaacctacgtctttccctactgcttgctggcatatatcagttggtatgaacattgttcttgagctgcctcttaggaaacagaagacagtgttgaagttttccctgcttctggtttgctgaagattttctagaagcactatttacacaaatatgcaaatgtgaaataaccgatctataacgtgaaggaggcagacatgagctgtactactcagtatgcaccacagaataagagtttgccgtgtaaagacaatatccccattcgtcatgctcttattttcccgtgggatatttgcatacaaatgcatgtctgttaccaaaatattgtgtaacacagacagaaaccacctgtttttgtctttccttgtttcccttaatatattatgaattgtctagcaaaaaggtaggatgcttctgtagttcacaaatgttacatttcagagactttagaggaaaaattattttaaataactgtcaactgtttcattgctttttaaatttttcacgtgcataaccccctttagaagtaaatttttacactattttgttgtttaaaggaggcatttctacttccttgagttttgctgttgccaacctaaaacatttccctttggaacatgagttataagttattacttttcctttacatgtttacacttttataaaaatcagatttttcagtggtctctccagatattaacaagaattgttgtgtaactcaaagatttgcttttatagacttgatttcaaattcttaagttcagcctttccctatcaatcacaaatcatgtattggaaattataaatggcaaccaaaaactggcttttaaaaaatatttttggatatcattgatgtgctgtcacactatatattgagtgactttctgaacaaatttatccagaacatccatagcccaataagcttttgtctaagttgtcatcttacttactcacaaaggaggggaaaacgttattttcatagctgcttttagaaatgtaaattgtaacagcctccttggacaacattgtgagtctgttttaacattaatatactcttacaacctaggaatctcctgggaatctatccctaaggaataaaaagcgccagcacttaagattatatgtttactaatgtatattgtattttttggtaaggaccaaaaaaacaaacaaaaaaaagaccatcagtaagggaatggatgaataaattgtggtaaaaacaaaaaaaaaaaaaaaaaaa

SEQ ID NO: 172 - DNA, 1692 bp, Homo sapiens
ggcacgagctggtgtccgacatcgttcaagttgagccctttttttccgctgtgagtctctacacatgtctgacactctcatgtcccacggattacagaaataaacaaggctttacagagaaagtccagaggagtttattggcactctgagctacaaaaaggcttggagagtgagccaacatcaagaaggcaatgtagaaattctccaggggagagtgaggagaaaaccccatcccaggagaagatgagtcaccagagtttttgtgccagggacaaagcctgtacacatatcctctgtgggaaaaactgctctcagagtgtgcactctccccacaagccagcgctcaaactggaaaaagtatctcaatgtcctgaatgtgggaaaacctttagccgaagttcttatcttgttcggcatcaaagaatccacacaggcgagaagcctcacaagtgcagtgagtgcgggaagggctttagtgagcgctccaacctcactgcccacctacgaactcacacaggggagaggccctatcagtgtgggcaatgtgggaaaagcttcaaccagagttccagcctcattgtccaccagaggacccataccggggaaaagccttaccagtgcattgtctgtggaaagagattcaacaacagttcccagttcagtgctcaccggcgcatccacactggggagagcccatacaagtgtgcagtgtgtgggaaaatcttcaacaatagctcccacttcagtgcccaccgaaaaacccacactggtgaaaagccttacaggtgttctcactgtgagagaggcttcactaagaactctgccctcacccgtcatcagacagtacacatgaaagcagtactctcatcacaggaaggaagagatgcgttatgagtgtgtcggtaaactgtcagattaagttcctcaggtcagcatgtatgagctttcttctgctgtggagagatctagccagtccctgactttgcaacagacctactgactactggatcttaagacccatgtctaggaccaggagtcagcataaggacgctgacctctcctggctgtgcctgtgactccagagtcctatcttactgtgacttaaagtttgatggagagaaagctgtaggatccataaattctaccaggaatccagggtcttcctgttcctagcactgagaatgggcacccagtggtccaagaacactttctgggctaacatagtcctcacacagggctgagaaagaaagtgtctcctttcctggaaagcacatgtaaaagttaagggcctgaatctcttctaaaccaataattgacctctaggcacccaccataatactgctaccttcagggcagaagacactgctctttgtaacccagccaccaccaaaaagcaaacagaaagaaggaaggatggttaagccattggataatactgaatctgtttccctaagtgacttaaccttagagcaagcacaacatccaggttaattttttgtaagatttctccttttattattgccctcatcatagttcctgattgtctcttaaagtaagtggtttatagacattactatttctgataataatttacaaactactataaacaaatttataaacattactaatttctgatgaaaataaagttgtttctccctccaaaaacgtaaaaaaaaaaaaaaaaaaaaaaaa

SEQ ID NO: 173 - DNA, 4283 bp, Homo sapiens
gctctgctcattggctctcaaagaaccagcggacctgagtcttcaatgaaagtgacctcttccatcccagtatttgacctccaggatggtggacggaaaatatgtccacgatgtaatgctcaatttcgtgttactgaagctttgagaggtcacatgtgttactgttgcccagaaatggttgaataccagaagaaaggaaagtccctggattcagaacccagtgtcccatcagcagcaaagcccccatcccctgagaaaacagctcctgttgcttccacaccctcttctacacctattcctgctctgtcaccgcctaccaaagtaccagaaccaaatgagaacgtgggcgatgccgtccagaccaaactcattatgcttgtagatgacttctactatggacgggatggtggcaaagtagcccagctcacaaatttccctaaggtcgccacatctttccgatgcccacattgtaccaaaaggctaaaaaacaatattcgattcatgaaccatatgaaacaccacgtagaactcgatcagcagaacggtgaggtagatggtcacactatctgccagcactgttaccgccagttttccactcccttccagcttcagtgccacttggaaaatgttcatagtccctatgaatctactaccaagtgcaagatctgtgaatgggcgtttgaaagtgagccactatttctccagcatatgaaggatactcataagcctggagagatgccttatgtttgccaggtgtgtcaatatcgctcctcactctactctgaggtagatgtccattttcggatgatccatgaggatacccggcatctgctctgcccttattgcctgaaggtcttcaaaaatggcaatgcattccaacagcattacatgaggcaccagaagagaaatgtttatcactgcaacaaatgccggctgcagtttctctttgccaaggacaaaattgaacacaagcttcaacaccataaaaccttccgtaaacccaagcagctggagggcttgaaaccaggcaccaaggtgacaatccgggcttcccgagggcagccacgaactgttcctgtatcctctaatgatacacctcccagcgccttgcaggaggcagcaccgctgacctcctcaatggaccctctgcctgtcttcctttatccccctgtccagcgcagcatccagaagagagctgytaggaaaatgagkgtcatgggccggcagacatgcctggagtgcagcttcgagatcccagacttccctaatcatttccctacttacgaacactgctctctgtgkcgctatagcacctgctgttctcgagcttatgccaaccacatgatcaacaatcatgttccacggaagagccccaagtatttggctttgtttaaaaattctgtgagtggaatcaagctggcctgcacttcatgtacctttgttacctctgtgggcgatgctatggccaagcatttggtattcaacccctctcacagatccagcagcatcctgccacggkgactcacttggatagctcactcaaggcatggccagactcgtgaccgagtgcatgaccggaacgtgaagaatatgtaccctcctccttccttccccactaacaaagctgccactgtgaaatctgcgggggccaccccagaagagaaactggctgagtgggtgctaacccagcgcgaacaacagctacctgtaaatgaggagaccttgttccagaaggccaccaaaataggacgttctttggaaggggggtttaagatctcctatgagtgggctgtgcgtttcatgctgcggcaccacctgactccccatgcccggcgagctgtggcccacaccctacctaaggatgtagcagagaatgcaggactcttcattgattttgtacaacggcagattcacaaccaggacttacccttgtctatgattgtggctattgatgagatctctttgttcctggatacagaggtgctgagcagtgatgatcgaaaggagaatgccctgcagacagtgggcacaggggaaccttggtgtgatgtagtcctagccattctggcagatggcactgtccttcccaccctggttttctacagagggcagatggatcagcctgctaacatgccagactccatattgctagaggcaaaggagagtggctacagtgatgacgagatcatggagctgtggtcaactcgagtgtggcagaagcacacagcttgccagcgcagcaaaggcatgcttgtgatggactgtcatcgcactcacttgtcagaagaggtactggctatgcttagtgcctctagcactttgcctgcagtggtcccagcaggctgtagctccaaaattcagccattagatgtatgcatcaaaagaactgtcaagaacttcctgcataaaaaatggaaggaacaggctcgggaaatggcagatactgcatgtgattctgatgtcctgcttcagctggtgcttgtctggctgggtgaagtgctaggtgtcattggggactgtccagagctagttcagcgctccttcctggtggctagtgttctgcctggccccgatggcaacattaactcacctacaagaaatgctgacatgcaggaggagctaattgcctccctagaggagcaactgaagctgagtggggaacattctgagtcttccactccacgacccagatcatctcctgaagagacaattgagcctgaaagtcttcaccagctctttgagggtgaaagtgagaccgagtctttctatggctttgaagaagctgacctagatctgatggagatttgagtgttggggtcatgagggggtgtggagtgggggtgggaacatgtgagggagggtaaaggggcttagggaaaagggggcataccaggtggggtatttggtttctattttttaattttataccaccactcccccctgaagttgacttacacttccctgtggatttgtggattaattaggaaaaccaatagtaatcacgtctgagccaaggagctggcccattggtcattcacttctgctaaaaacaggtttttgtgactttttttttttttaaatttaaatcactgtgtttggtatttttctgacaaaattaagaaaaagaaaaaaaattatttgtgggcaaatgttaaatttttttgtttccccttttacctcaattgtatcatagtactgggtttttttgtttgttttattgtgtggccaatgtctttgggcatgatgctatctaatcattgttaatgtgagaacatttctgaagatgggaaagacaaattatgtagctcacaaactggtttattatatatatggataaaaaacttttttcattgtggtcttaacacttttatataaaaatgaaaatggaaaaaaagtcccactgaactctctcttccttctccttttctttccttccctctccagagatgttggtttctacagcaaccctagatataaaattgtggctttaaaaatgcatgaaaccacctttaattatccagaatgaatagatttgtcttttcctcaccaccttccctccaaaacatgacataaacaatattttttgcacttgtgatccttggcccctttccccattctcaacaccatccatccctctggacaaaggatcatacaggtgttattagcaagcaagagatactgaagcgatcaaacagttttagggtggaagccattcccagtttgagtcttcatcctgtaagcccccaggggcagtccctgctttactgaacttcatcctgttagatggagagcatgcctgtttaagggattactggtcctacagccaggagctaattgttcaagaagtgttgaactttaaaaagacaagaccacttgttgaaatccagcgtgctctgtggctttcccctatttctcttaatacttagggaagaatctgacaggaagaagcgcacaggggtgtgcacaaagaaaatgacatgaatctttatttttcactgccagcttcaaggaaagaaaattttttctacaatttgcatgagggatttttttaattgtatgtactcatggttgtaaaccaaaacgtactgtaccgtacagagaaaaggagcaaaaaaccaagtcttctgtttatcctgaggctttccacaatgttcccctcctgtgagccaaggaggcaaactgcacaagcttgtaaatggttcgtctttaaaatgtacataagtggaacatttaataaaatgaggggaaatggaaaaaaaaaaaaaaaaaaaaaaaaaaaaaaa

SEQ ID NO: 174 - DNA, 1025 bp, Homo sapiens
aattcggcacgaggaaaaaagcttttcaagtgtaatgaatgtaagaaaacttttacccagagctcatctcttactgttcatcagagaattcacactggagagaaaccttataaatgtaatgaatgtgggaaggcctttagtgacggctcatcctttgcccgacaccagagatgtcacactggcaagaagccctatgagtgcattgagtgtgggaaagctttcatacagaacacatcccttatccgtcactggagatactatcatactggggagaaaccctttgattgcatcgattgtgggaaagccttcagtgaccacatagggcttaatcaacacaggagaattcatactggagagaaaccttacaaatgtgatgtatgtcacaaatccttcaggtatggttcctcccttactgtacatcaaaggattcatactggagaaaaaccttatgaatgcagtgtgtgtggcaaagcctttagtcatcgtcaatcccttagtgtacatcagagaatccattctggaaagaaaccatatgaatgtaaggaatgtaggaaaaccttcatccaaattggacaccttaatcaacataagagagttcatactggagagagatcttataactataagaaaagcagaaaagtcttcaggcaaactgctcacttagctcatcatcagcgaattcatactggagagtcgtcaacatgcccctctttaccttccacgtcaaatcctgtggatctgtttcccaaatttctctggaatccatcctccctcccatcaccatagcctcgagacgtcatttctgtttgactactccagcagtttaaaaccccatctccctgcccttttgttttctttttgtcccttattagttcttcacataagtgtaaatgtaacttattcactcctcttgtaaaacttatagtttctttaaattggttaatgtgtgagatgtgctcagcacagtgcctggtccatagtaagtgctcagtaaacttagctgttttaaaaaaaaaaaaaaaaaa

SEQ ID NO: 175 - DNA, 490 bp, Homo sapiens
  SITE (428): n equals a,t,g, or c
  SITE (442): n equals a,t,g, or c
caaatttaaaagttccttggaagtgatgatgctgtgttcagaatgcccaacagtctttgtggatgctgaaacactgatgtcatgtggtttgctggaaacactcaagtttggtgttttggagttgcaagaacacctggrtacatacaatgtgaaaagagaagccgctgagcagtggctagatgattgtaagaggacatttggtgccaaagaagacatgtataggataaacacagatgcacaacaaatggaaatactagcagaattggagctctgccgaagattatacaaattgcattttcaattgctgcttctgttccaggcctactgtaaacttatcaaccaagtaaatacgataaaaaatgaagcagaggtcatcaacatgtcagaggaacttgcccaactgggaaagtatcctccaaagaagctgnagtccgcttcccgnaaaacggaaggaaattggacatttcccaaagctggcacaaactacttt

SEQ ID NO: 176 - DNA, 1743 bp, Homo sapiens
gaattcggcacgagagccttcagagctgtgtcaatcctttgaatgcatggtaggactcaccctgaagagaaaccctatgagtgtgagcaatgacggaaagccttcagatctgccccacacctttgaatacgtggtaggacacacaatggagagaaaccctatgcatgtaaggaatgtgggaaacccttcggatctgcccagaaccttcgaattcatgaaaggacacaaacacacataatgcactctgtagagagaccttataaatgtaagatatgtgggaggggcttttattctgccaagtcatttcaaatacatgaaaaatcttacactggagagaaaccctatgagtgtaagcaatgtgggaaagcctttgtttccttcacttcctttcgatatcatgaaaggactcacactggagagaacccctatgagtgtaagcaatttgggaaagccttcagatctgtcaaaaatcttcgatttcataaaaggacacacactggagagaaaccctgtgaatgtaagaaatgtrgaaaagcattccataatttctcttctttgcaaatacatgaaaggatgcacagaggagagaagctctgtgaatgtaagcattgtgggaaagcattcatayctgccaagatcctttgaatacatgcaagaacacacaatggagagaaaccctatgaatgtaaagaatgcagaaaagcattcagcttgcctacttcctttcatagacatgaaaagactcacactggaaggaaacactatgaatgcaagcaatgtggcaaagctttcacttcttccagttcttttcaatatcatgaaagaacacactagggagaaaccctatcaatgtaagcaatgtgcaaaagcctttatttcttccacttcttttcaatatcatgaaaggactcacatgggagagaaaccctatgagtgtatgccaagtgggaaagccttcatttcttctagttcccttcaatatcatgaaaggactcacactggagagaagccctatgaatrtaagcaatgyrggaaagccttcagatcagcctcrcaccttcaaatgyatggaaggactcacactggagaraaaccctatgaatgtaagcagtatgggaaagcrttcagacctgacaagattctttgaatacagataatgaatgtaaacaattaactgtttataataactgtwtwctaacaaatgatattctttttaaatargaagctataatatcccatkggtgtcatgtattagatcagccttatactgttaaattgttattatttggacattgtgagtcagtataaccatgtggataaaatgccagacatctttttattcgaaaattttacttttcatgcttctgtacttacatttttatctcaaccttaatttttctttctttttttttttcccccagaaagaatctcactccaacctggacgacagagcaagactccatctcaaaaaaaaaaaaaaaaaaaaaaaagacttggccttgtggtgaggggagggcatctgtaaactcctggacctgtttttgccttacttattctctaaagactaaaatatttcctaaaatgtacaggcactgtttaccagaaagtaccttagttaaaacatataaatttgtttatgccttataaagctatattttttcaaattgctttactgagtcataggaggctaataaatttgtgtaaattgtctaaaaaaaaaaaaaaaaaaaaaaaaaaactcga

SEQ ID NO: 177 - DNA, 1447 bp, Homo sapiens
gggctgcagggtttttaattgaaaatcaaaccttgaacatcatcatagagttcatatcggagaaaaaccttacaaatgtgaagaatgtgacaaagttttcaatttcaattcacgccttgaaatacataggagagttcatactggagagaaaccatagaaatgtaaggtttgtgacaaggcattcgggtgtgattcacacctggcacaacatactagaattcacactggagagaaaccgtgcaagtgtgatgagtgtgacagagccttcagtggtcagtcaacacttattcaccatcaagcaatccatgtcatagggaaactttactaatgtaatgattgtcacaaagtcctcagtaatgctacaaccattgcaaattattggagaatgcataatgaagtgagaacttacaagtgttataaatgtggcaaatttttcagacttcgttcataccttgcagtttatcagcgaactcatactggagagaaaccttacaaatgtgatgattgtggcaaggtcttcagtcaagcttcatcttatgcaaaacacaggtgaattcatacaagaaagaaacctcacaagggtgatgattgtgtcaaagcctttatttcaggttcatgcctcattacacatcagagaatccatactagacagagatcttacaaaagtcatatgtgtggcaagatctttagtctgaggtcactccttgcaggacatcaggaaattcatttttgaggtaataatttcaaatgcaatgagtatagcaaaccatcaagcacaattgatgttagattcaaatcagcattgagttcagtttgagttgacttaacattgagttcaagtatttgttgagattaaagtgttatgttaagagattaggccaggtgcggtggctcacacctgtaatcccagcactttgggaggccaagacaggtagatcacttgagatcaggagtttgagagcagcctggccaacagaggtgagcacctttcccagtctgttttttgtttcttcaacaaaaactgatagagatttttatgggtattgtgttgaatyaaaatcacattgggttatgtaatcatttaacagtattaatttttccaaaacatcaatatgggttatatctttatatatgtttttaatcattttgatcaatgtttgtagatttcaatgtatgaatttctcacttctttccatttattcctatttcttactttaagttctctagcaaatggaagtgtttttaaattttcatttaaaattgtttattgttaatgtatgaaaattcaacgaatttttggtgctgatattgtattgtgcaaatctactgatgtgtttattagtcacagtagtattttggttgactctttgtgattttctacacagaagatcatgtcatctacaaaaaatataattttactttttctgaaaaaaaaaaaaaaaaaaaa

SEQ ID NO: 178 - DNA, 235 bp, Homo sapiens
  SITE (1): n equals a,t,g, or c
  SITE (45): n equals a,t,g, or c
ntaacaaatgtgggaaattctttaagtacagtgccaatttcatgnaacatcagacagttcacactagtgaaaggacttatgagtgcagagaatgtggaaaatcctttatgtacaactaccgactcatgagacataagcgagttcacactggagaaaggccttatgagtgcaacacatgtgggaaattctttcggtacagctccacatttgtttagacatcagagagttcacacca

SEQ ID NO: 179 - DNA, 593 bp, Homo sapiens
  SITE (468): n equals a,t,g, or c
  SITE (519): n equals a,t,g, or c
  SITE (539): n equals a,t,g, or c
ggcacgagtgtggttcataaaaagtcatctcgttatcttgggaaaataacagccagtttagagatcagagctataaaaaagcctattgattttgttctaaataaagtggcaaaaagaggcccttcgagggatgaagcaaaacatagtgattcaaaacatgatggcacttctaactctcctagtaaaaagtatgaagtagctgacgtcggtattgaagtaaaagtcacaaaaaacttttctcttcacagatgcaataaatgtggaaaggcatttgccaaaaagacttaccttgaacatcataagaaaactcataaggcaaatgcttccaattcacctgaakgaaacaaaaccaaaggccgaagtacaagatctaaggctcttgtctggtgaggaacagttaacagagttttgcttttttccccccatcgaactaaaaaaaaaatcatttgaccataatttatatctggntccattttaacacgtttgcttccatatatctcatggcaatgggaactgcangagtaatggtggcatattgnaatttaacctctttcagtggaccctttattccagtgggctttggggaaccaaaa

SEQ ID NO: 180 - DNA, 975 bp, Homo sapiens
ccgggtcgacccacgcgtccgatgtgaagggggtccatggagggctcacgtccccgcgccccgagcggccacttagcgccgtcgccgccggctttcgacggcgagctggatctgcagcgatactccaacgggccagccgtgagcgcagggtcgctcgggatgggagcggtgagctggtctgagagtcgtgcaggcgaacggcgcttcccctgccctgtatgcgggaagcgcttccgcttcaactctatccttgctttgcacctgcgggcgcacccaggagcccaggccttccagtgccctcactgcggccaccgcgcggcgcagcgggctctgctgcgctcgcacctgcgcacacaccagcccgagcgcccacgtagtcctgctgcacgcctgttgctggagttggaagagcgcgcgctactacgcgaggcccgactggggagagcccgaagctcagggggcatgcaggccacccctgccactgagggtctggcgcggccccaggctccttcatcgtccgccttccgttgcccctactgcaaaggcaagtttcgcacctcggcggagcgcgaacgccacctgcacatcctgcataggccctggaagtgcggcctgtgcagtttcggctccagccaggaggaggagctgctgcaccacagcctgacggcccacggggctcccgagcgtcccctggcggccacctccgctgcgcctccgcctcagcctcagcctcagcctccaccccagcccgaacccagatcagtcccccagccggagccggagccggagcccgaacgtgaggcaaccccgaccccagctcctgccgctcccgaggagcccccagcgcctccggagttccgctgccaagtgtgcggccagagctttacacagtcttggtttctcaagggccacatgcgtaagcacaaggcctccttcgatcatgcgtgtccggtgtgcggccgctctagaggatcc

SEQ ID NO: 181 - DNA, 2155 bp, Homo sapiens
gagcctatgccaggggtctggcgctcagggcgtggggcgcgcggggagggagaggggtcggcccagcacagcgtccgggagcgctagggccggagcagcgctgcccgccgccgtgcgtccgcgggaaggaccgcgcggcccctccgcctgcgctctcggccgccgccgcctctgcgtgggccggccgggagggcctcgggggactgactggcattttttactgtctacagaaatcagaactacctggttcccagtcctgtacttagaattctagaccacactgccttttctacagaaaaatctgctgatattgtaatttgtgatgaagagtgtgactcacctgaatcagtcaaccagcaaacccaagaggagagtcctatagaagttcacactgctgaagatgttccaattgctgtagaagtgcatgcgatttctgaggattatgatatagagacagaaaacaattcctctgagagtctccaagaccaaactgatgaagaaccgccagctaaactttgtaaaattcttgacaagagccaagctttgaatgtgactgcccagcagaaatggcctttactgagagctaatagcagtggcctctataaatgtgaactttgtgagtttaacagcaaatatttttctgacttaaagcagcatatgatcctgaagcataaacgtactgattcaaatgtgtgtcgagtatgcaaggaaagtttctctaccaatatgcttctgatagaacatgccaaactgcatgaagaggatccctacatttgtaaatactgtgattataagacagtaatttttgagaacctcagccagcacattgcagacacccattttagtgatcacctctattggtgtgaacagtgtgatgtacagttctcctcaagcagtgaactctacctacatttccaggagcacagctgtgatgaacagtacttgtgtcagttctgtgaacatgaaactaatgatccagaagacttgcatagccatgtggtaaatgagcatgcatgtaaattaatagagttaagtgataagtataacaatggtgaacatggacagtatagcctcttaagcaaaattacctttgacaaatgtaaaaacttctttgtatgtcaagtatgtggttttcggagtagacttcacacaaatgttaacaggcatgttgctattgaacatacaaaaatttttcctcatgtttgtgatgactgtgggaaaggcttttcaagtatgctagaatattgcaagcatttaaattcacatttatctgaagggatttatttatgtcaatattgtgaatattcaacaggacaaattgaagatcttaaaattcatctagatttcaagcattcagctgacttgcctcataaatgtagtgactgcttgatgaggtttggaaatgaaagggaattaataagtcaccttccagtccatgagacaacttgattattctctttaacttacagaatgttagtttaaaataataaattcatcctttttttggagatgattaaatggatgattgtaaacacaacttatgaaatctgcctttaacaagtaacttttttaaattataaaattttattggcattgctccattttctgtatataaatatatctttaatgtggtattttcaattgcgtgatagtttgtagtttcaaccactcttggtgactgtcatcctgtttcttccatattctctgatttcatgaattgaaaagaaacaaatgtattgaagaagtgagctacagttttccttccttaaccatgggtgctagtaactttttaaaactcaagacaagattagttttttatgtgtgaagtcattaaattattacacgaccagaactaaaatgcaatatacagttaagtccacggatactcccattaatgagaaataacactaggaagccactattacaggaagaaaagatttggttttcatggcagtctgtttttttaaaaaaaaatttttgagccactatctattgttgaatattttaagatgggatgagggaggaactaataagggcttacacaataaaaaataactatatcataactcaaaaaaaaaaaaaaaaaaaaaaaaaaaaaaaaaaaaaaaaaaaaaaaaaaaaaaaaaaaaaaaaaaaaaaaaaaaaaaaaaggggg

SEQ ID NO: 182 - DNA, 670 bp, Homo sapiens
gggctgcaggaattcggcacgagtcaatgtaatctctgtgggaagcgcttcatgcagcttattagcctccaatttcaccagcgaacccacactggcgagaggccctacacgtgtgacgtctgccagaagcagttcacccagaagtcctacttgaagtgtcacaagagaagccacacaggggagaagcccttcgaatgtaaagactgcaagaaagttttcacctacagggggagcctgaaggagcaccagcgcatccactccggagagaaaccctacaaatgttccaagtgtccaagagccttcagtcggctgaaattgttaagacgccaccagaaaacacatccagaagctacttctcagtgattgcataatccggtctatgccttctgcaccaagaagaagtgaatgatatttttcatcaatgttatcagatgacatttgacacatgcaagggcgtctgacacacagagggagtgccctagatatgaattgccaggatgtttgagtaaatatgtgtcctccccactgagctttgttttctgtttcattatgtccattgttttcttataggtttattttggtttgtgttgctgttcttccaataaacgatcatcttattagttttcaatattgtataacggaaaaaaaaaaaaaaaaaaaaaaaaaaaaa

SEQ ID NO: 183 - DNA, 813 bp, Homo sapiens
  SITE (15): n equals a,t,g, or c
cgggccccccctcgngttttttttttttttttttaaagccccaataattgaatgctttatagcctgaataaaactggtcatttacaagccgttgcacstwtgatatacatcaggtcatgagattmaacatattttgacttagcattattctgcatcatgcawtatyatagattagtatcagagaaccagagacagagttacttcttgtgtaaatcctatcgtgttctatagcaatggtccttgaataatagcccaagtacacacrattcatctgtgtgctttcatcctccacagtgatgtggtgatgtccagtgatttggcaggccttgataaagcctgtgtcacatacatttcatttatatgatttccacttagtatggactcactgatgttgattaatgctagaactcatgatgatggttttgccatacacagtttgtagggactctcatgaatgaactctctgatgctgtgcaaggtcagaattgtgactgaagaccttactgcacagggtgcatttgtaaggtttctctccaatgtgaattctatggtgattggtgagggaagacttctgagtgaagatcttgccacattctttacactcatgagatttcttttcagtatggattgcaagatgggcagtaaggcctgaacaccctcgaaatgctttgccacatttactacatctgtaaggcctctctccagtatgaattatttgatgtcttgtaaggtatgatgcttgattaaagaccttgccacattgattacatttgtaaggcttttctcctgtatgaattttccctctgccgaatt

SEQ ID NO: 184 - DNA, 1074 bp, Homo sapiens
ccgggtcgacccacgcgtccgcaggtggtggtagtggaacaaaatggttcttttcaagtaaagattcccaaaaattttgtttgtgaacactgctttggagcctttcggagcagttaccacctaaagaggcacatccttattcacactggtgagaagccatttgaatgcgatatatgtgatatgcgtttcatccagaagtaccacctggaacgccacaagcgtgtgcacagtggtgaaaagccttaccagtgtgaacggtgtcatcaggtaaggctcatccctgctacaataccccacacacacttttccttccccagaatcagggccaccctccactcctgcctgacaaaagagccaccagcgttactcgccataatagttaacacatcggggtgaagtgcatctgtctggccttatgcagctgatcatggggagcagcaattagaacattgtaataataataataatagcattccatatcacttactctatgccaggcactgtgagagcatactttacatagatgattttatttaatcctcacattgactccctaaggtagctgtattgtccttatttcacgtatgggaaaattgagattcagagaagttaagtttcccagggacaccgcagatcacgaacagagctgggattcagtccaacttcagagctaatgcactttggaggaagagatacaatctttgccctgggggtcagtatctgatctgatgagaatgtaagagctggggccaaaacaagacaagaacaagagatgagaaatgataatagctaacacttcctggatgcattgctaggtcccaagctttgctctgcactcttacactgaatcttcagacgctagaataaaagctccatgagggcagagactttgttcctctggttctctactctgtatctgccttgagatagatactcaataaatctttgatgaataaaaaaaaaaaaaaaaaaaaaaaaaaaaaaaaaaaaaaaaaaaaaaaaaaaaaaaaaaaaaaaaaaaaaaaaaaaaaaaaaaaaaaaaaaaaaaaaaaaaaaaaaaaaaaaaaaaaaaaa

SEQ ID NO: 185 - DNA, 2058 bp, Homo sapiens
cccacgcgtccgtctgaaggaggcgaagagctggcaagaggagcagagtgctcaggctcagcgactgaaagacaaggtggcccagatgaaggacaccctaggccaggcccagcagcgggtggccgagctggagcccttgaaggagcagcttcgaggggcccaggagcttgcagcctcaagccagcagaaagccacccttcttggggaggagttggccagtgcagcagcagccagggaccgcaccatagccgaactacaccgcagccgcctggaagtggctgaagttaacggcaggctggctgagctcggtttgcacttgaaggaagaaaaatgccaatggagcaaggagcgggcagggctgctgcagagtgtggaggcagagaaggacaagatcctgaagctgagtgcagagatacttcgattggagaaggcagttcaggaggagaggacccaaaaccaagtgttcaagactgagctggcccgggagaaggattctagcctggtacagttgtcagaaagtaagcgggagctgacagagctgcggtcagccctgcgtgtgctccagaaggaaaaggagcagttacaggaggagaaacaggaattgctagagtacatgagaaagctagaggcccgcctggagaaggtggcagatgagaagtggaatgaggatgccaccacagaggatgaggaggccgctgtggggctgagctgcccggcagctctgacagactcagaggacgagtccccagaagacatgaggctcccaccctatggcctttgtgagcgaggagacccagcctcctctcctgctgggcctcgagaggcttctccccttgttgtcatcagccagccggctcccatttctcctcacctctctgggccagctgaggacagtagctctgactcggaggctgaagatgagaagacagtcctgatggcagctgtgcagagtgggggggaggaggccaacttactgtttcctgaactgggcagggccttctatgacatggccaggggctttacagggggtaccctgtcagaaaccagcactgggggccctgccacccccacatggaaggagtgtcctatctgtaaggagcgctttcctgctgagagagacaaggatgccctggaggaccacatggatggacacttttttttcagcacccaggaccccttcacctttgagagatcttactccctcgtacatgcacaaatacacactcatgcgcacacacactcacacacatgcatacacttaggtttcatgcccattttctatcacactgggctccatgatattctgttccctaaaaactgcttctgtgtgccctgttttcatcccaagatttctcacttcatcctctcctacctggctcttttgtcccagggaggggtcctgttcggaagcagtggctgaatttatcccctgaaagtggttttggaggaaccgggatggaggaggccttcccctgtgggaatagaatcgtccactcctagccctggttgcttctgatacacagccactgcacacacacactcacactcacactcccttgtctgatgccccaaagccaattcctggggcaccctaccctctcttatttggagtttccgttggtttacctgagttttctctggggtctgcacagaggcagcagcatggacatcatggcctctcaggtcccttttggttctcagtttcattggttcctctttctgttcccccattgacttctgtgccccaccctagccttttccataaccttaggtattcagtttggaggggttttttgtatttttgaggattcctgtattctgtatcctctcctcgcatctcctcacatggaaagaaataatgtatttgtgccttctgtgaggaatggggggaacaagtggtcccaggtatccccatttccaaggcccccctccctctccaggtccccccacagcaataaaagcttccccctgatatccaaaaaaaaaaaaaaaaaaaaaaaaaaaaaaaaaaaaaaaaaaaaaaaaaaaaaaaaaaaaaaaaaaaaaaaaaaaaaaaag

SEQ ID NO: 186 - DNA, 776 bp, Homo sapiens
gtgcatgaggaggaaaaattctacaaacaagatgaatgtcgtgaaggcttcaggcaatctcctgactgcagtcagccccagggtgctcccgctgtggagaaaacatttctgtgtcagcagtgtgggaaaacttttactagaaagaaaactctcgttgaccaccagagaattcacacaggtgagaaaccttaccagtgtagcgattgtgggaaggactttgcctataggtcagcctttattgttcataagaagaagcatgccatgaaaagaaaacctgagggcgggccatcttttagtcaggacacagtgttccaggttcctcagarcagtcactccaaagaggagccctacaaatgcagccagtgtggcaaggccttccgcaatcactcattcctcctcatccatcaragagttcacactggagagaagccatataagtgcagggagtgtgggaaagccttcaratggagttccaatctctaccgacatcagaggattcactctcttcaaaaacagtatgattgccatgaaagtgaaaagactccaaatgtggagccaaaaatcctcactggtgagaaacgtttttggtgtcaagaatgtgggaaaacctttacacgtaaaagaacccttttagatcataagggaatacacagtgggagagaagcgctwtaaatgtaatctatgtgggaaatcttatgatmgaaactatcgccttgttaaccatcagagggatccactctacagagagacctttcaaatgtcattggtttggaaaa

SEQ ID NO: 187 - DNA, 1565 bp, Homo sapiens
ccgggtcgacccacgcgtccgggctgcttccaagacccagggggctgtcgcccgaatgcaggaagaccgtgatgggtagctgcagcacagtcgggggtgtaggttatggggacagtaaggattgtatcctggagccgctttccctgccagaaagtccaggtggcaccaccactttagaaggttctccatctgtgccttgtattttctgtgaagaacattttcctgtggctgaacaagacaaacttctgaagcacatgattattgagcataagattgtcatagctgatgtcaagttggttgctgatttccaaaggtacattttatattggaggaaaaggttcactgaacagcccatcacagatttttgtagtgtaataagaattaattccactgctccatttgaagaacaagagaattattttttgttatgtgacgttttaccagaagatagaattcttagagaagagcttcagaaacagagactgagagaaattctggaacaacagcagcaagaacgaaatgataccaattttcatggcgtttgtatgttttgcaatgaagaattccttggaaacagatctgttattttgaaccacatggccagagaacatgctttcaacattggattgccagacaacattgtaaactgcaatgaatttttgtgtacattacagaaaaagcttgacaatttgcagtgcttgtactgtgagaagaccttcagggacaaaaatacacttaaagatcacatgaggaaaaaacagcatcgtaagattaatcctaagaacagagaatatgacagattttatgtcatcaattatttggaacttggaaaatcgtgggaagaagttcagttggaagatgatcgggagttgctggaccatcaggaagatgactggtctgattgggaagaacaccctgcctctgcagtctgcttattttgtgaaaagcaagcagaaacaattgagaagttgtatgtccacatggaggatgcacacgaatttgatcttctcaaaataaagtcagaacttggattaaatttctatcagcaagtgaaactggtcaattttattcggaggcaagttcaccaatgctagatgttatggctgccatgtgaagttcaaatccaaagcagacttaagaactcacatggaagaaactaaacacacttcgctgctccccgatagaaagacgtgggatcaactggagtattattttccaacctatgaaaatgacactctcctgtgtacactatctgacagtgaaagtgacctgacagctcaggaacaaaatgaaaatgttcccatcatcagtgaagatacatctaaactgtagtgctttgaaacaaagcagtattttgaaccagttgctactataagagtacttgaaaacctataagaaactaccacagaagcaatttttcatgtttttctcctatgagacagatatgaaagaacaatttaaatttgaacatcaacaacaagattgggccttggtggaaataaacttttcaaaaatgaatgttcttttcaaaaaataaagtagaaaaatgcgcaaaaaaaaaaaaa

SEQ ID NO: 188 - DNA, 2732 bp, Homo sapiens
ggcacgagactccatctaccagtcaaagttggttacaaaggcatatgctgacacacagtggagacaaacctttcaagtgtgttgttggtggctgcaatgccagctttgcttctcagggagggctagctcgtcatgtacccacacacttcagtcagcagaactcctcaaaagtttctagccagccaaaggccaaagaagaatctccttctaaagctggaatgaacaaaaggaggaaattaaagaacaaaagacgacgctcattaccacggccacatgatttcttcgatgcacaaacactggatgcgataagacatcgagccatatgctttaacctctcagctcatatagaaagtttagggaagggacacagtgttgtttttcatagtactgtaatagctaagagaaaagaagattctgggaagatcaaacttttgcttcattggatgcctgaagacattctgcctgatgtgtgggtgaatgaaagtgaacgacatcagttaaaaactaaagtagttcatttatcaaagctacccaaagatactgccttgcttttggacccaaacatatacagaacaatgccgcagaagaggttgaagaggtaaaaaataaataaatacataaaaagcaaacaagcggggacacctgcagtcttagtcactgacaatgggtttagggaaagttgcacattagagtcaaccccttcttttttttttttttttaaatccagtatttaggataatatttatgcttagtgtaaacattctgtgaatgaagtagactcttcggtggaatatattaatatattactgtatatccacattttcatggaatggtactgtgggagactgagcaaacactcttttggcaacttagtagaacagcttcttaaaggctttgcatgcttgctgctttaagctgcttttttttttcttttcttccctttagtgatttcagtagtttatattggaaagaaaaacaattacaacatgtgcccttacaaataccaaaagcactgtaaggatatttgtcttgacagtgtttattgatttgaagtcatattaggaaatatttagacaatgaaaattatcaagagataatttacctttcaattatgataaatagatgtgattggttgccatttgtgttcttttgcagaactctgataagaaaagtgttcaatttgtatttaagcaaacagtgaacgacgtttgcaatcaactaaaaattcgtctatcgaattagggctgaaaattactgttaaagagtgttgcagtatgtctggtggctcccttttcaggactagggctttctcatggagtacagtatgttaatatttacctatataactaatctgttaacggtttttgaaaaacctttcaaattatttgaataatcttcatattttcatttaacctatatgactctaattttttttctgaggaaatcatttggtttttgagttgttttttcttaatgtaagaaaaattgtattttttttacaagtatcttcaaactgaatcttttatgcaccaaagttggtcttgaaaaggaaaataaaatcactttcttgcttggtaagcaagaagccatatcgattttttttaacttacagaaatggaaatatgtgtaacttgttagtattgtattaaacaaatgttgcatagagataatagaacattgcttgtaaataattcagcagatttgtaatatatttttatattttgaaatgtactgtagatgttttctagaggcatgaaagttaaatgtatatattatggtagaaataatattgaaggatattgtacttcactagtgctgccagaggaattgttaataaaagcaccttctttaacaataaatgtctttcacagacttaagggactatgtactactgttaatatctctaagaacaaaacacattgaacatccttccagaaagtctttgagggaggacctatacccataatagaattatggcactcatttctgacagtgatcaagaaatcagttatttccttactgttggaaggacattgtaaagtatgtggttatatgcagtgaaactgcagaaaatactcctggttgaggagttttcactttactacagtgatataaaaaccagcagtttttacactaaattttttaaagaaatattagacaaaaatatagaattaaaacctttggttccaaaatgggaaaggttccacgatacataaatcatttctcatttgctttaaaaaatttaaaagtgtaaaaattatgagagactttattcgttaacaatgggggtaaagagctatatacatgaaaatgagtcttataaaattaagtgaagtgcaaataaaagcactgctactataagacattctggaatggttgtttaataagggtattatccatttgatctatagcaatgtgattttatttttaaaaagaaaagcagtgtgttttctttttttgttgttttcttttgcttaagcacttcatcaattgctttattctgtatctgcgaagtaatctgcaatctcttttgttctttttaaaatttgatttgttataaaattgccaaatagaagtgtttcagatacatagtttgtacctgtatttttattttattgcctcatgttcttgtaagtcattcctaattgaccaatgattgtagaccttgcttgagtattttttctaataaaacaaagcaaatcacatttagcttcaaaaaaaaaaaaaaaaaa

SEQ ID NO: 189 - DNA, 2687 bp, Homo sapiens
ggcacgagaaaagtcacacattagagaacatcatagagttcatataggggtgaaaccctttgaatatggaaaaagtttcaaccgtaattcaaccctcccagtgcatcagagaactcatgcaacagataaatactctgattatcacccatgtacagagacattcagctaccagtcaactttcagtgtacatcagaaggttcacataagggcaaaaccctatgagtataatgaatgtgggaaatcctgctctatgaattcacacttgatttggcctcagaaaagtcacacaggggagaaaccctatgaatgtcctgagtgcgggaaagccttcagtgagaagtcacgcctaagaaaacatcagagaactcacacgggagagaaaccatacaaatgtgatggatgtgataaagctttcagtgcaaagtcaggcctaagaatacaccagagaacccacacaggggagaaaccattcgaatgtcatgaatgtgggaaatcttttaactataagtcaatcctcatagtgcatcagagaactcacacaggggagaaaccttttgaatgtaatgaatgcgggaaatctttcagccatatgtcaggcctaaggaatcaccgaagaactcacacaggggaaagaccatataaatgtgatgaatgtgggaaagctttcaaactgaagtcaggcctgaggaaacatcatagaacacacacaggggagaagccctacaaatgtaatcagtgtggaaaagctttcggtcagaaatcacaactcagaggacatcatagaattcacacaggggaaaaaccctataaatgtaatcattgtggggaagctttcagtcagaaatcaaacctcagagtacatcacagaactcatactggggagaaaccctatcaatgtgaggagtgtggaaaaacattcaggcagaaatcaaatctcagagggcatcagagaactcacactggggagaagccctatgaatgtaatgaatgtggaaaagctttcagtgagaagtcagtcctaagaaaacatcagcgaactcacaccggggagaaaccatataattgtaatcagtgtggggaagctttcagtcagaaatccaatctcagagtacatcagagaactcacacaggggagaaaccctataaatgtgataaatgtgggagaactttcagtcaaaaatcaagccttagagaacatcagaaagcccacccaggggattaaatgtatgcatataaagaatacgaaaaaactctgagctggaaatcaaacctcacaatacataaatgaacacacaggagagaactgttaacatagtgagcactggaatttcctctacaatttcagcctccaccaaatatcaaagaatagaagataaattgttgaaatctattttatatgggcattctttcagccagagcccagtcttctatggatatacagaactcacacagcaaagaaaccctataaacataatgaatatggaaaatactcttgcgaactcactcctcagaaaactcacgctgcagaaaagctctgagaaagtaataaaaatgtgaaaactttgtgccaacaatcaaaactcattcaccatcagagaaatcacacaatgacaaaagctagaatataataagtgtgtgataaactttaatgaaaagtcagtacagcagaaaatacattcaagatagagacctcatagtatattaaaacaaacaagaaatgaagttaatggatgtgggaaattcttctgccatgacaaccctcattttaacctacacagaggtaatccctatatgtcgtataataactattgaaatgttcactagtaatcattttcacttctccctcatgccacacctggcctaaatttctcaaccactctctcatctaaacggggtcatattgttaccctctagctagtggaatatggggtcagtgacaggtcttaaatacatcagtcaaattctcaatattttcttctatccctcattagaatggaatggaggaaaaccttggactcaggctctgatgatggaaagtacaagatggtaggaacccgggtcagagaaggatcctgtggcatggagttttctcctccctgtacacagttggacttcttgcagtgaggaaataaatgtgttccctgctgaacttctaaaggtttgggtatacttgatactgacagaaactcaacaaccctcacataataaaacttaggagtatgatttttcaggacatctgaactcagtgtatgtcagaaaagtcacataggacaaatctcggacagcatcctgaatgaccatggcttttatccccaaagtcttcctcatcagacaggtaatatcataagaaatctgacattttaacaaatataggaaattcttcacacacacagacacacactcacacatacacacccaaagtctcattaaatatatgataatttagttttgaatgtgtaaaagttttcaacaaattatcatattttatatcagagcttgttacaaggagaaaatctatcaatttgagaaaggtaagtaatagcctttatctagatattgctttatcagaactgttgtttcacatataatatcaaaacttttaatgaaatataagacattcactataataaaaagcttaaaaagaacaaaaaataaactgcataaactgaaaaaaaaaaaaaaaaaaa

SEQ ID NO: 190 - DNA, 1828 bp, Homo sapiens
ccgggtcgacccacgcgtccgagggattttacacggtgtatcgtaatgtttttgaaatgattgccaaggaagaactagaatctgtgttagaggaagaggttgatgatttcccaacttttggagactcccagagtgactatgatacggtagtccatcctttctacgcttattggcagagtttctgcactcaaaagaattttgcatggaaggaagaatatgatacacgacaggcttcaaaccgctgggaaaaacgagccatggaaaaagaaaacaaaaagattcgggacaaagcaaggaaagagaagaatgagcttgtccgtcagctggtagctttcattcgtaaaagagataaaagagtgcaggcgcatcgaaaacttgtggaagaacagaatgcagagaaggcgaggaaagccgaagagatgaggcggcagcagaagctaaagcaggccaaactggtggagcagtacagagaacagagctggatgactatggccaatttggagaaagagctccaggagatggaggcacggtacgagaaggagtttggagatggatcggatgaaaatgaaatggaagaacatgaactcaaagatgaggaggatggtaaagacagtgatgaggccgaggacgctgagctctatgatgacctttactgcccagcatgtgacaaatcgttcaagacagaaaaggccatgaagaatcacgagaagtcaaagaagcatcgggaaatggtggccttgctaaaacaacagctggaggaggaagaagaaaatttttcaagacctcaaattgatgaaaatccattagatgacaattctgaggaagaaatggaagatgcaccaaaacaaaagctttctaaaaaacagaagaaaaagaaacagaaaccagcacagaattatgatgacaatttcaatgtaaatggacctggagaaggagtaaaggttgatccagaagatactaacttaaatcaagacagtgccaaagaattggaagatagtccccaggaaaatgtcagtgtcacagagatcattaaaccatgtgatgatccaaaaagtgaagctaaaagtgttcctaaacccaaaggaaagaaaaccaaagatatgaaaaaacctgtcagagtacctgctgaaccacaaacaatgagtgttcttatcagctgtacaacctgccatagtgaatttccatctcggaataaactttttgaccatctaaaggccacaggtcatgcaagagcaccttcatcatcgtctttaaacagcgcaacaagtagtcaaagcaagaaagagaaacgtaaaaacagatagagattctgcctgtgcttttgtttgactgtctctagattttgaaaccaaaaaactgaactgaaatcatctaaagagttaaaatttcagtgatctgcaattaattacattgtggaagattattttttatcttgtaaaaacacttttttggtttaatatatatttttaaaacatttcactagtgattgaattctacttttgccatctgaattgacttgaatgtcttaaaacaggtaaatactgtaaagtgtgtattcttgatgtttattggctcatgtggacagaaatgtacagggagaattacattattttaacccacagaagtgcaactttctgctttattttctgaatttcccattacttttacttaatgcttttgtgttttgttaatacttcataatatgtgaaaaactcggatcttttaaaaagcatcatagatcctttttccatatgaccctggttccgattttaaaaattatttttaaataaccgaaaaaaaaaaaaaaaaaaaaaaaaaaaaaaaaaaa

SEQ ID NO: 191 - DNA, 2716 bp, Homo sapiens
ccacgcgtccggtaaccagttaacttgtggttgccgtgagagttacatctgtaaagtcaacagaaaagaagattatagcagatgtctccaaatcatgctggataaaggaaaactgtggtttcgctgcagtttatgttcggcaacagcacagaatttaaccgacatgaacactcatatccatcaagtgcacaaagaaaagagtgatgaggaggagcagcagtatgtaatcaagtgtggcacctgcaccaaagcatttcatgatcctgagagtgcacagcagcatttccatagaaaacattgcttcttacagaaacccagtgtggctcattttggatctgaaaaatcaaacctgtacaagtttactgctagtgcctcacatacagagagaaaactgaaacaggcaataaactattcaaaaagtttagacatggagaaaggagttgagaatgacctaagctatcagaatatagaggaagaaattgttgagcttccagatttggattacctgcgaaccatgactcatatagtctttgtagattttgataactggtcaaacttttttggtcatctaccagggcatctaaaccaaggaacatttatttggggctttcaaggaggaaacaccaattggaagcctccgctcaactgtaagatttataactacctgaacaggattggatgcttcttccttcatcctcgctgtagtaaaagaaaagatgctgctgattttgccatatgtatgcataatgtgacagtgatgataacatgggtgccaaaaatacttcaataggagaagaatttatatccacagaagatgtggaattagaagaagctattagaagaagtcttgaggaaatgtaattaaagatattaccacacaacatcaagtggccttgaagagactgagataacgaattcttgagtttgttttctaaaggagaccagaaatccactattacaaatgtatttgaaaacatgtttttgctttcatatgttcaaaatctgatctttgttttgtatttttgtgctaatgtgcaaacatgtacagaagaaatagaatacatgttcatgcaaatataaattatgtattctaatataggtgtaacagtttcccagttaactttgaatttatatatttagatttaaaggattaaaaaaaaggaaagctcttgacagttgtttcccaaatagcattagttctttaattttatttgtactgtacaaatgatgctagtttatttttttagcagtgaaaatgaatataaaaaaggtgacataggtcaagttttccataaattctacttctcatgtggcactattatataatacctttgagatctttgtttatgtttattagaagagggtaatggaaactgatcatggaaacatttaaaattttatcagcaatgttctttgtgggtgccatgcatatgtaaattattgctttaattagagcagcacattgctaaaataaaaaatacaccttaatttttaagaaataatttaaatgaaacaatttccattccttttacctgcttagacttttatgtgacttgtatggtctcctggttaaagggaatggtgtcagaatatttgcataaaattatttttcataacagtccttttttatatattggtgtaaacataatattcttcaagaaataatgttgaaagcctactcaggaataatcttccttaactctttaaatttttatttcatgtgaagtgttttcagtttagttattcactgaattgtcagtttccttcatttggtattacatatttaattcttaaatattgaggccccattgtgagtaataaaaaatacgacataagtagaagactaagaagggcttgtcatattatctttgtgtatatgcttcatgttatttaaccagaaatgtcttatctctaaaaatttttagtagtaattatttaccaaacttaaaaacatttctataaatataaagcttttctttatatttaagacaaaatataaaggctagaatttggttccttctctgtaacactaaatattttagtgtgaaattgaattttttttattactatagtcttttcaatctataatttgtgtttttaatttcttgatatgtcacttctgttcctccctgcttgcattttttaaaaactagacattgtggcttgagaatttatcaatcatctttccgaaatgaccacattgtgcttttagtttgtatgtttaagtggtcaagcaaggctctaggaggtagtcactgagctggaccttaaacacatctgcaggagctcacaaaatgggagcaaaagaggcattccagaaagaagagtagttaagcagatgtgggggcagggcaagaggagacagcaccttgttgccagagattctacacaaaggtgtgatggacactgatgctctattaagaagcttttgtggtgtgtgtggtagagaataattaaggcttctgataagacaggaaagggatatttcatcatgactgttaagaaaaggtaactgggttgtttaatgttttaattgataattgtcactgatcgtatttctacttgttaaataattaaaaatcatcttaaaattcatactttgactttaatttagacacaaggagatgtaatcgctgtgtaacatcagagaaagctatatggattatcgtcagaagtaaatgtttctaacattgaaaaaaaaaaaaaaaaaaaaaaa

SEQ ID NO: 192 - DNA, 1658 bp, Homo sapiens
ccacgcgtccgattgctcgtttgtttctgctttcaggcacaatttggatcgccatatgcaaacccaccacggacaccataaaccattccgatgcaaactctgctccttcaagtcctcctataacagccggctgaaaacacatatactcaaagctcatgctggtgagcatgcctacaagtgttcttggtgctcattctccaccatgacaatcagccagctgaaggaacactccctcaaggtccacggaaaagccctgaccctccccaggccacggatcgtcagtctcctctcctcacactcccaccactcctcccaaaaagctaccccggctgaagaagtggaagactccaatgactcatcatattcagagcccccagatgttcagcagcagttgaaccactatcagtcagctgccctggcaaggaacaacagccgtgttagccctgtgcctctttctggggctgctgctggcactgagcagaaaactgaagccgtgcttcactgcgaattctgtgaattctcctccggctacatccagagcatcaggcgtcattaccgggacaagcatggtgggaagaagcttttcaagtgcaaagactgctccttttacacaggctttaaatctgcttttactatgcacgtggaagctgggcactcagcagttcccgaggagggccccaaagatcttcgctgtcctctctgcctctatcacaccaaatacaagcgcaacatgattgaccacatcgtgctgcaccgagaagagcgtgttgtccccattgaagtttgccggtccaaactgtccaaatacttgcagggagtagttttccgctgtgataagtgtaccttcacctgctccagtgatgagagcctccagcaacatatagaaaagcacaatgaactgaaaccttacaaatgccagctctgctactatgagaccaagcacacggaggaactggacagccaccttcgggatgagcataaggtaagccgtaactttgagctggttggacgggttaacttggatcagctggaacagatgaaggagaaaatggagagctccagcagcgatgatgaggacaaggaagaagaaatgaacagcaaggctgaagacagagagctgatgagattttctgaccacggggctgctcttaacactgagaagcgttttccatgtgaattttgtggacgggcgttttcacagggctctgagtgggaaagacatgtgctgagacacggcatggcattgaatgacaccaagcaggtgagcagagaagaaatccacccaaaagagatcatggagaacagtgttaaaatgccctccatagaggaaaaggaagatgacgaggccattgggatagacttttccctaaagaatgaaacagtagccatctgtgtagtaactgccgacaaatctctcctggagaatgcagaggccaaaaaagaatgagcgtttggtgaaattcttaatcaaaccttacttgaacagtgatgaaaaagtgggagggctggcttgggctgagaagggagggacagaaaagagaagacagaacaaagctgctttttaggactgaacaatctattttcaaagcactggtacctgtgtgagtgagtatgtaaattaaagttatttaaatggttggaaaaaaaaaaaaaaaaaa

SEQ ID NO: 193 - DNA, 799 bp, Homo sapiens
ccacgcgtccggtctccagtgaagtctcaactttgcataaaagaaaaggccggcagtccaactggaatcctcagcatcttctgattctacaagcccagtttgcctcgagcctcttccagacatcagagggcaaatacctgctgtctgatctgggcccacaagagcgtatgcaaatctctaagtttacgggactctcaatgaccactatcagtcactggctggccaacgtcaagtaccagcttaggaaaacgggcgggacaaaatttctgaaaaacatggacaaaggccaccccatcttttattgcagtgactgtgcctcccagttcagaaccccttctacctacatcagtcacttagaatctcacctgggtttccaaatgaaggacatgacccgcttgtcagtggaccagcaaagcaaggtggagcaagagatctcccgggtatcgtcggctcagaggtctccagaaacaatagctgccgaagaggacacagactctaaattcaagtgtaagttgtgctgtcggacatttgtgagcaaacatgcggtaaaactccacctaagcaaaacgcacagcaagtcacccgaacaccattcacagtttgtaacagacgtggatgaagaatagctctgcaggacgaatgccttagtttcccctttccagcctggatcccctcacactgaacccttcttcgttgcaccatcctgcttctgacattgaactcattgaactcctcctgacaccctggctctgagaagactgccaaaaaaaaaaaaaaaaaaaaaaaaaaaaaaaaaaaa

SEQ ID NO: 194 - DNA, 2294 bp, Homo sapiens
  SITE (2292): n equals a,t,g, or c
acccacgcgtccgccttgtgccgcgcgctcgagcgtgcttggcgcctgcgctggacgactcggccggtagtggagatgtccggccggtctaagcgggagtctcgcggttccactcgcgggaagcgagagtctgagtcgcggggcagctccggtcgcgtcaagcgggagcgagatcgggagcgggagcctgaggcggcgagctcccggggcagccctgtgcgcgtgaagcgggagttcgagccggcgagcgcgcgcgaggccccggcttctgttgtcccgtttgtgcgggtgaagcgggagcgcgaggtcgatgaggactcggagcctgagcgggaggtgcgagcaaagaatggccgagtggattctgaggaccggaggagccgccactgcccgtacctggacaccattaacaggagtgtgctggactttgactttgagaaactgtgttctatctccctctcacacatcaatgcttatgcctgtctggtgtgtggcaagtactttcaaggccggggtttgaagtctcacgcctacattcacagtgtccagtttagccaccatgttttcctcaacctccacaccctcaagttttactgccttccagacaactatgagatcatcgattcctcattggaggatatcacgtatgtgttgaagcccactttcacaaagcagcaaattgcaaacttggacaagcaagccaaattgtcccgggcatatgatggtaccacttacctgccgggtattgtgggactgaataacataaaggccaatgattatgccaacgctgtccttcaggctctatctaatgttcctcctctccggaactactttctggaagaagacaattataagaacatcaaacgtcctccaggggatatcatgttcttgttggtccagcgttttggagagctgatgagaaagctctggaaccctcgaaatttcaaggcacatgtgtctccccatgagatgcttcaggcagttgtactttgcagtaagaagacttttcagatcaccaaacaaggagatggcgttgactttctgtcttggtttctgaatgctctgcactcagctctggggggcacaaagaagaaaaagaagactattgtgactgatgttttccaggggtccatgaggatcttcactaaaaagcttccccatcctgatctgccagcagaagaaaaagagcagttgctccataatgacgagtaccaggagacaatggtggagtccacttttatgtacctgacgctggaccttcctactgcccccctctacaaggacgagaaggagcagctcatcattccccaagtgccactcttcaacatcctggctaagttcaatggcatcactgagaaggaatataagacttacaaggagaactttctgaagcgcttccagcttaccaagttgcctccatatctaatcttttgtatcaagagattcactaagaacaacttctttgttgagaagaatccaactattgtcaatttccctattacaaatgtggatctgagagaatacttgtctgaagaagtacaagcagtacacaagaataccacctatgacctcattgccaacatcgtgcatgacggcaagccctccgagggctcctaccggatccacgtgcttcatcatgggacaggcaaatggtatgaattacaagacctccaggtgactgacatccttccccagatgatcacactgtcagaggcttacattcagatttggaagaggcgagataatgatgaaaccaaccagcagggggcttgaaggaggcgtctagggctttgctcccaagggctgtggctgatgatggtaaataagaacacagaagctgtagctgaacacaggctggctggtgggcttcctaggccagcccagcttgtatgggttctggctacaccagagcaccaagagcccacttgcctgggatggccccacactgtcactcagctgttctttgatcatttttttctagattgatgctcctttctcccatgcattgagctcccatctagcttcagcagggcagaacccttctccagatgtgtgtaacttatgtcttgagtatctgggagtagttgaagaacagataattccttccaaacatcaagccttgggattcttggagcaagcagaaagccagtaacttcgctctgttagaggtggaggattttcctatggttccccccatttcctgatttgtatttttagatggattaaatagtctcctgtttttaaaccaaaaaaaaaaaaaaaaaaaaaaaaaacccggggggggccccggancc

SEQ ID NO: 195 - DNA, 580 bp, Homo sapiens
  SITE (475): n equals a,t,g, or c
  SITE (525): n equals a,t,g, or c
  SITE (543): n equals a,t,g, or c
  SITE (559): n equals a,t,g, or c
  SITE (573): n equals a,t,g, or c
attcagatcatggcagtggcattataaagagagacacaaaagcttgctctctctctctgccatgtaagactaccacacaaagactgccatctgcaaaccagaagcaggtgggctttcctcagacaccagatctgcctgcaccttgatcttggacttgccagccttcagaactctaagaaagaaatggtggcatggcttggtctaagttggaaggcctgagaaacaagcacatggtggaactgagttcaaggataaagacttgagaatacctgctcagtggactgagtagggaagatcaaccctcaatgtaggcaggcactatccaatcacctgagggcccagatggaacaaaaaggtggaagaagggtgaattctctcttccagagctgtgacacccttctcatgcccttgtaccacacaactctaggtcctttggcctttggactctgacacttgcaccagtggccctctgggntctcaaagctttagctgtggtcttagttacaccatgtgctccttgttctnaggcttccaacttggatnaggcatgcaacggttntttgatctcagttnagatgga

SEQ ID NO: 196 - DNA, 514 bp, Homo sapiens
ggcacgagccaggactccacagacacagaaagcaaccacgaagatcgggttgcgggggtggtatccctccctcagggtcccccaccccagccacctcccaccattgtggtgggccggcacagtcctgcctacgccaaagaggaccccaagccacaggaggggttattgcggggcaccccaggcccctccaaggaagtgcttcgggtggtgggcgagagtggtgagcctgtgaaggccttcaagtgtgagcactgccgtatcctcttcctggaccacgtcatgttcactatccacatgggctgccatggcttcagagacccttttgagtgcaacatctgtggttatcacagccaggaccggtacgaattctcttcccacattgtccggggggagcataaggtgggctagcaacctctccctctctcctcagtccaccactccactgccctgaytacaggcattgatccctgtccccaccatttcccaaggagttttgstttgtagsccttgatta

SEQ ID NO: 197 - DNA, 1817 bp, Homo sapiens
ggcacgaggggggactccagccccggcttccttgcctgggggtagcaaggaagaggaggagaaagccaagcggctgctctactgtgctctgtgcaaggtggctgtgaactccctgtcccagcttgaggcacataacaaaggtactaagcacaagacaattctggaggcccgaagtgggctcgggcccatcaaagcttaccctcggctggggcctcccaccccgggggaaccagaggctcctgcccaggaccgaactttccactgtgagatctgcaatgtcaaggtcaactcggaggtccaactgaaacagcacatctccagccggcggcaccgagacggcgtggccgggaagcccaacccactactgagccgtcacaagaagtctaggggcgccggggagctggcgggcacgctgactttctccaaggagctgcccaagtccctggcgggcggcctgctccccagccccctggcggtggctgcagtgatggcagcggcagcaggctcgccgctgtccctgcgcccggctccagccgcacctcttctccagggaccgccgatcactcaccctctgcttcacccggcccccggacccatcgaactgcgcacggacccatcctcttctccccgtactgacctcaaccctgaacccctcccattcaactccccacctccagccgggacccaggcgtccgggctcccagcccgcccctcctcccggcactccctaaatgatctctccttccccccccccaccccgagatacggggttccaggaaaggggaggggtagcgggggaggggggcttcagaagggggggaacaccccagatctcagggaaccccgccccctgcctttccctctcccctagaaaagggggggccgtctcacccccgagcccccttggagacaccccccctcccaaaagccatgtccatccagcccttccccccaaacctagcacaaaacggggttcacaagccatggtcggggtccgggggggacagaaatggattttcttggcaataagcggactctgggactccggctccctaccccaaactgaagcgcttccgtgaacacccccgtcctccgtagggggaggggagcaggcgggatcctgggtccctcataagcactttggttttaccgcctgcaacctcactgtgcccgccccgcaccatgccctagccccaggtctagccgggcccattgcagggggcagcacttgggggcatctccggcacttgggtgggaccaaggagatgccaccatagacctttccctcgccttcttcctccctagtccgggttccattcttttcaccagcacccatcgcccaaggggtaccgaggggggcaaggggtgtccagtccaagcccacccccgcctcgccttccgcaaaactgtgagcaaaaagcaatagaagcctcgcccccgcccttccccttcgcaggattcgccgagtctgtagcctccccgatccaagttcctagacctcatggctgtcccctcccaccagtcacctccactgcacaactcgggcgggggtgtgacacctctcccccacccccgactccgtggtttccgtatcgtcaacccttcagccgccgacccgggaggggtctggcctacactggtcttccccttcccatcaactctttctgcttgacaatgtagcaacccaggccccccacccacggtcctcccctttttcctctccctgacaataaagtctgaatttgttctgccaaaaaaaaaaaaaaaaaaaaaaaaaaaaaaaaaaaaaaaaaaaaaaaaaaaaaaaaaaaaaaaaa

SEQ ID NO: 198 - DNA, 1999 bp, Homo sapiens
ggcacgagaaagctttcagcacaaggtcctctctcactgggcacaatagcattcatacaggggagaaaccttatgaatgtcacgattgtgggaaaaccttcaggaagagctcctatctgacacagcacgtaagaactcatactggagaaaaaccctatgaatgtaacgagtgtgggaaatccttcagcagtagcttttctcttactgtgcacaagagaatacataccggagagaaaccctacgagtgcagtgactgtggaaaagcctttaataatctctcagctgtgaagaaacacttaagaactcacactggagaaaaaccctatgaatgtaatcattgtgggaaatccttcacaagtaactcctatctttctgtgcacaagagaatacataatagatggatatgaattactgcaggaacttctggaggaaagcactcattgatctttcatccctaagatagtttgagagagctcacactggatatataagttatttgttgcagcataacaaatgatccccgcaaattttgtggcttcaaacacgaaatgtttattctctaacaatttctacagatcaggaattcaagaacagcttatctctgtagttacactgcaggatctctcatgcctttacttacaatcaagatgtttttcaaagctatagtcatctaacatctttactgatgaacagtccacttccaagatgacttattcacatgcctggaaagttgatgttggttgttgtcaggggaccttcagtcattaccatgtaggcctctttacaaggcccagctccttgacaatttggcaataagttctcgccaaggttagtgatccaagagaggaccaatacagaggccaaaatggcttttatgacctatcctcaggaggactgctaagctttcacttatttcctattgtgttggtctcacaacacaccaatcctgatacaatgtgagagactgcagaaggtatgaataccaggaaacagataactcagaagcatctgggaaatttgccatggaattaatgaagaaaagccctcagcacatcatccttctactctaatcaatatgaaatagcattcagtaactcctattaattcactctgaagagaaaccttttgaggacaatctgtatggtaaagctctcagctcgaattctcaccttcatgggcccagaagattatgtactgagagaatcctgaagaatggaacagctgtagaaagccttcagtgctatcagcagggattcatgtgacagctcacactaagggagaaaacctgtgaaggtctcagaaggcttcagtgacagtcatcccttaagacacactggaaatacacaatggaacaacactcagaaatgcggaataccctacagcaaaagtgttcacattactgagcaaactatagtgtggtattctgcagtgactatgggaaagccttgaatgttctatcggtttttaagggacttgagaattaattctggagagaatgccccattgaacatcatcaatattggagagctttctgtttttctacatttgttaggaaacttgtgagcattcacactacagagaaacttgaaatataaagaagaagagaaagccttcagtgatgcctctgtgttagggaaaatatggaacttctccctggatgcaaaacctatgagtatattaatattggaaaatttttcagtgattcttctctttcttgtatatgagagaacttatatggagaaacccctaggaatgtaatcagtgttaggatgcctcagcctgaactcttcactgagtggccacaattttcactgggaacaaaaagtataatcactgttttgagtgtgggatatcctttatcagtgtctcatctgtagattggactgctggctcattaatttttttagtctttttttcttttaatataaacatttgtgtatagctgttccctaaaataaacattaacatatttcataattttaaaaaaaaaaaaaaaaaa

SEQ ID NO: 199 - DNA, 474 bp, Homo sapiens
  SITE (8): n equals a,t,g, or c
  SITE (9): n equals a,t,g, or c
  SITE (11): n equals a,t,g, or c
  SITE (16): n equals a,t,g, or c
atttcggnncnaggcntgggaaagcttttaatcaacaatcacatctttcacgtcatcgtagacttcatactggagagaaaccttacaaatgtgaagcatgtgacaaagtttttggtcagaaatcagctcttgagtcacataagagaattcatactggagagaraccatacagatgtcaggtttgtgacacagctttcacgtggaattcacagctggcacgacatacaagaattcacactggagaaaaaacttacaagtgtaatgagtgtgggaagaccttcagttacaagtcatcacttgtatggcatcgtagacttcatggtggagagaaatcttacaaatgtaaggtttgtgacaaggctttcgtgtgtcgttcctatgtggcaaaacatactagaattcacagtggaatgaaaccttacaagtgtaatgagtgcagcaagaccttcagtaacaggtcatcccttgtatgcc

SEQ ID NO: 200 - DNA, 2260 bp, Homo sapiens
ggcacgagcacacgcctggagccgagggtctgtgtcaagagcggcaggggctgcaggagataagagaaacgggctgccgtggggtgtgtgtaggcttcagagacatgggatcacggaagactgaagcagaaacagtggattaagacttcctgagcgatagctggcactgccttccccacaatggcagaggtggtggctgaggtggccgagatgccaacacagatgtcaccaggggcagtggagatgtcaacacctatgtcggcagagatgatggagatgtcaacagaagtgactgagatgacacctggggaggcccttgcctcatccctcttcttccagcatcaccagttcatgtgctctgagtgtggcagcctctataacacactggaggaagtcctctcacaccaggagcagcacatgcttgctgtctcagaggaggaggcactgaccacacagaatgttggcctggagccggagctggtgccgggtgctgaggggcccttccagtgtggtgaatgcagccagctcatcctctcccctggggagctcctggcccaccaggatgcccacctccgagagtctgcaaaccagatccaataccagtgctgggactgccaggagctgttcccctcgcccgagctgtgggtggctcatcgaaaggcccagcacctttctgctacggtagctgagccaccagtgccacctcctttgcctcccccaacaccactgcctccaccttctcccccatccgaagtcaagatggagccctatgagtgtcctgagtgctctaccctctgcgccacccctgaggagttcttggagcatcagggcacccactttgactccctagagaaagaggagcgcaatgggttggaggaggaggaagaggacgatgaggaggatgaagaagatgatgaagagatggaggatgaggaggccatggcagaggtcggtgatgatgctgtgggaggtgacgagtccacagctggctgggctcagggctgcggggactgtccccagcaccagccctcagcaggggctcgccggcaacaccggcggacggctcacagcccggcatctgccacccaccccttccactgcagccagtgtcagcgcagtttcagctccgccaaccggctgcaggctcatgggcgggcccatgttggtggcacacatgagtgtacaacctgctccaaggtcttcaagaaagcagcatcgcttgagcagcaccggcggttgcacttgcggccagtcgcctttgcccgcgccccccgcctccccatcactggtctctacaacaagagtccctactactgcgggacttgtggccgctggttccgcgccatggcgggcttgcgactgcatcagcgggtccatgcccgagctcggactttgacgctacagcctcccagatcaccatctcctgccccacccccacctccagagcctcaacagactatcatgtgcacagagctgggggagaccatcgccatcattgagacatcccagccactggcgcttgaggacaccctgcagctgtgccaggctgcactgggggccagtgaagcaggcgggctcttgcagttggacacggccttcgtgtgacgcagctgaaaagcaacaacaaaagggtttggttgcaacagccagtgtgggtacctctggggagagaggacctcctctgacaaactggtctggtacccaccatgtgccaggatccaccctggcctctttttacccactgactccccagaacaacccttccaggcttctcttgtcatctttctctgcctgaggggaaactgaagctctgaaatgcgatgtgatctgtaccaggtcacccagctatgctgcaaagtgggttggccaaggccctttgcactgcatcaccctggtgcccagcaacatcaggtaaccttcactgagcaccaagcttatgccaggtctgtgctggccactctcatatacctcttcagatcctctgcttgtacccccagcccttgccttccctggattttgggcacccaggactttgctctgcctggtggagggtacttgatttctctgggcttccttcatctcaattctgacagtgtggaaggaaatctgtaggtacccaggtcctcagctccagactgggtgatgctggagacccaggagcaagtcagcacaggctctgcccacaggaggcatgcacaatctggtaggagaaacgcacaagtacagatagcttgctctctgaaaaaaaaaaaaaaaaaaa

SEQ ID NO: 201 - DNA, 1814 bp, Homo sapiens
cacggctgcttgttttgtgctttcacaacgtcctccatggagctcatggcccttcatctccaggccaaccacctgggcaaagcgaaacgcaaagataacaccatcggggtcacagtcaactgcaaagaccaagcccgggaggcgagtaagatggccctgctgccctcgttacaatcaaacaaagacctgggcctctccaatatgatcagctctctagactctgcttctgagaagatggcccaaggtcagctcaaggagactctgggagagcagaagagcggtgcatggaccggccacgtggaccctgcattttgtaacttcccatcagacttctacaagcagtttggtgtttacccaggcatggttggctcaggggcctccagttcctgccccaacaaggagcctgatggaaaggcccactctgaagaggatgtccccatcctgatccccgaaaccacgagtaagaacactactgatgacctctctgacattgcctcctcagaggacatggactcctccaagggggagaacaacgatgaagaggatgttgaaaccgaaccggaaatgatgaccaagccactgtctgccctcagcaaagacagcagcagcgatggcggggacagcctgcagcccacaggcacctcccagcccgtccagggactggtctcacctttatcccaagcaccggagaagcagtggcacagccagggtcttctccaagcccaggaccccttggcgggcctgccaaagccggagcgggggccccagagcctggacaagccgatgaacatgctgtcggtcctcagggcctacagttctgatggcttagcagcctttaacggacttgcaagtagcacagcaaattctggatgtatcaagaggccagacttgtgtggtaagtgacactccctgtcctagtcggtctatctggacttgcccttgtctgttcgtggtcctcggtggttatctgcagcttgttaatcgtgtaaagtcaagagaagaatgtatacacatatgtgtgttgaataattactattggcataggtatgtgtatacacacggtgcaccaatctacagtatatatagcagagaatcagaggctaaaaatattaccccatatgttccagtattagtcatggattgcaaaggcttagtaacttgagcaggagagaaaactccctcaaagtcataaatcctgagtgacaactgctgctggatgacagatcccttcacctgtggacaacctggctgggggtggggggctgttccaccagctcacctgagcatgtagaggtgggtcctgcagtggtctcgtgggtattactgcttgtgtctgattgtcctgtattttgtaacactttagaagaatacagaaaagtgcagtaattctctttctccatagtatttaagcagaaatattgctagtttaatattgtgtcaggtcgtcctattaaccaggagcagatgacagtaaaatttcagtgaatagcaccttgacatctacaacttaaaaatggtgattgaagcaaaatatgtaaacttgtacggggtgatcgtgtgctttggaacagagtattgttgaagtaattagaagatatattaaggtgttcctggtaatgaaggcatgtaagttataataattgtagctttctgaataagtgtcaaactatatctttaagtgtgctgtatgctgagttacaagttaggtcatttatgaatggaatgtaaaataatactaaaaatgcttcaataacttatcttggtattgctaataaaaaaaaaaagctgtgaaacattaaaaaaaaaaaaaaaaa

SEQ ID NO: 202 - DNA, 921 bp, Homo sapiens
ggcacgaggtggcaaggcctttgcccgccggccctccctgcggctgcatcgcaagacccaccaggtgccagctgcccctgccccttgcccatgccctgtgtgtgggcggcccctggccaaccagggctccctgcggaaccatatgaggctccatacaggagaaaagcctttcctgtgcccgcactgtggccgggcgtttcgtcagcggggcaacctgcgtgggcatttgcggctccacaccggggagcgtccttaccgctgcccacactgtgccgatgccttcccccagctgcctgaactgcggcgccatctcatctcacacaccggggaggcccacttgtgcccgtgtgtggcaaggccctccgagacccacacacgctccgagctcacgagcgcctgcactccggagagaggccctttccctgtccccagtgtggccgtgcttacacgctggccaccaagctgcggcgccacctcaaatctcacttggaggacaagccctaccgctgccccacctgtggcatgggctacaccctcccgcagagcctcaggcggcatcagctcagtcaccggcctgaggcaccctgcagcccaccctctgtgccttctgctgcttctgagcccactgtggtgctcctgcaggctgagccacaactgctggacacacacagagaggaggaagtctcccccgccagggatgttgttgaggtcaccatttcagaaagccaggagaagtgctttgtggtgccagaggagccagatgccgcccccagcctggtgctaatccataaggacatgggcctcggcgcctgggcagaggtggtggaggtggagatgggcacctgacagctttgccttttgctgacacagctccataaagactcgtgctttctcaaaaaaaaaaaaaaaaaaaaaaaaaaa

SEQ ID NO: 203 - DNA, 1750 bp, Homo sapiens
  SITE (1624): n equals a,t,g, or c
  SITE (1714): n equals a,t,g, or c
  SITE (1723): n equals a,t,g, or c
  SITE (1738): n equals a,t,g, or c
  SITE (1744): n equals a,t,g, or c
ggctttacggctgcgagaagacgacagaagggagataagtgtggagaagagagttcacctgttcatactagcacttttctttcaaataccttaaaaaagaaatgtgaagagagtgattctgagtcacctgctactttcagtaccgaagagccatcattctacccctgtacaaagtgcaatgtgaattttagggagwagaagcacctccacaggcatatgatgtatcatttagatgggaatagtcactttcgccatcttaatgtcccaaggccatatgcttgtagagaatgtggacggacatttcgagatcgcaattcacttctaaaacatatgattattcaccaggagagaagacagaagttgatggaggaaattcgtgaattgaaagaacttcaggatgaaggaagaagtgcacgattacagtgtcctcagtgtgtgtttggtaccaattgccctaaaacatttgtgcaacatgctaaaacccatgaaaaagataaaaggtactactgctgtgaagagtgtaacttcatggcagtgacagaaaatgaattggaatgccatcgaggcattgcacatggggcagtggtaaaatgccctatggtcacttctgatattgcccagaraaaaamamaaaaaaagactttcatgaaagactctgtagtaggatcatccaaaaaatcagctacctacatatgtaagatgtgtccttttactacttcagccaaaagtgttttaaaaaagcacacggagtacttgcattcatcatcatgtgttgattcatttggtagtcctcttggacttgataaaaraaaaaatgacatccttgaagaacctgtagatagtgatagcactaaaacattaactaaacaacagtcaaccacatttccaaagaactctgctttaaaacaagatgtgaagcgaacatttggwtcaacctcacaatcaagtagtttttcaaaaattcataagcggccacacagaatacagaaagctcggaaaagcattgcccaatcaggtgtaaacatgtgcaatcaaaacagctctcctcataagaatgttacaattaaaagcagcgttgaccaaaaacctaagtatttccatcaagcagcaaaagaaaagtctaatgccaaggcaaatagccactatttgtatagacacaaatatgaaaactataggatgatcaaaaaatcaggtgaatcatatcctgtgcatttcaaaaaagaagaagctagttcattaaattctttacacctgttttcatcatcaagtaattctcacaacaattttatttcagaccctcataagcctgacgccaaaaggcctgaaagcttcaaagatcacagacgtgtagctgtaaagagagtaattaaggaatctaagaaggaaagttctgttggaggggaagacttggatagctatccagattttttgcataaaatgactgttgtcgttttgcaaaaacttaattctgctgaaaagaaagatagttatgaaacagaagatgaaagttcctgggataatgttgagttaggagactacactacacaggccatagaagatgaaaacctatagtgatattaatcmagagcatgtraatttattccctttatttaagagccaagtngaaggtcaggagcctgagaaaatgctactctagtttgaccaaacgatggctttatttgatctatgaagtatggagtaccacttttgctgngtaatgtcncgcttggactgcgtntcctgnaagctg

SEQ ID NO: 204 - DNA, 2204 bp, Homo sapiens
ccacgcgtccggcaatcactgtgggaaagcatttagtgatccctcatcccttagactgcatttgagaattcacactggagaaaaaccctatgaatgtaaccagtgttttcacgttttccgcaccagttgtaacctcaaaagccacaagaggattcacacgggggagaatcaccatgaatgtaatcagtgtggaaaagctttcagcacaaggtcctctctcactgggcacaatagcattcatacaggggagaaaccttatgaatgtcacgattgtgggaaaaccttcaggaagagctcctatctgacacagcacgtaagaactcatactggagaaaaaccctatgaatgtaacgagtgtgggaaatccttcagcagtagcttttctcttactgtgcacaagagaatacataccggagagaaaccctacgagtgcagtgactgtggaaaagcctttaataatctctcagctgtgaagaaacacttaagaactcacactggagaaaaaccctatgaatgtaatcattgtgggaaatccttcacaagtaactcctatctttctgtgcacaagagaatacataatagatggatatgaattactgcaggaacttctggaggaaagcactcattgatctttcatccctaagatagtttgagagagctcacactggatatataagttatttgttgcagcataacaaatgatccccgcaaattttgtggcttcaaacacgaaatgtttattctctaacaatttctacagatcaggaattcaagaacagcttatctctgtagttacactgcaggatctctcatgcctttacttacaatcaagatgtcagccaaagctatagtcatctaacatctttactgatgaacagtccacttccaagatgacttattcacatgcctggaaagttgatgttggttgttgtcaggggaccttcagtcattaccatgtaggcctctttacaaggcccagctccttgacaatttggcaataagttctcgccaaggttagtgatccaagagaggaccaatacagaggccaaaatggcttttatggcctatcctcaggaggactgctaagctttcacttatttcctattgtgttggtctcacaacacaccaatcctgatacaatgtgagagactgcagaaggtatgaataccaggaaacagataactcagaagcatctgggaaatttgccatggaattaatgaagaaaagccctcagcacatcatccttctactctaatcaatatgaaatagcattcagtaactcctattaattcactctgaagagaaaccttttgaggacaatctgtatggtaaagctctcagctcgaattctcaccttcatgggcccagaagattatgtactgagagaatcctgaagaatggaacagctgtagaaagccttcagtgctatcagcagggattcatgtgacagctcacactaagggagaaaacctgtgaaggtctcagaaggcttcagtgacagtcatcccttaagacacactggaaatcacacaatggaacaacactcagaaatgcggaataccctgcagcaaaagtgttcacattactgagcaaactatagtgtggtattctgcagtgactatgggaaagccttgaatgttctatcggtttttaagggacttgagaattaattctggagagaatgccccattgaacatcatcaatattggagagctttctgtttttctacatttgttaggaaacttgtgagcattcacactacagagaaacttgaaatataaagaagaagagaaagccttcagtgatgcctctgtgttagggaaaatatggaacttctccctggatgcaaaacctatgagtatattaatattggaaaatttttcagtgattcttctctttcttgtatatgagagaacttacatggagaaacccctaggaatgtaatcagtgttaggatgcctcagcctgaactcctcactgagtggccacaattttcactgggaacaaaaagtataatcactgttttgagtgtgggatatcctttatcagtgtctcatctgtagattggactgctggctcattaatttttttagtctttttttcttttaatataaacatttgtgtatagctgttccctaaaataaacattaacatatttcaaaaaaaaaaaaaaaaaaaaaaaaaaaaaaaaaaaaaaaaaaaaa

SEQ ID NO: 205 - DNA, 2629 bp, Homo sapiens
gcggacgcgtgggaccaggtgcttcaaatgatttcaagtatggattattgccagaatcttggccaaaacaagaaacctgggaaaatggtgaatcatctctaatcatgaacaagttaaaatgccctcattgtagctatgtagccaaatacagacgaacactaaaaaggcacttgctcattcacacaggagtgagatcatttagctgtgatatttgtggaaaactgtttactcgaagagaacatgtaaaaagacattccctggtgcataaaaaggataaaaaatacaaatgtatggtgtgtaagaagatcttcatgttagcagccagtgttggaataagacatggatctcgacgttatggtgtttgtgtagactgtgcagataaatcacagccaggagggcaagaaggtgtagatcagggacaggatacagaattccctcgggatgaagaatacgaggagaatgaagtaggagaagctgatgaagagctagttgatgatggagaagatcagaatgatccctctcgatgggatgaatcaggagaagtttgtatgtctctagatgattaactgacctactatactcctcaaggatgctgcatttggacctaatatgaatcgacaatttggattgttgaacttgaaggcttgcaaaatatggtacatgctggatagtagttatgttgctgtgaaaactgtagggtcaaagccttatagcaaaaaaaatttttttttatatttgcacaggactatacagcaaacaaccatgtggttggattacatggagtccccacatactcagtcagttatcaaagtaaaatattttttatttataggatatacagtaactatttgggtcctatgaaaatagtccttaaagagcttacattcatgtgctactttaacatgaatggagaaaatccgtttatggaagtacagtgacaattgacccaatcactctgtccatcaaaccactcaggctagtttgtactagtagagttttgtttctatttttatttttattaattttattttttttaatacagattttcagtgaggggctttttcaaccccattggttctattttcttgtatttttccatttaatttgcttcataacttaaaccaagtctcttctagtcttaggtattatttctcgattttgtgctgatgggcatgtttataagaactggagaggtaatttattggaatgaactaactgacttcctccattcccctcttcctttttgacatgaattttactacttcacaaatgaagaatgatgttatgaagttaccgtggcgaagttgacaaataccactaaaatgattatgatttagaagtaactttcttctgctgctctaatctgataaatggttactatatgatattttctgacatggtatttggttttgggtatctgttactttggcactattcttgtttgcctctttatttttgccagtgtactatacctcagtcctatttgaaagacctaattgaaagaaaaatcatagaaataagtaaaatgatttgttttataatttatccaccatgtccagtttggttagcttgttatgcaatataagtgaaatatcaggtttttacccgtgtcccttttatcatgaaaattaacacaaaatgtgcattctcttttgtttcatacttagcgggatattgattgttttgaaattatgatcaatacttaatttatttttttctgtccttgaagtcactacaccttgatacagtctttctagtagtcaccatgattcaacagtctcaaaaatcttacaaataaaattctgagaagctttattattctataaattcttcagggtacaaagggtgacatattgaggtgaaattgtcagatttacttagcctggtgacatgaattagctgattgtggaactctcagcagcatttcacgtattgttaacatgtatggcatttattagcatattgtatattatataagattgagggatgtcatattttcagctttcttttaaataaaaattgagtatattttcctattttatatcaggtaactaaattatgctagttatgtggaaaaaattgcaaagatgctttgacagatataatccctttggtgctccatctgatcaaagttgaaaagttgatgttttttaagagacaagctttatcattgtctctgatttcagtagaataatggtttattgttagacaatgatgtttctgcttggataaatcaaagataaattacagttacatggttagatgcatcttttgtcatctatattgtagtttctacataactgtaaacctgacagataagaatagtttcggtttgatttttgtttaaaacagatgagtacttcttaatgttctagacaaatgagtaaaatgtatttctggtagaaattagttgggcaaagatactatgaatgaaaaagtattttaaacgtaaaatgttctttgtgaatatgtaagtatagtataaagatttctttcatcccatttatccccttcctttaaataaactagtttacaattggtagatctgtctatatataaatatatattaaagaacaaagatatatatctaaaaatcaaaaaaaacaaaaaatcaaaaaaaaaaaaaaaa

SEQ ID NO: 206 - DNA, 652 bp, Homo sapiens
  SITE (619): n equals a,t,g, or c
  SITE (624): n equals a,t,g, or c
  SITE (631): n equals a,t,g, or c
  SITE (646): n equals a,t,g, or c
  SITE (649): n equals a,t,g, or c
gcagcagagaaaggccttatgaatgcagcaaatgtggaatcttcttcacttacgccgctgacctcactcaacaccagaaagttcacaatagaggaaaaccgtatgagtgctgtgaatgtggaaaattcttcagccagcactccagccttgttaaacatcgcagggttcacaccggtgaaagccctcacgtgtgtggtgactgtgggaaattcttcagccgaagctccaacctyattcagcataagagggttcacactggtgaaaagccatatgagtgcagcgactgtgggaagttcttcagccagcgttccaacctcattcatcataagagggttcatacgggcagaagtgcccatgagtgcagtgaatgtgggaaatctttcaactgcaactccagcctaattaaacattggagagttcacactggagaaagaccttacaagtgtaacgaatgtgggaaattcttcagccacattgccagcctcattcaacatcagatagttcacactggcgagcggcctcacgggttgtggtgagtgtgggaaagccttcagccgaagctctgacctcatgaacatcagcgagttcacactggtgagcggcctttatgaatgcaatnaatgngggaagntttttaagccagaanctncag

SEQ ID NO: 207 - DNA, 2325 bp, Homo sapiens
gattcgcagtggtcgcttcttctccttggtgtaaggtatgcccactgacctttttcaccaagtcagagatgcagatccactccaagtcgcacacagaggccaagccccacaagtgcccgcactgctccaagtcctttgccaacgcctcctacctggcccagcacctgcgcatccacctgggcgtcaagccctaccactgctcctactgtgataagtccttccggcagctctcccacctccagcagcacaccagaatccacacaggcgacagaccctacaagtgcccacatcctggctgcgagaaggctttcactcagctctccaacctccagtctcaccagcgccagcacaacaaggacaagccctacaagtgtcccaactgctaccgggcctattcggactccgcttctttgcagatccacctctcggcccacgccatcaagcacgccaaggcctactgctgcagcatgtgtgggcgggcctacacctcggagacctacctgatgaagcacatgtccaaacacacggtggtggagcacctggtgagccatcactcgccccagaggacggagtcccccggcatcccggtgcgaatctctctcatctgagcccactggaggcgccgccccacccggcccactggcagacacagacccaggcagcaccaggccccagctccctccgggggccctccaggaaccaccaagctctctcacgaccttcccaatcttccagaaagcttggtccgcagaagccctgcctggtccagtccgggggcggccaggccaactgcaagattctggactgttttggtggcatccaaagacgatctcagagcactttgaacctctctgttgagttttctttttgttccccacccttcacttgcttcactgtttttttttttttttttcgttttttttttttaagtttgttttggaaataacagaaaagatatttattggccaggaagttggtgctgctaagaccgagaaatttaaagaatcggacagatggacgcagagaaccagagggcaatgtgggaccttctcttgccatggcctcaggtcttgagggaaggctcgggcctaggtttctggactgcaaaggggacccccaggtgggaggggcaggaagcagccggagtgagcccttcgcccctgagtgcctggctcgcacctctcgagctgtgccctgggcatcactgagcagaggggtgcggcagcttcaggaggcggaaacgagaggggtgggagatccacaggaccaaagggtgcagtgatgggctgggtggcgggcccagggaaatggggtggggatgggctgggtaagacctggccctcccctgctgccctgaagaccaccccagtctacctcggtgctggccaggaaacctttcggctacctctcccaccatcccagactgtgggcagggggatggggagggagtgggcctggatctgggacctccctccagaatttcctccagatgggggcagtgcccagggaggggttatttgtcttccctgccatggagtgggaatccccagccgaggccctaggcccctcagcagggaagggatccccggggaggcaggtcccaggagcagaccctgcccccagcccccacagacacaccccaatctgaaagccatgcgtgtcggtgtatataggaaccatgtacagagcccagagaagccccctacatccccccgggaaaaaaaagaaaactagacagaaactcatctatatattctgtatctggagttccgttttgaatattaactgtgttatttttatacactttttaagccttaactcgccattgatttaccagtttaacgtttcctggggtttctttgcccatggggttctctgcccccacccccggccctttgtttgacttgcgtcgtctgatactcagtattgtagctttttgtccgcatgttactccctgtaaatacgctgttatacatactgttaacacccctttgctttttctatgggacctccaggccaccatatttagaactagttaccttattaaaaaagaaaaaacagtctgttggcttctcagtctgcatcttggaggcagggaggtgagggcaggtgcccctcagacacttcaggaaggtagtttgcattctatttaaaaaagggagtggggagcaaatgaaaatcaaatgtggggggaaaacactaaagggggcaagaaacaaaggaattacaaaccctctgctctttgtatttctctgttgtgaagaataaactgtacctgcacccggaaaaaaaaaaaaaaaaaaaaaaaaaaaaaaaaaaaaaaaa

SEQ ID NO: 208 - DNA, 2970 bp, Homo sapiens
accccgctgtggcggagacgcagagggcgggtcgcgctcgagggtcagggaggagagtgacccggccctggtccagggccctccctgcccgtcttggggccagaactccagccctggggagtgggcagggcctgttttccgtgcctcacgccctgcttttcgcctccttcagcgctgtctgctagctgcttttcctgctctctctccctggaggcgaacccttgtgctcgagatggcagccaccctgctcatggctgggtcccaggcacctgtgacgtttgaagatatggccatgtatctcacccgggaagaatggagacctctggacgctgcacagagggacctttaccgggatgttatgcaggagaattatggaaatgttgtctcactagattttgagatcaggagtgagaacgaggtaaatcccaagcaagagattagtgaagatgtacaatttgggactacatctgaaagacctgctgagaatgctgaggaaaatcctgaaagtgaagagggctttgaaagcggagataggtcagaaagacaatggggagatttaacagcagaagagtgggtaagctatcctctccaaccagtcactgatctacttgtccacaaagaagtccacacaggcatccgctatcatatatgttctcattgtggaaaggccttcagtcagatctcagaccttaatcgacatcagaagacccacactggagacagaccctataaatgttatgaatgtggaaaaggcttcagtcgcagctcacaccttattcagcatcaaagaacacatactggggagaggccttatgactgtaacgagtgtgggaaaagttttggaagaagttctcacctgattcagcatcagacaatccacactggagagaagcctcacaaatgtaatgagtgtggaaaaagtttctgccgtctctctcacctaatccaacaccaaaggacccacagtggtgagaaaccctatgagtgtgaggagtgtgggaaaagcttcagccggagctctcacctagctcagcaccagaggacccacacgggtgagaaaccttatgaatgtaacgaatgtggccgaggcttcagtgagagatctgatctcatcaaacactatcgagtccacacaggggagaggccctacaagtgtgatgagtgtgggaagaatttcagtcagaactccgaccttgtgcgtcatcgcagagcccacacggggagagaagccataccactgtaacgaatgtggggaaaatttcagccgcatctcacacttggttcagcaccagagaactcacactggagagaagccatatgaatgcaatgcttgtgggaaaagcttcagccggagctctcatctcatcacacaccagaaaattcacactggagagaagccttatgagtgtaatgagtgttggcgaagctttggtgaaaggtcagatctaattaaacatcagagaacccacacaaggggagaagccctacgagtgtgtgcagtgtgggaaaggtttcacccagagctccaacctcatcacacatcaaagagttcacacgggagagaaaccttatgaatgtaccgaatgtgagaagagtttcagcaggagctcagctcttattaaacataagagagttcatacggactaagctgtaattatgatggctgagaaatgattcatttgaagatacaattttatttgatatcaatgaacgccctcaagactgagctgcttttatcatactctcctagttgtgggccacgatttaaaccatcagagatgacaagccatttgaaattctgaccctcagctttgggaatgttatctcctccaaaatggtgatttttattcactcaatgggttacttcattaaaagcagccccacaagtaactggaaatctgaagaccaggggacaaatgctggtgaatgcctaggcctggaaatggagtaaatctttcaatgttattttctcccatccttggcccaaggaactatgctaagtgaaacgtgggactgtaatagggtggtaatggctgctttggaaaaaggcaactagagactctgcctaaattgccacacctattcacacaccatagtagttgggcacacacatcttcccttccaaagggctttttccttgagttgctcatgcatttgtatcttttccatcttcctgagggcaagattttgcacgatgaaggcaatgattgtaacttttctccttctcattgtttctaattagctcctttaaagcttgcatctttgtgaaggctaactgaaggtacggttggaaaggaaaaatgagacacaggtttggggaccaaggacccatcaatgatggtgactttagcagaagatgcccacagttattacaaaaggaaatattatttctcccaaaagttgtttggaattgccttataccccaaagacattttttggggggtggaaaaggggaaattggtggccccacgaaaaatggggactgggaagttgaggaaatatcttttcttttgagaagtacccccagtttatttctactgtgctttattgctactgttctttattgtgaatgttgtaacattttaaaaatgttttgccatagctttctaggacttggtgttaaaggaaccagtggtctctctgggtgggtactataatgagttattgtgacccccaactgtgtggggccacatcccttgttaataacccaacctttaaagtaacccatttttccaggggggttccttcatgttgcccctccttttaaggacaaactcaggcaaggagcatgtttttttgttatttacaaaatctagcagcctgtgggtacccctctttaactgccgggtgccccctgttccgtggtaaataaactaccaatcatgtcctttctcatttatgaaaatcaaggttataataaaagtgcaaagatctacccgttgaaaaaaaaaaaaaaaaacaacaaaagcg

SEQ ID NO: 209 - DNA, 2275 bp, Homo sapiens
ggcacgaggattactggtttgaaacaaagatgtcagccctaaagcaaagcacttctgaagcatctgttctaggagagcgaacgaaaagtgtcatgatggaaaaaggcctggactgggagggcagaagctccacagagaagaactataagtgcaaggaatgtgggaaagtcttcaaatacaattcgtcctttattagccaccagagaaatcacaccagtgagaaaccacataaatgtaaagaatgtgggatcgcctttatgaacagttcatcccttttaaatcaccataaggttcatgcaggcaaacagccttatagatgtattgaatgtgggaagttcctgaagaagcactcaacgtttatcaaccatcagagaattcattctagggagaaaccccacaaatgcattgaatgtggaaaaactttcagaaagaactcaatccttttaagtcatcagagaattcatactggccagaaaccttacaaatgtaatgactgtgggaaagccttcgctcagaatgcagctcttactcgtcatgaaagaatacatagtggagagaagccttttaaatgtaacaagtgtgggagagctttcagggataattcaactgtgttggaacatcagaaaatccatactggtgagaagccatatcagtgtaatgaatgtggaaaagcctttaggaagagctcaactcttattagtcaccaaagaatgcatactggggagaaaccctatcactgcagtaaatgtggaaaatctttcaggtatagctcatcctttgctggtcatcagaaaactcacagtggaaataaaccgtatcagtgtcgtgactgtgggaaggcctttacaaagagctcaacccttactggacatcagagaattcatactggagaaaaaccctatcactgtaagaaatgtgggaaagcctttcggcacagctcaggccttgttgaacatcagagactccatactggggaaaaaccttataaatgtaatgaatgtgggaaagcttttccccgaagttcagcgcttaagcaacataagaaaattcataataaagaaagagccatgaaatgtagttagtgtggcaaattgtgcagagtagtttattccttctgaccatcatagaggagacattaaataaattatgcatttaacagaaatactctgtacttctgagagaacacatcacttgtgaggatattcattgtgaggttctactagtgaaatatttgaagaaactaaatgtatgtcagtatggaagtagttatagcatactgtgtgctaattgaaaagaatgaggtggagctgtaaatactgtacaaagccaggcatggtggcatatgcctgtagtcccagttacttgggaggctgagacaggattgcttaagcccaggagtttgagtctgtaatgcactatgattgtgcatgtgaatagccactgcactccagcctgggcaacatagcaagactccatctctaagtaaaaaaatacaacagtagaaatatacccatgataatatacccaatatacccttgttaaagaagcaagtttcaggaaatctatattatatgcattcaaaaagacctggacaaataaagaccaatcttaacagcagttatctctctctctctctttttttttttttttttttaaaagagactagctcttactctgtcacccaggctggagtgccatgtgatcatagctcactgtagttttgaacttgggcttgaacaaccttcccacttcagtctctggagtagctggggctacaggcacgtaccaccacactcagctaacagcagttatctttgatgaggatgtagtataggttgagcatccataactggaaaatctgaaatctgaagtgctccaaaatccaaaatttgtctgagcaccaacaggtacaaaattctacaccagaccttatgtgatgggttgcagttaaaatgcacccccggccgggcgcggtggctcacgcctgtaatcccagcactttgggaggccgaggcgggtggatcatgaggtcaggagatcgagaccatcctggctaacaaggtgaaaccccgtctctactaaaaatacaaaaaattagccgggcgcggtggcgggcgcctgtagtcccagctactcgggaggctgaggcaggagaatggcgtgaacccgggaagcggagcttgcagtgagccgagattgcaccactgcagtccgcagtccggcctgggcgacagagcgagactccgtctcaaaaaaaaaaaaaaaaaaaaaaaaa

SEQ ID NO: 210 - DNA, 836 bp, Homo sapiens
ccacgcgtccgacacaaaggagcacccttttaaatgtaacgaatgcggaaagaccttcagccacagtgcacacctctcaaaacatcagttaattcacgctggagagaatccctttaaatgtagtaagtgtgacagagtcttcacccagagaaactaccttgttcagcatgagcgaactcatgccagaaagaagccgttggtgtgtaacgaatgcgggaaaacgttccgtcagagctcatgcctttctaagcatcagagaattcactcaggtgagaagccctatgtatgtgattactgcgggaaggccttcggcctgagtgctgagcttgtccgccaccagagaattcacactggagaaaagccttatttgtcaggaatgcgggaaagccttcacccagagctcatgcctttctattcaccggagagttcacactggggagaagccctacagatgtggtgaatgtgggaaagcctttgcccagaaagcaaatctaacacagcaccagagaattcacacaggggagaagccttactcctgtaatgtgtgtggcaaagcttttgtcctcagtgcccatctcaaccagcacctgagagttcacacccaggagacactttatcagtgtcaacgttgccagaaagcctttcggtgccactcgagcctcagccgccatcagcgtgtacacaacaagcagcaatactgcctgtagccattgggtggcagcagagtcccagaatatgagaccgttactcggatgttgaaagttggaaactatcccattgcaagtttctctccaaataaatgcatctaaagattgattagaaaaaaaaaaaaaaaa

SEQ ID NO: 211 - DNA, 900 bp, Homo sapiens
  SITE (862): n equals a,t,g, or c
  SITE (871): n equals a,t,g, or c
  SITE (877): n equals a,t,g, or c
  SITE (889): n equals a,t,g, or c
gcggccgcgccccccagcccggcgtggagcgagccggagcccgaggcggggctggagcccgagcgggagccggggcccgcggggagcggcgagcccggcctcagacaaagggtccggcggggccgaagtcgcgccgacctcgagtccccgcagaggaagcacaagtgccactacgcgggctgcgagaaagtttacgggaaatcttcgcacctcaaggcgcacctgagaactcacacaggtgagaggcccttcgcctgcagctggcaggactgcaacaagaagttcgcgcgctccgacgagctggcgcggcactaccgcacacacacgggcgagaagaagttcagctgccccatctgcgagaagcgcttcatgcgcagcgaccacctgaccaagcacgcgcgccgccacgccaacttccacccgggaatgctgcagcggcgcggcgggggctcgcggaccggctccctcagcgactacagccgctccgacgccagcagccccaccatcagcccggccagctcgccctgagcccgccacagccatgagcagccgctcccaccccctcgtgagtccctggcctttccttttgtaataagaaagaagagagagaacttgatgcaaagtccacgaaaaaacaatttttttcacctcaggtgtcaaagtaaatttgttaaaaaaacaaaaaaaacacaaaaatttcaaaaaacaccacccaccaaattgcacaatagatacacccacaaagttgagattcagccgttgttgaaccccctttctcagggatggacacgtttcacgaggtcagtgaggacaccccttcctgacgccttactctgtacatagattttgcactcttggagtntttctgttnagttcngggaaacaacgntggggacagaa

SEQ ID NO: 212 - DNA, 947 bp, Homo sapiens
ggcacgaggcgaactgatggccaaggcgagactacgaatcccagcaagcagtacgcgacgcgaggacgcaggaggaggagcccggagctgcagccaccggggagccaggcagcaaagcacctgctctgagtggccatggggaagcgatacttctgtgactactgcgaccgctccttccaggacaacctccacaaccgcaagaagcacctgaacgggctgcagcacctcaaggccaagaaggtctggtacgacatgttccgagatgcagctgccatcttgctggatgagcagaacaagcggccctgcaggaagtttctactgacaggccagtgcgactttggctccaactgcagattttcccacatgtcagagcgagacctgcaggagctgagcatccaggtggaggaggagaggcgagccagggagtggctactagatgctcctgaagctccccgagggccatctggaggactggctggagaagagagccaagcggctgagctcagccccaagtagcagggctgaacccatcagaaccactgtcttccagtaccccgtgggctggccaccagttcaggagctgcctccatccctgcgggcacccccacctggggggtggcctctgcagcccagagtccagtggggctgagccccttgcccccgactgacccccacgtggtcacttttctcatcagtcacaataggaagccaagcccggttcctgctacgccccatggaggctccgagaccatctgcccagcctcactgaggctcaggacacggcccccccaagtgcagccctcgtcctgggtctgcaccgggcagctctcccctcactttcctccccctgcccccctggtttttaagaagatgggggagaaaacttccaaatgtttataaagaaaggctggcccccaaaaaaaaaaaaaaaaaaaaaaaaaaaaaaa

SEQ ID NO: 213 - DNA, 260 bp, Homo sapiens
tttttaaattggaagttttgtcttttctggttcatttgcaattcattatataatccataaacaaatttcattgttgttacaatagttgcaaatatcttctcccagttgattgtttatttatttaatttcacttagggtgccattttttaaaaatatagcaactgatttaacatagtacacgtatcgatcttttcttttgtggtgtgtggatttctgggtcttgtttgtttgagaaatcctccctgccttaagaggattct

SEQ ID NO: 214 - DNA, 1151 bp, Homo sapiens
ggcacgagcagctacagcagcacctgcggagtcaccgggagggcgtctttaagtgccccctgtgcagtcgtgtcttccctagcccttccagtctggaccagcaccttggagaccatagcagcgagtcacacttcctgtgtgtagactgtggcctggccttcggcacagaggccctcctcctggcccaccggcgagcccacaccccgaatcctctgcattcatgtccatgtgggaagacctttgtcaaccttaccaagttcctttatcaccggcgtactcatggggtagggggtgtccctctgcccacaacaccagtcccaccagaggaacctgtcattggtttccctgagccagccccagcagagactggagagccagaggcccctgagccccctgtgtctgaggagacctcagcagggcccgctgccccaggcacctaccgctgcctcctgtgcagtcgtgaatttggaaaggtcttgcagctgacccggcaccaacgatttgtgcatcggctggagcggcgccataaatgcagcatttgtggcaagatgttcaagaagaagtctcacgtgcgtaaccacctgcgcacacacacaggggagcggcccttcccctgccctgactgctccaagcccttcaactcacctgccaacctggcccgccaccggctcacacacacaggagagcggccctaccggtgtggggactgtggcaaggctttcacgcaaagctccacactgaggcagcaccgcttggtgcatgcccagcacttcccctaccgctgccaggaatgtggggtgcgttttcaccgtccttaccgcctgctcatgcaccgctaccatcacacaggtgaatacccctacaagtgtcgcgagtgcccccgctccttcttgctgcgtcggctgctggaggtgcaccagctcgtggtccatgccgggcgccagccccaccgctgcccatcctgtggggctgccttcccctcctcactgcggctccgggagcaccgctgtgcagccgctgctgcccaggccccacggcgctttgagtgtggcacctgtggcaagaaagtgggctcagctgctcgactgcaggcacacgaggcggcccatgcagctgctgggccctggaagaggtactctggtctaaaggaa

SEQ ID NO: 215 - DNA, 525 bp, Homo sapiens
  SITE (397): n equals a,t,g, or c
  SITE (401): n equals a,t,g, or c
  SITE (511): n equals a,t,g, or c
tcccgggggggatttttttttttttttttttttttttttttgcttaaaaaaaagccatgacggctctcccacaattcatcttccctgcgccatctttgtattatttctaatttattttggatgtcaaaaggcactgatgaagatattttctctggagtctccttctttctaacccggctctcccgatgtgaaccgagccgtcgtccgcccgcggccgmtctagaggatccaagcttacgtacgcgtgcatgcgacgtcatagctcttctatagtgtcacctaaattcaattcactggccgtcgttttacaacgtcgtgactgggaaaaccctggcggtaccccaacttaatcgccttgcagcacatccccctttcgccagctggcgtaatagcgaanaggnccgaaccgatggcccttcccaacagttgcgcagcctgaatggcgaatgggacgcgccctgagcggcgcattaagcgcggcgggtgtggtggttaccgcaacgggacccgntacaatttggccag

SEQ ID NO: 216 - DNA, 579 bp, Homo sapiens
gcccttttaggtgacactatagaaaggtgcaaacaggacacttcaaaccaccttgctggatgagcacctccgctgccagctccccggtgcccacgttggcatactcctcattagggtgcttcctgttgtagtgccgcttcagagagccagatatgttgcaggagtaatggcaatgggcacagcggaaaggcttgaaggagacatgctgttccatgtgccgcagcagctgtggcttctgggccgctgtgtagtcacacaccgcgcacttaaactgcttcccatctgcagtgtgaaggagtttgtgacttttcagtgtcccttttgatttgaatttcttgccacacatgtcacataggtgggttttctcagtgctgtgacgattcatatgagccttgaggttactcttgctacgagttgcatactcacacaaagaacacttgaagggcttcacaccttcatgagcccaaatatgacgctgaaggtctgagccattcttcatgaaataaaagtcacaatatgggcatttcatggctctctttccaattagccctttcagccggacgcgtgggtcgacccggg

SEQ ID NO: 217 - DNA, 464 bp, Homo sapiens
ccgcgcgtccggaagtgttcgatgacgcaagtgaccaggattccactgacaaaccgtggcgcccttactacaactacaaacccaaaaagaaatccagacagttgaaaaaaatgaggaaagtcaactggaggaaggagcacggaaacaggagcccgagccataaatgtaaatacccagcagaactggattgcgccgtggggaaggctcctcaggataaaccctttgaggaagaagaaactaaagagatgcccaagctgcagtgtgaactctgtgatggagacaaagcagtgggggctggaaaccaaggaaggccccaccgacatcttacttctcggccatatgcctgcgagctctgcgccaagcagttccagagcccttccacactcaaaatgcacatgagatgtcacaccggggagaagccataccagtgcaagccctgcccccccggcaccttctcaagggcg

SEQ ID NO: 218 - DNA, 1361 bp, Homo sapiens
ccacgcgtccgagaagatgtcagcataaaaaaaagtgtaggaaaactctaaaacctcgaatgtcagtaagtgctgatgaaagaggtggtttagagaatatgaggccccctaacaacagcagtccagtacaagaggatgctgaaaatgcatcttgtgagctgtgtggacttacaataaccgaggaggacctgtcatctcattacttagccaaacacattgaaaatatctgtgcatgtggtaaatgtggacaaatacttgtaaagggtaggcagcttcaggaacatgctcaacgatgtggcgagccccaagatctgaccatgaatgggttaggaaatactgaggagaaaatggacttggaagagaatcctgatgagcagtccgaaataagagatatgtttgttgaaatgctggatgattttagggacaatcattaccagataaacagtatccaaaaaaagcagttatttaaacattctgcctgcccttttcgatgtcctaattgtggccagcgttttgaaactgaaaatctagtggttgaacatatgtctagctgcttagatcaagatatgtttaagagtgccatcatggaagaaaatgaaagagatcacagacgaaagcatttttgtaatctgtgtggaaaaggattttatcagcggtgtcacttaagagaacactatactgttcatactaaggaaaaacagtttgtttgtcaaacatgtggaaagcagtttttaagagagcgtcagttgcgactgcacaatgatatgcacaaaggcatggccaggtatgtctgttccatttgtgatcaaggaaacttcagaaaacatgaccatgtacggcatatgatttctcatttatctgctggtgagactatatgccaggtctgctttcagatattcccaaataatgaacagttggagcagtacatggatgttcatctgtatacatgtggaatatgtggagcaaaatttaatttgaggaaagatatgagatcacattataatgccaagcatttgaaaagaacctgagtgattttctactgtactaatgtttagatgatagcagataaaacaccaaagcaaaggatatgagctatttaggaattgattatataagatgatttgttagaaacaaatttcaaggcccttttaactttaatatttttgtttaggattttaagtatctacatttaggtattaaatgtttatcatttttgttgtttcttaatagaattatttgtttttagtttttcttagctatgattaaaatttttaaatgtagactacaagtggttgttacccattcaatgactattaaactttagtttttcatcaaaaaaaaaaaaaaaaaaaaaaaaaaaa

SEQ ID NO: 219 - DNA, 1935 bp, Homo sapiens
ccacgcgtccgctccacaggtggtcaccctccacgtggcagagccagggggcggtgcagcagccgagagccagctaggccctcctgacctaccgcagatcaccctggcacctggtccatttggtgggactggctacagtgtcatcacagcaccccctatggaggagggaacatcagctcctggcacaccttacagcgaggagcccgcaggagaggcagcccaggctgtggttgtgagtgacaccctaaaagaagctggcacccactacatcatggctactgatggtacccagttgcaccacattgagctcaccgcagatggctccatctccttcccaagtccagatgctctggcctctggtgccaaatggcccctgctgcagtgtgggggactgcccagagacggccctgagcccccatctccagccaagacccactgcgtaggggactcccagagctctgcctcctcacctcctgcaaccagcaaagccctgggcctggcagtgcccccgtcaccgccatctgcagccactgctgcatcaaagaagttttcctgcaagatctgtgccgaggccttccctggccgagctgagatggagagtcacaagcgggcccacgctgggcctggtgccttcaagtgccccgactgccccttcagtgcccgccagtggcccgaggtccgggtaggtgctggttgctcctgtgtctctgctgtcattcattgggctactcgtttgtataacaaacctttaatgagtgccctttcaagccagatcctctgctctcctctgagtggatgagatgggtcagagatgactccgcaaggtcccagctctcagggagttggtctggtggggaggcaaaccacacacaacgtgactaatgccagacacagtgtcccgagtgtgaaccaagggtgcaggacacagagcaggtcatttgaacttgtgtgtgctggggaaaatgccacagaagggatggccaagctgggcctctaggagcaaaggcacagaagtgtgtgacagaggcatggctagggagactcgaacgtctagaacaggggtgcccaacccctgggccatagactggtagtcatccatggcctgttaggaaccaggccacacagcaggtgagcggcaggtgggcaagcactactgcctgagctccacttcctgtcacagcagctgcattagtctcaggagcacagccccattgtgaactgtgcatacgagtaatctaggtcacacactccttctaagaatctaactaatatctgatgaactgaggtgcaacaacttcatcccaaaactatcaccctgcacatgccgtgaaacagttatctcccataaaaccagtccctggtgccaaaaagggtggggaccactggtctagaatactgagggcacagaggttcgaggtggttggggagccaccatggagaaggtgagtgggccagttctggggcaggttcacagcccagcttggggcctccctgtttgcctgaggattttgttttcagatccagtcatgcactgcatcctctccagaggttggagagggaagcagggcctagagccccaccctacagtgcagaggtgaacgccctatcaggcctcagccctagaaaatcagggccagggccgggcacggtggctcacacctcttatcccagcactttgggaggccgaggcaggcggatcacctgaggtcgggagtttgagaccagcctgaccaacatggagaaaacccatctctactaaaaatacaaaattagccaggtgtggtggcgcatgccagtaatccctgcaacttgggaggctgaggcgggagaatcgcttgaacccaggaggtggaggttgcagtgagccgagatcacgccattgcactccagcctctgggcaacaagagcaaaactgtctcaaaaaaaaaaaaaaaa

SEQ ID NO: 220 - DNA, 1396 bp, Homo sapiens
ggacaatatggagctcatagtgaagcagatttctgatgactctgaatcacactgggtggcgccagaacacaccgaaaggagcgttcctcaggatccagactttgcagaagtcagtgaccttaaaggcatggtacaaaggtggcaggtcaaccccactgtggggaaatcaaggcagaatccttcccagaaaagggatctggatgcaatcacagacatcagccctaagcaaagcacacatggcgagagagggcacagatgcagcgattgtggcaaattcttcctccaagcctcaaactttattcagcatcggcgcatccacactggagaaaaaccgtttaagtgcggagaatgtgggaagagctacaatcagcgggtgcacctcacccagcaccagcgccgtccacacaggggagaaaccctacaaatgtcaggtgtgcggaaaggctttccgggtgagttcccacctggttcagcaccacagtgtccacagcggagagaggccctatggctgcaatgagtgtgggaagaacttcggtcgccattcgcatctgatcgaacacctaaaacgccacttcagggagaaatcccagagatgcagtgaacaaaagaaagtaagaacacaaaattaagtgttaagaagaaaatttcagaatattcagaagcagacatggaactatctggaaaaacccaaagaaatgcttctcaagttcaagattttggagaaggctgtgagtttcaaggcaagctggatagaaagcagggaattcccatgaaagagatactaggacaaccatcttcaaagaggatgaactacagtgaagtcccatatgtccacaaaaaatcctccactggagagagccacataaatgtaacgagtgtgggaaaagcttcattcagagtgcacatcttattcaacatcaaagaatacacactggggagaaaccattcaggtgtgaggaatgtgggaaaagctacaaccaacgcgtgcacctaactcagcatcagcgcgtccacacaggtgagaagccctacacctgtcccttatgtgggaaagccttcagagtgaggtcccaccttgttcagcatcagagcgtgcacagtggggagagacccttcaagtgtaacgaatgtgggaaaggctttgggaggcgttcccacctggctggacatcttcgactccactcccgagagaaatcccatcagtgtcgtgaatgtggggaaatcttttttcagtacgttagcctaattgaacatcaggtgctccacatgggtcagaaaaatgaaaaaaatggcatctgtgaggaagcatattagttgggaacttggacagtgattgaagacaagaagattgagtttacaagagcagccttattcagtgtgatatctgtggaaaagc

SEQ ID NO: 221 - DNA, 1245 bp, Homo sapiens
tcgacccacgcgtccgggcctggccccgcccgagcccgccgaccggccctgtgccggcctccgttgccccgagtgcagtgtcaagtttgagagtgccgaagacctggagagccacatgcaggtggaccaccgtgacctcacgccggagaccagtgggccccggaaaggcacccagacatcgccagtgccccggaaaaagacataccagtgcatcaagtgccagatgaccttcgagaacgagagagagatccaaatccacgttgccaaccacatgattgaggaaggcatcaaccacgagtgtaagctgtgcaaccagatgttcgactccccggccaagctcctctgtcacctcattgagcacagcttcgagggcatgggcggcaccttcaaatgccccgtgtgtttcacagtcttcgtccaggccaacaagttgcagcagcacatctttgccgtgcacgggcaggaggacaagatctacgactgctcacagtgccctcagaagttcttcttccagaccgagctgcagaaccacacgatgagccagcacgcacagtgagggatcgctcaacaggacacctctccgcagaaggcttgccggagacgccgtggggagggccatttgaacattacatccaatcaaagtgtcatttgcaacccagatgtaaaactctaatgatttggccatgaggcgctgctattataagcagctggaaatgaatattaatggcagagattaaaagtattccatgctcagtattttttattgtcctgctacagctagtgtgcttttagactttccgccgcagactacatttctagagttagagaaacctgctttttaaggctattgtcctttgttccttcatgtattatattgatagtttttaaaaaagaattagtgtgattttttttctttgcttcttttttttctttcttgtttttcttcccccccacccccccacccccttcggttaactactttttaattgcaattctaggtaattgtgcatcgtgatgtgattgcttggctattgtctgaatatttccttttaattttttaattaaagactaatgctttgattggatttgccagttcaccggacagtgattaaaactatgtaatgaatataatcggtttcagtgcaactggatggtctgcttttaaatgtgacttaatctgactgcagtaactagtacagttcaataaagggaatccatgcgattagcaaaaaaaaaaaaaaaaaa

SEQ ID NO: 222 - DNA, 456 bp, Homo sapiens
  SITE (264): n equals a,t,g, or c
atgacatttcggaagacaagctctccgttgttggggaggccacggggggacccacgaggaatggtgccaggggtcctggctcagaaggagtgtgggaaccaggcagctggccagagaggccgcggggagatgcaggtgcagagtgggagccattgggaattccccaggggaacaaactcttagggggctcagtacccgcatgtcatgaactgaaggcatttgccaaccaaggctgtgtcctggtcccaccacggctggacgacnccacagaaaagggggcctgtccacccataaggcgtggcaagaacttctccagcacttcagacctcagtaagccccccatgccctgcgaggagaagaaaacctacgactgcagcgagtgtggcaaggcctttagccgaagctcgtccctgataaagcaccaaaggatccacacgggagaaaagccgtttaagt

SEQ ID NO: 223 - DNA, 1001 bp, Homo sapiens
tggtacccctgcccgtaccggtccggaattcccgggggcctttatgaaccaagcttttytacaaagtcacattcaacgccgccacactgaagaaaattctcattttgagtatcagaaaaatgcacagattgagaagctccggagtgagatcgtcgtattgaaggaagagctgcagctcaccaggtctgagctagaggctgcacaccatgccagtgcagtcagattctccaaggaatatgaaatgcagaaaacaaaagaggaagactttttgaagttatttgacaggtggaaagaagaagaaaaggagaaactagttgatgaaatggaaaaagtcaaggagatgtttatgaaggaatttaaagaattaacttcgaagaattcagcattagaatatcaactgtcagaaatccagaagtccaatatgcagatcaagtccaacataggcacattaaaagatgcacacgagtttaaagaagaccgttctccatatccccaggatttccataatgtcatgcagcttcttgatagtcaggaaagcaaatggacagctcgagttcaagctattcatcaagaacacaagaaagagaagggtcggctcctgtcacatatagagaaacttcgaacctcaatgatagatgatctaaatgcaagcaatgttttctataagaaaaggatagargagctagggcagagactccaggagcagaatgagctgattataactcagagacagcagattaaagactttacctgtaatccattaaacagtatcagtgaacccaaaggaaatcctttagcctggcaggcttttgaatctcagccagctgctccagctgtgcctatgaatgccccagccctgcacactttggaaactaaatcaagtctgccaatggtgcatgaacaggcattctcgtcgcacatactggaaccaatagaagaactttcagaggaagaaaaaggaagggaaaatgaccagaaattaaataacaacaaaatgcatt

SEQ ID NO: 224 - DNA, 1317 bp, Homo sapiens
ccacgcgtccgcaggggagaaatcctttcaatgcaatcaatgtggaaaaacatttggccagaagtcaaacctcagaatacatcagagaactcacactggggagaaaacttaccagtgtaatgaatgtgaaaaatccttctggcgaaaagatcatctcattcaacatcagaaaactcacacgggagagaaaccattcaaatgtaacgaatgtgggaaaacttttgcccggacatcaaccctcagagtgcatcaaagaattcacactggggagaaaccatttaaatgtaatgaatgtgggaagaaatttgtccggaaagcaatccttagtgatcatcagagaattcacacaggggagaaaccctttcagtgtaataaatgtgggaaaacttttggccagaaatcaaacctcagaatacatcaaaggactcacagtggggagaaatcttatgaatgcaatgaatatgggaaattatgtaagaagtctaccctaagcttataccaggaaaattcagggagaggggaatccctattgatgtaataactagaaaatccttttgacaaaaggaataccccatttgatatcagagatacacaaaaaaccaattgagggtagtgaatgtaagaagacagtcccagaagtaaaccctcactgtgaatcagagaattcacataggaaagaaaccagatgaagatgaatgcaggaagaattgtgtccaaaatgcaaccttcagagtgtatcaaagaattcagacaggcttctgttttcagagtactatggataggcctgaatgaagtcataccctattagatagctcccacacatcacacaggctggtaatctcttcaccagcaccaatttcattttactccaggcacatagtccagatttcccaatctccttttcatccaggttggtctttgtgactggctactaagatgtggatgtccatgatgtatatcacatcccagtctgaaacataagagacttccctaataaattaccagggccctgtcacaacaaaatggatatcatttctaggacaagcttggtgccgtgctttaatgtggcatggtacaagataaagaagtctgtgcctgaatgaatacacgcagcaaaattctcctcttctgtgtctttcccagttgaacattatgtgagcaaaatttaagcttatacagtagtccccccttatctgtattttcactttacgcaatttccattaaccatggtcaactgtactttaaagttattaaatggatccagaaataaacaattcctacattttaaaaaaaaaaaaaaaaaaaaaaaaaaaaaaa

SEQ ID NO: 225 - DNA, 1627 bp, Homo sapiens
ccacgcgtccggttctgagtaagtgagtttgtagacattttcttgtaagaaaatgttccatgctttactctgttttggacattttcttttgaaaaattttgagatagaaaccttaatatcatttcatatatttacagcatatagttaatttgagtagagtcaaattaatcttactttagaatttgattactaagtattagcatggataataatgcttcttttgcttaaatgtaaaaattaggccgttttactaggtgtactttgtcttaatcatattcctatttttttatacagctgtgcaaccatattgcttctgggaaaaaatgtcaatatgttggaaactgttcctttgctcatagtcctgaggaaagagaagtttggacttacatgaaggagaatgggatacaagatatggagcaattttacgaactatggctcaagagtcaaaaaaatgaaaaaagtgaagacatagccagtcagtcaaacaaggaaaatggaaaacaaattcacatgccaacagattatgctgaagttacagtggactttcactgctggatgtgtgggaaaaactgcaacagtgagaagcagtggcagggccacatctcctccgagaagcacaaagagaaggttttccacaccgaggacgaccagtactgctggcagcaccgcttcccaacaggctatttcagtatttgtgataggtatatgaatggcacctgcccagaaggaaacagctgtaaatttgcacatggaaatgccgaacttcatgaatgggaagaaagaagagatgccctaaagatgaagctcaacaaagcacgaaaagatcacttaattggcccaaatgataatgactttggaaaatatagttttttgtttaaagatttaaactaatatgctggcttttatgtatgatacctaatcagagcattgaccagaaaaattgaaagtgttctgaggcacatagcagaggagctgcagatttcctgcttgtattggcgtatatcgttcctcctgagcagcaacccacagtaggtaggaaaatgggctgtttcacaggcctggccacgctctcacggaaccactggcatcagatggtgaagtgactgctacccggttgccatctgttgaacagacttttggatgaagtgtgttggggaagaggataaggttatatctaggacaactctttgagttggtccttcatataagaatcgtgacggtaagagaataaacacttgtactgggatcagaatacatgatggatgaaattctttacatgttttagcagaatgaatttgtttaatataataaagtttgctacttatctgtatgtaggttgctaaaaaggattttcttaactcagattttaagccaaataaccatttaacactagtatttgttaaatgggttatttttctgtatttgtatgtttcactataataagggaattaaggataatgtgcattgagaatattttgaaaaataattgactcaaattttatttcttggtcttttgctgtttaaatgatgattttgaaagattaaacctgtactgttggtattgtgttagtgtatggaccaatactgcctgtaataaagattttatatataaaaaaaaaaaaaaaaa

SEQ ID NO: 226 - DNA, 1307 bp, Homo sapiens
ggcacgagaaaccctacaaatgtaaagaatgtggaaaagcttttcaccgatactcaatccttagtacacataagaaaattcatactggggagaaaccccacaaatgtggagaatgcggaaaagcctttaactggtcctcaactcttattacacataagataattcacagtggagaaaaaccctacaaatatgaagaatgtggcaaagcttttaaccagtcctcacaccttatgagacataagaaaattcatagtaagagaaaccttacaaatgtgaacagtgtggcaaggtctttaagaagtcctcaactcttactgcacataagatcattcatactggagagaaaccttacaaatgtgaggaatgtggcaaaggttttagccaactctcaaaccttactaaacacaagaagattcatactagagagaaaccctacaaacgtgaagaatgtggcatatcttttaaccagttctcacaacttgctatacataagatgattcacacttgaatgaaaccctacaaatgtgaacgatgtggcagttgttttaactagttctcgaactttactatgcataagaaaattcaaactggagagaaactctacaaatgtgaagaatgtggcaaagcttttaaccaagtctcaacacttactatacataagataatttatactggagcaaaaccttggaaattcaaagaatgtggtaaaacttataatcctcaaaacttcttacacctaaaattcatgcaggagagaaaccccacaaatgtgaaaaatttggtaaattctttaacaaatcttcaaccctttctgcacataatataattcatactggagagaaaccccacaaatatgaagaatgtggtaatgcttttaaccaattctcaaatcttactaaacaaaattaatactgaaaatgttacaaaccagaaaaatgtgaaaatgattttaaaaaaaccttcaaatttttctaaacataaaggaaatcatactggtaagaaattataaaaatgtgaagaatgtgacaaagcctttaaatggttgtcacacttgattgtaggtaagataattcatactggcagaaactcccagaagtgtgaagaatatggcaaaactttaattcctataccttattgcacaggaaagcatttatacttcagaaaatgttgtactgatataaagaatgtagaaaagccattaatatgtgcttacatcttattcaacattagagagttagtacttaataaaagcattataaatgcaattactttcaaaaaaaaaaaaaaaaaaaaaaaaaaaaaaaaaa

SEQ ID NO: 227 - DNA, 589 bp, Homo sapiens
  SITE (434): n equals a,t,g, or c
  SITE (458): n equals a,t,g, or c
  SITE (532): n equals a,t,g, or c
  SITE (546): n equals a,t,g, or c
  SITE (561): n equals a,t,g, or c
gctctactaaatttagtggagatgggaaatcatttcttcatggtaactatgaagaactttattctgcagctaaattctctgtaagtacaaaagccaatagcactaaatcccaagtcagtaagcatcagagaactcatgaaatagaaaaaaaccacgtatgcagtgaatgtgggaaagcgtttgtcaagaagtctcagctcactgatcatgagagagttcatacaggagaaaaaccttatggatgtactttgtgtgcaaaagtgttctccagaaagtccaggctaaatgaacatcaaagaattcataaaagagagaaatcttttatatgcagtgaatgtggaaaagtcttcactatgaagagccgtctgattgaacatcagcgaactcatactggagagaaaccctacatatgcaatgaatgtggaaaaggcttnccaggcaagccgtaatctcattgnacatcagcgaaatcatactggagagaaatcctactcaagaggctgaggcatgagaattgctttgaacctgggangcagaaggttgcantgaagccgagaatgnaccactggccttcagcctggcaacggac

SEQ ID NO: 228 - DNA, 1422 bp, Homo sapiens
  SITE (1418): n equals a,t,g, or c
ggcaagatctagtgatttggagtatgagggagaaaaaatatgggataagctcaagatgataacctcaaggcctaaagaatagattgtgttccccagcagatagtcattgatgccacccaagtgctgccattagcatttccacctgcagctcagtaggggccatgacatgttttattgttattgggagtcatgacctatataaaggctgattctctccccatccccctcctcttctggccttattatctcagatataatatctaacatctgtctacttaggtgagaggccctatctgtgtgactatccagactgtggaaaagcctttgttcaaagtggacagctcaaaacacatcagcgtcttcacaccggagagaaaccttttgtttgttcagaaaatggtacggtgttagaagttaagtttatggaataactagttgtgacttaacagttaaaatatcctttccttgaatttttttgaggggaaagattttttaatataaattttataaaacttataagctttcttctttgataattgtgatacatgctgaatttctcagaaatgattgattttaaaaatttgktggttttgatttttgtgggtacacagtacgtatacatatttacagggtacatgagatacttgatacagacatgcaatgcataataatcacatggtaaatgggctatccatcctctcaagcatgggtcctttgtgttacaaataatcccgttatactcttaacttattttagaatgtacagttaaattattattgactatagtcaccgtgtgctataaaatactaggtcttattcattctttctatttttggtacctattaaccatccttacctgcccctcatcccccagttccccttcctagcctctgggcaccattgttctactgtctatctccacgagttcaattgttttgatatttagatcccacaaataagtgagaacaagtgatgtttgtctttctgtgcctggcttaagaaataattgatttttaaataaagtaatcctttttgatgaaaccttaaagggcaattaaagatactatatccagttgtaggcagtagaaaaatctgtaaaagtaaatacagcctttggagcaacattttaaactttttaattattaaagtgaagtaagcatattatcctaagtgattttcttaatcttttatcagtttctaaagatgcacatttttatgcagttacagtaattttgaagtttccgtgcaatctgtcctgttgctctgtaattttcttgattattacaaatgttgcaaaagtctgcaaagttttcatccagcaagtttgcttaagcctatatgcaatggtttcctctatgttgaataatgaatatttgtttaaaaattttttgagacggagttttgctcttgttgcccangctg

SEQ ID NO: 229 - DNA, 935 bp, Homo sapiens
gcacgagggttaatggagatgggaaatccttccttcatgccaagcatgaacaatttcataatgaaatgaacttccccgaaggtggaaattctgtgaatacaaattcacaattcattaagcatcagcgaactcaaaacatagataaaccccatgtatgcactgagtgtgggaaggctttcctcaagaagtctcgcctcatctatcatcagagagttcacactggggagaaacctcatggatgcagtatatgtgggaaagccttctccagaaagtccgggctcactgaacaccagagaaaccacacaggagagaaaccctatgtatgcaatgaatgtgggaaaggcttcagccagaagacatgtttaatatcccatcagagatttcacacaggaaagacaccctttgtatgtactgagtgtggaaaatcctgctcacacaagtcaggtctcattaaccaccagagaattcacacaggagagaaaccctatacatgcagtgactgtgggaaagctttcagagataaatcatgtctcaacagacatcggagaactcatacaggggagagaccgtatggatgctctgattgtgggaaagctttctcccacttgtcatgccttgtttatcataagggaatgctgcatgcaagagagaaatgtgtaggttcagtcaaattggaaaatccttgctcagagagtcatagcttatcacatacacgtgatctcatacaggataaagactctgttaacatggtgactctgcagatgccttctgtggcagctcagacctcattaactaacagtgcgttccaagcagagagcaaagtagccattgtgagccagcctgttgtcagaagttcagtctcagcagatagtagaatttgcacagaataaaaaccatatgaatgcaaaaaaaaaaaaaaaaaaaaaaaaaaaaaa

SEQ ID NO: 230 - DNA, 1895 bp, Homo sapiens
ggcacgagctcgtgccgagaaaagctatagagaagtctgaaaccacttctgaacacacttgtcagctctgtggtggttggtttgatactaaaattggattatcaaatcatgttagaggccacttgaaaagacttggaaagacgaaatgggatgctcacaaatctccaatctgtgttctgaatgagatgatgcaaaatgaagaaaaatatgaaaaaatcttaaaggcattgaacagtcgtcgtattattcccagaccatttgtagctcaaaaacttgcatcaaatgaatatgatgaaacaaaaccagaactgcccagtgggaaaaagaatcagtctcttacactcatagaacttcattttctctactaatggccgaagcagcttcatagaaccaggaaaccttttaaatagccagtttgaattggatgtaaatttgaaattctttttttttaagccacattaaattatctgtttataaatactaaagcaggaaaatggggggaaagtgaattacagtgacatcagagcaaattgaatacttaaaacagtaagtagtctatatattttatatagggtggaagatgtgtttttaaggtttatgaagttttgttggttaactgtgttcactcagtaaaagagcagtacatgtaagcagccattaataaactgttgcacatggatacttatagacagacttattggacaattatgttttttgcagtgttaccagaatcaaggctctgtttattccccacaagacttgcatagaaaaataagatattatattttgtttgtatgtatttagtgttttgtataataccaagaaccgctgactaaatttactcaaattagggcattaaatatcatgtacttcatagtttgagactgttcactcaaatagggcagagtactattctatctagatgtgtaagtgttttttttaaaatcacatggaacggttttttttatactaaaaagtggagggagatttgtttaaacaagtatttctaaaagaaatatgtacatagttctggaaattatttgtggtaaggaaatattctttactccagttgcatttctcagacaataaagtggtggcatccatgctacctcctactttgtcaacaaagatgctatttaccctttacatttttgtatcataatagattttaaaaatctaatgttctttattgcaagacattcttttgttaacaggtttgtttctttttaatgttttacctaaaatttgacatgcttacaggacaggtttgcctcttactttatttaacattgtagaaatgtaattaataaacaatgctcactacacagtttagaatagacgttctcatttatattatcttccaaatttgatcagttagcaaaacttaatacaccaattaaaatatttctacatatgagaatgtttacaatttaaattttagaacttgttttggatgtgattatatgtacgaaaatcgtgtaacactatgctcatgctaagaaccgacataacagaattactgaaataaatgtgctgtgaggaatggaaaatatggtgcaggtgtcttggtcatgataaattgtgattctttttaaaaattttttccaaaaacaattaggtattttaatctgaaatcagattcctttacaaacaacaagtttttgtatgcaagcaccattttatttcatgtagtatggctaatactatagttgaaccaaggatatgcattgattctttgcttcgtatgtaaataaagttaaaaacagttaaaataaggagtattttggtagagtatatacatacctcactgccagtgaaattgctttcctatggtatatctccttaccagaaaaatctctaaataaaaaaaggtttaaagaaaaaaaaaaaaaaaa

SEQ ID NO: 231 - DNA, 1086 bp, Homo sapiens
  SITE (1064): n equals a,t,g, or c
  SITE (1067): n equals a,t,g, or c
  SITE (1069): n equals a,t,g, or c
  SITE (1074): n equals a,t,g, or c
  SITE (1079): n equals a,t,g, or c
acaaatctctccacttggaaggagatcccaatccttctgcagccccaacatccacctgcgcacctaggaaaatgcccaaaaggatttcaatatccaaacaactggcttcagtgaaagctctgaggaagtgctcagatctggaaaaagctattgccaccactgctctgattttcagaaattcttctgactctgatggtaaacttgaaaaagctattgccaaagatctgctgcaaacccaatttaggaatttcgcagagggacaagaaaccaagccaaaatacagagagatcctttctgaacttgatgagcacacagaaaataagctagattttgaagacttcatgatcttgctcttaagcatcactgtcatgtcagatctgytacaaaatatacggaatgtaaaaattatgaaatgaacagttttaaatatgctgtataaaataatggcaaaagacagtgttattaaaatgtttccatcttatttttgattaattgaatatatctatcatgcatctgaaattgcctaggatggttctgattgctggtattcagatccaatgtaactccaaatatttacccatacacttcaagaatgtttgaatgataaggtctctgtgtgctttacaataggatagatttgataccactgaataataaatggcttttgctgagtcagtagcgacctagagcactctacttatagtcattgagtcactcatttattcactaaacatttgttgagcatctacttgatggaactgctgaggatacagtaatgaattggccaggcaattccttccttcagacatgtttgcagaagtctagcagaagagatagacattgaacaatttttaaataattgcatacacagtataattagaattgaaataagggctataggatgctaaaagagattatcacctgatcggagttcaaaggtcagaaaagctttactgacattctataaaaagcaaaaaaaaaaaaattggtccatggatgccagggatatgggtgggaaatggggctgtccacaaatggcacaaggggagttttttattttattntantntaatntattntaattta

SEQ ID NO: 232 - DNA, 2375 bp, Homo sapiens
ggcacgagaaagggtgaaatgggtgccaaaggagacaaaggatcacctggattttatggcaaaaagggtgcaaaaggtgaaaaggggaatgctggcttccctggcctccctggacctgctggagaaccaggaagacatggaaaggatggattaatgggtagtcccggtttcaagggagaagcaggatcccctggtgctccggggcaggatggaacacggggagagcctggaatcccaggatttcctggaaaccgaggattaatgggccaaaagggagaaattgggcctccaggacagcaaggaaaaaaaggagccccagggatgcctggtttaatgggaagcaatggctcaccaggccagcctggaacaccgggatctaagggaagcaaaggtgaacctggaattcaagggatgcctggggcttctgggctcaagggagaaccaggagcaacgggttccccaggagaaccaggatacatgggtttacccgggattcaaggaaaaaagggggacaaaggaaatcaaggtgaaaaaggtattcagggtcaaaagggagaaaatggaagacagggaattccagggcaacagggaattcaaggccatcatggtgcaaaaggagagagaggtgaaaagggagaacctggtgtccgaggtgccattggatcaaaaggagaatctggggtggatggcttgatggggcccgcaggtcctaaggggcaacctggggatccaggtcctcagggacccccaggtttggatgggaagcccggaagagagttttcagaacaatttattcgacaagtttgcacagatgtaataagagcccagctaccagtcttacttcagagtggaagaattagaaattgtgatcattgcctgtcccaacatggctccccgggtattcctgggccacctggtccgataggcccagagggtcccagaggattacctggtttgccaggaagagatggtgttcctggattagtgggtgtccctggacgtccaggtgtcagaggattaaaaggcctaccaggaagaaatggggaaaaagggagccaagggtttgggtatcctggagaacaaggtcctcctggtcccccaggtccagagggccctcctggaataagcaaagaaggtcctccaggagacccaggtctccctggcaaagatggagaccatggaaaacctggaatccaagggcaaccaggccccccaggcatctgcgacccatcactatgttttagtgtaattgccagaagagatccgttcagaaaaggaccaaactattagtgtctgatgcctcattcagcagcctaggcatggtgctttttctgtggtcttttgcatctcaggaagataaccaacagtaatcccttgaaaagaaacttaagtacctcggtgtttttattttttttttcttatggaaaaaaatataaaagatcacatatactgattttaaaggctcctcagtcatttggagcccttggattagcagcattaattaaatctcaagggtttcttgtaaagtccatttatgttaatcaaagttgaatataaaaatccaccattgcctgttagccagtcagttttagtcactgtgaaatatttcacattcagcctccatgcagtagagatttgagtttaatttcatgtccatgtgactttcatgtttcctatctcatagctcatgctactacataagccaaaacatgtatctcatcattggaagtaagatcagggctgatattcacctgggatagacagtattggtgaactactcatttactacagtgtctcagccttgataaagggcagtggattgcctgttgttcggtgttgtgaatagcacctctgaataagattagagtgtttcttaattcatttcaaactctaaaattagattaatggtggtgctaagaaagagtattaattactttgggaatggtcaaaattaacattaaaaacattttagacaaaaagtttcattgtacattcaaagaaaatgtaagtttggaagtactaaaagactattttatacttgttgattaatcggaatgtttgttgtatgccttcattttccatttcacttatatgtgtatgtccatatatgttaattttcattgtagcaaagctaatggaaataaagctaatgctctagttgaaagaaaaggaaaactcctgaaatcctagaatgtcttgttatttttagctgactgtaaaatattatgaacagtctttgtgtattgtgcttaatgcttttgtaagaaacagaatttgaaatatttcatcctttcatgctcaaaattttgttacatgcttgttattcagagtataataaagttttgtacaggcctgaaaaaaaaaaaaaaaaaaaa

SEQ ID NO: 233 - DNA, 2201 bp, Homo sapiens
  SITE (952): n equals a,t,g, or c
  SITE (2190): n equals a,t,g, or c
  SITE (2191): n equals a,t,g, or c
  SITE (2198): n equals a,t,g, or c
tcaggctgcgcaactgttgggaagggcgatcggtgcgggcctcttcgctattacgccagctggcgaaagggggatgtgctgcaaggcgattaagttgggtaacgccagggttttcccagtcacgacgttgtaaaacgacggccagtgaattgtaatacgactcactatagggcgaattgggtaccgggccccccctcgaggtcgacggtatcgataagcttgatatcgaattcggcacgaggaaaccctgtctctactaaaaatacaaaaaaaaaaaaaaaaaaaaaaaaaattagccaggtgtggtggcggccagaggcttaggcaggaaaattgcttgaacctgggaggcagaggttgcagtgagcggagatcacgccactgcacaccagcctgggtgacagtgacagactctgtcccagaaaaaaaaccaaaccaaaacaaaacaaaacagtccaagatgtaggcacacctgggcaacatggggaagggggaatgtgaaccaaggaagatgggaaatgaaatcccaggacctggaggccagaaagtggggtccccggatcttcagccaggagcttcctgccctcatcccactaacagcagaggccatgtcctcgacatcacatcggggcctccaacacctaccaaaggagcctttgggacagggagcagcagcaggcagcccgaagcgggtacggggccaccagatcccagcctcaatcgctcgtgggcagctgtcataattcactgcggggaagagcacatggtcacccaggagcagctctccctctgctgtcctgcccaggctccccagccctccctaggcytcccmaggcctccccaggcctgcaaccagccccttcctggctttcctkgggtgcaggtgcctagcacactgtaaggagggctgcccacccatcccaggagccccaccttcacagccattggtggngacctcagcaaaagggttgtcacagcggtcacactgacgcccgatgacacctggcttgcatggacactggccatcctcagggtcacagactctggacaaggagcctgtggggtagcagtcacacaagaggcaggtggggctgcctgggggccggtagtggttctcctgagaaaggagggaagaacggtgtcattggccaggctctcttcccaggatgctcatgggtccttctcagctgtggcccctgtggagagggtcccgacctcaggtcccctcaggagcagtattcaaaataattaacactagcaatgctttggagttgagcccatcagcgagatgtcacagaatcagaacaggctgcaaaccaccaccacaccaggccagagctcatgggttacacattggcccagggtccccctgcgcctcagacwcacgaaggtaagcagccaactgccctgcctgtgagagcaaaggcwcaaggccctcagctctacaggaagacccatccctacagcctgccctctagggcccaggagatgtggacagaggcccaagtggccacagtggaggcttgcttggggctgtcaccttgcagtggcactcgccgcttgtcttgttgcagtctgggtcaaagcctttgctgacatcacagttgcatgggccacatgtgggatgtccccaccagccacggggacaaggctggtcaatcctgcagagagggacccaggtaggcatgagctccccctgccactcccacctaacctaggtgagccctatgtggcccttctgaccctggctgtggatcagccaggctttcggggctctgagggacacaccagagagaagcagcagccactgggacctgctgccacatgccctggtctgcttacctggtctcacagtatggcccaaggtaatttgggggacactcgcaggtatagccatggggggcactgggcttgcgggtacacacagactggtgctcacacgggttcaggtcacacacattagtacagttgtcaccatagtaacctgggaccagaaggaccagagaggctcattccccctcgtgccgaatcctgcagcccgggggatccactagttctagagcggccgccaccgcggtggagctccagcttttgttccctttagtgagggttaatttcgagcttggcgtaatcatggcatarctgkttcctgtgtgaaattggtatccgcttacaattcacacaatatannagcccgnaag

SEQ ID NO: 234 - DNA, 651 bp, Homo sapiens
gcacgaggaaagaccaccggcgcctgcacacaggtgagcggccctttgcctgtgaagtgtgtggcaaggcctttgccatctccatgcgcctggcagaacatcgccgcatccacacaggcgaacgaccctactcctgccctgactgtggcaagagctaccgctccttctccaacctctggaagcaccgcaagacccatcagcagcagcatcaggcagctgtgcggcagcagctggcagaggcggaggctgccgttggcctggccgtcatggagactgctgtggaggcgctacccctggtggaagccattgagatctaccctctggccgaggctgagggggtccagatcagtggctgactctgcccgacttcctctttggcacctccattccctgttgctgaaggccctccagcatccccttaagcatctgtacatactgtgtcccttcctcttcccatccccaccaccttgtaagttctaaattggatttattctctcgtgaggggggtgctctggggtccttgacacacataaaggtgcccccccaccttccacctcttagcactggtgaccccaaaaatgaaaccatcaataaagactgagttgccaaaaaaaaaaaaaaaaaaaaaaaaaaaaaaaaaaaaaaaaaaaa

SEQ ID NO: 235 - DNA, 577 bp, Homo sapiens
  SITE (294): n equals a,t,g, or c
acgctctagaactagtggatcccccgggctgcaggaattcggcacgagcttctttgcaggtctgctgctaccagctagkccaagccaccaccagctctgccatggagccttttaattggactccctgcttccattcttgtcctttctagagaaatctttaacaaaaagcaagtgaaaattacctctgaaaaaatgaccacttacaaaaggcacaattttcttactgagtatcagatcgttcataatggagaaaaggtgtatgagtgtaaggagtgtaggaagacctttattcgncgctcaacacttagtcaacacctgagaattcatactggwgagaaaccttataagtgtaaggaatgtgggcaggcctttagacagcgtgcacatcttattcgacatcacaaacttcacaccggtgagaaaccctatgaatgtaaggagtgtgggaaggcctttacagtgctccaagaacttactcaacatcagaracttcatacgggtgaaaaaccctatgaatgtaaggaatgtggaaaggcctttagagtacatcagcaactggctcgacatcagagaattc

SEQ ID NO: 236 - DNA, 457 bp, Homo sapiens
  SITE (382): n equals a,t,g, or c
  SITE (438): n equals a,t,g, or c
gcctgatcgagcggcgggagcgagggcctggacgtatgtcttcaacagttgtaacagcagctgccatttgctgaatgacagcatgtgtcacacactctgctgagtattacaggcatttttttctaatacaaagtcttgtagtgtggaaatacttgcagacttgaaggaattatcagtctttcattttctatcatcagtgtcctatgatagtttgtgcttccctccctcatccctttgttcatgtcactctgttcaccaacccactctgctgaaatgtcgttatttcttcaaggcccggaggaaatgctaccactctcatcagagggttcagagatgggcagtgagaaggagcagagtccagaaccacacckgcctgargaanggggaarggggtaagccttggagagtggatgacycagagggttctggatcccaccngggagaaggagcttgggca

SEQ ID NO: 237 - DNA, 478 bp, Homo sapiens
tcgacccacgcgtccggaaagccttcaccagtgacaacaatgaatgtaatgaacctgaaaaaagcttcagtctggactctaccattgatacagatcagagagttcttagaattcagaatattgatgatactgataagtatgacatgggggtgaaccagaattcagctgctgggaaacaagaacaaataaatctcatacaggatgttcagagtagtgaatataaggaaagcttaatggatctctcccaccttagtaaatgtgacagcattcctgccactgagaaatcctataaatgtgatgcatgtgagaaggtcttccatcagagctctgccctttccagacatcagagaattcatactagagagaaaccgtacaagtgtaaagaatgtgagaaatctttcagtcagagttcaagtcttagtcgacataaaagaatacacactagagaaaaaccctataaatgtgaagcatctgataa

SEQ ID NO: 238 - DNA, 560 bp, Homo sapiens
  SITE (526): n equals a,t,g, or c
  SITE (544): n equals a,t,g, or c
  SITE (551): n equals a,t,g, or c
tcgacccacgcgtccgatccggcaatcgacctgaggacttgcgagccgctcagctcccgggacgtttggagctgctgctaaataatttctgctcagccatgtcgccggctccagatgcagccccggctcctgcgtcgatctccctgtttgacctcagcgcggatgctccggtctttcagggcctgagcctggtgagccacgcgcctggggaggctctggcccgggctccgcgtacttcctgttcaggctcaggggagagagaaagcccagaaagaaagctactccagggtcctatggatatttcagagaagttattttgttcaacttgtgaccagaccttccagaaccaccaagaacagrgggaacattataagcttgactggcatcggtttaacctaaagcaacgtctcaaggacaagcctctcctgtctgccctgggactttgaaaagcagagctccacaggagatcttttccagcatyttgggatcagaagaytcaggattcagccagtgagggagggatttncaggacattgggattccngggaganggggttaca

SEQ ID NO: 239 - DNA, 1801 bp, Homo sapiens
tcgacccacgcgtccgcccacgcgtccgcccacgcgtccggtgaatttgtccgtctccgacttctggagagtgatgatgcgggtgtgctggttggtgagacaggacagccggcaccagcgaatcagacttccacatttggaagcagttgtgattgggcgtggcccagagaccaagatcactgataagaaatgttctcgacagcaagttgaaagcagagtgtaacaagggatatgtcaaggtaaagcagagtttgaggaagaggcaaagaaccctggcctggaaacacacaggaagagaaagagatcaggcaacagtgattctatagaaagggatgctgctcaggaagctgaggctgggacagggctggaacctgggagcaactctggccaatgctctgtgcccctaaagaagggaaaagatgcacctatcaaaaaggaatccctgggccactggagtcaaggcttgaagatttctatgcaggaccccaaaatgcaggtttacaaagatgagcaggtggtggtgataaaggataaatacccaaaggcccgttaccattggctggtcttaccgtggacctccatttccagtctgaaggctgtggccagggaacaccttgaactccttaagcatatgcacactgtgggggaaaaggtgattgtagattttgctgggtccagcaaactccgcttccgattgggctaccacgccattccgagtatgagccatgtacatcttcatgtgatcagccaggattttgattctccttgccttaaaaacaaaaaacattggaattctttcaatacagaatacttcctagaatcacaagctgtgatcgagatggtacaagaggctggtagagtaactgtccgagatgggatgcctgagctcttgaagctgccccttcgttgtcatgagtgccagcagctgctgccttccattcctcagctgaaagaacatctcaggaagcactggacacagtgattctgcagagcctgagctgctgctgtggtgtggcccactggagcaaactgctggcacctattctgggttgcttgtgaacttctactcatttcctaaattaaaacatgcagctttttcacaaatttattctattattgagtggccacaatgtagagtggctcaaagtacttcaggattaggaatttggggtttgtcatagatgtattctctggtgagggtggctgggatatacctgacccaccatcttcagaaggacccatgtcaggtctgaccattgggagcaaagccatgttcacactgacctaatgcagagtatggaagcattgggctggttatacatttctgtttcttagatttatcctccgcctctgtaggcatggacaacctttaatcagagcatctagagtggcctcttgtttatcctgaagatactgatgggtcttgttttctgttagtctgttttgtaatattcttttcccttccttcatggggaggcttagtttgtccagtccttccatgcccttctatcccagattacctaaatgttcccttctcaggaattctgtctcatcagttcttcacagtgagaaaagaggctagatgatggtggggggttgggagttttcttctaataccgagggttcctggctgtgaggaaacagccacatgttcgtcatgattgagctgtgaagtcttcttggacctgttgtctgaaaataaagttaatttgtttgaggcatctctcttaaaaaaaaaaaaaaaaaaaaaaaaaaaaaaaaaaaaaaaaaaaaaaaaaaaaaaaaaaaaaaaaaaaaaaaa

SEQ ID NO: 240 - DNA, 586 bp, Homo sapiens
ccacgcgtccgcagaagggtctgcctgacgcccaccttgggctgcccccaggcctggctaagaagtccagctcactgaaggaggtggtcgccggggccccccggcccggcttgctcagcctggccaagcccttggatgcccctgctgtcaacaaagccatcaagtcgcctcccggcttctcggccaagggcctgggccacccgcccagctctccactcctcaaaaagacaccactggccctggcgggctcccctacccctaagaatcctgaggacaagagcccccagctgtccctgagcccccggccggcctccccaaaggcacagtggcctcagtctgaggatgaggggcccttgaacctcactttagatagtgacgggggcagagagctggactgccagctgtgcggtgcctggtttgagacccgcaagggcctgtctagccacgcccgtgcccacctgcgccacctgggcgtcagcgatccggacgccaagggatcccccatagacgtgctccacgggctcatcaggagggacggcgtccagatccgcctcccacccaggcgcggcgccctggcccacccggg

SEQ ID NO: 241 - DNA, 4363 bp, Homo sapiens
  SITE (2): n equals a,t,g, or c
  SITE (3): n equals a,t,g, or c
tnnattagcttttgcaaagctatttaggtgacactatagaaggtacgcctgcaggtaccggtccggaattcccgggtcgacccacgcgtccgcagagcctggccctccaccctctgtcatcacttttgcccacccagccccctctgtcattgtccatgggggcagtagcagtggtggaggggggagtgggacggccagcacaggagggtcccaagctgcctcggttatcacttacactgctcccccgaggccacccaagaaacgagaatacccacctcctccccctgagcctgcagccacacccaccagcccagccacagcagtcagcccagccaccgctgcagggccagccatggccaccaccacggaggaggccaagggccggaatccacgggctggaaggactctgacttacacagccaagccagtgggcgggattggtggaggtgggggtccccccacaggggctggccggggcccctctcagctgcaggctccacctccactgtgtcagatcactgtgcgaataggggaggaggccatcgtcaagcgccgcatctcagagactgacctgcgtcctggggagctgagcggagaggagatggaggagagtgaggaggacgaagaggaggaggacgaagaggaggaggaggaggatgaggaggaatcaaaggctggtggggaggaccagctctggaggccctactactcctacaagcctaagcgcaaggctggagctgctggaggtgccagtgtggggggcagtgggctgccccgaggccgccggccaccacgttggaggcagaagctggaacggaggagctgggaggaaaccccagcggccgagagcccagcgggacgtgcccgcacagagcggaggcaccgatgcggggactgtgcccagaccttcaccaccctgagaaagctgcggaagcaccaagaggcccacggtgggggctcccacagctcccgggccggacggaggccctccacccgctttacctgcccccactgcgccaaggtgtgcaagaccgcagctgccctgagccgccacgggcagaggcatgctgctgagcggcccgggggcaccccaacccctgtcattgcctattccaagggcagcgctggcaccaggcccggggatgtcaaggaggaagccccccaagagatgcaagtctcctcatccagcggtgaggcaggkggcgggagcactgctgctgaggaagcttccgagaccgcctcactccaggaccctatcatttcagggggtgaggagcccccagtagtggcaagcgggggcagctatgtatacccacctgtgcaggaatttccactggccttgattgggggcggccgggaacctggcggtggcaggggaaaatctgggagtgaagggccagtgggggctggtgagggggaccggatggaggggataggggctgccaaagtcactttctaccctgagccctacccgctcgtctatggcccccagctccttgccgcctacccttacaacttcagtaacttggccgctctcccggttgctctcaacatggtcctacctgatgagaagggtgcgggggcccttcccttcctaccaggggtctttggctacgcagtgaatcctcaagcagcaccccctgccccaccaacaccacctcccccaactcttcctccaccaattccccctaagggagaaggggaaagggcaggggttgagagaacccagaagggcgatgtggggtgaaccctggggctcaatccccctttcaccagatgccaccctccctgaaccccccaccactaccagctccctggcctccctgccccttgggagccccttcacactcttgtgcagggacttgggggcccctggagctcaggggtcaggctgctttgtgtgagatgtagttttcccatctcctgggaagggatctttcgaggttcccctctcagtcttcctccagggaatggcctccatgaggggcagggccagcttccatcccttctccagcccttggggcaactgagcaatatacttaacctgaatctctactcacagcccccaccagctctgaatgtctaacctgctcccctgattcgtaaacctaggggaaaccatctctctcacctaatgacccgccttgttctgaagctttctctaagcccttcccagttgcttcctagcacattccattctttgtggcccagggctggaccagaccattgtgatacctgaccccgcccacctgggagtgtggctttgggtttcatccttccccagcgtgggtctctacgtccctgtttcccttgtatcaagacaccttcctcagcttccatgcctttggatcttccatgttcctccccatattcctggacttcggagatggcctctcccaagccaggtcaaggaggtttgggggagggttgcccctctgcccctctgttctgtggctgagcactttcccagtccagggcagggaaatattggccctatcttgacccccaaatccagtgagctccagattcttccaaggcaaaagaggtaagcagatcacacctctttctgcctctacatatggcctattctgggctagaccagatttgggggccaggagggaagaactccatatgggatggagaagggaatctactttctccctgtttttttttcctgatggtttctcccagactagaccaaatagccagaaaaatgataggggtcggatgggtgggtaagcccaggatttgcacatgaccttccatccttacctgtattcccatctccccagtgtcactcccctcaccaatcactccagatggttttgggggaaccattctactcttctggtgggctttggggtatccccaccaactttcccttcaaaatagcaccttacaccccatctttgactcagttccccacacccaaagatcccagcctagggatggggtacagggactttaaatagtccctaatccctaatttgcactagttaaccctggtcagggtccctgtatttccttccagtgggggagataaatgtttgctcctaattctctttgaaaactgggcctccctgctctgtgattggataaatatttcccatcccacccacctccccccaaaaaatagctcacaaggggagagccagtatgggggagcaaatttgacaaatgggaattagaggagtgcagttttaaaaggaaaagttgctgtcatcaaaatggcagccttttccccagctactgtttttggggccaagatggctgccctagcagcaatcactgccaagggcaagatcatggcttttggagggaggtgagtttagggagggccaggaccatcctcctacccctcataccctcccagcatatacaaaaggggaggttttagacaggctccctgaatgttaaccacagaggagtcactccttcattcctcctctgtctctttgcacttttcttggtcttggccacagcctgagtgacgaatttcctactgaatgtaccaagttccaatttttaagggggggaaaggtttcaaatggggaaaaacacacaaaaaaaaaatcactaaaaattcccacaaatcttgtttctggcactttagaaaaactgcaaaaaaatacgtaataaagaatacatatatatatatctacacacaaattatatatctatctatctatacagcggaaccacaagagagactgaggaaggcctggaggcaggggcagaggtgacgacagtgcccctatatccttaacccatactcctctgaggcaaacaggcatgggaaaatggaagggttgaggatggaccggagaattggaacttcagaataggtcaaaattccaaaaccatggacatttttttttgggagaattgagattgtagacattttttttttcttaaatatgatcaaggaaaatagcttccagaatgtggtggttctgggcaacaaatgagattgtggcgacgtggagattaaaatatatgtatttgagctggggaatttgaatattgtgagtttcagatgttggaaatttgggattttgcagttttgtcttttgaaaatgatcaagtcttgtcagttcgtgccctctttccccatgttccctgggaagacgggtggtggcagagtgagaaggccactggttctgtgccgcagcacgcaaaatttagaattctacagactagctctatacgtagtgaggacccagatttagagaaactgaccaatatttatctccgcatttgtgtgtgtgtccaactctgtaggccaataaaccaacaagacaaatgaactgtgctccamaaaaaaaaaaaaaaaaaaaaaaaaaaaaaaaaaaaaaaaaaaaaa

SEQ ID NO: 242 - DNA, 233 bp, Homo sapiens
agggagccaagtgcccatgcccacctctactcccagcatcccagcttccaaactcagcaggccaagctgatctacaagtgcgccatgtgcgacacagtcttcactcacaaacccctcctctcctcacacttcgaccagcacttgctgccccagcgtgtcagtgtctttaagtgcccgttttgtcctctgctctttgcccaaaaaaggaccatgctgggaacatctcaagaaca

SEQ ID NO: 243 - DNA, 832 bp, Homo sapiens
  SITE (765): n equals a,t,g, or c
  SITE (809): n equals a,t,g, or c
  SITE (828): n equals a,t,g, or c
ggcacgagcctctccggagatggtctgaggtgggagaagagctgaagagacctggagccgacagacgggtgaaggccatgccgcctcctgggaaagttccccgaaaggagaatctgtggctacagtgtgagtgggggtcctgctcctttgtgtgctcaaccatggaaaagttctttgagcatgtcactcagcacctgcagcagcacctgcatggctctggggaggaggaggaagaggaagaggaggatgacccacttgaggaagaattctcctgcttgtggcaggaatgtggcttttgttctctggacagttctgctgacctcatccgccatgtctacttccactgctaccacaccaagctgaaacagtgggggctgcaggccttgcaaagccaggctgaccttggcccctgcatcctggacttccagagccggaacgtcatccctgatatccctgaccacttcctgtgtctgtgggagcactgtgagaattccttcgacaatcctgagtggttttatcggcatgtggaagcacacagtctgtgctgtgaatacsaarcagtcggcaaggacaacccggtggtgctgtgtggctggaaaggctgtacctgcaccttcaaggaccgcagtaaacttcgagagcacctccgcagccatacccagggagaaagtggtagcctgccccacctgtgggggcattgtttgccaacaataccaagttcttagatcacatccgtcgccagaccttcattgggatcagcagcanttccagtgttcttcactgtttccaagaagattttgcccacagangccggttttttccgggganccaa

SEQ ID NO: 244 - DNA, 611 bp, Homo sapiens
ggaaaatgaaggaccccagtcaggaaccaacaagccaagggaaacctgccagggccctgagtgtcctggcctccacacgtttctcttgtggtcccattcaggctttaactgcctgctttgtgcagagatgctgggacggaaagaggacctcctccaccactggaagcaccagcataactgtgaggacccttccaaactgtgggctattttaaatacggtctccaaccagggagtgatcgaactttccagtgaagctgagaaatgagaccccaaggcagcctggggttaaggagagagctctgccgccaccttccttcagagcttcgtgctttatggtggtgcttagtcacaaagatcaaacaacaggattggtgtgagtgaacagaaatgatttttgtacatggttttattttcttaacgaaataaaatataagctctcgaagcatatttttctaactatatgcagtcttattttaaaatacgtactgattcttaatatcttagactttcagaataaataaaaagatcaaaatttgaagattgaaatttagcagaatataggctgttcttcaaatacagctctcagtgaaaacaaaaaaaaaaaaaaaaaa

SEQ ID NO: 245 - DNA, 825 bp, Homo sapiens
  SITE (1): n equals a,t,g, or c
  SITE (11): n equals a,t,g, or c
ngaacaaaagntgsagctccaccgcggtggcggccgctctagaactagtggatcccccgggctgcaggaattcggcacgagctcattcgacactctatcatccacactggagagaagccgtatgagtgcagtgaatgtggaaaggccttcagtcgcagctcgtccctcactcagcatcaaaggatgcatactgggagaaatcctatcagtgtaacagatgtgggaagaccttttacaagtgggcagacctcagtcaacatccaagaacttttattggggaaaaactttttgaatgtcaccactgaggaaaatcttttgcaagaggaagcatcttacatggcatctgatcgtacataccaaagagaaaccccacaagtgtcttcactgtgagaaaaccttctgttgccaaatgtcatttgtcacctaaggagtcatattagaaaatcacgcagcttagagccttattctccatccgaattcatcctggaaaaacacccagtggttatwacgcacttgggaaaacctttagctccatctttctcattagtttacagtgcaatgttatctcaggaatttttataaacagaaagaggtgacatagaaaagaaaatgaaatgcagacactgcttttatactgktgkcttgtatgtacatttctgtcctgtgtcaggaaagktagtaagggaaggtctggaaacttactcaatgtctttgttctacaacattgtctcttcttaagaagcattgtttttatgagaaataatgaagccttgagttatgaaatacttttatatttaaggattaaaagamacatgaaaaaacaaa

SEQ ID NO: 246 - DNA, 1433 bp, Homo sapiens
ggcacgagcagaaatccggcaatcgacctgaggacttgcgagccgctcagctcccgggacgtttggagctgctgctaaataatttctgctcagccatgtcgccggctccagatgcagccccggctcctgcgtcgatctccctgtttgacctcagcgcggatgctccggtctttcagggcctgagcctggtgagccacgcgcctggggaggctctggcccgggctccgcgtacttcctgttcaggctcaggggagagagaaagcccagaaagaaagctactccagggtcctatggatatttcagagaagttattttgttcaacttgtgaccagaccttccagaaccaccaagaacagagggaacattataagcttgactggcatcggtttaacctaaagcaacgtctcaaggacaagcctctcctgtctgccctggacttttgaaaagcagagctcacaggagatctttcagcatctcgggatcagaagactcagactcagccagtgaggaggacttgcagacactggatcgggagagggctacatttgagaagttgagccgacccccaggcttttaccctcatcgagttcttttccagaatgcccagggccagtttctttatgcctaccgctgtgtcctaggccctcatcaggatcccccagaagaggcagaactgctgctacagaacctgcaaagtagaggtcccagagactgcgtggtgctcatggctgcagctgggcactttgctggtgctatatttcaaggaagagaagtggtgacacacaaaacttttcaccgctatacggttcgggccaagcggggcacagcccaggggcttcgggatgcccgaggtgggccatcacactctgctggagccaacctgaggcgctacaatggagccacactatataaggatgttcgtgacctgctggcagggccaagctgggctaaggcgctggaggaggctggtacaatactgttgcgtgctccccgctctggccggtctttgttctttggaggcaagggagcacccctgcaaaggggggatccccgactttgggatatccccctcgccacccgcagacccaccttccaagagctacagcgtgtgctccataagctgaccactttgcatgtctatgaagaagaccctcgggaagcagtcagactgcactcacctcagacacactggaaaacagtaagagaggagagaaagaagcctactgaggaagaaataagaaagatctgcagggatgaaaaggaagcgctggggcagaatgaggaatctcccaaacagggttcagggtcggagggagaagatggctttcaggtagagttggagctagtggagttgactgtggggactctggatctttgtgagtctgaagtattgcccaagcggaggaggagaaaaaggaaaaaaaaaaaaaaaa

SEQ ID NO: 247 - DNA, 1061 bp, Homo sapiens
gggtcgacccacgcgtccgatcacaatttgggtttagaatcaggagaactgtcttcaaaacacaactcccaatacatctcacatttttggtgctgactctactaatgagtgttttataataatatattaaagaaaagaggttttgcactatcctgaagatgttttagacaaaaaaaaaaaaacaaaaaaacaaaaaaacaaaaaccatttgcatcaagtcttagaagtacaggaattcctagtctatcaattaaactttaataaaaccaaactcaaagaacatttcattgtgcatttatataaaattttgtcaagtgttactggatttagatcaccccccagtttagaagatcatcagttaatacacagaattgtgtttccacggtgtttattagcctgccatggtttaaaatgcgtttacaccataacatgccgatgaaggctaatgatgggcttactacagaccagaaactgttctgggcacataggttctgtctcattttagctcaccgtctcacaaatagccacaggcagatgcagtaggctaggggatgccggggactgcatgtaggctgcctaaatttacatccgggtccctcaacctgtgcagcctgggccaagtcacttaatctcgtagtgtctcggttttctccactgggaaacagggacaatgatgttgtctttttgttagggttgttaagaagcctggacatcatagacagtgtatacatatttgatagcctcatttttacaggtaaagacactgaaaacagagatcaaagtaactttaactcagggtttcccgggctgtaaatggtagccctgagatctgaccccaggcagcttaactggagaacctgagttctaaccactaaacgcaccacgggaggaacatttgaatatttatttattttttttaacatttgaatttttctatgaggccttatgatgcatactttgacccaagattgcgtgttaaaccatttccagtactgaaagatatttaaattgcagtgaaaaacgcccaatagaatattgccaaaaaaaaaaaaaaaaaaaaa

SEQ ID NO: 248 - DNA, 730 bp, Homo sapiens
ccacgcgtccgaagaaaaacccttcaaatgtcaggagtgtgggaaaggattttgtcagtctagaactctagcagttcacaaaactttacacatgcaggaatctccacacaaatgtcccacatgtggaagaacctttaatcagagaagtaatctgaaaactcaccttctcacccatacagacatcaagccctacagctgcgagcagtgcggcaaagtgttcaggcgaaactgtgatctgcggcggcacagcctgactcacaccccgcggcaggacttctagagaagcccaggatctgtcccgtgccgccgctgctcccctccccagacacctctccacgtctcctacccagggggtcgcatccctagcccttcactgaccccagctcttcccttgctgcagccgcacctgcagctccagggagttaactcttcttctgggggactgagaactgtagaaagccacacactactacatcccttcacaaagagtatatgctagtttcttgtagatattcacagctcattttagagctctgtacataatgttgtgggtctttgttttgttgttttgtttgctttgggatcttgttggatgcacttagatatggaaaatggaagccaaattttatctttaaagactgtattttcaaaataaaactttttcttgtttgtttcaaaaaaaaaaaaaaaaaaaaaaaaaaaaaaaaaaaaaaaaaaaaaaaaaaaaaaa

SEQ ID NO: 249 - DNA, 1061 bp, Homo sapiens
ccacgcgtccgccttcccctgtccacaatgcgacaaggcctatggcacccagcgagacctcaaagagcaccaggtggtacattcaggtgcccggccctttgcttgtgaccagtgtggcaaggcctttgcccgccggccctccctgcggctgcatcgcaagacccaccaggtgccagctgcccctgccccttgcccatgccctgtgtgtgggcggcccctggccaaccagggctccctgcggaaccatatgaggctccatacaggagaaaagcctttcctgtgcccgcactgtggccgggcgtttcgtcagcggggcaacctgcgtgggcatttgcggctccacaccggggagcgtccttaccgctgcccacactgtgccgatgccttcccccagctgcctgaactgcggcgccatctcatctcacacaccggggaggcccacttgtgcccggtgtgtggcaaggccctccgagacccacacacgctccgagctcacgagcgcctgcactccggagagaggccctttccctgtccccagtgtggccgtgcttacacgctggccaccaagctgcggcgccacctcaaatctcacttggaggacaagccctaccgctgccccacctgtggcatgggctacaccctcccgcagagcctcaggcggcatcagctcagtcaccggcctgaggcaccctgcagcccaccctctgtgccttctgctgcttctgagcccactgtggtgctcctgcaggctgagccacaactgctggacacacacagagaggaggaagtctcccccgccagggatgttgttgaggtcaccatttcagaaagccaggagaagtgctttgtggtgccagaggagccagatgccgcccccagcctggtgctaatccataaggacatgggcctcggcgcctgggcagaggtggtggaggtggagatgggcacctgacagctttgccttttgctgacacagctccataaagactcgtgctttttccaaaaaaaaaaaaaaaaaaaaaaaaaaaaaaaaaaaaaaaaaaaaaaaaaaaaaaaaaaaa

SEQ ID NO: 250 - DNA, 2131 bp, Homo sapiens
ctcttggcctttgtgaaaaccaggaagccagagagaggcccggaggttcccctcgaggcccggtcacttctgagaaaactggaggacagagtggcctcgagtcagacgtccctccgaacgcaggccccggggcagagggcgggggcagctggaaggggcggcctttcccgtgcggcgcctgtggccgcagcttcaagtgctcctcggacgcggcaaagcaccggagcatccactcgggggagaaaccgtacgagtgcagcgactgcgggaaggccttcatccacagctcgcacgtggtccggcaccagcgggcgcacagcggggagaggccctacgcgtgcgccgagtgcggcaaggccttcggccagagcttcaacctcctccggcaccagcgcgtgcacacgggcgagaagccctacgcgtgcgccgactgcggcaaggccttcggccagaggtcggacgccgccaagcaccgccgcacccacaccggcgagaggctgtacgcgtgcggcgagtgcgggaagcgcttcctgcacagctcgaacgtggtccggcaccggcggacccaccacggggagaacccgtacgagtgccgggagtgcggccaggccttcagccagagctccaacctcctccagcaccagcgcgtgcacacgggggagcggcccttcgcctgccaggactgcggccgcgccttcagccgcagctccttcctccgcgagcaccgccgcatccacaccggggagaagccccaccagtgcggccactgcgggcgcgcgttccgggcgctgtcgggcttcttccggcaccagcggctccacacgggcgagaagccgttccgctgcaccgagtgcggccgcgccttccgcctgagcttccacctcatccagcaccggcgggtgcatggcgccgagtgagccggggctgcggcggaagagatgccggcggcctggtgggcgcgaggccgaggccgggggaggctcctgtccgccccgtgcgcggtgaggaagtaacagccggctgcgcgcctggttctcgggttgcgaaagcctcgccaggcctgcatccgccttggcttgggagcaatcaggagagacagggctcggggaaggcgagcgctgcccgcgggaggcgattcccagaggcggggaggtctcaggggtctgtcccgggccggccgcccgcctctgagactcccagcctcccacggtcagctgctgcggggcagtggccggtgattgaatcggtcattcctccgcaaccaggcctccatcaaaaccctgcatgagatgagggcctcgggcttcgggttggtgaaggcggggtgggggggcagatatgaagggggcgcccacacagggcatggaagcctcgcgtcctcccccgtaccttgcgggtcggggggtcatccatgtatttcaacgccttttcacagaccggtcatatgagcccgacttctgtgtgcttagaaaattatggaacttggccgcgtgcggggggtcccgcctgtaatcctagcacttttggaggccgagccgggcggatcacacggtcaagagatcaagaccatcctggccaacatggcaaaacccccatctcgactaaaaatacaaaaaattaattgggcgtggtggcatgcgcctgtaatctcagctacttgggagcctggggcaggagaatcacttgaacctgggaggcggaggttgcagtgagcggagatctgggcactgtactttagcctgggcgacagagagacccatctcaaaaaaaaaattggaacctgagaagggggtcgtggggtccccggggcccaccgtctgcacttggcatctgaagtcggggtggtcttgtgggactgaccccttaccctgtgggttctgtactagctccgggcaattggtgacagaatcgagttaaattgtaggacatcgcgttggtgtctgagagggagttggagagctggttggtgtggagggaaaggcttacacacatgtgatttcagaagcgttctgtgggtagaggaatcgttttctctttgagactgttatgagtatgtacaaatgttatttcctgtaaaatattttcattttttaaaatgttttttctagataaaaaaaaaaaaaaaaaaaaa

SEQ ID NO: 251 - DNA, 2468 bp, Homo sapiens
ggcacgagccggcctggtccagcggacagcggctgcagcgggggcgccggctgggaggtgaaagaccttttatgtgtgaaacatgtggcaagagttttgcttctaaggagtacttaaaacaccacaatagaatccatactggatccaaaccctttaaatgtgaagtatgtttcaggacttttgcccagcggaattcactgtaccagcatattaaagtccacacaggggagcgtccctactgctgtgaccagtgcggcaagcagttcacccagctcaacgccctccagcgccaccgccgcatccacacaggggagaggccattcatgtgcaatgcgtgcggacggacattcaccgacaagtccactcttcggcggcacacctcaatacacgataagaatactccatggaagtctttccttgtcattgtagatggctcgcccaagaacgatgacggacacaagactgaacagcctgacgaagagtatgtgtcatccaagctttcggataaattgctgtcttttgcagaaaatggccatttccacaacctggctgcagtccaagacactgtacctaccatgcaggagaacagttctgctgacacagcctgcaaggcagatgactccgtggtgtcccaggacaccctcctggccaccaccatcagtgagcttagcgagctgaccccacagacagactcgatgcccacacagcttcactctttgagcaacatggaataagagcttcaagcagttcccatcctgttagtctgcgtgtgtggtagctgaactcaagatgatgtggggctaagaaaaataattgtccatgtgcaaagatgtgggcaagaatggcctctgcagattttcctgaacttctgctaacttgcacggctttatcacagcatttttaaagctttccctcaaaaatcctgatctgcatgatctcagctactttattgacaaaaaggcagtgaacataacctcacttaattctggtgtagggtgtatgtgctaatcgttctaattcttgattacctagtttatagataactgctggtcttaattgcagagtacagagaactgaaccagctcctgatattgtagttagcagtcttcctggcttctcactctgccttatatttccatgtgggtttacttctctcataactactttcaaggtatttttcttccaagctgaaataaaactggggccacatattttcagtcatttcttccctgttgaattgaagcaaatcagattttctgtggggaccctcaaatgcaactgaagaaatagattgttgcattcattcctccccaccccccatttgtaggcagtaaacaaagtatgactgacagattgaacacctgcaaaactgctagcgtaatctcagcacatacgcagctaggaagtttgtcataaaatcaacttagaaatgagatgaggctgttcagtttgtcttaaaaaaatcagattaggtaaaagctgtcctaccaaagagtctagcaaaacaatatagtatttttttgcagaggcatgaaaaattaagacgctttagagtacttgaaagttgtgtagtcattttatttgcaaaatgaggtgactgtggcaaattatagaacacagagtattattacttttgccaggtttttctgacttgatttctgtaatttccagaaacccagacttctcatttccacacctagagatggaaacaggcaagtaactgacatgtctatttccttgggagcatgtgagaacatagcagtagggaccaaaagtctcagcacacttacctccgattatgccttaaagagttgattgtgaagaaccagtaactttgtcccaaatgcttctttggctgtttcatgcaggacttaattattgcttttaaaaattcacaatgaaaagacgattctgctgtatttgttaaacgttgacatttggttctagggccttgagtatgtgccacgtgcttgtgaaatgctatgattcacatgtaacatttaaacattaatttaaaaagggaaccttggagaattcttttgttcactagttcctttttttctctacatttttaatttattaaacttgctgtgaaaacactttgattttctaagaggaaggtactttaagttccaggatgaacatgtagctgcactatgccagaaattaatgagggaagactttcttcctaagtgcttatgttttaacttatgttagtgaaaccactacaaggtgtttcaggcgctgataacatgcttcacacctgcccttggaggtcacagtactaatttacttcaaatttagttatgacagtgtcactgtatcctagttatgtttacagcacaaataaataatgactgtcatacatccagaggagaccgaacctgcccagctgatgtactgttttatggaataaagtcacttgatcagaaaaaaaaaaaaaaaaaataaaaaaaaaaaaaaaaaaa

SEQ ID NO: 252 - DNA, 821 bp, Homo sapiens
ggcacgagccggcaagcgagtgtccacctgccccttttgctttggcccctttgtgacaactgaggcctatgagctgcatttgaaggagaggcaccacatcatgcccacagtccacacggtcctgaagtctcccgccttcaagtgcatccactgctgtggggtctacacgggaaatatgaccctggctgccatcgccgtccatttggtgcgctgcagaagtgctcccaaggacagcagctcagacctgcaggcccagccgggttttattcacaacagtgaactgcttttagtcagtggtgaagtgatgcatgattccagtttttctgttaagagaaagctgcctgacggccacttaggggccgaagaccagcggcatggggaggagcagcctcccatcctaaatgccgatgcagccccgggtccagaaaaggtgacgagtgttgtgccttttaaaagacaaaggaatgaaagcagaacagagggacctattgtcaaggacgaggctcttcagattttagcattagatcctaaaaaatatgaaggccgttcttatgaagaaaagaagcaatttcttaaagattatttccataagaaaccatatcctagtaaaaaggaaatagaactgttgtcctcactcttttgggtgtggaaaattgatgtggcttcattttttggaaaaagaaggtatatttgcatgaaagcaataaaaaatcacaagccttctgtacttttaggctttgatatgtctgaacttaaaaatgtgaaacatagattgaactttgaatatgaaccataaaacttgcaaaaaaaaaaaaaaaaaa

SEQ ID NO: 253 - DNA, 2262 bp, Homo sapiens
ggcacgagggaacctcagccagtgtccaagcaaaatggggctggggaagataaccaacaggagaacaaacccagccacgaggatgaatcccctgatggcgccgtgtcagacagaaagtgcaaagtgtgcgcaaaaacttttgaaactgaagctgccttaaatactcacatgcggacacacggcatggccttcatcaaatccaaaaggatgagctcagccgagaaatagccacagatgctccatgaggaaaatccctgtccacattggaataaaaaagacatttttgttacaaagtttgcagtataatagagttaacagtactgtctaggctgttgcaatatattctctttcaatgtaccttccttcacctcgtcgtatatatcctcgataagtattaaaacagtatttgagtttaaaagagtttgtatatatttaaatgaataactttttatactctttgttacatgtttgtatcagtatttagtggaaaaccatttgagttgttttgggttagaatttttctttttgtactgtttctttaaaacagagttcttagtaacaggggcagttcctgaattcaaataaaccattttgtatgtttggattttgaatgggttaactaattacaggctaaaataatgccttttttagtgtttttaatttttagaattcactacataaattgtaagtaattgtgggtctcaaaaacactaggaacttttaagtgtcttagcacttcctcgatgtgcctgccctgagggagtgagttcacatttgagacaactgcactccagtgtggacgtgcctttgtcttcaggccatgccgaagggtgtttaaagcagtcttgcaggtcgctcctttcccagccgtggataaaaactgaagctaggaatctaataaggaatgctgatttcctcagttccattttgaggaatggggaaggctattctaaagaaaaaaatgggatttgttttctcggcagatctgcaaggctggctttaagagcacaaggagggaaagtaacgaaagggctggactactataaaagttacaaatacgtagttagaccaatagatttatatagtcaggtttttgtcatgtaatttattaactaactattacagaaacacagctaagaatatcaagtatttctctggctcttgacagaaaaaaatcagttgacttaaccctttgctgtcaaaagagttggcgtttcctgttctgggtgctactgccaaacgttatggtacttagagtcgggatgcacaacttcaaccaccgacttatcaatgcagccgcctgtgtattgcaattggccgttaccttaagcactgagccacccgggtttagttcagccatttcaagaagtatatttaacgtcggtagttctgctttattaaaatgcagcagaggtactcttctgtcccttccgtttatagttctctgagagagttctattttttggttttgttttgtgttttcttttgcattttgtatcttgtatttatccctgaacatgttttgtacctttttttttttttttttttaagaaaaggaattcttttgtgtatatatagatacttgcatgatatactgtagtcaatgttcggttcctcaaaaggtcttgctgctgtcaggtgttatgcactccatccatcataactgtatgaaacacatttcatatgtaaataaacgtgggacatttggcccttgtgcttctgtgagagaattattgatggtgggtctctgacatctttgtgaagtttgggaagtaattaattgcagcgacaagctacagggtgttgcagaattcttcccactcagaagaatggcatattcgttctcattagtaatcagctattttgtcactttcttgttgactccatcagtacatgggtacaatccgagggtgtgaatttcagcttgaaattccattgctgttccttgttttgtttgtattgctctaagttgtattcataatagcactttcatatgtttctgcatttgaaccttgcaataagcctgtgtggtaggccacataggtccgaataacctagttttacagttgagggagctgagctcagattcagttctttgccgaagccctcatagctggtaagtggctttgcatattagaacccaaatattttgctctctaaatctaatgctcgctctatgtggttatgtacatattgacaaatattcatttattcaacaaataaaaagtatgtacaaaacatgaaaaaaaaaaaaaaaaaaaa

SEQ ID NO: 254 - DNA, 946 bp, Homo sapiens
  SITE (945): n equals a,t,g, or c
gaatgaatccactgacaatgatgaattagaagatgaacctgaagagccattttatagatactatgttgaagaagatgtcagcataaaaaaaagtggtaggaaaactctatctgtgcatgtggtaaatgtggacaaatacttgtaaagggtaggcagcttcaggaacatgctcaacgatgtggcgagccccaagatctgaccatgaatgggttaggaaatactgaggagaaaatggacttggaagagaatcctgatgagcagtccgaaataagagatatgtttgttgaaatgctggatgattttagggacaatcattaccagataaacagtatccaaaaaaagcagttatttaaacattctgcctgcccttttcgatgtcctaattgtggccagcgttttgaaactgaaaatctagtggttgaacatatgtctagctgcttagatcaagatatgtttaagagtgccatcatggaagaaaatgaaagagatcacagacgaaagcatttttgtaatctgtgtggaaaaggattttatcagcggtgtcacttaagagaacactatactgttcatactaaggaaaaacagtttgtttgtcaaacatgtggaaagcagtttttaagagagcgtcagttgcgactgcacaatgatatgcacaaaggcatggccagwggtgaaatagggcctctaaacctgtggagaagtgagagatctgaatttggagaggacatggggaagaatcaatcttcaacagataatcttaagtacagacccaggaatatcagatctgaagtggcaccatcttttckgtcttcctgacaaacttccatccarcccaaaaagttccattgcaaagatccaagaaaactcagtaaagatcactttgggaatcactttgttgtaaccaaaattgaatccagggtgactctaataattggtggtaaatcng

SEQ ID NO: 255 - DNA, 1346 bp, Homo sapiens
ccacgcgtccgcggacgcgtgggcggacgcgtggggttttttttagattggaaaatgttcagtatccctaccaactctacattgctccttccaccagcagtacagagcgaccaagtccaaatggtcccgacagaccttttcagtgtccaacctgcggggtgcgattcacccgtattcagaacctaaagcagcacatgctcatccactcaggaattaaaccatttcagtgtgaccgctgtgggaaaaagttcaccagggcttactcgctaaagatgcatcgcctaaagcatgaagtgatttcctagtaccggactacttaaaccaggaacaagaagagacccttgttcaatatgatcttggagaacacggttttgaaagcaactcctctgttcaaatgcctgtcatttcacaggtctcctcaacccagaattgtgaaagcacttttcccttggggtctcttggtgggctggcagaaaaagaggaagaagtgccagagcagccaaagagcagtgcttgtgctgaggcaaccagagatgaccccccaaaatcagagctgtcttctataactattgagtagttttgtgatttggcttcagttttgttttttggaaagtgcctgtgcttggtcttgtacatttaaatttaatttaattttttaaacaaaaaaagccgggtgggagggagggggagattgggaaagaatttccctttttactttctgagccctgaaactgattttatttttcctaactgagagattgcttctgtaagtacacaataacatgatgttgaaacagaaactatgagacttaaggagaactggttgacttaaaacatataccagttccttcttccattgttaaaagtaggctaacaacagatcattagctagagaggaaatcagatgattattgaccttcttgagacaagagggtacatgagaaactaattactaaacagcttgacaaatggcctgagtagatacttactgctgtacacaggatgttgtataatattttgtaaagcctgttgtttttggaagtatttatggtaagctttcttaaaaattattatggtaaatacttctgaaatccggcgtacttttctttaagctttgtcatttctgttatgatttttcatggtgaaattttggtactgagatgggcattctctgtacctttatagtaccactccaaaggcaaggaaccatgattgacaacagtcaagctgtggatgaaatgaccaggaacggagaatgaagtatgtaaatcccagcttcataggaactcttctcatactgcttttcagattaaaattgctgtttacctggaaaaaaaaaaaaaaaa

SEQ ID NO: 256 - DNA, 1736 bp, Homo sapiens
tcgacccacgcgtccggtcctatagaagttcacactgctgaagatgttccaattgctgtagaagtgcatgcgatttctgaggattatgatatagagacagaaaacaattcctctgagagtctccaagaccaaactgatgaagaaccgccagctaaactttgtaaaattcttgacaagagccaagctttgaatgtgactgcccagcagaaatggcctttactgagagctaatagcagtggcctctataaatgtgaactttgtgagtttaacagcaaatatttttctgacttaaagcagcatatgatcctgaagcataaacgtactgattcaaatgtgtgtcgagtatgcaaggaaagtttctctaccaatatgcttctgatagaacatgccaaactgcatgaagaggatccctacatttgtaaatactgtgattataagacagtaatttttgagaacctcagccagcacattgcagacacccattttagtgatcacctctattggtgtgaacagtgtgatgtacagttctcctcaagcagtgaactctacctacatttccaggagcacagctgtgatgaacagtacttgtgtcagttctgtgaacatgaaactaatgatccagaagacttgcatagccatgtggtaaatgagcatgcatgtaaattaatagagttaagtgataagtataacaatggtgaacatggacagtatagcctcttaagcaaaattacctttggcaaatgtaaaaacttctttgtatgtcaagtatgtggttttcggagtagacttcacacaaatgttaacaggcatgttgctattgaacatacaaaaatttttcctcatgtttgtgatgactgtgggaaaggcttttcaagtatgctagaatattgcaagcatttaaattcacatttatctgaagggatttatttatgtcaatattgtgaatattcaacaggacaaattgaagatcttaaaattcatctagatttcaagcattcagctgacttgcctcataaatgtagtgactgcttgatgaggtttggaaatgaaagggaattaataagtcaccttccagtccatgagacaacttgattattctctttaacttacagaatgttagtttaaaataataaattcatcctttttttggagatgattaaatggatgattgtaaacacaacttatgaaatctgcctttaacaagtaacttttttaaattataaaattttattggcattgctccattttctgtatataaatatatctttaatgtggtattttcaattgcgtgatagtttgtagtttcaaccactcttggtgactgtcatcctgtttcttccatattctctgatttcatgaattgaaaagaaacaaatgtattgaagaagtgagctacagttttccttccttaaccatgggtgctagtaactttttaaaactcaagacaagattagttttttatgtgtgaagtcattaaattattacacgaccagaactaaaatgcaatatacagttaagtccacggatactcccattaatgagaaataacactaggaagccactattacaggaagaaaagatttggttttcatggcagtctgtttttttaaaaaaaaatttttgagccactatctattgttgaatattttaagatgggatgagggaggaactaataagggcttacacaataaaaaataactatatcataactcaaaaaaaaaaaaaaaaaaaaaaaa

SEQ ID NO: 257 - DNA, 1079 bp, Homo sapiens
aattcggcacgagcggcgacggcggcggctccaagatggcgcaggcgatctttgaggccctggagggaatggacaatcagaccgttctggctgtccagtcattattggatggccaaggagcagtccctgatccgacaggccagagtgtcaatgcgccccctgctatccagccattggatgacgaggatgtatttctctgcgggaagtgtaagaagcaattcaactcgctgccagcgtttatgacccacaagcgggaacagtgccaggggaatgcccccgccctggccacagtctcactggccaccaacagcatctacccaccttcggcagcacccacagcggtccagcaggccccaactcctgccaatcgccagatctccacatacatcacagtgcccccgtccccactgatccagaccctggtgcaggggaacatcttggtgagcgatgatgtgctcatgtctgccatgtcagccttcacatccctggaccagcccatgccccagggccccccacctgtgcagcctgaacatgcattccgtgcccagctacctcacccagcctccacctcctcctccacctcctccaccactgcccccaccgccaccacctcagcctccaccacctccaccccagagcctgggcccccctgggcgtcccaaccctggtgggaacggtgtggtggaggtgtacagtgctgctgcgcccctggctgggagtggaacggtggagatccaggcactggggatgcagccctacccacccctagaggtgagcagagggggcagggtggaagaggacactggtcatggacatcatggccaacccggacccatcctgagcaccagctgtgtgccagacactgtgctggggataccatgaaaaccagacccggtcctggccttcatggggtgtaccacattacaggggagaaggactttaatcaaagcattacacctacagatgtaagatgcaagccatgagaaggtggaatggagtacaggttgtagcagaaatataagctgcctgcaggtaatgcttagtacagttagagaatgcctaccttttcaggcaaaaaa

SEQ ID NO: 258 - DNA, 1613 bp, Homo sapiens
atgggaaatccttccttcatgccaagcatgaacaatttcataatgaaatgaacttccccgaaggtggaaattctgtgaatacaaattcacaattcattaagcatcagcgaactcaaaacatagataaaccccatgtatgcactgagtgtgggaaggctttcctcaagaagtctcgcctcatctatcatcagagagttcacactggggagaaacctcatggatgcagtatatgtgggaaagccttctccagaaagtccgggctcactgaacaccagagaaaccacacaggagagaaaccctatgaatgcactgaatgtgacaaagcattccgctggaaatcacagctcaatgcacaccagaaaattcatacaggagagaagtcatatatatgcagtgattgtggaaaaggcttcatcaagaagtctcggctcattaatcatcagagagttcatacaggagagaaaccacatggatgcagcctgtgtgggaaggccttctccaaaaggtccaggctcactgaacaccagagaactcatacaggagagaaaccctatgaatgcactgaatgtgacaaagcattccgctggaaatcacagctcaatgcacatcagaaagctcacacaggagagaagtcatatatatgccgtgattgtggaaaaggcttcattcagaagggaaatctcattgtacatcagcgaattcatactggagaaaaaccctatatatgcaatgaatgtggaaaaggcttcatccaaaagggcaacctccttattcatcgacgtactcacactggagagaaaccctatgtatgcaatgaatgtgggaaaggcttcagccagaagacatgtttaatatcccatcagagatttcacacaggaaagacaccctttgtatgtactgagtgtggaaaatcctgctcacacaagtcaggtctcattaaccaccagagaattcacacaggagagaaaccctatacatgcagtgactgtgggaaagctttcagagataaatcatgtctcaacagacatcggagaactcatacaggggagagaccctatggatgctctgattgtgggaaagctttctcccacttgtcatgccttgtttatcataagggaatgctgcatgcaagagagaaatgtgtaggttcagtcaaattggaaaatccttgctcagagagtcatagcttatcacatacacgtgatctcatacaggataaagactctgttaacatggtgactctgcagatgccttctgtggcagctcagacctcattaactaacagtgcgttccaagcagagagcaaagtagccattgtgagccagcctgttgccagaagttcagtctcagcagatagtagaatttgcacagaataaaaaccatatgaatgcagtgaatgtggtagtgctttcagtgatcaattacatcatatgtcacaaaaaacacagaggaacaaactgtgatatattcaaggtggaaagcccttgaataaaaccttatggctaataagcatatactcagagaaaaatagtatgaagtggagactgggaaaaaaaaaaaaaaaaaaaaaaaaaaaaaaaaaaaaaaaaaaaaaaaaaaaaaaaaaaaaaaaa

SEQ ID NO: 259 - DNA, 1139 bp, Homo sapiens
aggaaacaccagaaggttcacacaggcataaaaccttttaagtgtagtgactgtggtaaaaccttcaaccgcaaagacgcacttgttctacaccagaggattcacactggagaaaggccttacgagtgcagcaaatgtggtaaaaccttcagtgttctgtctaccctcattcggcaccggaaagtgcacattggagaaaggccctatgagtgtacagaatgtgggaagttctttaaatacaataatagcttcattcttcaccagagagttcacactggagaaaggccttttgaatgcaagcaatgtgggaaaggctacgtgacccgttcaggcctctatcagcactggaaagtccacactggggaacggccctatgaatgtagcctgtgtgggaaaaccttcactaccagatcctaccgcaatcggcaccagcagttccacactgaagagaggtcttatgaatgtacagagtgtgggaaggccttcaaacatagttccaccctccttcagcacaagaaagtccatactccagaaaggcgtcaggaggacagggcacatgggaaggtcgttagctgctagcaccgtgttcatcaggaaaggtcttattccagaaaggaggttaaggagagtggccgtgagagtgccatccgaaagaagctaaaccttgcacatcccaacacccaccccagggagagttcccgtgtgtgcctggtgtgtgggacgctttcgggacccacattgcactctgacttgcctggggctgttggcagtgtcacatcactgagtttatccaccgccatccacctctatccaccccataaggtccctacagcaagtgggacagcagaccttgtgctccttgctctaaacagtagagaatcgttaatagtggagcccaaaacaggcctcattccctacccttgactggtttagctgtggacatgacccacctctggccggaggagctgagctggtatctgctgggggcttcctgggaaggtttaccattttcatggaaatggttgacattacacatggtatttgtcatgccctagcatggactgtctcatactgctctggactatgtggtaataaaggctttattgtttaaaaaaaaaaaaaaaaaaaaaaaaaaaaaa

SEQ ID NO: 260 - DNA, 1109 bp, Homo sapiens
  SITE (435): n equals a,t,g, or c
  SITE (1077): n equals a,t,g, or c
  SITE (1084): n equals a,t,g, or c
  SITE (1109): n equals a,t,g, or c
gcgtgacaggaccgagcagctgggggctgcagcctgctctgtccccaccgatcccagagagaggctgtgagtctggatctgggcgttcgcaccctgagagagggggtcaaagctcccctgcggccccgaggaagaagagcaaggttgaggacagcctcgggtcaccagagtagtttggaggcaggcctgcaggcgcgtccccgctcctcagctccaagctgacgtatctacacctgccggcgggcattaagatggctggttatgccactaytcccagccccatgcagacccttcaggaggaagcggtgtgtgccatctgcttggattacttcaaggaccccgtgtccatcagctgtgggcacaacttctgccgagggtgtgtgacccagctgtggagtaaggaggacgaggaggaccagaacgaggaggaagatnatgggaaggaggaggaggacgaggaagcggtgggggcatggatggatgggacggctccattcgagaggtgttgtatcgggggaatgctgacsaaragttgttccaagaccaagatgacgatgaactctggctcggtgacagtggtataactaattgggacaacgtagactatatgtgggacgaggaggaagaagaagaagaggaagatcaggactattacctaggaggcttgagacctgacctgagaattgatgtctaccgagaagaagaaatactggaagcatacgatgaggacgaagatgaagagctgtatcctgacatccacccgcctccttccttgccccttccagggcagttcacctgcccccagtgccgaaagagctttacacgtcgcagctttcgtcccaacttgcarctggccaacatggtccagataattcgccagatgtgccccactccttatcggggaaaccggagtaatgatcagggcatgtgctttaaacaccaggaagccctgaaactcttctgtgaggtggacaaagaggccatctgtgtggtgtgccgagaatccaggagccacaaacagcacagcgtgctgcctttggaggaggtggtgcaggagtaccaggtgagagaaatganggaatgnggggggatgaagggagtggaaaggn

SEQ ID NO: 261 - DNA, 1043 bp, Homo sapiens
ggcacgagcaacagttcccagttcagtgctcaccggcgcatccacactggggagagcccatacaagtgtgcagtgtgtgggaaaatcttcaacaatagctcccacttcagtgcccaccgaaaaacccacactggtgaaaagccttacaggtgttctcactgtgagagaggcttcactaagaactctgccctcacccgtcatcagacagtacacatgaaagcagtactctcatcacaggaaggaagagatgcgttatgagtgtgtcggtaaactgtcagattaagttcctcaggtcagcatgtatgagctttcttctgctgtggagagatctagccagtccctgactttgcaacagacctactgactactggatcttaagacccatgtctaggaccaggagtcagcataaggacgctgacctctcctggctgtgcctgtgactccagagtcctatcttactgtgacttaaagtttgatggagagaaagctgtaggatccataaattctaccaggaatccagggtcttcctgttcctagcactgagaatgggcacccagtggtccaagaacactttctgggctaacatagtcctcacacagggctgagaaagaaagtgtctcctttcctggaaagcacatgtaaaagttaagggcctgaatctcttctaaaccaataattgacctctaggcacccaccataatactgctaccttcagggcagaagacactgctctttgtaacccagccaccaccaaaaagcaaacagaaagaaggaaggatggttaagccattggataatactgaatctgtttccctaagtgacttaaccttagagcaagcacaacatccaggttaattttttgtaagatttctccttttattattgccctcatcatagttcctgattgtctcttaaagtaagtggtttatagacattactatttctgataataatttacaaactactataaacaaatttataaacattactaatttctgatgaaaataaagttgtttctccctccaaaaaaaaaaaaaaaaaaa

SEQ ID NO: 262 - DNA, 588 bp, Homo sapiens
  SITE (97): n equals a,t,g, or c
taaggcaaaaatcctgtatttcgggacggtggcatttgtgccccctgggaaggggatgagcactgctgcctcctggtatccaccggaccccgcagcngcaggaaagaaagcccctccacccctccctggtggtcacctgcacgcacctgagggcgcgtcggagccgccctggggtcttcgggggctgctgccagcaccttggctctttttccagacggcggcgctggaagccggcggcccgggtgcagcggccaggaaggggcgcaggcgcggggggcttaggccaaagggcgcagggttcaagtagggcaggaacggtccggtgggggcaggggcgggggtcgtgaagggttccagcagcgggaacggcaggcccggcgctgatgcggggtcaacctccggggggcgctccggcgcgggcggctctcggtccagggccgggggtggcggcggggctgggctctgcgcatgctccgcgcaaacatgcaggtgcttgaagagcgagcggtgcgtgcggaagcgcaggaggcagttctcacacctggaggtgggcagagggctgggctgggctgggcctccagggggacc

SEQ ID NO: 263 - DNA, 602 bp, Homo sapiens
ggcacgagattctcttggctcacttgccttctgcgacatgaaagaattcacactggaaagaaatcttatgaatgtcaacaatgtggtaaagccttcactcgttctcgtttccttcgaggacatgaaaaaactcacactggagagaagatgcatgaatgtaaggaatgtgggaaggcactgagttctctcagttccttgcatagacataaaaggactcactggagagatactctataaatgtggaaaagcattcattaattttatttcatttcagaaacgtgaaagaaatcacataggagataagcctcatgaatgcaaacacatggtaaagccttaagatgtttcttttgaatatggttatcccctaaccatatgcaggggattggttccagaccccctaagcatacctaaatccacagatgctgtgttccttttataaaaggacatttgcatgtaacctatccacatcctcctgcatcccataaatcatgcctagattacttaatttttcaccaacccaaagcttttgtaaaagtaaaaataaaaagtaggttactaaaatacctcatgtgttgtaaaagctaaaaaaaaaaaaaaaaaaa

SEQ ID NO: 264 - DNA, 677 bp, Homo sapiens
  SITE (622): n equals a,t,g, or c
ggcacgagtgaacattcctgcaagaataaggcctagtgaatgtgagacccttggaagcaatttgggacataatgcagacttacttaatgagaataatattcttgcaaaaaagaaaccctataagtgtgataaatgtagaaaagcctttattcatagatcatcgcttactaaacatgagaaaacacataaaggagagggagctttccctaatggaacagatcaaggaatttatcctggaaagaaaccaccatgaatgtaccgactgtgggaaaacctttctctggamgacacagyttactgagcatcagagaattcacactggggagaaaccctttgaatgcaatgtatgtggaaaggccttcaggcatagctcatctcttggtcagcatgagaatgctcataccggagagaaaccctatcagygtagtctctgtgggaaagccttccagcgcagtcctcccttgttcaacaccagcgaattcacactggagagaaaccctatcgatgtaatctatgtgggaggtcctttaggcatggcacatccctcactcaacacgaggtcacacacagtggagagaagcccttccagtgtaaggaatgtgggaaagcctttagtcgatgntcttcccttgtccaacatgagaggactcatactggagagaaaccttttgaatgta

SEQ ID NO: 265 - DNA, 1273 bp, Homo sapiens
ggcacgaggaaaaaccagcgagtcctggcaagcccaacttccacaagccagctccactcggagttcagtgactggcatctttggaaatgtgggcagtgctttaagactttcacccagcggatcctcttacagatgcacgtgtgcacgcagaaccccgacagaccctaccaatgcggccactgctcccagtccttttcccagccttcagaactgaggaaccacgtggtcactcactctagtgaccggcctttcaagtgcggctactgtggtcgtgcctttgccggggccaccaccctcaacaaccacatccgaacccacactggagaaaagcccttcaagtgcgagaggtgtgagaggagcttcacgcaggccacccagctgagccgacaccagcggatgcccaatgagtgcaagccaataactgagagcccagaatcaatcgaagtggattaacggattgactggatggaaattaaactgcaaggaaagtcatgattaaatgtcacggacacttaagcaaaaccaaagatttcctctgagcaactttcaatcagtcccagaaaaccaaaagcagtaataaaataagtaagatgttaagagatattgatcctggcatggaagtcagaccaggaaagagattatttatttatgacttagggatgagacttatttcagtggacaactaacctgggatggttaacatttccagtcccaccatgtattttgctttgtttctaaaaagctttttaaaaactgttatttaataccaaagggaggaatcgtatgggttcttctgcccaccgttgtgactaagaatgcacagggacttggttctcgttgcacctttttttagtaacatgtttcatggggacccactgtacagcccttcattctgctgtgtcagtttggcctggcctgacactggctgccccagcggggaccacggaagcagagtgagagccttcgctgagtcaatgctaccttcagccccagacgcatcccatttccatgtcttccatgctcactgctcatgcactttttacacggtttcttccaaacagcccggtcttgatgcaggagagtctggaaaaggaagaaaatggtttcagtttcaaaattcaaaggaaaaagttgaggacttattttgtcctgtcaagattgcaagaacatgtaaaatgtacggagcttcataatacgttatattgttccgaagcagctcgttgagaaacatttgttttcaataacattttagcttaaaaaaaaaaaaaaaaaa

SEQ ID NO: 266 - DNA, 510 bp, Homo sapiens
  SITE (424): n equals a,t,g, or c
tcacagggaagctctaaagggaaccacttgtgtggcagcgagttagatattacaagcttggcatccgattcagtcttaaaccaccatcagctgggatatgcagatcggagaccttgtgaaagtaatgaatgtggaaatgccatccgccagaacagtcactttattcaacacggggggaagatgtttgtgtatttggaaaatgggcagtcattgaaccacggtatggccctgactatccacaacaaaatcaacacggcagagaaaccctttgagtgccaccagtgtgggaaggtgttcaaccggaggcattctttgagcgaacatcaaagaattcacacgggggagaaaccctacgagtgtcaggagtgtgggcgagcctttacgcacagctccaccctcacgcgscatctgagractcatactnggaggagaagccctacgggtgcggtgagtkcgggraagcttcaacaggwttcatcgytgaytcagcatcagaggwtcacaccgggg

SEQ ID NO: 267 - DNA, 437 bp, Homo sapiens
catttattttgaaaaaaacattacacatatgaagaggattgtaatatctttacttgtaccacagatcttattgtacacattttatactagagaaaaaccctcaggcagttgttaaaattttgttgaacatcagggagtttaagaaaaccctgcaagtataatgaatttggaaaaacattttttcaaaaactacaaattataaaacaccaaagtgttcatactaaaatatatttttgcagatacattaaatatgaaagatattcaatccaaaattaagtctatgtaaatatcagggaataattcacagtagaaatatctagggcattcaagctttagacattacactaaatcagagtgctgagtatagaaaataatacaaacagatttgtctaaacatttgtatataactttaaaaatagaatattttttggaggggt

SEQ ID NO: 268 - DNA, 2102 bp, Homo sapiens
ggcacgaggtgcactcgggggagaagcctttcaagtgcgagttctgcaatgtccgctgcaccatgaaggggaacctcaagtcgcacatccgtatcaagcacagcgggaataacttcaagtgtcctcattgcgacttcctgggtgacagcaaagccaccctccggaagcacagccgcgtgcaccagtcggagcatcctgagaagtgctcggaatgcagctactcctgctccagcaaggccgccctgcgcatccacgagcgtatccactgcaccgaccgccctttcaagtgcaactactgcagcttcgacaccaaacagcccagcaacctgagcaagcacatgaagaagttccacggggacatggttaagactgaggctctagagaggaaggacaccggcaggcagagcagccggcaggtggccaagctggatgccaagaagagtttccactgcgatatatgcgatgcctccttcatgcgggaggactcgctccgcagccacaagagacagcacagtgagtacaatgagagtaagaactcggacgtgaccgttctccagtttcagatcgaccccagcaagcagcccgccacgcccctcactgtgggacacctccaggtgcccctccagcccagccaagtgccccagttcagcgagggaagagtcaaaatcatcgttgggcatcaggtgccccaggcgaacaccatcgtccaggctgccgctgctgcagtgaacatcgtcccgcctgccttggtggcccagaacccagaggaactcccagggaacagccggctgcagatcctgcgccaggtcagtctgatcgccccccctcagtcctcgcggtgtccgagcgaggcgggcgcaatgacccagccggctgtcctgctgaccacccacgagcagacggacggagccactctgcaccagactctcatccccacggcctcaggtggcccccaggaaggctctggcaatcaaactttcattaccagttcgggtattacttgcactgactttgaaggcctaaacgccttgattcaggaggggacagcagaagtgacagtggtgagcgatggaggccagaacatcgcagtggccaccacagcgccaccggtcttctcctcctcttcccagcaagaactacccaagcagacctactccatcattcaaggggcagcccatccagctttgctctgtcccgccgactccattccagattagtgcttaaaaaacaaaaggagtgggggaaaggaattgagaaaaagaaatcttatgtagaattctctaaaaggtttgctcttaatgttttctttgttttgttttgtttttgagacggagtctcgctctgtttcccaggctggagtgcagtggcgctatcttggctcactgcaacgtccgcctcccaggttcaagcgattctcatgcctcggccctccgagtagctgggaccacaggtgtacgacatcatgactggctaatttttgtatatttaatagaggcggggtttcatcatgttgaactcctgacctcaagtgatctgcccacctcagcctcccaaagtgctgggattacaggtgtgagccaccatgcctggccgtggtttgctcttaatgtttttaaggatggttgtgaatccccctggccccataataaattgtaattttatactgcttactataatttttttaacactgtaacaactttgagaccacctctgaatcgtcgcattataactgttgtagaatcttaaatgttaccaagatgattccaatgaggggttggaattaaatgcattaagtagtgaattcatgtgtttgtttccaacttgattttccaactctaataaaggtttctgtccatcttattacatttgtgtagtaaatggtacttcccagcctctcttttgccccattctggaatactccccagagtttgggggtgttcatgttttatacatgtaagtctgttggcatgaaggaccattttctacataatatgacatggatacttgacccaaaaaaaaatgtttagtgctaatgagcagaaaatgaatggttccataataaattgatatctgattaaaatataaaaaaaaaaaaaaaaaaa

SEQ ID NO: 269 - DNA, 622 bp, Homo sapiens
  SITE (606): n equals a,t,g, or c
ccgaccagtggtgccccgacggcagccatctcgggcagccacggcagctacccagggaccgaaggcccaggacaagccatatatctgcactgattgcggcaagaggtttgtgctcagctgcagcctcctgagtcacyagcgtagtcacttggggcccaagccctttggctgtgatgtgtgtggaaaggagtttgcycggggatccgacctggtgaagcacctgcgggtcacacgggtgagaagccctacctctgcccagagtgcggcaaaggtttcgcggacagctccgcccgagtcaaacacctccgcacccacagtggcgagaggccccatgcctgcccggaatgcgaccgtaccttcagcctcagctccacccttcttcgccaccgcctcactcacatggagccccaggacttcagcttcccaggctatcccctacccgctctgatccccagcccacccccacctcctctgggcaccagccccccgctgacacctygaagtccctcacactcgggtgagccttttggcctgcctggcttggagccagagcctgggggcccacaggcttggggagccacccccaccactggcggggcgacaagncccacaagtgccctga

SEQ ID NO: 270 - DNA, 332 bp, Homo sapiens
gtactactgccggatggcaaatccgggatctcggctccgagaggctcatctggcaaaagggcgcggaaaccacgggggccctgagactgagtggtccctatcccacttctctctggggcggcgctgtakccagcgctgacaggcgcagcgaaaggcagccctctgctaagggtcccagcaccatggaggacccgaaccctgaaagagaacatgaagcagcaggattcacccaaggagagaagtccccagagcccagggaggcaacatcttgccacctggggggcccccgaaagttgccacccgtttgccttcattcacttttcggcagattt

SEQ ID NO: 271 - DNA, 1636 bp, Homo sapiens
ggcacgaggtttttattgattctcatactttactaaaaataagataatttatactgtggagaagccttacaaatgtgaaaaatgtagcaaaccttttaactaatcctcaacccttactacacataagataattaatgctggagggaaatcccacccatgtggcaaagcttttaatcaatcctcaaaccttactaaacataagataactcatactggagaaaaatcttagaaatgtgaaggatgtggtaaagccgttatccagtcctcaactcccactaaacataacataattcatactggagagaaacctcacaactgtgaagaatgtggcaaagcttttaaccagtcctacaaacctttttgaacaaaataattcatacaggagagaaacactacaaatgtgaggaatgtgacaaagcctttaaccagtcctcaattcttaccaaacataagaaaattcatattggagattaaccttatgagtgtgaaaaaatggcaaaagctttaactagttctcagttattattattatttttagagatggagtttcactcttgttgccaaggctgcaatactgtggcatgatttcagctcactgcaacctccgtctcccaggtttaagcaattctgcctcagcctcccgagtagctgggattacaggcatgcaccactatacccatctaattttgtatgtttagcagagatggggtttctccatgtagatcaggctggtcttgaactcctgaccttgtaatctgcccacctcagcctcccaaagtgctgggattacaggcatgagccaccacgctcagccactagtcctcagatcttaacacacataagataattcatactggaaagaaactccacaaaccagaaagatgcaataatgcttttgacaacacctcaagcttttctaaccataaaaagaatcatattggtgagaaatcctagaaatgtgaagaatgtgacaaagtctttaaatggttgtcatacttgacttttttctttttttgagatgaagtctcactcttgtcccccaggctggtgtgcaatggcatgatgtcggctcactgcaaactccgcctcccaggttcaagtgattctcctacctcagcctcccaagtagctgggattacaggcacctgccaccacgcctggctaatttttgtacttttagtagagatggggtatgaccatcttggccaggctgctctcaaactcctgacctcaggtgatccgcccacctcgggcctcccaaagtgctgggattacaggcatgagccaccactccctgccttacttgattacattcaatataattcatactggaaagaaatcctacaagtgagagcaatgtggcaaaacttaaccaccttattgcacagaaaagcatttatgtttgagaaaaattatacaaatacagactgtgaaaaagacattaatatctgcttacatcttaacaccagagagttcatacttaataaaagcaagataagggcaattactgtcaaaaggtctttcagaaaaatataaccctttaaagtgaagaagagaaaaaaaaaaaaaaaaaaaaaaaaaaaaaaaaaaaaaaaaaaaaaaaaaaaaaaaaaaaaaaaaaaaaaaaaaaaaaaaa

SEQ ID NO: 272 - DNA, 1436 bp, Homo sapiens
ggcggggtggccgggccaggggtgggcagggccctcggctaaacatctgcggcatctgcgggaagagcttcgggcgkggctccaccctgatccagcaccagcgcatccacaccggtgagaagccctacaaatgtgaggtctgcagcaaggccttctcccagagctctgacctcatcaaacaccagcgcacccacactggcgagcggccctacaaatgtccccgttgcggcaaggccttcgccgacagctcttacctgcttcgccaccagcgcactcactctggccagaagccctacaagtgcccacattgtggcaaggccttcggcgacagctcctacctcctgcgacaccagcgcacccacagccacgagcggccctacagctgcaccgagtgcggcaagtgctatagccagaactcgtccctgcgcagcatcagagggtgcacaccggtcagaggcccttcagctgtggcatctgcggcaagagcttctcccagcggtcggcccttatcccccatgcccgcagccacgcccgggagaagcccttcaagtgccctgagtgcggcaagcgctttggccagagctcggtgctggccatccacgcccgcacccacctgccaggccgcacctacagctgccccgactgcggcaagaccttcaatcgctcctccactctcatccagcaccagcgctcccacacgggcgagcggccctacaggtgcgccgtgtgcggcaagggcttctgccgctcctccacgcttctgcagcatcaccgggtccacagtggcgagcggccttacaagtgcgatgactgcggaaaggccttctcccagagctccgacctcatccgccaccagcggacccacgcggcgggccggcgctgacctggggccccagcaggggtgggaggtgtgggcagaagataaggggccagggagctagaggaacctttagggaggatagtggagaagccgcaggagaatggaggagctgaggatgctggaagaagagaaccagggtggaggaagtgacatgccctggagacttgtgggaagtgggttggagggaggccaggccggcagcgggaggccctgggagaaatggagagaggtcagcggagggctggcctcagccgcggctccttggtgggtgcctggcttggcaactgctagagcagggaggggggagggcaggggattacctaattagagtgggttagcttagattggtagctgctgaaactctcgttgagtcaggagcgggtaaaaggtaggtggggtggggagtggggccccggggtggggcctgggcctctgcgtgcaaaccccagcctccctcttcttcctcaggctttggagcccctgagtttgagttcaataaaaactttatgtggtaaaaaaaaaaaaaaaaaaaaaaaaaaaaaaaaaaaaaaaaaaa

SEQ ID NO: 273 - DNA, 1625 bp, Homo sapiens
ggcacgagaaacaacttcgttcactggcagggatgaagtatcatgtcatggcaaatcataatagtttgcccattttgaaagccggagatgaaatagatgagccaagtgagagggaaaggctccgaacagttctaaagagactgggaaagctcaggtgcatgcgtgagagttgctccagtagcttcaccagcatcatgggatatctctaccatgtcagaaaatgtggcaaaggggctgcagagctggaaaagatgaccctgaaatgtcaccactgtggaaaaccatataggtcgaaggctggacttgcatatcacctgaggtcagagcatgggcctatatccttctttccagagtcaggacagccagagtgcttaaaggagatgaacctagagtcaaagagtgggggccgagttcagagacgttctgccaagatagctgtataccacctacaggagctggcctctgctgaactggccaaggaatggcccaagaggaaggtgcttcaggacctggtacctgatgatcgaaagttaaaatatactcgtccagggctacctaccttcagccaggaagtactacataaatggaagacagatatcaagaaatatcatcgtattcagtgtcctaaccagggctgtgaggctgtctacagcagtgtatctggccttaaagctcacctgggctcttgtacattgggaaactttgtggctggaaaatacaaatgtcttctatgtcagaaagaatttgtgtcagagagtggtgtcaagtatcacatcaactccgtccatgctgaggactggttcgttgtaaacccaacaacaaccaaaagctttgaaaagctgatgaagataaagcagcggcagcaagaagaagaaaagcggaggcagcagcacaggagcagaaggtctctaagaaggcggcagcagcctggcattgagcttcccgagacagagctgagtcttagagtagggaaggatcagaggaggaataatgaggaactggtagtgtcagcctcctgtaaggaaccagagcaggagccagtgccagcacagttccagaaagtaaagcccccaaagactaatcataaacgaggaaggaaataggcagtcagtgtaaaagtgctcctaggaaagcagatgtgatgctgttgtcacggggacctgtgctgggaggactgagtgaagattctttcagctgtttgtgtaaggctgtgactttctcagctccttcctcctgtgtaaatttcactgtcttcccttcttacattttgattcccccctccccttttagtaggttttcctgctattcctcgtcaagtcctcttgtttttttatcttgcccaaagagctccctctcaaggccaactataggctcctcttgccctgtacaaaactaagaaacctctttggttgtcctttccttcctggggtatagaatgttcttggaagctccattgatttagtagctgctccatcatctagcttgtgaaaccattccaaactaattttttaaaaccataactgatttgtcattttgtatttgtgatataacaagtctagaagttagaactgttgtcattcacataataagattaccctgtctccaaaaaaaaaaaaaaaaaaaaa

SEQ ID NO: 274 - DNA, 1930 bp, Homo sapiens
  SITE (1897): n equals a,t,g, or c
  SITE (1917): n equals a,t,g, or c
gggcatgtcaggaaatccctacagaagagaggccacatccatatgacatgggtggccagagtttccagcacagtgtggacctaactggtcatgagggggttcccacagctgaaagtccactcatatgtaatgagtgtgggaaaaccttccaaggaaatcctgaccttattcagcgtcaaatagtccacactggggaggcttcctttatgtgtgatgattgtgggaaaaccttcagccagaactcagttcttaaaaaccgtcatcgatctcatatgagtgagaaagcttaccagtgcagcgaatgtgggaaagccttccgagggcactcagacttttctaggcatcagagtcaccacagcagtgagaggccttatatgtgtaatgaatgtggaaaagccttcagccagaactcgagccttaaaaagcaccaaaagtctcacatgagtgagaagccctatgaatgcaatgaatgtgggaaggcttttaggcggagctcaaacctcatccaacatcaaagaatccattctgsggagaaaccgtatgtgtgcagtgagtgtgggaaggccttcaggcgaagctcaaacctcatcaaacaccacaggactcacacaggagagaagccttttgagtgtggcgagtgtgggaaagccttcagccagagtgcacacctgaggaagcaccagagggtycacwctkkwkagaagccttatgagtgyaatgattgtggcaagcccttcagtcggrtctccaacctyattaagcaccacagggttcacactggagagaagccctataagtgcagtgactgtgggaaagcatttagtcagagctccagccttattcagcatcggakaattcacactggagaaaagcctcacgtgtgyaatgtatgtggaaaagcctttagttatagctcagtgctccgaaagcaccagatcatccacacgggagagaagccgtacagatgcagygwctgtgggaaggccttcagccacagctcagccctcattcagcaccagggcgtgcacacaggcgacaagccctacgcctgccacgagtgtgggaagacctttggtcgcagctccaacctcatccttcaccagcgagtccacactggagagaagccctatgaatgtactgaatgtggaaaaaccttcagccagagctcaaccctcattcagcatcagaggattcataatgggctgaagccccatgaatgtaaccagtgtggtaaagccttcaaccgaagctcaaatctcattcaccaccagaaagttcatactggggaaaaaccctacacctgtgttgaatgtggtaagggcttcagccagagctcacacctcattcagcatcagataatccacacgggcgagcgcccctacaaatgcagtgagtgtgggaaagccttcagtcagcgttctgtcctcatccagcaccagaggattcacactggggtgaagccctatgactgtgctgcttgtgggaaagccttcagccagcgatcaaagttgatcaaacaccagttgattcacaccagggaataggctgttgggctggcaggagtgaaaccgagcatagtttcctctccaactcctctttggccattgtctcagcctctgccacttcccagaccgaaagcctggactcagctcactgcctacatccagtggccacatagcctgggaccctcctttgaaacatcctttacaggctcccttctcactgccactgctcttgcctcttgtgatgtcttgggtttgggcttgtttttacagcttgtgaacggactgcacgtttgttacaagggagaagattatggaggctgcatattcatgaatagagtttattattataatgaaaagttaccaaaaaagtaaagtgacgtttggtttgaganaaaaaaaaaaaaaaaaaacncgagggggggccc

SEQ ID NO: 275 - DNA, 893 bp, Homo sapiens
  SITE (618): n equals a,t,g, or c
  SITE (627): n equals a,t,g, or c
tccaccacggctccagaacttgatgataatgtccaaaaagcaaactgcttctccactgaaagcactgacactccgaaggcccctgtcatcactcttccttcagaggcaagggaacaaatggccacccttggagagaggacgttcaactgttgctacccaggttgccacttcaaaactgtccatggcatgaaagacttggaccgccatctcagaatccacacgggagacaaaccgcacaagtgtgagttctgtgacaagtgcttcagccggaaggacaacctgaccatgcacatgcggtgccacaccagtgtgaagccacacaagtgtcacctgtgtgactacgctgccgtggacagcagtagcctcaagaagcacctgcggatccactctgatgagcggccgtacaaatgccagytctgcccctatgccagccgcaactccagccagctyaccgtccacctgcgatctcacacgggkgagtccctgaccaggaaacctcaatcccttactttttctctaatttcttaaccttcatttacttaacaacacaagcaacttaaatgacttggtgtggtagaagtacaagaatttggaacttctgtgataattgtgagattngtcattttnctgttgccggaacaacaacttttggtaaaatatgactgacagctgggttttatatcttgactatatagaatccagctgggagtagatacccactataactgccaagaagccaatgatgtatctcaagtcagacctataaactagatgtttcagtaaatgtatacactgattgcatggctaaatttggaatgtagcaggatccattaagtataattaaaaatcacaaacttttaatcttaggaacttcctttatgggaccctactga

SEQ ID NO: 276 - DNA, 2669 bp, Homo sapiens
ggacgattctgggcagtgtcgtccccagaggtcggcggccgttgcccgctcaccagcgacgcggggcgcctgcggggacggacactgcccatctctaagataagagcctggaaagaggactctgttggctgttggaaattgcagagtaatgcctcaggtgacatttaatgatgtggctatagacttcactcatgaagagtggggatggctcagttctgctcagagggacttatacaaggatgtgatggtccagaattatgagaacctggtctctgtaggtctttctgtaactaagccatatgtgatcacgttattggaggatggaaaagagccctggatgatggagaaaaaactgtcraaaggtatgattccagattgggaatcaagatgggaaaacaaggaattatcaacaaagaaggataattatgatgaagattcaccccaaacagtaataatagaaaaagttgtaaaacaaagttatgaattttcaaattctaagaagaatttggaatatatagagaagttggaagggaagcatggaagtcaggtagaccatttcagaccagcaattctcacctytagagaragccccastgcagacagtgtttacaaatacaatatatttagaagcacctttcattcaaagtctactctttctgaaccacaaaaaatttctgctgaagggaattcacacaaatatgatatattaaagaagaayttaycaaaaaagtcagttataaaaartgagarartmaatggtggaaagaaacttttraattctaataaaagtggggcagccttcarccagrgcaaatctcttacccttccccagacttgtaatagagagaaaatctatacatgcagtgaatgtgggaaagcctttggcaaacagtcaatcctcartcgccactggagaattcatacaggagagaagccctatgaatgtcgtgaatgtgggaagacttttagccatggytcatcccttacacgacatcwgataagccatagtggagagaaaccttacaaatgyattgaatgtgggaaggcctttagccatgkctcatcacttactaaccatcagagcactcacackggagagaaaccrtatgaatgtatgaactgtggaaagtcttttagtcgtgtgtcccwtctyattsarcatctaagaattcatackcaagaaaaackctatgagtgtcgtatatgtggaaaggccttcattcatagktcrtctctcattcaccatcagaaaakccatactggagagaagccttatgaatgtagagaatgtgggaaagctttctgctgtagctcacaccttactcracatcaaagaattcacastatggagaaamaatatgaatgcaacaaatgtctsaargtctttagtagcytctcatttcttgttcarcatcagagtattcatactgaagaaaaaccstttgaakktyagaaatgcaggaaatccttcaaccagcttgaatcactgaatatgcatttgagaaatcacattagattgaaaccctacgaatgcagtatatgtgggaaagcctttagtcataggtcrtccctgcttcaacatcacagwattcatactggagagaaaccttaygaatgtattaaatgtgggaagaccttcagctgtagttcaaaccttaccgtacatcagagaattcacactggagaaaagccatataaatgtaatgagtgtgggaaagcttttagcaaaggctcaaatcttactgcccatcaaagagtacataatggagagaaacccaatagtgtggtaagtgtggaaaagcctttagactatatgaatcactatacatgtgagaaatcttacagaagagaaactgtatgaagcagtggttatcatggtaaatttcctagattctcccttatttaacattagaaaaatttatactggggaaagtcttatgaatgtggtgaatataggaagaccttttagcaaagatgcaggccagtttgkttattagactttatactgtagagaaatcatatgaagaccataaatgtgggaaagcctttgtcagtaytaatcccttaattgacataagtatactcacactaggataaaaccctgtacatgtagcaaatgtgggaaagactatagacaataggaatcttttacaaactcctacaggagagaagctgtatgaatgtagaaaatttagaaattgagggaagtcttcagttccaagtatatcccttattctacagcagagaactcaaaatggagagaaatctcatttaagagatgtagcaaagtgttcactaagagtgtttatcttggtacacatcagaagattaatggtagaacaacctgaaggatttaggagttatgtgtaaatctttgcagtcatgctatttgtaaactggattctacaggagagcaaataaacattataataaaatatgcatttcttagagcagtagcttgcagtttcagttgagttctacttagaaattctttttagctagtgggcatgtgaagatatttagtcacccagaggagccagtaagtgttataatattgaaaattaaagctgcaaaagaaataaagtgatgttaataaaagttttggcatctaataaaatcattttgtatatcaaaaaaaaaaaaaaaaaaaaaaaaaaaaaaaaaaaaag

SEQ ID NO: 277 - DNA, 2259 bp, Homo sapiens
gggctgcaggtgaacatgtaagaactcacactggaataaaaccctatgaatgtaaggaatgtggccaagcctttgctcagtactcgggcctttctatacacatacgaagtcacagtggaaagaaaccctatcagtgtaaggaatgtgggaaagccttcactacatccacaagtcttattcagcatacaagaattcacacaggagagaagccttatgaatgtgttgaatgtgggaagaccttcattacttcttcccgtcgtagtaaacatttgaaaactcatagtggagaaaagccctttgtatgcaagatatgtgggaaagcatttctatattcctcacgccttaatgttcacctgcgaactcataccggagagaaacccttcgtatgtaaagaatgtgggaaagcatttgctgtttcctcacgcctaagtagacatgaaagaattcacactggggagaaaccctatgaatgcaaggatatgagtgttaccatttagcccatcggttgccatctttaattattggcaatgacaccaaagattatcaagatttgtcctaaatgccttttggaggttgtaatgactcatggattggccttagataccatcctgagggtctgaaattaaacctacaggttctgaatacaacatcatggttgcctgagtctgggcatctgtgaagaagggtcatggatggtgaggtcagtactgcaggctgccttacccctgggattagattcctaagatcatagcattaacaagttgtgtatgagataaatcatgcagattgaccccagcccctgttggttagtggctgccagtgtggcacatttatgtcaaaatttaccagaagccaagatgatgtaggaccccaaaggtgggttgttaagagatgctcctccaagggtctcttctgatcccacggatcctgcagagcgtgtcaggaatgaaaccatccataactgccagtgccctttcacagctgattatttctgtgtccccttgtaaaatctaagaagtgtgacagccttgcctgttctgccttgtatgtctattttagatggcacaatgtaagtggcaatgtctcttctagtataatccagtctctcttctcacttctgtcaaggtggctgatatagtccatgaatcccactcatgatctctttatcagatgatcgttcagccacactttgaggattctcttcagtacaagttttctaatttttgcattatggataggctgagaattttccaaatctccaagttctggttcctttttccttaacaattttttctgcaattcaggtctccttttgcatttttgctgagaccagctgggtcatggagaccctgacccagcagctctagaggaattaagacaaagacacagaaatagagtgcagagtgggaatcggggctcacagccttcagagctgagagccttgaacagagtttgacccacatatttattgacagtaagcctgtgataaacattatttctatagattatagattagctaaaagtattccttacaagaaagaaagggacaggctctggcttgttatctgcaacaggaacatgtccttaaggcacaaatcactcatggtattgtttgtggtttaggaatgcctgagcagttttccagttttccaccgtgggtgggccaggtgttccttgccctcattcgggtaaaccagcaacctccagcatgggtgtcatagccatcacgagcatgtcacagtgccgcagagattttgtttatgggcagtttctcatggcctgtttatgtccaaatttggggggcctgttctgagcacattttcctgtaagcactcaggaagaatgaagcttcctgtgtcctttaacactttaagtacagatcttagtgatacataaccagttttatctttctcaagctctaccttccgcaaagtgctagaatacagttctgccaagttcttcactacttcgtatcaagggttgtattttctttatttcccaatagcatgttcctcattccccaatgacacctcaccaggatcacccttaccaaccttacttccagcttgcacatcagaatttttccagcctcatttgtcagtttcaaatctgcttcacatttttagtttttttgtttgtttgtttttaatctgccttaatgagctcaggccactatcacaaaataccacagaccaaatggcttacaaatttgttaattttaaataaatgaggttaaaaacaaatttatattctcacttt

SEQ ID NO: 278 - DNA, 2965 bp, Homo sapiens
  SITE (869): n equals a,t,g, or c
  SITE (2799): n equals a,t,g, or c
gccaccccgctgtggcggagacgcagagggcgggtcgcgctcgagggtcagggaggagagtgacccggccctggtccagggccctccctgcccgtcttggggccagaactccagccctggggagtgggcagggcctgttttccgtgcctcacgccctgcttttcgcctccttcagcgctgtctgctagctgcttttcctgctctctctccctggaggcgaacccttgtgctcgaratggcagccaccctgctcatggctgggtcccaggcacctgtgacgtttgaagatatggccatgtatctcacccgggaagaatggagacctctggacgctgcacagagggacctttaccgggatgttatgcaggagaattatggaaatgttgtctcactagattttgagatcaggagtgagaacgaggtaaatcccaagcaagagattagtgaagatgtacaatttgggactacatctgaaagacctgctgagaatgctgaggaaaatcctgaaagtgaagagggctttgaaagcggagataggtcagaaagacaatggggagatttaacagcagaagagtgggtaagctatcctctccaaccagtcactgatctacttgtccacaaagaagtccacacaggcatccgctatcatatatgttctcattgtggaaaggccttcagtcagatctcagaccttaatcgacatcagaagacccacactggagacagaccctataaatgttatgaatgtggaaaaggcttcagtcgcagctcacaccttattcagcatcaaagaacacatactggggagaggccttatgactgtaacgagtgtgggaaaagttttggaagaagttctcacctgattmagnatagacatcccactggagagaagcctcacaaatgtaatgagtgtggaaaaagtttctgccgtctctctcacctaatccaacaccaaaggacccacagtggtgagaaaccctatgagtgtgaggagtgtgggaaaagcttcagccggagctctcacctagctcagcaccagaggacccacacgggtgagaaaccttatgaatgtaacgaatgtggccgaggcttcagtgagagatctgatctcatcaaacactatcgagtccacacaggggagaggccctacaagtgtgatgagtgtgggaagaayttcagtcagaactccgaccttgtgcgtcatcgcagagcccacacgggagagaagccataccactgtaacgaatgtggggaaaatttcagccgcatctcacacttggttcagcaccagagaactcacactggagagaagccatatgaatgcaatgcttgtgggaaaagcttcagccggagctctcatctcatcacacaccagaaaattcacactggagagaagccttatgagtgtaatgagtgttggcgaagctttggtgaaaggtcagatctaattaaacatcagagaacccacacaggggagaagccctacgagtgtgtgcagtgtgggaaaggtttcacccagagctccaacctcatcacacatcaaagagttcacacgggagagaaaccttatgaatgtaccgaatgtgagaagagtttcagcaggagctcagctcttattaaacataagagagttcatacggactaagctgtaattatgatggctgagaaatgattcatttgaagatacaattttatttgatatcaatgaacgccctcaagactgagctgcttttatcatactctcctagttgtgggccacgatttaaaccatcagagatgacaagccatttgaaattctgaccctcagctttgggaatgttatctcctccaaaatggtgatttttattcactcaatgggttacttcattaaaagcagccccacaagtaactggaaatctgaagaccaggggacaaatgctggtgaatgcctaggcctggaaatggagtaaatctttcaatgttattttctcccatccttggcccaaggaactatgctaagtgaacgtgggactgtaatagggtggtaatggctgctttggaaaaaggcaactagagactctgcctaaattgccacacctattcacacaccatagtagttgggcacacacatcttcccttccaaagggctttttccttgagttgctcatgcatttgtatcttttccatcttcctgagggcaagattttgcacgatgaaggcaatgattgtaacttttctccttctcattgtttctaattagctcctttaaagcttgcatctttgtgaaggctaactgaagatacggttggaaaggaaaaatgagacacaggtttggggaccaaggacccatcaatgatggtgactttagcagaagatgcccacagttattactgccattaatcagatttatgaattttctttggggatcactatagggaatattgtatagaaaatatcttcaagaaaagataggaccatcagtgacagttaagtgtaaggagcaagtggaattgagtccttcagggaaggaaccacagagtcccttcccaaggaatgtaggtcgtttctgtgttctttcccttctaatctttaagatcaactcttcctatcctgctaactctaagatttgataagggccacatcccagtgtttatcttagcttgcatcagggcatgtgtatgtacagtratgtgtattcctgtggtttttctaatagaaactgaatttacagagacttagcatgttcttgggtgatgtgagtcatgtgacagaagtacagacataactccaatgtgagaaatgtccttttttcattatggnaaataatttaaacactagtgctttagtgtgcactctcctgtaggtctgtcttgtacagagctaagcacttgtttgtatgtgtttgtcaattgtggargataatgaccagacaaataggtcgattgtccyattctcagatgattatctctatggaatgaggactctt

SEQ ID NO: 279 - DNA, 2618 bp, Homo sapiens
ggcagaggccggccgcggccgcrgrgcgwacgcagcagcccgctgtccccgcgccgccggggggkagctgatccagccgtcggtgagcgagctgtcccgggccgtgcggaccaacatcctgtgcaccgtgcgcggctgsggcaagatcctgcccaacagccccgygctcaacatgcacctagtcaagagccaccgcctgcaggatggcatagtcaatccaacaataagaaaagatttgaaaactggaccgaaattctactgctgtccaattgaaggctgccccagaggccctgagagaccgttttctcagttttctctcgtaaaacagcactttatgaaaatgcatgctgagaagaagcacaaatgtagtaagtgcagcaattcgtacggtacagaatgggacctgaaaagacatgcagaggactgtggcaagaccttccggtgcacatgcggctgtccctacgccagtagaacagcactgcagtctcacatctaccgaactgggcacgagatacctgcagaacacagggacccacctagtaagaaaaggaaaatggaaaactgtgcacaaaaccagaagttatccaacaagaccattgaatcattgaacaaccaaccaatccctagaccagacactcaagaactagaagcttcagaaataaagctagaaccatcttttgaagactcttgtggctctaacactgacaagcagactcttacaacaccaccgagatatcctcagaagttgcttttaccaaagcccaaagtggctttggttaaactacccgtgatgcagttttctgtcatgcctgtctttgtgcctacagccgactcctcagcccagcctgtggtgttaggtgttgatcagggctctgccacaggggctgtgcacttaatgcccttgtcagtaggaaccctgatcctcggcctagattcagaggcttgctctcttaaggagagcctacctcttttcaaaattgctaatcctattgctggtgagccaataagtactggtgttcaagtgaactttggtaaaagtccatctaatcctttacaagaactagggaacacgtgtcaaaagawtagcatttcttcaatcaacgtgcagacagatctgtcttatgcctcacaaaactttataccttctgcacagtgggccactgctgattcctctgtgtcgtcttgttctcaaactgatttgtcgtttgattctcaagtgtctcttcccattagtgttcacactcagacatttttgcccagctctaaggtaacttcatctatagctgctcagactgatgcatttatggacacctgtttccagtcaggtggggtctccagagaaactcaaaccagtgggatagaaagtccaacggatgaccatgtacagatggaccaagctggaatgtgcggagacatttttgagagtgttcattcatcatataatgttgctacaggtaacattataagcaacagtttagtagcagagacagtaactcatagtttgttacctcagaatgagcctaagactttaaatcaagatattgagaaatctgcaccaattataaatttcagtgcacagaatagtatgcttccttcacagaacatgacagataatcagacccaaaccatagatttattaagtgatttggaaaacatcttgtcaagtaatctgcctgcccagacattggatcatcgtagtcttttgtctgacacaaatcctggacctgacacccagctcccatctggcccagcccagaaccccggaatcgattttgatatcgaagagttcttttcggcctcaaatatccagactcaaactgaagagagtgaacttagcaccatgaccaccgagccagtcttggagtcactggacatagagactcaaacggacttcttactcgcagatacctctgctcagtcctatgggtgtaggggaaattctaacttcttaggccttgagatgtttgacacacagacacagacagacttaaactttttcttagacagtagccctcatctgcctctgggaagtattctgaaacactccagcttttccgtgagtactgattcatctgacacagagacccaaactgaaggagtctccactgctaaaaatatacctgctctagaaagcaaagttcagttgaacagtacagaaacacagaccatgagttctgggtttgaaaccctggggagcttgttcttcaccagcaacgaaactcagacagcaatggatgactttcttctggctgatctggcctggaacacgatggagtctcagttcagctctgtagaaacccagacttctgcggaaccacacacagtctccaacttctaaaactaacggtggagtccatgtgtgaaatggcatctaccatttcctctggattaaaactacggactggggacaacagtattaattcgattgaatgtggctgatgatgcagttgcttagcttctttgtgtttctttgccttttgtacttgtaaacagaaatttgcgtataaatgtgagtgtattataaagtttgagatgttgatctaaattgtttttgtgttgcctacatttgccttttcacagctagtcttttcatgttaaaaaaaaaaaaaaaaaaaaaa

SEQ ID NO: 280 - DNA, 606 bp, Homo sapiens
acgtagctgacccgctggccagtaaacatctctttcatccagttcagtcacatccatttatttccaacttgcatacaagacatactgagaaactaaaaaaatcgttaaaagtaaagacacgttctggacgggtatctcgacctcccaaatataaagctaaagattataagttcataaaaacagaggatctggcggatggtcatctgtcagattctgatgattactcagaactctgtgtggaagaagatgaagatcagagggagaggcacgcactctttgacttatcgagctgctccctgaggcccaaaagctttaagtgtcagacttgtgaaaagtcatatatagggaaggggggactggcccgacattttaaacttaacccaggccacggccagttggaccccgagatggtgctgtctgagaaagccagtggaagcaccctccgggggtgcacggaggaaaggacgctcagcctgacctccctggggctgtccatgccagcggatccatgtgagggaggggcccgctcctgcttggtgacagagtcagcacgcggtggcctgcagtaatggtcagtctgtagacgttgaagagacattgccatct

SEQ ID NO: 281 - DNA, 803 bp, Homo sapiens
gcacgagcggcaccagagaattcacagtgaggagaaaccctttgactgtgtagattgtggaaaagccttcagtgctcaggaacaattaaaaaggcatctgagaattcatactcaggagtcttcctatgtatgtgatgagtgtggaaaagccttgactagcaaaagaaatcttcatcagcatcaaagaatccatactggagagaaaccctatgagtgtagcaagtatgagaaggcctttgggacttcttcccagctaggtcaccttgagcatgtctactctggagagaagcctgtgctggacatttgtcgttttggcctcccagaattttttacccccttttactggtaatagtacactccagtgaaatgtactgagtggattccgtcttctactcaggaatggaatgtgtgacacaggcctgactcagcctctgatccatccctcaagccacagttaatgattcagatgtcagtagatgaccaaagatggttcaattagagtcccaggattgcaagagctaataggaacaaatactctccccccgcccacccccattggttttaatgtgagaagaagaactagactcttacagaggtgagaatgaagtccacacagcaaaaatgcatctgagaattggagagcagtaaaagactgaagataatgtttgaacagccacatacaccatgcctgaagctaaaaatatatacgggtttttgaattgcagcagccaataaattccatttttgtttggttggttttggctttggcaaaaaaaaaaaaaaaaaaaaaaaaaaaaaaaaaa

SEQ ID NO: 282 - DNA, 1968 bp, Homo sapiens
ccccgggctgcaggaattcgcacgagagacttcacaccggcgagcggccttatgagtgcagcgaatgtgggaaaaccttcaggcagaggtccaatctgaggcagcacctgaaagttcacaaaccagacaggccttacgaatgcagcgaatgtgggaaagccttcaaccaaaggcctaccctcattcggcatcagaagattcacatcagagaaaggagcatggagaatgtgctccttccctgttcacagcacacaccagagataagctctgagaacagaccttatcagggcgctgtcaactacaagttgaaacttgttcatccaagtacccaccctggggaggttccctaggaatgctagctgtgttggaagctttctggagacaagttacattctcttactgtagattttatcagcgttttttcactgctggggttgtgatagaagccatgtcagcaccacacactgcagctctccaaagagtgtgtccaccactccactgtgctcagggaaggcagacctctcctctctctttccaatccctaaagggaattaggagtagtctgaagccttgggaagatgtcattcccgccctgtatggctggtttagccatggacatgaccagcttttggctgtgaagacctgagcagggttttgccaacagcttgttctagagaaggtttccctttttctgggacattgttggtctcatgttatgcctgtgaaggatttgtccagccttcatgttactctacacaacaacttatctcctgtgtattgccctggttcatgtgatgataatggccttatgataaagccgcctttagtcttccatgttctgatcactgtgtggggtggttcaagagcagagttaagatctaccaaactgaaggggtctccagattatcttggaggggacaggaggatggcagagaaacaactgtcaatccagatttgacctcatttgcattgccaccaaggcctcctaggaaaaattgtaggaatttatgggtataatattgtggtctgaatggcgtgaatttttatcccgaggagggggcagttgtgacaacctccagtgcatgtgggaacagcatgaattgggtcccttattcccagggggtgccccatattccccaatactgtaaagcagatgctgtttagcacctgccaaggagccatatgccctgaagttcagcattaggcaggtatctcttaactgtaagacataccasgcccagctgggaccataatttgtacagaaacactggatgtgattaatagggagtaggcgagattatagcaaaccagcagaaatggaactctgctaaatgtgcatccgtgaatgctcccttgaatgtggctgtgcaggattcagggtttgsagaaattctcaggacctcagacctctgtcctatgactaatgttactggcagagcaaataatctaaaggttttggttttgtggattaccatctccgtgctgtgcatctgaaggccagtgctgtgctggcaggaaaatagggactgagaaaaagcagatcctatactatagggactgtagtatctatgacgtagccagccattctttgctcccaaggcaagaagaaagagatgacagagtcaatatagggttgccaaatcggattttctaaaatgagtaggaagttggatttttatgtgcaacagtttcttttaatgctttgttgatatgtgattgtcatgcaataattattcatatttggtaagttttgtacatatattatgtacactcagggaaccaataccataatcatgataatgaacgtatccatcacctgcaaagctacctcatgcccctttacattccctccttgccttccctaggaaaccgttgatttacattttttactttagatttgtttgccttttctagaattaacacaattggaatcataaagtatttatactctcaaaaaaaaaaaaaaaa

SEQ ID NO: 283 - DNA, 2617 bp, Homo sapiens
ggcacgagtccggtactcaatcaagtgtcttgaatgtcacaagcagatgcgggactacatggtcctggctgcacatttccagaggacaacagaggagacagaggggctgacctgccaggtatgccagatgctgctgcccaaccagtgcagtttctgtgcccaccagcggattcatgcacacaagtccccctactgctgcccggagtgtggggtcctctgccgctctgcctacttccagacccatgtaaaggagaattgcctgcactatgcccgcaaggtgggctacaggtgcatccactgtggtgtcgtccacctgaccttggccttgctgaaaagccacatccaggagcgacactgccaggttttccacaaatgtgcattctgccccatggccttcaagactgccagcagcactgcagaccacagtgccacccagcaccccacccagccccacagaccctcccagctcatttataagtgctcctgtgaaatggtcttcaacaagaagaggcacattcagcagcatttttaccagaatgtcagcaagacgcaggtgggcgtcttcaagtgccctgagtgcccactcttgttcgtgcagaagccggagttgatgcaacacgtcaagagcacccacggtgttccccgaaatgtggacgagctgtcaagcctccagtcttcagcggacacatcctcaagccgccctggctctcgagttcccactgagccaccagccactagtgtggctgctcggagcagctccctgccttctggccgctggggtaggcctgaagcccaccgcagggtggaagccaggccgcggctgaggaacactggctggacctgccaggagtgccaggagtgggttccagatcgggagagctacgtgtcccacatgaaaaagagccacggtcggacattgaagcggtacccatgccggcagtgtgaacagtccttccacacccccaacagcctgcgcaaacacatccgcaacaaccatgacacagtaaagaagttctacacctgcgggtactgcacagaggacagccccagctttcctcggccctcccttctggagagccacatcagccttatgcatggcatcagaaaccctgatttgagccagacgtccaaagtgaaacctccgggtggacattcccctcaggtgaaccatctgaaaagaccagtcagtggagtgggggacgctccaggcaccagcaatggcgcaactgtctcttccaccaaaaggcacaagtccctttttcagtgcgcgaaatgtagttttgccacagactcggggctcgagtttcagagccacatacctcagcaccaggtggacagctccacagcccaatgtctcctctgtggtttgtgctacacctctgccagctccctcagccgccacctcttcattgtccacaaggtgagagaccaggaggaggaggaggaagaggaggcggcggcagcggagatggcagtggaggtggcagagccagaggagggctccggggaggaggtgcccatggagactagagagaatggactggaagaatgtgccggtgagcctttgtcagctgacccagaggcgaggagattgctgggcccggcccctgaggacgatggtggccacaatgatcacagtcaaccacaggcctctcaggaccaggacagccacacactgtcccctcaggtgtgaccggagactttgcagtgtgcatggtcaggggtggtgccgaagtgtcttccacctgccctgcggaccgtggaaaataaaaggctctgcccccagtgtgagtgtgaccggttgtaccctggagtagtgtctgccctgagctgccagtgctgggtatcccccagccccaggaaatgtggggtcggccaggaccctcacagctctgaatttgcttctgttatttatggcttttcgctgcttcttggtgccccatctcttgtctgtgtccttccaaccccaagctgcttatgtggcccaaccccactgctgtcaactaggcttgaaccccacagcggctgtgctcttctgggaggttcccgcttgctgccttcagccagggcgctcctcagagctctattttcctgcagacaccagctctccttcctgcctttagatcctgagaaggagggaaatgaggggtgctgacacagtccctctgggagagctctgcctagtctggtttggcgagggcccttgatcaccttgcccctcctccctgtcttctctgattcttttccctcaaaatagtcctgagaactaattgtcacactggctcatcatgtctctgtgggtggggtgggagaaacctctgctgcacacctctgtttggaacctgggcagagcaggaggtaaggcaaaggcaggcaggcaccaagaaccagaccccttgagaaggcgctgtgggtgggtctttgttctgctgttctgcctttcctgacaggtggggttggggcacacagacattggaatatttgtactgctctcgtgccatttgagaggctgctgccccaggcaggccagcccctactcctcttggctacactcatgttgctcagactatatttcaaataaaaaatcttctccccatgaaaaaaaaaaaaaaaaaaa

SEQ ID NO: 284 - DNA, 970 bp, Homo sapiens
ggcacgagcggcggctgcacgctgtggcccggccccagcgctgcagcgcctgtggcaagaccttccgctaccgctccaacctgctggagcaccagcggctgcacctgggcgagcgcgcctaccgctgtgagcactgcggcaagggcttcttctacctgagctccgtgctgcgccaccagcgcgcccatgagccgccgcggcccgagctccgctgccccgcctgcctcaaggccttcaaggatcccggctacttccgtaagcacctggctgcccaccagggcggccggcccttccgctgctcctcctgcggcgagggcttcgccaacacctacggcctcaagaaacaccgcctggcgcacaaggccgagaacctcggggggcctggagcaggggcgggcaccttggccgggaaggatgcctgaccgaggggttcccatcccactcccatcaaaagcccccttctggactcccacctcccaggactgatcagactcttcccccctcctcgctgttgccccatccttcagaacttcacacggactggcgaccttcagggcgcacgcccgacaggctcaagactgaatcactcccatcctcgacctctctgccctcccctcatcccatcagacactgaaccctatcctccgtccaaccctcgtttgtgacccgcatcagcccccgccccagcagcactctgcccccagtaagttttggcggagatgggtctgaaccgcccctccccctcctttggaatctggctggacagtggagtatgagcagagttgggagggcacaagggagtgctgggtgctttttggggtgggggggtggggggcggggtggcagacgcggcttgtacagagcggagaataataaatcttaccatgagggccgctggagtccatccttgcatcccacccagggagagtggggatcacatggtggcaaagcaaaaaaaaaaaaaaaaaaa

SEQ ID NO: 285 - DNA, 852 bp, Homo sapiens
  SITE (745): n equals a,t,g, or c
  SITE (747): n equals a,t,g, or c
  SITE (756): n equals a,t,g, or c
  SITE (768): n equals a,t,g, or c
  SITE (790): n equals a,t,g, or c
  SITE (828): n equals a,t,g, or c
  SITE (834): n equals a,t,g, or c
aaggcccatttctaccagagcagcccggacctgctccacagacagtagagaagaactccaggcctcaggaagggactggtagaaggggctcctcagaggcaaggccttactgctgcaactacgagaactgcggaaaagcttataccaaacgctcccacctcgtgagccaccagcgcaacacacaggtgagaggccatattcttgcaactgggaaagttgttcatggtctttcttccgttctratgagcttagacgacatatgcgggtacacaccaratatcgaccatataaatgtratcagtgcagccgggagttcatgaggtctgaccatctcaagcaacaccagaagactcatcggccgggaccctcagacccacaggccaacaacaacaatggagagcaggacagtcctcctgctgctggtccttaggtgaatgaagaaggaagaggattccaggctgagagcactggacgtggcaactgttcagaggagaggcagtcttcaagttctacattcattcagaaaaatgttttttgagcctacaataytgagcgcaacaaggytktggagacccatggtgaggagcwtggagttaactaaaggatgtgtcagggaagaaagacttcttaaggaggtgcctccatcagacccaaaggactcatgggggctagctgcacctcacattctttggacatataccggtggacatggctaatctttctggaaactatggcatggacaggnangggattcanaagtgcatgaangcaccctggctttgcagaagcngaaagaatcattggccaccatttatgaatgggcccagnggttgnccagaaaaaaaaacccct

SEQ ID NO: 286 - DNA, 646 bp, Homo sapiens
ccagacaggcaccgcagccttgccttacccgctgaaaaagaagaatggcaaaatcctgtacgagtgcaacatatgtggcaagagctttgggcagctctccaatctcaaggtccacctgcgtgtgcacagtggagagcgtccattccagtgtgccttgtgccagaagagcttcactcaacttgcccacctgcagaagcaccacctggtgcacactggggagcggccccacaagtgctcggtgtgccacaagcgcttcagcagctccagtaacctcaagacccacctgcgcctgcactccggggcccggcccttccagtgcagtgtctgccggagtcgcttcacccagcacatccacctgaagctgcaccatcggctgcatgccccacagccctgtggcctggtgcacacccagctgcccctggcctctctggcctgccttgcccaatggcaccagggggcactagatcttatggcggtggcatctgagaaacacatgggctatgacatagatgaggtcaaagtgtcctcgacatcccaggggaaagcaagagcagtgagcctgagcagtgccgggactcccctggtgatggggcaggaccagaacaattaaaaatgtttcttctgtcaaaaaaaaaaaaaaaaaaaa

SEQ ID NO: 287 - DNA, 2133 bp, Homo sapiens
ggcacgaggtgaaatggtcttcaacaagaagaggcacattcagcagcatttttaccagaatgtcagcaagacgcaggtgggcgtcttcaagtgccctgagtgcccactcttgttcgtgcagaagccggagttgatgcaacacgtcaagagcacccacggtgttccccgaaatgtggacgagctgtcaaacctccagtcttcagcggacacatcctcaagccgccctggctctcgagttcccactgagccaccagccactagtgtggctgctcggagcagctccctgccttctggccgctggggtaggcctgaagcccaccgcagggtggaagccaggccgcggctgaggaacactggctggacctgccaggagtgccaggagtgggttccagatcgggagagctacgtgtcccacatgaaaaagagccacggtcggacattgaagcggtacccatgccggcagtgtgaacagtccttccacacccccaacagcctgcgcaaacacatccgcaacaaccatgacacagtaaagaagttctacacctgcgggtactgcacagaggacagccccagctttcctcggccctcccttctggagagccacatcagccttatgcatggcatcagaaaccctgatttgagccagacgtccaaagtgaaacctccgggtggacattcccctcaggtgaaccatctgaaaagaccagtcagtggagtgggggacgctccaggcaccagcaatggcgcaactgtctcttccaccaaaaggcacaagtccctttttcagtgcgcgaaatgtagttttgccacagactcggggctcgagtttcagagccacatacctcagcaccaggtggacagctccacagcccaatgtctcctctgtggtttgtgctacacctctgccagctccctcagccgccacctcttcattgtccacaaggtgagagaccaggaggaggaggaggaagaggaggcggcggcagcggagatggcagtggaggtggcagagccagaggagggctccggggaggaggtgcccatggagactagagagaatggactggaagaatgtgccggtgagcctttgtcagctgacccagaggcgaggagattgctgggcccggcccctgaggacgatggtggccacaatgatcacagtcaaccacaggcctctcaggaccaggacagccacacactgtcccctcaggtgtgaccggagactttgcagtgtgcatggtcaggggtggtgccgaagtgtcttccacctgccctgcggaccgtggaaaataaaaggctctgcccccagtgtgagtgtgaccggttgtaccctggagtagtgtctgccctgagctgccagtgctgggtatcccccagccccaggaaatgtggggtcggccaggaccctcacagctctgaatttgcttctgttatttatggcttttcgctgcttcttggtgccccatctcttgtctgtgtccttccaaccccaagctgcttatgtggcccaaccccactgctgtcaactaggcttgaaccccacagcggctgtgctcttctgggaggttcccgcttgctgccttcagccagggcgctcctcagagctctattttcctgcagacaccagctctccttcctgcctttagatcctgagaaggagggaaatgaggggtgctgacacagtccctctgggagagctctgcctagtctggtttggcgagggcccttgatcaccttgcccctcctccctgtcttctctgattcttttccctcaaaatagtcctgagaactaattgtcacactggctcatcatgtctctgtgggtggggtgggagaaacctctgctgcacacctctgtttggaacctgggcagagcaggaggtaaggcaaaggcaggcaggcaccaagaaccagaccccttgagaaggcgctgtgggtgggtctttgttctgctgttctgcctttcctgacaggtggggttggggcacacagacattggaatatttgtactgctctcgtgccatttgagaggctgctgccccaggcaggccagcccctactcctcttggctacactcatgttgctcagactatatttaaaaaaaaaaacttcaaaccaaaaaaaaaaaaaaaa

SEQ ID NO: 288 - DNA, 1282 bp, Homo sapiens
gaccgacactattgcctgctctgctccaaggagttcttaaatcctgtggccacaaagagccacagccacaaccacatagacgcccagacctttgcctgtcctgactgtggcaaagcctttgagtcccaccaggaactggccagccacctgcaggctcatgcccggggccacagccaggtgccagcccagatggaggaggccagagatcccaaagccgggactggggaggaccaggtggttctccctggtcaagggaaagcccaggaggccccatcagaaacccccagaggsccaggagagagtgtggagagagccaggggaggacaagcggtgacgtccatggcggctgaggacaaggagcggcccttccgctgcacccagtgcgggcgctcctaccgccatgctggcagcctgctgaaccaccagaaggcccacaccacagggttgtacccgtgctccctctgtcccaaacttctccctaacctgctgtctcttaagaaccacagcaggacccacacggaccccaagcgccactgctgcagcatctgtggcaaggcctttcggacagctgcccggctggagggccacgggcgggtccatgcaccccgggaggggcctttcacctgcccccattgtccccgccacttycgscgccgaatcagcttcgtgcagcaccagcagcagcaccaggagagtggacggtggccggytccggagccccagtggcaccagtgacgggcagaggggacttgccattgccccctccayycacccccacgaccccactcctggatccttcaccccagtggcctgcagacctcagcttctccctctgaacttcaagtctccaaagatcagaatctgggggagggagcgcgtgcagggaggggcttgatctccacattttctcaggagtagttcgggcatccccatatcttctcctctccccttgtgaagaggacccagatctggcttctttcccaaggagggggtggggtgttcctcgcgtccctgtccttgaaggacctccttcccccagcctcatcaccgtgctcttctcagcgccaccctcagcagccagattgcaacaccagggagaggcggatgcagagccccaccggtgggaaagttgcctgtggaagggagccttttgctacaatttgtaacttattttctaaagtctattttgtaacaatttatttaagtttaaaaaaaggaaaactgctgccccccaaaaaaagaaattttcaaaamaaaaaaaaaaaaaaaaaaaaaaaaaaaa

SEQ ID NO: 289 - DNA, 869 bp, Homo sapiens
  SITE (806): n equals a,t,g, or c
  SITE (833): n equals a,t,g, or c
  SITE (865): n equals a,t,g, or c
aaagctggagctccaccgcggtggcggccgctctagaactagtggatcccccgggctgcaggaattcggcacgaggaaaaaagcttttcaagtgtaatgaatgtaakaaaacttttacccakagctcatctcttactgttcatcakagaattcacactggagagaaaccttataaatgtaatgaatgtgggaaggcctttagtgacggctcatcctttgcccgacaccagagatgtcacactggcaagaagccctatgagtgcattgagtgtgggaaagctttcatacagaacacatcccttatccgtcactggagatactatcatactggggagaaaccctttgattgcatcgattgtgggaaagccttcagtgaccacatagggcttaatcaacacaggagaattcatactggagagaaaccttacaaatgtgatgtatgtcacaaatccttcaggtatggttcctcccttactgtacatcaaaggattcataccggagaaaaaccatatgaatgtgatgtttgcagaaaagccttcagccatcatgcatcactcactcaacatcaaagagtacattctggagaaaagccttttaagtgtaaagagtgcggaaaagcttttaggcagaatatacaccttgccagkcatttaaggattcatactggggagaagccttttgaatgtgyggagtgtggaaaatccttcagcatcagttctcagcttgccactcatcagagaatccatactgkagagaagccctatgaatgtaaggtttgtagtaaagcgttcacccagaaggttcanctgcacagctcagaaaaccctacaggngaggaaaccttatgagtgcaaggattgcggtnaagc

SEQ ID NO: 290 - DNA, 457 bp, Homo sapiens
gagtctttagagcatctgcaagccttactaaccaagtaatccataacgcagataatccttacaaatgcagtgaatgtggcaaggtctttagttgcagttcaaagcttgtgatacatcgaagaatgcatactggagagaagccttacaaatgtcatgaatgtggcaagctcttcagtagcaattcaaacctttcacaacatcaaagaattcatactggagagaagccttacaaatgtcatgaatgtgacaaggtctttcgaagcagttcaaagcttgcacaacatcaaagaattcatactggagagaagccttacaaatgtcatgaatgtgacaaggtcttcaatcaaattgcacaccttgtacgacatcaaaaaattcatactggagagaaaccttacagttgtaataagtggcaaggtctttagtcgccattcatatctagcagaacatcaaacgg

SEQ ID NO: 291 - DNA, 410 bp, Homo sapiens
  SITE (329): n equals a,t,g, or c
  SITE (367): n equals a,t,g, or c
  SITE (383): n equals a,t,g, or c
gggccgcttctgcaagaagaagtactctgacgtcaagaacctcatcaagcacatccgagacgcgcatgacccacaggacaagaaggtcaaagaggccttggacgagctctgcctgatgacgagggagggcaagcggcactgctctatgactgccacatctgtgaagcgcaattcaagaacgagctggaccgcgaccgccatatgctggtccacggagacaagtggccttttgcctgtgagctctgtggccatggggccacyaagtaccaggcgctggaactgcatgtcaggaagcaccccttcgtgtacgtctgtgccgtctgccgcangaagttcgtcagctccatcaggctgcgcacccacatcnaagaggtgcacggggntgcccaaggaggccttggtcttcacca

SEQ ID NO: 292 - DNA, 2349 bp, Homo sapiens
ggcacgagagcacattggctagtagcaataaaaaaagtaaagtcaatacagcattgaggaatttaaggtatcgtcggggcattcacaaatgcattgagtgttgttccgaaataaaagattttgcaaaccactttcctacgtacgtccactgtagtttttgcagatacaacactagctgtagcaaagcctatgtaaatcatatgatgagctttcatagtaaccgtccaagcaaaaggttttgtatttttaagaagcattcagaaaatctccggggcattactctagtgtgccttaattgtgatttcctaagtgatgtttctggcttagataatatggctacacacttaagtcaacataaaactcatacttgccaagttgtaatgcagaaagtttctgtttgtatcccaacttctgagcacctttctgaattaaaaaaagaagctcccgcaaaggaacaagaacctgtgtctaaggaaattgcaagacctaacatggctgaaagagaaacagaaacatcaaattctgaaagtaaacaagataaagctgcttcttcaaaagaaaaaaatggatgtaatgcaaattcatttgaaggctcatcaacaacaaaaagtgaagaaagcataacagtttcagataaggaaaatgaaacctgtcttgcagaccaggaaactggctcaaaaaacatcgtcagttgtgattcaaatattggtgcagataaagtggaaaagaaaaaacaaatacaacacgtttgtcaggaaatggagttgaagatgtgccaaagttcagaaaacataatcttatctgatcagattaaagatcacaactccagtgaagccagattttcttcaaagaatattaaggatttgcgattagcatcagataatgtaagcattgatcagtttttgagaaaaagacatgaacctgaatctgttagttctgatgttagcgagcaaggcagtattcatttggaacctctgactccatccgaggtacttgagtatgaagccacagagattcttcagaaaggtagtggtgatccttcagccaagactgatgaagtagtgtctgatcaaacagatgacattcctggaggaaataaccctagcacaacagaggcaacagtagacctggaagatgaaaaagaaagaagttgaaattagtcattttaagtttcagtgtaccaacgataagggcatttggaacagtgctatcaggtgagctcagtggtgctgttgtaggttcagaaatggaaatatgtaagggaggtcacacatacactttacctgtatgttcaacctatgttatcaaacaaaccaattcaccaataatagcatgattagtagggattcccaaaaagtttttaaaaacacgaacaggattttaatgataattaaatttgcagtggaaaggtctcatttaatggttttcaaggaaatgggatttggttgctgacatgaattgatgatattagtaatatttataaagcctttcaaacttccatcaatcctaagctaaaaatctttattacctgtatatccttttcagttaactgagaggaagggatttggaaaccatgtacttttggggagtaattgattaaaaacaatggctgattggcattgttaatgaaggctttatttgtgaggatgatgctggtaaatggagcatgcttagagtactaaattgatctaatgagaatttggatgaacataaacttaattttggatttaatataacattccagtcagacgcatgtaaacagaatatttgaatctttgtacctccatacaagtgttagcctgccaggctgtaagcttaccttaattaaactttcagtgaaagtggaattattaagatataaatttatatttgtgctttttgtcagtgtgtaagctgtgtagaaattctttgatgtattagttgtattaatgtaaagtagaaacccattgttgaaactcctgtagctattatgcttttaatattgttttaatgatcttccttagaaataggcccataaaaatggtctggaagccaaaccaaagtatggtataatgtagatattgtaaagcagtaaactgaaaacatgtcctggcatgtattcagccatgtttaagtgacttttctgtaattgtaaaataaaaacttcaaatgggacctaaaacagtgatgtaaaagaactggttttggaaatttagcctaatttatctataagatggctgctaaattgatttttcagttctttttatcatctagaatataatagatatagaaatgaataatatgaagaacagtagtttgctttgaaatactaataaccttttatttaaaatgaaaaaaaaaaaaaaaaaa

SEQ ID NO: 293 - DNA, 618 bp, Homo sapiens
  SITE (161): n equals a,t,g, or c
  SITE (396): n equals a,t,g, or c
  SITE (508): n equals a,t,g, or c
  SITE (520): n equals a,t,g, or c
  SITE (550): n equals a,t,g, or c
  SITE (583): n equals a,t,g, or c
  SITE (611): n equals a,t,g, or c
gctcgtgccgcgaatccacacaggtgagaagccctacaaatgccttgaatgtggaaaaaactttagtgaccgctctaacctcaatacccatcagagaatccacactggagagaagccctataaatgccttgaatgtgggaaaagctttagtgaccattctnaatctcatcactcaccagagaattcacacgggggaaaagccctrttaaatgtggagaatgttggaaaagcttcaaccagagsttcaaaccttctgaaacatcagagaatccacttgggaggaaatcctgaccatgtagtgagcctgggggaaactttgcccaaagcccatyttttagtgctcactggaggaattctacagaagagacagctcctgaacaacctcaaagtatcagnaaggacttgaattctcctggaccacacagcacaaactcaggggagaaactttatgagtgttctgaatgtgggaagaagcttctctaagagctctgccctcattaggcaccanagaatccatacnggagagaaaccatatgaatgtgccgaatgngggaaaagcttcagtaagagcttcacccttggncaaccaccagcggcacccacactggganagaaacc

SEQ ID NO: 294 - DNA, 1723 bp, Homo sapiens
ggcacgagggacttcaggaatcctggccaggaagtcaggaaactagacctgccagtgctgttcccaaacagacttggttttgagttcaagaacgagattaaaaaagaaaatctaaaatgggatgattcagaggaagtagaaataaacaaggctttacagaggaaagtccagaggagtttattggcactctgagctacaaaaaggcttggagagtgagccaacatcaagaaggcaatgtagaaattctccaggggagagtgaggagaaaaccccatcccaggagaagatgagtcaccagagtttttgtgccagggacaaagcctgtacacatatcctctgtgggaaaaactgctctcagagtgtgcactctccccacaagccagcgctcaaactggaaaaagtatctcaatgtcctgaatgtgggaaaacctttagccgaagttcttatcttgttcggcatcaaagaatccacacaggcgagaagcctcacaagtgcagtgagtgcgggaagggctttagtgagcgctccaacctcactgcccacctacgaactcacacaggggagaggccctatcagtgtgggcaatgtgggaaaagcttcaaccagagttccagcctcattgtccaccagaggacccataccggggaaaagccttaccagtgcattgtctgtggaaagagattcaacaacagttcccagttcagtgctcaccggcgcatccacactggggagagcccatacaagtgtgcagtgtgtgggaaaatcttcaacaatagctcccacttcagtgcccaccgaaaaacccacactggtgaaaagccttacaggtgttctcactgtgagagaggcttcactaagaactctgccctcacccgtcatcagacagtacacatgaaagcagtactctcatcacaggaaggaagagatgcgttatgagtgtgtcggtaaactgtcagattaagttcctcaggtcagcatgtatgagctttcttctgctgtggagagatctagccagtccctgactttgcaacagacctactgactactggttctaagacccatgtctaggaccaggagtcagtataaggacgctgacctctcctggctgtgcctgtgactccagagtcctatcttactgtgacttaaagtttgatggagagaaagctgtaggatccataaattctaccaggaaaccagggtcttcctgttcctagcactgagaatgggcacccagtggtccaagaacactttctgggctaacatagtcctcacacagggctgagaaagaaagtgtctcctttcctggaaagcacatgtaaaagttaagggcctgaatctcttctaaaccaataattgacctctaggcacccaccgtaatactgctaccttcagggcagaagacactgctctttgtaacccagccaccaccaaaaagcaaacagaaagaaggaaggatggttaagccattggataatactgaatctgtttccctaagtgacttaaccttagagcaagcacaacatccaggttaattttttgtaagatttctccttttattattgccctcatcatagttcctgattgtctcttaaagtaagtggtttatagacattactatttctgataataatttacaaactactataaacaaatttataaacattactaatttctgatgaaaataaagttgtttctccctccaaaaaaaaaaaaaaaaaaact

SEQ ID NO: 295 - DNA, 633 bp, Homo sapiens
aattcggcacgagctcgtgccgaattcggcacgagtcataggagcataaaagtgtaagaccgtaaagagtatgagcgcgccattcatcatcagacagcccacactggtgagaaatgatggaatgttagtcttataggtatggctttagcaattgagagagttcaaaatgcagatcttgccacattagaaagcattcaatgtcagtcctgttttaatggaatatctgactattcaatggtaaattaagaaaaaaaaaaaaaaaacaggaatcccagtttcttcatgcctacaacatccatggcatggatttttttttaaaaaaacttaataattaaggctgggcgcggtggtttgcctgtaatcccagcactttgagaggccaaggtgggcggatcacgaggtcaggagatagagaccatcctggctaacacgatgaaaccccgtctctactaaaaatacaaaaaattagctgggcgtggtggcaggcgcctgcaatcccagctactcgggaggctgaggcaggagaatagcgtgaacccgggaggcagagcttgcagtgagcagagatcgcgccactgcactccagcctgggcaacagagtgagactccgtctcaaaaaaaaaaaaaaaaaaa

SEQ ID NO: 296 - DNA, 846 bp, Homo sapiens
ctacacaagtgccttctgtggcccctcagacatcattaaacatcagcggcctcctcgcaaacaggaacgtagtccttgtgggacagccagtggtcagatgtgcagcctcaggagataacagaggatttgcacaggacagaaaccttgtgaatgcagtgaatgtggttgtgccttccgtgatcaattatgtcttattttatgttacagaaaacccataggaagaaaactcagatctatgtggaaaagggttgagcaaaaatttgtagttcattatgtggccgaaaagcatacactgagagaacatgtataaggctgagatagcctgataaactcatcctattaaaatgtatgctgtgatacacaggcaaatttgatgttaacctaagcacatacacagcaattgctcgactgtgtcaattaaatgagtaaaggaagcccaagtacttttaagtggaggaaatgaagtactgtgaatttttaaaacagatgagataattggtgtcgggagtgttgcagtgactgaaaagcttcataaggggcagttggtgggaaagggctaatactgtaatggtggaatgtgggacacatatgtgtcaattcagtttccttagaccagtgccagtgtggaggattaattgaaaaccaggaccataaactttcagaactttgtattatgcagagggatctgtgaaactagtcaatttgtttcattaaacaaatattttaaaattataaaaaaaaaaaaaaaaaaaaaaaaaaaaaaaaaaaaaaaaaaaaaaaaaaaaaaaaaaaaaaaaaaaaaaaaaaaaaaaaaaaaaaaaaaaaaaaaaaaaaaaaaaaaaaaaa

SEQ ID NO: 297 - DNA, 1407 bp, Homo sapiens
ccacgcgtccgggaaaatggcgctgacgtgagcgcgaactcgcactgcccagagggtggccgccgcctaagctgcagccgccggagccgcagaaacaagaggccgagccgtgtcgaagatggaggagaaaccctcagggcccatcccagacatgctggccactgcagagcccagctccagtgagaccgacaaggaggtgttgtccccggctgtgccagctgcagccccttcctcctccatgtcggaggagccaggccctgagcaggcagccacaccgccagtgtgggaacgtggaggggctggagggatgcggcagggctcctccccagccccagacagctgccagcctggccccggacccagccctggcctgaccagcatagtctccgggaccagcgaggacctgcggcctcccagacgacgcccacctccagggaagcaaatcccttgctccagccctggctgctgcctcagttttcccagcgtccgtgacctggcacagcatctgcgaacccactgcccgcccacacagtccctggaaggcaagctcttccgctgctcagccctgagctgcaccgagaccttccccagcatgcaggagctggtggctcacagcaaactgcactacaaacccaatcgctacttcaagtgtgagaactgcctcctgcgcttccgcacgcaccgctcgctcttcaagcacctgcatgtttgcgcggagcatgcgcagagcccagccccgccgccacccccggccctggaccgagagccgcccgcgccggagcgccccccggaggttgaccccgcatcagcgccgggcctgccgttcccgctgctggaacccttcacgacccccgcccctgcccccaccggaccgttcctgccctacttgaaccctgcgccctttggcctaagccccccgcgcctgcgccccttcctggccgctgcacccgggccgccggcttccagcgccgccgtctggaaaaagagccaaggtgctggcagcagcccccgaagaccccagggcggctccgacgcgccctcagtgcgccttctccacggcctcgcggcccgccatgaccctgcacctggaggaccaccgccccggcgcccccgcggcccccgcggccgggccgccgcgccccgacgcccccgcggatccggccccgcttgcacccaaggtgtcgccgctgctgtcagagggggagcttccagtgttctcgcagctctgaatcccgccgctttgggggtgggccatgggatgtgggtagttttgtcatttggagggggctgcagggaaggggggctggggtggacaataaagaaggcgccatgagccagcctaaaaaaaaaaaaaaaaaaaaataaaaaaaaaaaaaaaaaaaaaaaaaaaaaaaaaaaaaaaaaaaa

SEQ ID NO: 298 - DNA, 1773 bp, Homo sapiens
gtgaagcatgtgacaaagtttacagtcgcaaatcaagcctcgaaagacaggagaattcatactggagagaaagcttacatatgtgaagaatgtcaccaagttttcagtcacactcaaaccttgaaagacacaggagaattcctactggagagatagcataaaaatgtaagagtttgtgacaaggctttcaggcataattcgcacctggcacaacatcctagaattcacattggagagaaagcttacaagtataatgaatgtgacaggtctttagtgggcagtcaacacttgtttaccatcaggcaatccatggtgtagggaaactttacttatgtaatgattgtcacaaagtcttcagttacactacaaccattgcgaatcattggagaatccataatgaagagagatcatactagtttaataaatttggcaaatttttcagacattgttcataacttgcagttcatcggcgaactcgtactggagagaaaccttacaaatgtcatgattgtgacaaggtctcagtcaagcttcattctatgcaaaacataggagaattcatacaggagagaaacctcacaagtgtgatgattgtggcaaagcctttaattcacattcacacctcactagacatcagagaatgcatactggacagaaatcttataaatgtcatcagtgtgccaaagtcttcagtctgagctcactccttgcaggatatcagaaaattcattttggagatagttgttccaaatacaatgtgtatagcaaaccatcaagcattaattgacactagagtcagttcagcattgacttgagtttgacttaacattgagttgaagccttaattgacattaaagtgtttatgttaagaggactgggccaggcacagtggctcacacctgtaatctgagagctttgggaggccagcaccggtggatcacttgagttcaggagtttgaggtcagcctggccaacagacgtgagccattttcccagcctgttttttgtttctttaacaaaaactgatagggatttttttttttttttttttgagatggagcttcactcttgttgcccaggctggactgcaatggagcgatcccagctcactacaacctccgcctcccaggttcaagcaattctcctgcctcagcctccagagtagctaggattacaggcatgagccaccacgcccagctaattttgtgtttttagtagagatggggtttctccatgttggttaggctggtcttgaactcccagcctcagatgatccacccacctcggcctcccaaagtgctgggattacaggcgtgagccactgcgcccagccccagtgataaggatttttatgggtaccgtgttgaatctaaatcacattgggttatataatcatttaacaatattaatttttccaaaccataagtatgggttgtagctctatgtttctaatcattttgatcaatgtttgtagatttcaaggtaaaaacctctgacctttttacgtttatttctaagtatttcttactttaagttctccagccaatggaagtgttttaaaattttcttttaaagttgtttattgttaaaagtatggaaattcaactaatttttggtgctgatactgtattgtgcaaatccactgaatatgttacttagttccagtagtattttggttgactctttgtgattttctgcacagaagatcatgtcatctacaaacaaatataattttacttctttctttctgaaaaaaaaaaaaaaaaaaaaaaa

SEQ ID NO: 299 - DNA, 1654 bp, Homo sapiens
  SITE (1499): n equals a,t,g, or c
gctggaactccaatttcggagaagcctgtatagaggacacctggttagatagtttgctaggcgatccaggaagtcttctgaggtctgatattgccaccaacggggaaagtcccacggaatgcaagagtcatgaattaaagagaggactcagtcctgtgtccaccgtttccacgggagaagattccatggtgcataatgtttctgaaaagaccctcacaccagctaagtctaaggaatataggggtgagtttttctcctactccgaccacagccagcaaggattctgttcaggaaggggagaaaccatatcaatgtagtgaatgtgggaaaagcttcagtgggagttaccgtcttacccagcactggatcactcatactagggagaaacccactgtccatcaagagtgtgagcaaggttttgaccggaatgcttccctttctgtgtatccgaaaactcacacgggctacaaattctatgtgtgtaatgaatatkggacaacttttagtcagagtacatacctgtgggcatcagaaaactcacactggagaaaaaccatgtaagagtcaagrtagtgaccacccacccagtcatgacacacagcctggtgagcatcagaaaactcacacagrtagtaagtcctacaactgtaacgratgcggcaaggcttttacccggatcttccaccttactcggcaccagaagatccacactcggaaacgctatgagtgttccaagtgccaggcgaccttcaacttgagaaaacacctcatccaacatcagaaaactcacgctgcaaaaactacctctgagtgtcaggagtgtgggaagatttttaggcacagttcgctgctcattgaacaccaggctcttcatgctggagaggagccttataagtgtaacgaacgtgggaaatccttcaggcataactctaccctaaagatccatcagagggttcacagtggagagaagccttacaaatgcagtgagtgtgggaaggccttccaccggcacactcaccttaatgaacatcggcgaattcatacaggctacagaccccacaaatgtcaggaatgcgtcaggagtttcagccggccctcacatctgatgcgacatcaggccattcacaccgcagaaaagccctatagctgtgctgaatgcaaggagactttcagcgataacaatcgccttgtgcaacaccagaaaatgcacactgtcaaaaccccatatgaatgtcaggagtgcggagaacgcttcatttgcggctcaaccctgaagtgccacgagagtgttcacgccagagaaaaacaaggattttttgtgagtgggaagatcttggatcagaacccagaacagaaagagaagtgctttaagtgtaacaaatgtgagaaaacctttagctgcagcaaatacctaactcagcacgagaggattcacaccaggggagtgaagccctttgaatgtgaccagtgtgggaaagcctttggccaaagtactcggntcattcaccatcaaagaatcactctagaatgaggctktataaatgggtgagcaaggaaagcattagcagggcttccttataaacttagccttcacacaaaggrcacctttaaagwaccaatgygraagacttagcccagggccacttttaaaaat

SEQ ID NO: 300 - DNA, 964 bp, Homo sapiens
ggcacgagagcccggagctgcagccaccggggagccaggtaccttccgcgagacgtcgaggggcgagtcctagtctcttttctccgcactggaagacttgaacacttccttctctgcagcaaagcacctgctctgagtggccatggggaagcgatacttctgtgactactgcgaccgctccttccaggacaacctccacaaccgcaagaagcacctgaacgggctgcagcacctcaaggccaagaaggtctggtacgacatgttccgagatgcagctgccatcttgctggatgagcagaacaagcggccctgcaggaagtttctactgacaggccagtgcgactttggctccaactgcagattttcccacatgtcagagcgagacctgcaggagctgagcatccaggtggaggaggagaggcgagccagggagtggctactagatgctcctgagctccccgagggccatctggaggactggctggagaagagagccaagcggctgagctcagccccaagtagcagggctgaacccatcagaaccactgtcttccagtaccccgtgggctggccaccagttcaggagctgcctccatccctgcgggcacccccacctggggggtggcctctgcagcccagagtccagtggggctgagccccttgcccccgactgacccccacgtggtcacttttctcatcagtcacaataggaagccaagcccggttcctgctacgccccatggaggctccgagaccatctgcccagcctcactgaggctcaggacacggccacaccaagtgcagccctcgtcctgggtctgcaccgggcagctctcccctcactctcctccacctgcccccctgcttcttaagaagatgggggagaaaacttccaaatgtttataaagaaagtctgtcaccaccaaaaaaaaaaaaaaaaaaaaaaaaaaaaaaaaaaaaaaaa

SEQ ID NO: 301 - DNA, 1221 bp, Homo sapiens
  SITE (3): n equals a,t,g, or c
  SITE (4): n equals a,t,g, or c
cgnntcgacccacgcktccgccgccatcagctggtactagatcaccatgtgaaagggcatgggggcactcgtctctacaagtgcaccgattgtgcttacagcaccaagaaccgacagaagatcacctggcacagccgcatccacactggggaaaagccttaccactgtcacctctgcccctatgcctgtgctgatccctctcgtctcaagtaccacatgcggatccacaaggaggaacggaagtacctgtgccctgagtgtggctacaagtgcaagtgggtcaaccagctgaaataccacatgaccaagcatacaggactgaagccataccagtgtcccgagtgtgagtactgcaccaaccgggctgatgcactgcgtgtgcaccaggagacccggcatcgagaagcacgggctttcatgtgtgagcagtgtggcaaggccttcaagacgcgcttcctgctgcgcacccaccttcgcaagcacagtgaggccaaaccctatgtgtgcaatgtgtgccaccgtgctttccgctgggctgctggcctgcgccatcatgccctcacccacaccgaccgccaccccttcttttgccgcctctgcaactacaaggccaagcaaaagttccaggtggtcaagcacgtacgcaggcaccaccctgaccaagccgacccaaaccagggtgtgggcaaagaccccaccacccccacagtgcacctgcatgatgtgcagctggaggatcccagccctcctgctcctgccgctccccacactggacctgagggctgaaagcctgccccacctcctgtataggaagagggtatggtctgagatgtgcagactgggaccagcgctagcctgaggagctcagagcctaaggaaagactggcttttggggtacaagggtgactagaaccttcctgggactctggctatagtactttgaaattatcacccatataaaagagggacatggactataacgttgatttcttattgctgtacattgcgtttttaacctgcaagttctcagtttcttcaccatcactccatcaaagtccctggctataagatctggattttacccactccatcttctctttccttcttactgtgtcaattcctattttctttcagaatcttctaaaaacagttgtatctaaccgcatgtgctgttgtgcctaatgctctataaagcatgttaaacagaaaaaaaaaaaaaaa

SEQ ID NO: 302 - DNA, 966 bp, Homo sapiens
gggtcgacccacgcgtccgctgtaaggaccgtcccttcaagtgtgacttctgcagcttcgacacgaagcggcccagcagcctggccaagcacgtcgacaaggtgcacagggacgaggccaagacggagaaccgggcccctctgggcaaggaagggctcagagagggcagctcccagcacgtggccaagatcgtgacgcagagggccttccgctgtgagacctgcggcgcctccttcgtcagggatgactctctgagatgccacaagaagcagcacagtgatcagagtgagaacaagaactcagacttggtcaccttcccaccggaaagcggtgcctcgggacagctcagcaccctggtctccgtggggcagctcgaggctcccctagagcccagccaagacctctagctcagccgaagagggtggtcagctgtcggaacttctgaccagtgctgttgcccagccctccagaggtgaggccactgagagacaggctttgggcaccacttctggggctggccgctccaacttcacaggccttcagaggcgatggctgggcgacagtgacgaaagcaaagcaaagcagggctgtggagacactcctcgcatttgtctcttccctccaaggattatctgagcaagtcgacttgttcattcaaaggcggggtctgccaagccctgctctatccaatggggatagcttctacgtaacggattccaattttaaaactgatccatctctgatggaattattaaacttagacgatatagaaaactaaaactaatctctagagtggaaagggttaaagtgaggaaggtgtacgtgaagggtctggggttgctggaaaacttctatttcataacctgggtgatcgttctaagagtgtttgccttatatgtttgtgtggtttcttttacctgttgtcttacaataaaaaaggcagactcatggtaaaaaaaaaaaaaa

SEQ ID NO: 303 - DNA, 390 bp, Homo sapiens
  SITE (81): n equals a,t,g, or c
tgagcctgaaaaactggcagcgtgtgcaccatttctaaagtggatgagagagaaaacggtgcgatgtctgttttgtaagtncttggtctctgaggaagagcttatacaccacttgctgatgcatggcttggggtgcttgttctgtccatgcaccttccatgatatcaaaggtctttcagagcacagcaggaataggcacctggggaagaagaarttgcctatggattatagcaacagargttttcaattaratgtcgatgccaatggcaacctgctctttccccaccttgatttcatcaccatattgccaaaggaraagcttggggarcgggaartctacttggcaatcctggctgggatacactccaagtcactggtgcctgtgtatgt

SEQ ID NO: 304 - DNA, 2628 bp, Homo sapiens
aattcggcacgagccctcgtgagaaccgagccacagtcatgtttcctacatcagcctcctgctcaggggtttgtacagagaccactgccagccctctaggtggtccctgcaaagaaagtcccagctcccaaggctccaaatggacagggcaccatgttgaccccttcgttggcctccagttcgccgactgtaacatgtttcatccagttcaggacgtttatttatttccaacttgcatacaaaacatactgagaaactaaaaccatcgttaaaagtgaagacacgttgagacaggtatctcgacctgccaagtatacagctaaagctgagttcataaaaagggatgatttggccgacggtcatctgccagattctgatgatgattcagaagtcagtgtggaagaagatcagagggagaggcaggcgctctttgacttatcaagctgctccctgaggcccaaaagcttcaagtgtcagacttgtaaaaagtcatatatagggaagtggggactggcccagcattttaaacttaatccaggccatggccagctggaccctgagatggtgctatctgagaaagccaatgggagcaccctccgggggtgcacagaggaaaggacgctcagcctgaccttcccgaggctgtccgtgccagcggctccgcgtgagggaggggcccgctcctgcttggtgagagagtcagcacgcggtggcctgggtgaactgtcacccctacaactcagcttgcaaccagccctggccaccaccagtttccccacactgagctgaatattggacatgcccatcttagacattccagcccattctgaaattccacatcgattcacccgacaaagtctgaagttccagggcaatttatctggaaaagctcacctggaatcatgtgtcatttcaaccaacaactgttgaagaggacgtggcatcaaaaccaaggttatcaattatttataagggttgtgtggtggttggtccaagcatctctccttcatgccatcactcctttcaagagctgcctctattttctaatttagcacaggaatttagatgcccctaaataagtaggcatccagtatctgcccacaccagttttagtgagagtacatatggagacactaccaccacccctgctctcctactgcataccccaccatgccaaagcatggtggctcacacctgtaatcccagtgctttgggaggccaaagaggaggaacacttgaggccagaagtatgagaccagcctgggcaacatagtgagacctcatttctataaataagttaaaaaaacaaaaaaatagggcatagtggtgcacatgtgtggtcccagttactcagcaggctgaggctggaagatcacttgagcccaggagtttgaggctgcagtgagctaggattatgccactgcactctagcctgggcaacagagagagaccccatctctaaaaagagggagaagaaggaaggaggaggaagaagaggaagaggaggaggagaaatactgctctttctcaggcccaaggtaaaaaggtttttggtctcatgttgaccagaaagacattgatatttaattaagcaatataaaaaggctcattgttaggattaaagagtaagtaaaatcaatattgagataggaggatggaggacaccaactgagttccgatcccaatgaagaggagaaaaagctacaactatctaggtgaaatatctacttatcctagaagaagccttttgacagcaacataaaattcatacctataggtttttaattcctatggatgccgtagcaaataacaaaaacttggatggtgtaaagtaacagatgtttactcttttccagtattggagaccaggaatctgagatcaaggtgtgggcaggggtgcgctccccctggaggttctaggagagatccttcctgcctcttccagctcctggtggctcaggtgtccctgggcttgtggccacatcactacattctctgcctccatctccacgtgaccttttcctctgtgtctgtgtctcctcttctgtctcttagaaggacactggtcattggatttaaaggccacctgggtaatttatagtgatctaatctcaagaatctttccttaattacatgcaaatactctttatccaaattagtttgcattcacaaattctggagcttagtacttggacatatattttggggggttgatggttggaggggcttttattcaactcagtacatcttaataaggaattaatgccccccaacttgccttacaagtcatatattaaaaacaatgttggcctggcacagtggctcatgcccgtaatctcaacactttgggaagccaagggaggaggatcacttgagcccaggagttggagaccagcctggataacaaagggagacccagtttctacaaaatatttaaaaattagccaggcatgatggtgcatgcctgtggtcctagctattcaggaaactgaggtgggaggatcacttgagcctggaagttcaagacagcagtgagctatgctcacaccactgcactccatcctgggcaacagagctggactctgtctcaaaaaacataacactaaaacatcaaaattaaaaaaaaaa

SEQ ID NO: 305 - DNA, 534 bp, Homo sapiens
ggtaaggaagtgcttttgaatgaggtactgagggccaaggtgttggaagttcctaattctttcctcggttaactgtgaaactctgcgtattgggaaggcctggcctcagtcatcaggccaggagaggtactggacgccgcgcacgcactcgtctgccagcgaggcccaaaggggaagcctagcggactcagtgtggcagctgctggcctctgggccgctacttgtcaataccatgctttcctgtaatatttgtggtgaaacagtaacctcagaaccagacatgaaagctcacctaattgttcacatggaaagtgaaattatatgtccattttgcaagttgtcaggtgtgaattatgatgaaatgtgtyttcatatcgaaacagctcattttgagcagaatacacttgaaagaaactttgagaggataaatacagtacaatatggaacttcagataacaagaaagacaacaccctacagtgtggaatggaagttaattcaagtattctttcaggttgtgcatctaatcatccaaa

SEQ ID NO: 306 - DNA, 1622 bp, Homo sapiens
acccccctcccccggccaccgcctccgctgagtctgccccctccccatccgcagggctcttccgtgggcggcggcttcgcgggcttggagttcgcgcggccgcaggagtcggagccgcgggcctcggacctgggggccccccggacgtggacggtggcggcggcggggccccggactccgtcggcgcacatccccgtcccagcgcagagagccaccccaggaaaagcccggctggacgaggtcatggctgccgctgcccttacaagcctgtccaccagccctctccttctgggggccccagttgcagccttcagcccagagcctggcctggagccctggaaggaggccctggtgcggcccccaggcagctacagcagcagcagcaacagtggagactggggatgggacctggccagtgaccagtcctctccgtccaccccgtcacccccactgccccccgaggcagcccactttctgtttggggagcccaccctgagaaaaaggaagagcccggcccaggtcatgttccagtgtctgtggaagagctgcgggaaggtgctgagcacggcgtcggcgatgcagagacacatccgcctggtgcacctggggaggcaggcagagcctgatcagagtgatggtgaggaggacttctactacacagagctggatgttggtgtggacacgctgaccgacgggctgtccagcctgactccagtgtcccccacggcctccatgccgcctgccttcccccgcctggagctgccagagctgctggagcccccagccctgcctagtcccctgcggccgcctgccccgcccctgcccccgccccctgtcctgagcaccgttgctaacccccagtcctgtcacagtgaccgtgtctaccagggctgcctgacgcccgcccgcctggagccgcagcccacggaggtcggagcctgcccacccgccttgtcctccaggatcggagtcaccctgaggaagccccgcggcgacgcgaagaagtgccggaaggtgtatggcatggagcgccgggacctctggtgcacagcctgccgctggaagaaagcctgccagcggttcctggactaagtccggctcgttcaagaacataagctaccaccttctccctccccaccccctccaggcccggggctgaaacagcccgaggacagccccaggggctggccttcaccagctgcagggtctgcttttacttggggtgggggggcggggctgaccctgaaccctcccccccgccaggtcggggaggggtcccaccactcaaagtgcctctaaagaaaccagctttttgcactaaagccaaaccacaccgctgtccccttagccccaagggccctgggggcagccaccctcccgcctgtcggcccgtagatttatcaagggtgttatgggcccagctttggggggccagtcccgatgcactttgaggggtgttggagaggggactcccccactcgcacttaactcaacggctctcgggccctggggctgtttttaccatgtttgtttttgaagctcaggtgtctcacgtctgggctgcaccaggcgaagagagaaattaaagatttgaggtttttccaaaaaaaaaaaaaaaaaaa

SEQ ID NO: 307 - DNA, 767 bp, Homo sapiens
gggtcgacccacgcgtccgccgctcgttgagccccggcgccgccagcagcagcagcggggatggggacggcaaggagggcctggaggagcccaagggaccgcggggcagccagggcggcggcgggggcggcagcagtagcagcagcgtagtctccagcggcggcgacgagggctacgggactgggggaggcggaagcagcgcgacctccgggggccggcggggcagcttggagatgtcgtcggatggggaacccctgagccgcatggactcggaggacagcataagcagtactataatggatgtagacagcacaatttccagtgggcgttcaactccagcaatgatgaatggacaaggaagcactacttcttcaagcaaaaatattgcctataattgttgttgggaccagtgccaggcttgcttcaactctagcccagatctggcagatcacatccgttccatacatgtagatggtcagcgaggaggggtatttgtttgcttatggaaaggttgtaaagtatataacactccatctaccagtcaaagttggttacaaaggcatatgctgacacacagtggagacaaacctttcaagtgtgttgttggtggctgcaatgccagctttgcttctcagggagggctagctcgtcatgtacccacacacttcagtcagcagaactcctcaaaagtttctagccagccaaaggccaaagaagaatctccttctaaagctggaatgaacaaaaggaggaaaaaaaaaaaaaaa

SEQ ID NO: 308 - DNA, 4460 bp, Homo sapiens
  SITE (3854): n equals a,t,g, or c
gaacagcagctgscagctccaccgcggtggcggycgctctagaactagyaggatccyccgggctgcaggaattcggcacgagggactttaaaaaaagctttttttgtattttttttctgtgagcaaagggtatgcatatgtgtgtgtgtgaatatgaatgtatataaatgtatacatgaatatataactgagacatacttttgataaactcattattatgtaagactattactagaatatttcagttgtactgtttcttctctctaaatgcattcgaagccataacagtttttatactgtattgactaatacaacatcaatgcatatttcaggttgttgctgatgagttcttaagctttatttcaatttgtgggtttatttacaaattttaacaatctcatatgctatgcaaatatgactttctgaaagcattttctttttgatcaatttccagttgtccaatgaatggacaagcaaaactttccataaatgaactactcttgtagtttctccatcatttttcttttgaaacaggtgaaaaacctcatcgatgtcatctttgtccatttgcatctgcttatgagcgtcatctggaagcccatatgcgttctcatactggagaaaaaccatacaaatgtgaattatgttccttccgctgcagtgatcgaagtaacttgtcccatcatcgaaggcgcaagcataaaatggtaccaattaaaggtactaggtcttccttaagcagcaagaaaatgtggggggttttacagaagaaaacaagcaatctgggctatagcagaagagcactaatcaacttaagtccaccttccatggtggttcagaaaccagactaccttaacgattttacccacgaaatcccaaatatccagactgactcctatgaaagtatggcaaaaaccacaccaactggtggccttccaagggacccccaagaactcatggttgataaccctttgaatcagctctcgactctagcagggcagttgtccagtctgccacccgaaaaccaaaaccctgcatcccctgatgtagttccctgccctgatgaaaagcctttcatgattcagcagccctctacccaagcagtagtttctgccgtatcagcaagtattcctcagagctcctctcccacaagcccagaacctcggccatcccatagtcaaaggaactatagtccagtggcaggtccaagcagtgagccaagtgcccacacgagcactcccagcataggaaacagccagccaagcaccccagccccagccctgccggtccaggaccctcagcttctgcaccactgccagcactgtgatatgtactttgcagacaacatcctttacactattcatatgggatgtcatgggtatgaaaatccttttcagtgtaatatatgtggatgcaaatgtaaaaacaagtatgattttgcctgtcattttgcaagagggcaacataaccaacattgattgaaaatagtcatattttacttagttttgctgtttttgtggtttggttttttttgttttttgttttggtcatccctaataaagtgtctgctaattcaaggcttatacattatatttatagaatataaatttgtcagtggaataaaatttcccctttttttcataaaaatctggtcagggtcatttatatattagaacagttagacacattggtgtctcttttttcctttcctttcgacattggagaattggagtgcagtcataatcttacaagatgttcatttgaatttctcacatttatggtccataaaaacttcaaggcttatccatacttttgatgtttcaatatgcattgaactggatgttatttctgccatatttcaaaatggtagaataaattacagaatttattactactcatttcagtgtttagtacagaaattgccttaaaaattgctattaattgaaatatcatttagttcacattccttaagttgaatcggtagtttcatttcaactgataatagtaaagctatttcagtttagtaaaaattttcttttttcccaagaggaaatgtaaaacagttaagacttgaaattgaaaattcttttaatatttaaaataacttgtttattcaatgtctaaacacatgtcagttttccactggatttttattttcacaggtaaatacactagagtgctagatgcctttttcccctgtcagtttgactttcatttaaatccttcattctgatatcattactgttaggtgaggtggataactataatgagaatctcttattcttcctattcctttgatgaccaaagagataaagtgaagtcatccttattattaaaatgcagcctccaaacaaatttctcaagattccttttccttccttctatccattttctgcccataatttccaagaaaaggtgggtatggaaacacatgagagaatgtgatagtgaagtcatatttacaaaactgagaacatgtccaaaatggattcttgtctcctcttcagaattagccatttaaaatattttctgtgacttcaaattgtaattcttatttgcagttttaccagtcttcatgtacagtgacgaaactgtgtagaaactaaatcatcgctttagtaagaaaggataaaaaggtgtggaartgaatataaaatgcatctaaacatgacatttaatttgtttataaaaataagacttactaaatatagagtaattcattttgaataggaggctattgtttttatattgtgtaataactcacgtactctgaagagagcttggtcaaacaataaaatacattgttactaacttggtttcttttctgtgtactttgcaaaaattctatttttaattttgttcatatgyygaatgtgcccctaattggcatcttaaagagaatagtaagcatctattaaccaaaaaagaactctaatagtaaaggaaagggaaatattggtggtatgtacccacaaaacccccaagtgccaagttaatggaatctctgctttccctttcagatgctagaaagccactgtaatgagttcttgcagtttagcatccagtctaagctactgcattgtttaaagagcagcatcaaggacactttctccaaactggaactctcttctttgtcaaatcttgtactttaaaattctacaattctgttacattgttgtttaaatcacagactgctcagatccattttactgcagtagtttccaagtgtgtaacttggctttagtatttatcagttgccagaaagaaacaggttgtcatttggaagtttttgtggttattttttcccatttttattcttcagataaaagcagtaccccaaaatagaaaatgaaaattttcatgaaacaaagagaactcccttgttaaaaccagcttattaactctgtattctgtcaaatgcatttttttctaacaactgaccatggatgttgtgaaggtgcattttaatttaaacatggaaaagatttttttcataattacatactagaatgtaaaattataattttgccatgacttaaagrgcacagttgatatcccaaaggttttgatgctaagaagctacagttattctaaatgcactaaaatgtttgaggcaaatctaccttagaggcttttttggtatggtattttttaaaatatttagattttatttaaatttcctgtgagttattctgtatttgaaaagatgttcgtgtcttcccctctgtattgaatgtttcactcattttatttttaatcaaatattttatagaaatgagttgttgggaagagtttaacatgcactatttatagtactttgccgttaacaggcaatgttctgaaactaaatttanttttgktcagwgaacataagtttasatttttaaagktggtagataatttatctccactaatatttttttaagaaactgtgaagagattaactgggaataattttatttcagattttactaatgtagtatgtagctacaacttcttgaacttcaagttaaggctagacatttactttgaaaaaattccactgggtgtttccagggctatttcattttagaaataagtgtttgccattcttctgcaaaaactggacaaggggaatactacaaaaaatactcagagataaaatcctcatttcaagttctacaaaatatttatcaaatgaatgttaatttttttttaattccctgctaaagacgttttcattagtcttagagggtatatgctttctagaacttgtttttgttaacatgtgctttgatgtaaagaacatattttgtatgcaaaacataacttgcattatggttgtacaatacactatattgtttagggattccggaaagcagtttaatgcagaaataactatatctagtatgcagttcatattgtgaatgaagctttgcttttgtaataaataaataagactttctaatgaaaaaaaaaaa

SEQ ID NO: 309 - DNA, 2440 bp, Homo sapiens
  SITE (23): n equals a,t,g, or c
  SITE (27): n equals a,t,g, or c
aatttcccacctttatttaatancctntcccaaggacccggggttttattaccttatgggaaccktatgggktttttttttttttaaaggtgggttttggggatgtttaccctattgttttttatttggatgccctaaggcatataaagcgcatagtgaattacctactggaatgtaaatggttctaaaattaaaactgttaaaatagaaagagggaaaaggaaggcccaagaactcttaaagagaggctgagaacaagaacaaaaaaacccagaagtgtaggtaatacgtaacagcgcagacagaaccgttgtaggccatgtataataaataatgcatgccccaaatttcagttaatcatataatttcaacttgagttctaatactggaaccagccaaccacttgggcttcaacactgtactagatgtcagtagaatcgcttgatggaattacagccttgttacagttgagatcaagagagggtgctttttttttttccttcttttattaaagctatcattccaggctttgatcaaagatccaagaatatttgttctaccaggctggaatgaatgtggtttggaagttcagagtacatttaaaagctgcaacaaaatataggtagccaacaatctcagaattttggatcagcccagatggagatagcaatttgaaatgtcttcgatcccttacttaaatgacgaaatgtctatcagcccagatagagcaatttgaaatgttttcgatcccttacttaaatgatgaaatgtatatcatactatctgtaaattggatattccattacagtgataacgtacagaattcccatgcgttattacactttcctgagagtaaagcaattagaataaccttaatcctagcaacaaagttttttttgtaggttttttttttttggtttttttttgtctttttttttgcgtttaaaacatttgggctattccctgacgatctatacatgtaaatttgattgctaaacattgtcactttgaatgtcaaactatttttaatctattgattttgattaaaaatcataatacaaacagagctaaaatcacgctaacaaaataaactaaatatgaaaagttgcattgaaagggcatcacattattcttaataggatcgtgtagaaacattccaatggcagtgttctcaaaataaaacaaaattacattagaagacctccagcctggccacttttgggaccttacctgtaactctggctggtgggtgtctttactcttgtactacatggctcacttacatcagacatcatatttgtataccctgagaaatctgacactgaagtccttactctatggtccacttctccattagagttagtgataaaggtcattggcaccctgctgcccgacttaaactgagaaccaaacgcttgtgcaaagttctcaatctgatacgttgttctaggctctatgtctttctgaggatctatctggctagctaactcctgagatggaatctgaaagcctgttgaagactctaagtttttctgttccttctggctagtcaatttctgagatgaggactggaaggctgatgaagtctctaagttcttctgagaatctatcagatcatccagctcctgggaaggtgtcaactgctgatgtgtagcatccaaagcagacaaataaagacctggctgagatccaaacaacatcccaaaaggaggctttggcaatgaagatggcaacactgaggtaacagattggccgaaaccacactccaaaggagacgtagtgtatatttgtttttctggaaacaaagtgtggttgtggagaggtgaagacaaactgacaaattggaaaccgtgtccaagagtaaaacttgcattagtggatttttcaaaagcctgttggaggtatttggagtattcttgcaacatacttgctttatcatttgaaggtgtttgggtgcctgggctcaaattttcttcttgaaccaattctgagtgttctcctgaggtgtgtaaatccactcgtggttctgcaatattgaaaggatcctctttctggctttctgatttgttggagtattgatccaaaatactttgtaaaacctcatcaggaattccagacttgtcatgacaagatttaatttcagcatttagagctgaggagtcaataagtgacaatggtgcctcattgtccaaaacactgacacctgcagactgaatgacagactgttgggagaccatgtgtcctacgtttatagaaaaggcactgttgctgctggcagttggtaaatatcttcttttctttgaaaactgcatggcatcatcataattactacttatctgaccttgtttgccacttgtactttggagaagaccaatggtctccacactattatttgatactatgccaagtgagccacttggttttccagacaaggatttct

SEQ ID NO: 310 - DNA, 591 bp, Homo sapiens
ccacgcgtccgggactgcaaggacgcagcttgtcagttctcgctcaaggtcacccactaccactgcacgcgcgagaactgcggctacaagttctgcgggcgcacgcacatgtacaagcacgcgcagcaccacgaccgcgtggacaacctggtgctggacgacttcaagcgcttcaaggcctcactcagctgccacttcgccgactgccccttctcgggcaccagcacgcacttccactgcctgcgctgccgcttccgctgcaccgacagcaccaaggtcacggcgcatcgcaagcaccacggcaaacaggacgtgatcagcgccgcgggcttctgccagttcagctccagcgccgactgcgccgtgcccgactgcaagtacaagctcaagtgctcgcacttccactgcaccttcccgggctgccgccacacggtggtgggcatgtcgcagatggactcgcacaagcgcaagcacgagaagcaggagcgcggcgagcccgcggcagagggccccgcgcccgggcctcccatcagtctggacggctccctgtcgctgggcgccgagccgggctcgctgctcttcctgcagtcg

SEQ ID NO: 311 - DNA, 1086 bp, Homo sapiens
gggtcgacccacgcgtccgctatgaatgtaaagaatgtgggaaggcttttagtcgtggctatcaccttactcaacatcagaaaattcataccggtgagaaacctttcaaatgtaaggaatgtgggaaggccttcagttggggttcaagcctagttaagcatgagagagtccatactaatgagaagtcttatgaatgtaaagactgtgggaaggcctttggtagtggctatcaacttagtgttcatcagagatttcatactggtgagaagctttatcaacgtaaggaattcgggaagacctttacttgtggctcaaaacttgttcatgagagaactcatagtaatgataaaccctacaaatataacgaatgtggggaagcctttctgtggacaatttactcaaatgagtaaaatgatactgatgaaaccttatgattgaaagttgtaaaagaatattttgtgtgtgtgtatagacaacttatcataataagaactcttactcttgagaaaccttgtgaatgtaagggttgtgcaaaagccattcatttctgtttatgggcaattatcttgctatccagcaattcatactagtgagaaatattttgaatataattaatatgaaaaggcctttagacttctgtacagtcttattggatatcaatttatactgatgtaaaatcatttaaatgtaaggaatgtgtgaagatcttcattcatgacataaggtctgattaacatcaaataattggtatttgttaaaaagagtttaaataggaggaatgtgggaaggacctaaacttaattcagttcttgctgcacatcagagaattcatactgctgtgtaatcctatgcacataaggaatttgggaaggcttatagacacagtaaatatcttagagtacatcagagaattcatccaaatgagaaatcatttgaattagaattataggaaggcctttagacaaatgctacccaaattattatccagagactggtgcagtcataaaattgtcatctgtcaattgtgagataaacgtggaaagtgagtaaatatttggaacttttatagcaaaaaaaaaaaaaaaa

SEQ ID NO: 312 - DNA, 646 bp, Homo sapiens
  SITE (551): n equals a,t,g, or c
  SITE (642): n equals a,t,g, or c
gagcacaatgaatgtggaaaagctttcagttggccctctatcctcagtaaacatcagagaatccacactggtaagaaactctacacatgtgaggattgtggcaaatctttcagtgttcactcatactttattcagcattgtaaaattcacactagagaaaaaccctatgagtgtattaaatgtgggaaagcttttagtacacattcatcttatgttcaacatctaaaaattcatacaggagagaaacatcatgagtgtaatcagtgtgggaaagcctttagtcatagctctaatctaattcatcatcagagaattcatagtggagagaaaccttacaagtgcaaagaatgtgggaaagccttcaacagacaatcaaaccttattcagcatcaggaattcattctggagagaaaccttatgactgtaaggagtgtggcaaagccttcagtacacaattatttctcattcagcatcaagagaattcatacaggagaaaagccctatgaatgtatgaatgtgcaaaatcctttacctgaccgaactcttactgnccatcagagaattcacactggagagaaaccttataggtgtaatgaatgtgggwaatcctttagtcaatggctcacaagttwttaacttaanaaat

SEQ ID NO: 313 - DNA, 1694 bp, Homo sapiens
cgcgggagcgctcccctgcccaccccgcccccgcgggcgagcccgggagtcgagtgggagtcggccggccggcrcgggcagcgccgggaccccgcgggggacactgcagccggagcccgggaggggccgcgccgccaccgtctgaactaggatgtcccgacatgaaggtgtcagctgtgatgcatgtttaaaaggaaattttcgaggtcgcagatataagtgtttaatttgctacgattacgatctttgtgcatcttgttatgaaagtggtgcaacaacaacaaggcatacaactgaccacccaatgcagtgcatattaacaagggtagattttgatttatactatggtggggaagctttctctgtagagcagccacagtcttttacttgtccctattgtggaaaaatgggctatacggagacatctcttcaagaacatgttacttctgaacatgcagaaacatcaacagaagtgatttgtccaatatgtgcagcgttacctggaggcgatcctaatcatgtcacggatgactttgcagctcatcttacacttgaacacagagcccctagagatttagatgaatcgagtggtgttcgacatgtacgtagaatgtttcaccctggccggggattaggaggtcctcgtgctcgtagatcaaacatgcactttactagcagttctactggtggactttcttcttctcagagttcatattctccaagcaatagggaagccatggatcctatagctgagcttttatctcagttatcaggagtgagacgttctgcaggaggacagcttaattcctctggcccttccgcttctcagttacaacaactgcagatgcagctgcagctagaacggcagcatgcccaggcagcacggcaacaactggagaccgcacgcaacgcaacccggcgtactaacacaagcagtgtcaccactacaatcacacaatccacagcaacaaccaacatagctaatacagaaagcagtcagcagactctacagaattcccagtttcttttaacaaggttgaatgatcctaaaatgtctgaaacggagcgccagtccatggaaagcgagcgtgcagaccgcagcctgtttgtccaagagctccttctgtccactttagtgcgtgaagagagctcatcctcagatgaggatgatcggggggagatggcagattttggtgctatgggctgtgtagatattatgcctttagatgttgctttagaaaacctaaatttaaaagagagtaataaaggaaatgagcctccaccacctcctctttgatgacatcccaattcgcagacaatgtcctctgtgctgtatttgccaatgaaagtggacaacaactatcttgggtttgtttggtgattgtaatttcaggtctgtcactcttgttacattgtgtacattcaaaaggaagagagaaaatatatatgataatcatttccacttaactaatttttacttctagcaggtaaatgtaggtagcagtgcaggggtgatctctgcttcctgtaccttgacatgcaaaaggctctcctaatactccacattcaaactgaagaggaaaattgaaatctctaatgaagctgctgtgtgtatttatgaatattaatgaataaaaactgcttggatggtttaccttaaaaaaaaaaaaaaaaaaaaaaaaamaaaaaaaaaa

SEQ ID NO: 314 - DNA, 1937 bp, Homo sapiens
  SITE (2): n equals a,t,g, or c
  SITE (14): n equals a,t,g, or c
  SITE (1925): n equals a,t,g, or c
gngcgacgcgttgncttcccaacgtcgccccggtttgacgcacacggcaccaaactgtttgatttaattttggatgagatcgttcttgcagcaagatgttaataagacaaaatctagccttagattgtaagcaaaagaaatcaaggtcaagatctggaagcaagaagaaaatgctaacattacctcatggtgctgacgaggtttacattctccgatgcaggttttgtggcctagtctttcgaggacccttgtctgttcaggaagactggattaagcacttacaacgacatattgtaaacgctaatcttccacggactggagctggcatggtggaagtcacgtcactacttaaaaagcctgcctccattacagaaacttcattttctctactaatggccgaagcagcttcatagaaccaggaaaccttttaaatagccagtttgaattggatgtaaatttgaaattctttttttttaagccacattaaattatctgtttataaatactaaagcaggaaaatggggggaaagtgaattacagtgacatcagagcaaattgaatacttaaaacagtaagtagtctatatattttatatagggtggaagatgtgtttttaaggtttatgaagttttgttggttaactgtgttcactcagtaaaagagcagtacatgtaagcagccattaataaactgttgcacatggatacttatagacagacttattggacaattatgttttttgcagtgttaccagaatcaaggctctgtttattccccacaagacttgcatagaaaaataagatattatattttgtttgtatgtatttagtgttttgtataataccaagaaccgctgactaaatttactcaaattagggcattaaatatcatgtacttcatagtttgagactgttcactcaaatagggcagagtactattctatctagatgtgtaagtgttttttttaaaatcacatggaacggttttttttatactaaaaagtggagggagatttgtttaaacaagtatttctaaaagaaatatgtacatagttctggaaattatttgtggtaaggaaatattctttactccagttgcatttctcagacaataaagtggtgcatccatgctacctcctactttgtcaacaaagatgctatttaccctttacatttttgtatcataatagattttaaaaatctaatgttctttattgcaagacattcttttgttaacaggtttgtttctttttaatgttttacctaaaatttgacatgcttacaggacaggtttgcctcttactttatttaacattgtagaaatgtaattaataaacaatgctcactacacagtttagaatagacgttctcatttatattatcttccaaatttgatcagttagcaaaacttaatacaccaattaaaatatttctacatatgagaatgkttacaatttaaattttagaacttggtttggatgtgattatatgtacsaaaatcgtgtaacactatgctcatgctaagaaccgacataacagaattactgaaataaatgtgctgtgaggaatggaaaaaaaatggtgcaggtgtcttggtcatgataaattgtgattctttttaaaaattttttccaaaaacaattaggtattttaatctgaaatcagattcctttacaaacaacaagtttttgtatgcaagcaccattttatttcatgtagtatggctaatactatagttgaaccaaggatatgcattgattctttgcttcgtatgtaaataaagttaaaaacagttaaaataaggagtattttggtagagtatatacatacctcactgccagtgaaattgctttcctatggtatatctccttaccagaaaaatctctaaataaaaaaaggtttaaagaaaaaaaaaaaaaaaaaacncgagggggggcc

SEQ ID NO: 315 - DNA, 1345 bp, Homo sapiens
gggtcgacccacgcgtccggtttccctcccttttaactcttactgaacacaaagtcacgcatagtaagagtcttgatactggaaactgccggatttgcaagatgcctctccagagtgaagaggagtttttagagcattgccaaatgcaccctgacttgaggaattccctgacaggctttcgctgcgtggtgtgcatgcagacagtgacctccaccttggaactcaaaatccatgggacgttccacatgcaaaagacagggaatgggtctgcagttcagaccacagggcggggccagcacgtccaaaaactgtataagtgcgcatcttgcctcaaagaattccgttccaagcaagatctggtgaaacttgatatcaatggcctgccatatggtctgtgtgccggctgcgtgaatctcagtaagagcgccagcccaggcattaacgtccctcccggcacgaatagaccaggcttgggccagaatgagaatctgagtgccattgaggggaaaggcaaggtggggggactgaagacacgctgctctagctgcaacgttaagtttgagtctgaaagtgaactccagaaccacatccaaaccatccaccgagagctcgtgccagacagcaacagcacacagttgaaaacgccccaagtatcaccaatgcccagaatcagtccctcccagtcggatgagaagaagacctatcaatgcatcaagtgtcagatggttttctacaatgaatgggatattcaggttcatgttgcaaatcacatgattgatgaaggactgaaccatgaatgcaaactctgcagccagacctttgactctcctgccaaactccagtgccacctgatagagcacagcttcgaagggatgggaggcaccttcaagtgtccagtctgctttacagtatttgttcaagcaaacaagttgcagcagcatattttctctgcccatggacaagaagacaagatctatgactgtacacaatgtccacagaagtttttcttccaaacagagctgcagaatcatacaatgacccaacacagcagttagtgcaagtacagtctctcaaggagaattgattttgtggcacaaaaagggaacatgttttactctttgcacgaaactttcattgttaatgtatattattcagaaacattgtattgtaccataaaacttgtattatcaaactgttggatgttcatgtgtttgaacttttgcgcaccggatagaccccttgtatataaagtgttgcacatgtattatgtcgtctgatactaaaatggtcttataaagacaagtggacttgggccctattcaggcaagattaaaaaaaaaaaaaa

SEQ ID NO: 316 - DNA, 1002 bp, Homo sapiens
cccacgcgtccggccagagaacacgctggaggagtccacggaaggctccagcgagttcagcgaactgaagcagatgctggtgcagcagaggaactgcacggaggggatcgtgatcaagacagaggaacaagacgaggaggaagaagaggaggaggaggatgagctgccgcagcacttgcaatcccttgggcagctgtccgggagatatgaggccagtatgtaccagaccccgctgcccggggagatgtcccccgagggcgaggagagccccccgcccctgcagctaggaaaccccgcagtgaaaaggctggcgccctccgtgcacggtgagcggcacctgagcgagaaccgcggggcctcgagccagcagcagcggaaccggcgcggcgagcggcccttcacatgcatggagtgcggcaagagcttccgcctgaagatcaacctcatcatccaccagcgcaaccacatcaaggaggggccctacgagtgcgccgaatgcgagatcagcttccggcacaagcaacagctcacgctgcaccagcgcatccaccgcgtgcgcggaggctgcgtctcacccgaacgcgggcccacgttcaaccccaagcacgcgctcaagccgcgtcccaagtcacccagctctggtagcggcggcggtggccctaagccctacaagtgccccgagtgcgacagcagcttcagccacaagtccagcctgaccaaacaccagatcacgcacacgggtgagcggccctacacgtgccccgagtgcaagaagagcttccgcctgcacatcagcttggtgatccatcagcgcgtgcacgcgggcaagcatgaggtctccttcatctgcagcctgtgcggcaagagcttcagccgcccctcgcacctgctgcgccaccagcggactcacacaggcgagcggcccttcaagtgccccgagtgcgagaagagcttcagcgagaagtccaagctcaccaaccactgccgcgtgcactcgcgcga

SEQ ID NO: 317 - DNA, 1267 bp, Homo sapiens
ccacgcgtccgcatcttcctctttgttctcctttcagtagtgagcctgatgcccccagactactgccttcccctgtcacctgcacacctaaagagggggagacaccaccagcccctgcagcactctccagtcctcttgctgagccggccttgtcagcatcctcattgagttccagagctcctccacctgcagaagtcagggtgcagccacagctcagcaggacccctcaagcggcccagcagactgaggccctggccaggtaacctgatggctgagacagaaagggcaggggcgtcctgggatgtggccctccctcgaggccctctgctccctctttgctgcccgtagcactgggagtcaggcccagtctgctccaaccccggcctgggatgaggacactgcacaaattggccccaagagaattaggaaagctgccaaaagagagctgatgccttgtgacttccctggctgtggaaggatcttctccaaccggcagtatttgaatcaccacaaaaagtaccagcacatccaccagaagtctttctcctgcccagagccagcctgtgggaagtctttcaactttaagaaacacctgaaggagcacatgaagctgcacagtgacacccgggactacatctgtgagttctgcgcccggtctttccgcactagcagcaaccttgtcatccacagacgtatccacactggagaaaaacccctgcagtgtgagatatgcgggtttacctgccgccagaaggcttccctgaactggcaccagcgcaagcatgcagagacggtggctgccttgcgcttcccctgtgaattctgcggcaagcgctttgagaagccagacagtgttgcagcccaccgtagcaaaagtcacccagccctgcttctagcccctcaagagtcacccagtggtcccctagagccctgtcccagcatctctgcccctgggcctctgggatccagcgaggggtccaggccctctgcatctcctcaggctccaaccctgcttcctcagcaatgagctctcctccagctttggctttgggaagccagactccagggactgaaaaggagcaacaaggagagggtctgcttgagaaatgccagatgcttggtccccaggaactaaggcgacagagtgcagggtgggggcaagactgggctgtaggggagctggactactttagtcttcctaaaggacaaaataaacagtattttatgcaaaaaaaaaaaaaaaaaaaaaaaaaaaaaaaaaaaaaaa

SEQ ID NO: 318 - DNA, 2550 bp, Homo sapiens
  SITE (2519): n equals a,t,g, or c
  SITE (2529): n equals a,t,g, or c
  SITE (2536): n equals a,t,g, or c
tgcggccgctgcccgccttaatcgactgaagaagaaggagtacgtgatggggctggagagtcgagtccggggtctggcagccgagaaccaggagctgcgggccgagaatcgggagctgggcaaacgcgtacaggcactgcaggaggagagtcgctacctacgggcagtcttagccaacgagactggactggctcgcttgctgagccggctgagcggcgtgggactgcggctgaccacctcgctcttcagagactcgcccgccggtgaccacgactacgctctgccggtgggaaagcagaagcaggacctgctggaagaggacgactcggcgggaggagtctgtctccatgtggacaaggataaggtgtcggtggagttctgctcggcgtgcgcccggaaggcgtcgtcttctcttaaaatgtagggtcaagtaatctgctctttatccgcgtttacccctttcaactcccttacaccatgtcaaacttaccttagtgggacatcttcaccggacacatttcagaggagagaaaaaaagtaatattgaatcttaaagtgtttagctaaaagcatgaatgtgacacagtaaccaactcctaatgataacatgtgactattaaatctctctgacagtttcttttttaggtgatttccttcctgccaggctccgttgtaggggttacagaacagtcgttcccgcctcacaacctgtggatacagctgttggggcagaagagacgggaccagctgctggccacatttcctgctttattttaaaaggtagtataagaaatgaggaaaaagaggtaatatcagggcttctgctgttttttatttttaacatgttcataattaaaaagtattttccagcagtccaaagatgtaagttatcttacacataaaatgttttattttgttatttggttatgaaaatggaatccttgttcttgcacaactgtaaatgttttgttgctagataatacgatttgagacctgaattggtctttggtttccagtgcatcacagcatattttgtaaaatcatctactactgcacttgagcatgaatgggtagtagccaaactcacaaattggagtgatgaacctgcttatacctaagggcaggagcaagcccctcacaatgcagctgcatgggtttttagtgcctactgaattatatatatatatacatatatatatatatatataaaccaaaagtagttggaaagattatttgaaatgactaatttgtgctatctttatgaaatatgttaaatgtagcttttttgaaacagaagccttgaattgaaatttaactaatacttgaacattttgtatatatttctttgtatataattttgtgcagtaccaatgacaaaaatatggtgtcataataaaaccaggtttgttgatcttttagttatgggctcaaagaatttattcatctctaacatgatattggaaaataatggatgaaaataggaaaaatgattgttaatgctgactgtgggtcttaaaaggttctggaaagcagtaagttcatttttctaaaaactataacattctgttggagtattttcttccttacgtcaatacttttcctgcattatttgaaattgtgggctggggagaaacagtagtcaaagctttctgaattgagatactttgaaattccaagtgtagatttttagaatgtcattttataaatggcagtttttggaattacttgataagaacttttgaaaatggaaggattagtatggcctatttttaaagctgctttgttaggttccttatgttttattaactgtcttttctcagtttccatttcatttttttttttctagttttggtgacttagtgattttgtcattttttacatcaacttcatggtcttgtttttacatggtaattgcatgtacttaggatctatctaataggggctttaaataaatttggtcatatttatgtgtaagcacattttactgtaaatgtttgggtttctgaatttaaacagatctgtttatttcagtatgtagtaaacaatatcttaaagtgtccgattcactacttgttaattaaaaaagttatgattaatgtgaaactgttgtcttactatttttagaaaattgtgttctggatgattagcacatggataaaggagatttctggaatataaaatggattgtttttgaaatttctaggtttggctctatttactgtaatggttgaaaacaatttagtatttgggtgacccttttgtttttcttctaaatgtgcctctggtaaaatacagaactagactaaagatgtagctttttaatatttgtcttttgatggtggcaggagttcatacattaattgaactaacacatcatattttgacctactatttctatcatattgacttactgtttctggcacttctttggaccagacttatccttaaaaagtcccacttttggttaaaatggtagtcacacccccggatattaatcccaccaagaagtggttccaaantattttaaanaattggnggccattttaaaaa

SEQ ID NO: 319 - DNA, 1040 bp, Homo sapiens
tcgacccacgcgtccgtgctcatgcccacatcctgcccagagcaggcaccgtagccccagtgccctgtacaaccctgctgccctgtcaaaccctgttcctgaccgatgaggagaagcgtctgctggggcaggaaggggtttccctgccctctcacctgcccctcaccaaggcagaggagagggtcctcaagaaggtcaggaggaaaatccgtaacaagcagtcagctcaggacagtcggcggcggaagaaggagtacattgatgggctggagagcagggtggcagcctgttctgcacagaaccaagaattacagaaaaaagtccaggagctggagaggcacaacatctccttggtagctcagctccgccagctgcagacgctaattgctcaaacttccaacaaagctgcccagaccagcacttgtgttttgattcttcttttttccctggctctcatcatcctgcccagcttcagtccattccagagtcgaccagaagctgggtctgaggattaccagcctcaccgagtgacttccagaaatatcctgacccacaaggacgtaacagaaaatctggagacccaagtggtagagtccagactgagggagccacctggagccaaggatgcaaatggctcaacaaggacactgcttgagaagatgggagggaagccaagscccagtgggcgcatccggtccgtgctgcatgcagatgagatgtgagctggaacagaccttcctggcccacttcctgatcacaaggaatcctgggcttccttatggctttgcttcccactgggattcctacttaggtgtctgccctcaggggtccaaatcacttcaggacaccccaagagatgtcctttagtctctgcctgaggcctagtctgcatttgtttgcatatatgagagggtacctcaaatacttctgttatgtatctgtgattttatttcttctttgggtatagggttgaggggaaataagttttgagtgagaaataaacgttttagctgaaaaaaaaaaaaaaaaaaaaaaaaaaa

SEQ ID NO: 320 - DNA, 1429 bp, Homo sapiens
  SITE (1353): n equals a,t,g, or c
  SITE (1394): n equals a,t,g, or c
tcttcactctgatgagggctcagacttgataacgcccgtggtgccccatccctataggagctggtgagattgcagcctgctgcctcccctccatcagccacagctattggatttcccacccagaatctttaggtaaatgagatcatgattctggaaggaggtggtgtaatgaatctcaaccccggcaacaacctccttcaccagccgccagcctggacagacagctactccacgtgcaatgtttccagtgggttttttggaggccagtggcatgaaattcatcctcagtactggaccaagtaccaggtgtgggagtggctccagcacctcctggacaccaaccagctggatgccaattgtatccctttccaagagttcgacatcaacggcgagcacctttgcagcatgagtttgcaggagttcacccgggcggcagggacggcggggcagctcctctacagcaacttgcagcatctgaagtggaacggccagtgcagtagtgacctgttccagtccacacacaatgtcattgtcaagactgaacaaactgagccttccatcatgaacacctggaaagacgagaactatttatatgacaccaactatggtagcacagtagatttgttggacagcaaaactttctgccgggctcagatctccatgacaaccaccagtcaccttcctgttgcagagtcacctgatatgaaaaaggagcaagacccccctgccaagtgccacaccaaaaagcacaacccgagagggactcacttatgggaattcatccgcgacatcctcttgaacccagacaagaacccaggattaataaaatgggaagaccgatctgagggcgtcttcaggttcttgaaatcagaggcagtggctcagctatggggtaaaaagaagamcaacagcagcatgacctatgaaaagctcagccgagctatgagatattactacaaaagagaaattctggagcgtgtggatggacgaagactggtatataaatttgggaagaatgcccgaggatggagagaaaatgaaaactgaagctgccaatactttggacacaaaccaaaacacacaccaaataatcagaaacaaagaactcctggacgtaaatatttcaaagactacttttctctgatatttatgtaccatgaggggaacaagaaactacttctaacgggaagaagaaacactacagtcgattaaaaaaattattttgttacttcgaagtatgtcctatatggggaaaaaacgtacacagttttctgtgaaatatgatgctgtatgtggttgtgattttttttcacctctattgtgaattctttttcactgcaagagtaaccaggntttgtagccttgtgcttcttgcctaagagaaaggaaaaacnaaatcagagggcattaaatggttttgtatggtgac

SEQ ID NO: 321 - DNA, 812 bp, Homo sapiens
ggcacgagactttctggggcacttcttgaggacaccaacactttccggggtgtagtcattaaatatagtgagcccccagaagcacgtatccccaaaaaacggtggcgtctctacccatttaaaaatgatgaggtgcttccagtcatgtacatacatcgacagagtgcgtacctactgggtcgacaccgccgcattgcagacattccaattgatcacccgttttgttcaaagcagcatgcggtctttcaatatcggcttgtggaatatacccgtgctgatggcacagttggccgaagagtgaagccctacatcattgaccttggctcaggcaatggaaccttcttaaacaacaaacgtattgagccacagagatactatgaactaaaagaaaaggatgtactcaaatttggattcagtagcagagaatacgtcttgctccatgagtcgtcggacacttctgaaatagacaggaaagatgacgaggatgaggaggaggaggaagaagtgtctgacagctagcaaactaagaacccaaactattgatacacggtttccttcttggaagtctttgattgactcagagagcactatggtggtgggtccagcactatggtgctctctgtaatgcctcttactgccttaagtctttcctctgttgctgaccagattgtgttaccatttgaatacactgactaatgtttgttaaactttttctgtggcaccttggccacatgcctgcaggcatttgttttcagaacagtctcaccaattacaacacaccgtgttttagtagaaaaaaaaaaaaaaaaaaa

SEQ ID NO: 322 - DNA, 357 bp, Homo sapiens
  SITE (272): n equals a,t,g, or c
  SITE (300): n equals a,t,g, or c
gctatccgggttcggcgcggggcggggatgtgaatcccgatggagcggcccgaggaaggcaagcagtcgccgccgccgcagccctggggacggctcctgcgtctgggcgcggaggagggcgagccgcacgtcctcctgaggaagcgggagtggaccatcgggcggagacgaggttgcgacctttccttccccagcaataaactggtctctggagatcactgtagaattgtagtggatgaaaaatcaggtcaggtgacactggaagataccancaccagtggaacagtgattaacaaactnaaagttgtttaagaaacagacatgcccttttacagactgggggatgtcatctacttg

SEQ ID NO: 323 - DNA, 354 bp, Homo sapiens
  SITE (289): n equals a,t,g, or c
  SITE (313): n equals a,t,g, or c
gtgtcacagcactcctctttgccctagagataagggacctgacttccccwgcaataaactggtctctggagatcactgtagaattgtagtggatgaaaaatcaggtcaggtgacactggaagataccagcaccagtggaacagtgattaacaagctgaaggttgttaagaagcagacatgccctttacagactggggatgtcatctacttggtgtacaggaagaatgaaccggaacacaacgtggcatacctctatgaatctttaagtgaaaagcaaggcatgacacangaatccttttgatacctcagggtngcaggtgcagggcgaggggccgatccccggggtccctccgt

SEQ ID NO: 324 - DNA, 1044 bp, Homo sapiens
gggccgcgatctcaaaccaaacacaagaattggcgtgtgactcatctgcttggatacctccagtccccaaactgtgttccaggagttttcttggccgaagctgcccgatgtttgagccttttcttcccagagaagaagatggactgaaagctgccagttggggactttttgtgatcacggcgttgcagcgttttaaaggaggtgatggggcttgcgctggcttgtcttcccacccaagtgaagagttgatgttcactggttatgcttagacaatgtgcagtttgtgttaatttaaaattttgggtgggataggggcataggcttgtgaagggcagtccggatccggaggaactcctctttgtccctggtaggagagacacccccagtctatcctcgatgccgtcagccttggccatcttcacttgccgcccgaactcgcacccgtttcaggagcgtcatgtctacctggacgagcccatcaaaatcggccgctcagtggcccgctgtcgaccagcgcagaataatgccactttkgattgcaaagtgctatcaaggaaccacgctctcgtctggtttgatcacaagacgggcaagttttatcttcaagacactaaaagtagtaatggtacttttataaatagccagagattgagtcgaggctctgaagaaagtccaccatgtgaaattctttccggtgacattatccagtttggagtagacgtgacagagaatacacggaaagttacccatgggtgtattgtttccacaataaaactttttctaccagrtggtatggaagcccggctccgctcagatgtcatccatgcaccattaccaagtcctgttgacaaagttgctgctaacactccaagtatgtactctcaggaactattccagctttctcagtatctacaggaggscttacatcgggaacaaatgttggaacagaagttagccacgcttcagcggctactagccatcacccaagaggcttcarataccagttggcaggctttaatagatgaagatagactcttatcacgg

SEQ ID NO: 325 - DNA, 834 bp, Homo sapiens
  SITE (770): n equals a,t,g, or c
  SITE (790): n equals a,t,g, or c
  SITE (794): n equals a,t,g, or c
  SITE (824): n equals a,t,g, or c
aatccttcaattatttgaaggtgattattcagcatatatctcttgagtacctgtgcatgcaagacactgtcctggatattgtgagagatccaaagattctctttgtggccagatgggtttgtatggacaggcttgtccatctgtaacttcattaaggatgacatctgaactggagagcagcctaacgtctatggactggttaccacagctcaccatgagagcagccatccaaaaatctgatgctacacaaaatgcacatggaacaggaatttctaagaagaatgcactccttgacccaaatacaactctggaccaggaagaagtccaacagcacaaagatgggaaacctccatacagttatgccagcctcattacatttgcaattaatagctcacccaaaaagaaaatgactttaagtgaaatttatcagtggatttgtgataacttcccatattatagagaggctggcagtggttggaagaattccatacgacataatctgtcattgaacaaatgtttccttaaagtgcctcgatctaaggatgaccctggaaaggtaggattcatcttcttaaaacagttgaattcttcagtatgtcacttgtcatgtttgaattaagaacttttccagttcattgaataggaacctctgcaaaatagtaagtcctcccccaccctgctctaaagcttgttagagagttttaagctggtgggaacctaactagtgtatagcttgttgcacaccacaggtgctgttggtactttggctngtttcttaatcttaatcttngggntggaaggtattggtggtttttaaattaaanttgggggggg

SEQ ID NO: 326 - DNA, 872 bp, Homo sapiens
gggctgcaggaattcggcacgaggtcactcgcagttgtgagcggccgcctctcccggggacaatgtgggactgagcggcccagccgccgtgccgccgccgccgccgccgcaggacagccccagcgagagccggccaggttgcagcgcggacacactcgcaggtcgctgtggccccagcctcgcctgacagaatgagcggctcggacgggggactggaggaggagccagagctcagcatcaccctcacgctgcggatgctgatgcacgggaaggaagtgggcagcatcatcgggaagaagggcgagactgtaaagcgaatccgggagcagagcagtgcccggatcaccatctccgagggctcctgccctgaacgcatcaccaccatcaccgggtctacagcagctgtcttccatgcagtctccatgattgctttcaaactggatgaggacctttgtgctgctcctgcaaatggtggaaatgtctccaggcctccagtgaccctgcgccttgtcatccctgccagtcagtgtggctcactgattgggaaggctggccccaagatcaaggagatccgagagggcttctctgtccagggtcagtatggggctgtgaccccagctgaggtcaccaagctccagcagctctcaagccatgcggtcccctttgccatacccttttgactggaatgaactggctgggcttgtcagggggcaccccaaagagggggcactgccaggtagctgggggagtggcatggggcaggggcccagttctcagcagcagacactctgtacagttttttcaatccctgtttttgaataaatattctcagcgaccaggaaaaaaaaaaaaaaaaaaaaaaaaaaaaaaaa

SEQ ID NO: 327 - DNA, 1182 bp, Homo sapiens
gggtcgacccacgcgtccgctgagaggaccatcactgtgaagggggccatcgagaattgttgcagggccgagcaggaaataatgaagaaagttcgggaggcctatgagaatgatgtggctgccatgagcctgcagtctcacctgatccctggcctgaacctggctgctgtaggtcttttcccagcttcatccagcgcagtcccgccgcctcccagcagcgttactggggctgctccctatagctcctttatgcaggctcccgagcaggagatggtgcaggtgtttatccccgcccaggcagtgggcgccatcatcggcaagaaggggcagcacatcaaacagctctcccggtttgccagcgcctccatcaagattgcaccacccgaaacacctgactccaaagttcgtatggttatcatcactggaccgccagaggcccaattcaaggctcagggaagaatctatggcaaactcaaggaggagaacttctttggtcccaaggaggaagtgaagctggagacccacatacgtgtgccagcatcagcagctggccgggtcattggcaaaggtggaaaaacggtgaacgagttgcagaatttgacggcagctgaggtggtagtaccaagagaccagacccctgatgagaacgaccaggtcatcgtgaaaatcatcggacatttctatgccagtcagatggctcaacggaagatccgagacatcctggcccaggttaagcagcagcatcagaagggacagagtaaccaggcccaggcacggaggaagtgaccagcccctccctgtcccttcgagtccaggacaacaacgggcagaaatcgagagtgtgctctccccggcaggcctgagaatgagtgggaatccgggacacctgggccgggctgtagatcaggtttgcccacttgattgagaaagatgttccagtgaggaaccctgatctctcagccccaaacacccacccaattggcccaacactgtctgcccctcggggtgtcagaaattctagcgcaaggcacttttaaacgtggattgtttaaagaagctctccaggccccaccaagagggtggatcacacctcagtgggaagaaaaataaaatttccttcaggttttaaaaacaaaaaaaaaaaaaaaaaaaaaaaaaaaaaaaaaaaaaaaaaaaaaaaaa

SEQ ID NO: 328 - DNA, 1096 bp, Homo sapiens
tcgacccacgcgtccggtaagataaacattaatatatgaatgaatattactgcttttaaattgtttttacccagtgcacaaaacgaaaatattttaaatacttttgtagttaaaatgctttaaattttagggaatattctttaacagttttcagtaattttaatcatctacttttctgttttatagtacaatatttttacatgtgtctaggtcaaaaaaaaaaaaaaatctcaagtgaccatggcatgttttaggttcatgtatgtagttgaattgtttatatatttgtctgtattacgttccagaaactgttcaggttccattatcaaaacgagcaaaatttgttggacctggtggctataacttaaaaaaacttcaggctgaaacaggtgtaactattagtcaggtggatgaagaaacgttttctgtatttgcaccaacacccagtgctatgcatgaggcaagagacttcattactgaaatctgcaaggatgatcaggagcagcaattagaatttggagcagtatataccgccacaataactgaaatcagagatactggtgtaatggtaaaattatatccaaatatgactgcggtactgcttcataacacacaacttgatcaacgaaagattaaacatcctactgccctaggattagaagttggccaagaaattcaggtgaaatactttggacgtgacccagccgatggaagaatgaggctttctcgaaaagtgcttcagtcgccagctacaaccgtggtcagaactttgaatgacagaagtagtattgtaatgggagaacctatttcacagtcatcatctaattctcagtgatttttttttttaaagagaattctagaattctattttgtctagggtgatgtgctgtagagcaacattttagtagtatcttccattgtgtagatttctatataatataaatacattttaattatttgtactaaaatgctcatttacatgtgccatttttttaattcgagtaacccatatttgtttaattgtatttacattataaatcaagaaatatttattattaaaagtaagtcatttatacatcttaaaaaaaaaaaaaaa

SEQ ID NO: 329 - DNA, 3694 bp, Homo sapiens
ctaggttctgcaaaaagctatttaggtgacactatagaaggtacgcctgcaggtaccggtccggaattcccgggtcgacccacgcgtccgggatgatgaacaagctttacatcgggaacctgagccccgccgtcaccgccgacgacctccggcagctctttggggacaggaagctgcccctggcgggacaggtcctgctgaagtccggctacgccttcgtggactaccccgaccagaactgggccatccgcgccatcgagaccctctcgggtaaagtggaattgcatgggaaaatcatggaagttgattactcagtctctaaaaagctaaggagcaggaaaattcagattcgaaacatccctcctcacctgcagtgggaggtgttggatggacttttggctcaatatgggacagtggagaatgtggaacaagtcaacacagacacagaaaccgccgttgtcaacgtcacatatgcaacaagagaagaagcaaaaatagccatggagaagctaagcgggcatcagtttgagaactactccttcaagatttcctacatcccggatgaagaggtgagctccccttcgccccctcagcgagcccagcgtggggaccactcttcccgggagcaaggccacgcccctgggggcacttctcaggccagacagattgatttcccgctgcggatcctggtccccacccagtttgttggtgccatcatcggaaaggagggcttgaccataaagaacatcactaagcagacccagtcccgggtagatatccatagaaaagagaactctggagctgcagagaagcctgtcaccatccatgccaccccagaggggacttctgaagcatgccgcatgattcttgaaatcatgcagaaagaggcagatgagaccaaactagccgaagagattcctctgaaaatcttggcacacaatggcttggttggaagactgattggaaaagaaggcagaaatttgaagaaaattgaacatgaaacagggaccaagataacaatctcatctttgcaggatttgagcatatacaacccggaaagaaccatcactgtgaagggcacagttgaggcctgtgccagtgctgagatagagattatgaagaagctgcgtgaggcctttgaaaatgatatgctggctgttaaccaacaagccaatctgatcccagggttgaacctcagcgcacttggcatcttttcaacaggactgtccgtgctatctccaccagcagggccccgcggagctccccccgctgccccctaccaccccttcactacccactccggatacttctccagcctgtacccccatcaccagtttggcccgttcccgcatcatcactcttatccagagcaggagattgtgaatctcttcatcccaacccaggctgtgggcgccatcatcgggaagaagggggcacacatcaaacagctggcgagattcgccggagcctctatcaagattgcccctgcggaaggcccagacgtcagcgaaaggatggtcatcatcaccgggccaccggaagcccagttcaaggcccagggacggatctttgggaaactgaaagaggaaaacttctttaaccccaaagaagaagtgaagctggaascgcatatcagagtgccctcttccacagctggccgggtgattggcaaaggtggcaagaccgtgaacgaactgcagaacttaaccagtgcagaagtcatcgtgcctcgtgaccaaacgccagatgaaaatgaggaagtgatcgtcagaattatcgggcacttctttgctagccagactgcacagcgcaagatcagggaaattgtacaacaggtgaagcagcaggagcagaaataccctcagggagtcgcctcacagcgcagcaagtgaggctcccacaggcaccagcaaaacaacggatgaatgtagcccttccaacacctgacagaatgagaccaaacgcagccagccagatcgggagcaaaccaaagaccatctgaggaatgagaagtctgcggaggcggccagggactctgccgaggccctgagaaccccaggggccgaggaggggcggggaaggtcagccaggtttgccagaaccaccgagccccgcctcccgccccccagggcttctgcaggcttcagccatccacttcaccatccactcggatctctcctgaactcccacgacgctatcccttttagttgaactaacataggtgaacgtgttcaaagccaagcaaaatgcacaccctttttctgtggcaaatcgtctctgtacatgtgtgtacatattagaaagggaagatgttaagatatgtggcctgtgggttacacagggtgcctgcagcggtaatatattttagaaataatatatcaaataactcaactaactccaatttttaatcaattattaatttttttttctttttaaagagaaagcaggcttttctagactttaaagaataaagtctttgggaggtctcacggtgtagagaggagctttgaggccacccgcacaaaattcacccagagggaaatctcgtcggaaggacactcacggcagttctggatcacctgtgtatgtcaacagaagggataccgtctccttgaagaggaaactctgtcactcctcatgcctgtctagctcatacacccatttctctttgcttcacaggttttaaactggttttttgcatactgctatataattctctgtctctctctgtttatctctcccctccctcccctccccttcttctccatctccattcttttgaatttcctcatccctccatctcaatcccgtatctacgcacccccccccccccccaggcaaagcagtgctctgagtatcacatcacacaaaaggaacaaaagcgaaacacacaaaccagcctcaacttacacttggttactcaaaagaacaagagtcaatggtacttgtcctagcgttttggaagaggaaaacaggaacccaccaaaccaaccaatcaaccaaacaaagaaaaaattccacaatgaaagaatgtattttgtctttttgcattttggtgtataagccatcaatattcagcaaaatgattcctttctttaaaaaaaaaaaatgtggaggaaagtagaaatttaccaaggttgttggcccagggcgttaaattcacagatttttttaacgagaaaaacacacagaagaagctacctcaggtgtttttacctcagcaccttgctcttgtgtttcccttagagattttgtaaagctgatagttggagcatttttttatttttttaataaaaatgagttggaaaaaaaataagatatcaactgccagcctggagaaggtgacagtccaagtgtgcaacagctgttctgaattgtcttccgctagccaagaacctatatggccttcttttggacaaaccttgaaaatgtttatttaaaaaaaaaaaagatgacaaagaaaaacagagagagagaatattggagatgtcctgaattttaatagggtacgcgccattagggctttttgcgctaaaggatgaacatgtactggtttatgtggacaagccattataccaccagactgcaatgccagtttcctctactgcaaacagtgttctgtgacaaaaaaaaaaaaaaaaaaaaagaaaaaaaaagaaaaaacagaaatatatccagctaacaagaaaaaaaa

SEQ ID NO: 330 - DNA, 822 bp, Homo sapiens
  SITE (441): n equals a,t,g, or c
  SITE (455): n equals a,t,g, or c
ctgcagagaagcctgtcaccatccatgccaccccagaggggacttctgaagcatgccgcatgattcttgaaatcatgcagaaagaggcagatgagaccaaactagccgaagagattcctctgaaaatcttggcacacaatggcttggttggaagactgattggaaaagaaggcagaaatttgaagaaaattgaacatgaaacagggaccaagrtaacaatctcatctttgcaggatttgagcatatacaacccggaaagaaccatcactgtgaagggcacagttgaggcctgtgccagtgctgagatagagattatgaagaagctgcgtgaggcctttgaaaatgatatgctggctgttaaccaacaagccaatctgatcccagggttgaacctcagcgcacttggcatcttttcaacaggactgtccgtgctatctccancagcagggccccgnggagtccccccgctgccccctacsascccttcactamccamtccggatamttctccagcctgtacccccatcaccagtttggcccgttcccgcatcatcactcttatccagagcaggagattgtgaatctcttcatcccaacccaggctgtgggcgccatcatcgggaagaagggggcacacatcaaacagctggcgagattcgccggagcctctatcaagattgcccctgcggaaggcccagacgtcagcgaaaggatggtcatcatcamcgggccamcggaatgcccagttcaaggcccagggacggatytttgggaaaytgaaagaaggaaaattttttaaaccccaaagaagaagtgaagctg

SEQ ID NO: 331 - DNA, 2015 bp, Homo sapiens
gaaatttcctatcgcacgtctgctgcagcagtctcctgtttctcctcctaccttctccatttttctagtccctgcagggcataattggaatatcatttggagaaagtgtcatggaagttctgcgtccacagcttataagaattgatggccggaattacaggaagaatccagtccaagaacagacctatcaacatgaagaagatgaagaggacttctatcaaggctccatggagtgtgctgatgagccctgtgatgcctacgaggtggagcagaccccacaaggattccggtctactttgagggcccccagcttgctctataagcatatagttggaaagagaggggacactaggaagaaaatagaaatggagaccaaaacttctattagcattcctaaacctggacaagacggggaaattgtaatcactggccagcatcgaaatggtgtaatttcagcccgaacacggattgatgttcttttggacacttttcgaagaaagcagcccttcactcacttccttgcctttttcctcaatgaagttgaggttcaggaaggattcctgagattccaggaggaagtactggcgaagtgctccatggatcatggggttgacagcagcattttccagaatcctaaaaagcttcatctaactattgggatgttggtgcttttgagtgaggaagagatccagcagacatgtgagatgctacagcagtgtaaagaggaattcattaatgatatttctgggggtaaacccctagaagtggagatggcagggatagaatacatgaatgatgatcctggcatggtggatgttctttacgccaaagtccatatgaaagatggctccaacaggctacaagaattagttgatcgagtgctggaacgttttcaggcatctggactaatagtgaaagagtggaatagtgtgaaactgcatgctacagttatgaatacactattcaggaaagaccccaatgctgaaggcaggtacaatctctacacagcggaaggcaaatatatcttcaaggaaagagaatcatttgatggccgaaatattttaaagttgtttgagaacttctactttggctccctaaagctgaattcaattcacatctctcagaggttcaccgtagacagctttggaaactacgcttcctgtggacaaattgacttctcctgaggtggatcttggaaagcactagaaactaaacatcttcaccaggtgctgaagaaaagtgtcttcgttttaattgccaagcagggatgtggacatttggatggtgactttcctgggtggttccccatagattcaccattgcctctaatggtgtctacacccgtcatactaccagctgagatggtggtgggcataaggagaatttgtgcctataacccttagtgtgttctggttttttttcttttaatttttaaattgtcgtaaaatactcataaaacatactgtcttcaccatttttaagtgcacagttcagtaacgttaactgttaatacattcataatgctgtgtggccgtcaccgccgtccatctccataggcttctcagcttgtaaaatggaaactgtacccattaaacagtaattcccactcctcccagcccccgcagccaccattctgctttctgtctctctggttttgactattctcagtatctcatataagtggaatcatacagtgacttgtctttttgtgactggcttatttcacttagcataatgtcctcaaggttcatccatgttgtgtcaggtgacaggatttccttcctgtattatacatataatggaatgttccgttacatgtgcgtaccacactctgttcctccatcagtgaacacttggcttgcttcctcttgactattgggagtagtgctaatacagacacgggggtgcaaatatctctttgagactctgcctttaattcctttaccacccagagttttatctttagcaaaataaccattaaagttgtttgccttttaaaaaaaaaaaaaaaaaaa

SEQ ID NO: 332 - DNA, 2290 bp, Homo sapiens
cccacgcgtccgcccacgcgtccgcccacgcgtccggcgccatcatcgggaagaagggggcacacatcaaacagctggcgagattcgccggagcctctatcaagattgcccctgcggaaggcccagacgtcagcgaaaggatggtcatcatcaccgggccaccggaagcccagttcaaggcccagggacggatctttgggaaactgaaagaggaaaacttctttaaccccaaagaagaagtgaagctggaagcgcatatcagagtgccctcttccacagctggccgggtgattggcaaaggtggcaagaccgtgaacgaactgcagaacttaaccagtgcagaagtcatcgtgcctcgtgaccaaacgccagatgaaaatgaggaagtgatcgtcagaattatcgggcacttctttgctagccagactgcacagcgcaagatcagggaaattgtacaacaggtgaagcagcaggagcagaaataccctcagggagtcgcctcacagcgcagcaagtgaggctcccacaggcaccagcaaaacaacggatgaatgtagcccttccaacacctgacagaatgagaccaaacgcagccagccagatcgggagcaaaccaaagaccatctgaggaatgagaagtctgcggaggcggccagggactctgccgaggccctgagaaccccaggggccgaggaggggcggggaaggtcagccaggtttgccagaaccaccgagccccgcctcccgccccccagggcttctgcaggcttcagccatccacttcaccatccactcggatctctcctgaactcccacgacgctatcccttttagttgaactaacataggtgaacgtgttcaaagccaagcaaaatgcacaccctttttctgtggcaaatcgtctctgtacatgtgtgtacatattagaaagggaagatgttaagatatgtggcctgtgggttacacagggtgcctgcagcggtaatatattttagaaataatatatcaaataactcaactaactccaatttttaatcaattattaatttttttttctttttaaagagaaagcaggcttttctagactttaaagactaaagtctttgggaggtctcacggtgtagagaggagctttgaggccacccgcacaaaattcacccagagggaaatctcgtcggaaggacactcacggcagttctggatcacctgtgtatgtcaacagaagggataccgtctccttgaagaggaaactctgtcactcctcatgcctgtctagctcatacacccatttctctttgcttcacaggttttaaactggttttttgcatactgctatataattctctgtctctctctgttatctctcccctccctcccctccccttcttctccatctccattcttttgaatttcctcatccctccatctcaatcccgtatctacgcacccccccccccccccaggcaaagcagtgctctgagtatcacatcacacaaaaggaacaaaagcgaaacacacaaaccagcctcaacttacacttggttactcaaaagaacaagagtcaatggtacttgtcctagcgttttggaagaggaaaacaggaacccaccaaaccaaccaatcaaccaaacaaagaaaaaattccacaatgaaagaatgtattttgtctttttgcattttggtgtataagccatcaatattcagcaaaatgattcctttctttaaaaaaaaaaaatgtggaggaaagtagaaatttaccaaggttgttggcccagggcgttaaattcacagatttttttaacgagaaaaacacacagaagaagctacctcaggtgtttttacctcagcaccttgctcttgtgtttcccttagagattttgtaaagctgatagttggagcatttttttatttttttaataaaaatgagttggaaaaaaaataagatatcaactgccagcctggagaaggtgacagtccaagtgtgcaacagctgttctgaattgtctcccgctagccaagaacctatatggccttcttttggacaaaccttgaaaatgtttatttaaaaaaaaaaaagatgacaaagaaaaacagagagagagaatattggagatgtcctgaattttaatagggtacgcgccattagggctttttgcgctaaaggatgaacatgtactggtttatgtggacaagccattataccaccagactgcaatgccagtttcctctactgcaaacagtgttctgtggcaaaaaaaaaaaaaaaaaaaaaagaaaaaaaaaaaaaaaaa

SEQ ID NO: 333 - DNA, 661 bp, Homo sapiens
  SITE (12): n equals a,t,g, or c
tgccctttctantcccactaacccttactaaagggaacaaaagctggagctccaccgcggtggcggccgctctagaactattgtatcccccgggctgcttcacgcgcggtcaggccagccagcacgtcgtgcgttgccgcacgcaggctttcggtggtcgcagaatccagcggcagctcgagggtggtatcctcgatgaaatcccccagatgcgaatcttcatcatcaccgatcggcgtttccatggagattggctctttggcgatcttcagcactttgcggatcttgtcttccggcatcagcatacgttcagccagttcttccggcgtcggttcacggcccatctcttgcagcatctggcgagaaatacggttgagcttgttgatggtctcaatcatatgcaccggaatacggatggtgcgcgcctgatccgcgatagagcgggtgatcgcctgacggatccaccaggttgcgtaggtggagaacttgtaaccacggcggtattcgaatttatcaaccgctttcatcagaccgatgttgccttcctgaatcaggtcaaggaactgcaagccacggttggtgtatttcttagcgatagaaataaccagacgtaagttcgcttcaaccatctctttcttcgcacggcgggctttcgcttcac

SEQ ID NO: 334 - DNA, 2911 bp, Homo sapiens
ggcacgagcacagacttaatgattcctattcttgcctgggctggttcagtcctggccaggtgtttgtactagacgagtattgcgcccgaaatggagtccgggggtgtcaccgacatctctgctacctcagagacttgcttgaacgggcagaaaatggcgccatgatcgaccccacccttcttcactacagctttgccttctgtgcatcccatgtccatgggaacaggcctgatggaattggaactgtgactgttgaagaaaaggaacgttttgaagaaatcaaagagaggctccgagttctgctagaaaatcagattacacattttaggtattgctttccatttggtcgacctgaaggtgctttgaaagctactctctcactcttggaaagggttttgatgaaagatattgttaccccagtgccacaagaggaggtaaaaacagttatccgtaaatgtctggaacaggctgcgttagtcaactattctcggctctcagagtatgccaaaatcgaagagaatcaaaaggatgcagaaaatgtaggccggttaatcactcctgccaaaaagcttgaagatacaatacgtcttgctgaactagtcattgaagttcttcagcaaaatgaggagcaccacgcagaggcctttgcgtggtggtcagatttaatggtggagcatgcggagacgttcctgtcactctttgcagtagacatggatgcagccttagaggtgcaacctccagacacatgggacagttttccactatttcagctgctgaatgattttctccgtactgactataatttgtgcaatggaaaatttcacaaacacctgcaagacctgtttgccccacttgttgttagatatgtggatctgatggagtcctcaattgcacaatccattcacaggggctttgagcgggagtcatgggaaccagtcaataatgggtcaggcacctcagaagatctgttttggaaacttgacgcccttcagaccttcattcgggacctgcactggcctgaagaagagtttggaaagcacctggaacaacggctgaagttgatggcaagtgacatgatcgaatcttgtgtcaaaagaaccaggattgcatttgaagttaagctgcaaaaaaccagtcgatcaacagattttcgagtcccacagtcaatatgcaccatgtttaatgttatggttgatgccaaagctcaatcaacaaaactttgcagcatggaaatgggccaagagcatcaataccattcaaaaatagacgaactaattgaagaaactgttaaagaaatgataacactcttggttgcaaagttcgttactatcttggaaggagtgctggcaaaattatccagatatgacgaagggactttgttttcttcttttctgtcatttaccgcgaaggcagcttccaaatatgtggatgtacctaaacccgggatggacgtggccgacgcctacgtgactttcgtccgccattctcaggatgtcctgcgtgataaggtcaatgaggagatgtacatagaaaggttatttgatcaatggtacaacagctccatgaacgtgatctgcacctggttgacggaccggatggacttacagcttcatatttatcagttgaaaacactaattaggatggtaaagaaaacctacagagatttccgattgcaaggggtcctggactccaccttaaacagcaagacctatgaaacgatccggaaccgtctcactgtggaggaagccacagcatcagtgagtgaaggtgggggactgcagggcatcagcatgaaggacagcgatgaggaagacgaagaagacgattagaccatttggtcctagagtctgctgggacagagtcctgtaatcagtgcatgtccttagtctgttagttaaacccattaggaattttctgtcaactaccatgcccatgagatgtttatcaatacaactgccattttagctatgtggtaccaagattagcaaatgaccttcatatccactgatttcctgatgtccatgtctatatgtttacaagcaatatggagcaccattctttaaatactgttcatggagaatacatagtctaaccactaggcgtgtccctgttatcagcaaagatcaatgatgcttcattcatgtactatgtatgcattggtggtaaatggatgtgaggacaagtacatcaagtacattcactctgtttcacgtatgtggatgccagttaattaaatgagtacgtaaataaattaattaaaacacatagatctgctttgtgtttttatttttattttttgaaaaacaaaaggcaagtctccaacaattaacttttgatgctttctgttcccctaaaaccaaaaaatgaaccccttgtgtcgttgttaacccatcctttcatttactcatataattagccaaaaaaaaaaggatggctacataccaatggattgattctcttaattgccacggcaagggggcgatcctatcatgacttaacatcaagcgcgcagttcaaaactactgtcttctgtcaaagttttctcctcttaaatgttattttgcttttacgtctcaactgtgtatgtaaaaaaaacgaatatttaaattacaaccctagactaaaaatgtgtttataataagatgtggatatttccttcagtagattgtaaccataatttaaattattttgttccacactgttttttatatctgtcatgtacattgcattttgatctgtaactgcacaaccctggggtttgctgcagagctatttctttccatgtaaagtagtggatccatcttgcttttgccttatataaagcctacagttatggaagtgtggaaaactgtggcttctcaataaatattcagatgtcctaagaataaaaaaaaaaaaaaaaaaaaaaaaa

SEQ ID NO: 335 - DNA, 2764 bp, Homo sapiens
  SITE (2761): n equals a,t,g, or c
gcggacgcgtgggttaaaactacatgatacaaatcatagaagccatttccagcgaactcacaactctaaggatagattggcaagataaaaggcaacagttcctgatctcggacatttgggaatactggatgaagcttggaaatttgtcagtttgacggtgagaacatgtatatgagcatgacagagccgagccaggactatgtgccagccagccagtcctaccctggtccaagcctggaaagtgaagacttcaacattccaccaattactcctccttccctcccagaccactcgctggtgcacctgaatgaagttgagtctggttaccattctctgtgtcaccccatgaaccataatggcctgctaccatttcatccacwaaacatggacctccctgaaatcacagtctccaatatgctgggccaggatggaacactgctttctaattccatttctgtgatgccagatatacgaaacccagaaggaactcagtacagttcccatcctcagatggcagccatgagaccaaggggccagcctgcagacatcaggcagcagccaggaatgatgccacatggccagctgactaccattaaccagtcacagctaagtgctcaacttggtttgaatatgggaggaagcaatgttccccacaactcaccatctccacctggaagcaagtctgcaactccttcaccatccagttcagtgcatgaagatgaaggcgatgatacctctaagatcaatggtggagagaagcggcctgcctctgatatggggaaaaaaccaaaaactcccaaaaagaagaagaagaaggatcccaatgagccccagaagcctgtgtctgcctatgcgttattctttcgtgatactcaggccgccatcaagggccaaaatccaaacgctacctttggcgaagtctctaaaattgtggcttcaatgtgggacggtttaggagaagagcaaaaacaggtctataaaaagaaaaccgaggctgcgaagaaggagtacctgaagcaactcgcagcatacagagccagccttgtatccaagagctacagtgaacctgttgacgtgaagacatctcaacctcctcagctgatcaattcgaagccgtcggtgttccatgggcccagccaggcccactcggccctgtacctaagttcccactatcaccaacaaccgggaatgaatcctcacctaactgccatgcatcctagtctccccaggaacatagcccccaagccgaataaccaaatgccagtgactgtctctatagcaaacatggctgtgtcccctcctcctcccctccagatcagcccgcctcttcaccagcatctcaacatgcagcagcaccagccgctcaccatgcagcagccccttgggaaccagctccccatgcaggtccagtctgccttacactcacccaccatgcagcaaggrtttactcttcaacccgactatcagactattatcaatcctacatctacagctgcacaagttgtcacccaggcaatggagtatgtgcgttcggggtgcagaaatcctcccccacaaccggtggactggaataacgactactgcagtagtgggggcatgcagagggacaaagcactgtaccttacttgagaatctgaacacctcttctttccactgaggaattcagggaagtgttttcaccatggattgctttgtacagtcaaggcagttctccattttattagaaaatacaagttgctaagcacttaggaccatttgagcttgtgggtcacccactctggaagaaatagtcatgcttctttattatttttttaatcctttatggacattgtttttcttcttccctgaaggaaatttggaccattcagattttatgttggttttttgctgtgaagtgctgcgctctagtaactgccttagcaactgtagatgtctcggataaaagtcctggattttccattggttttcataatgggtgtttatatgaaactactaaagactttttaaatggcttgatgtagcagtcatagcaagtttgtaaatagcatctatgttacactctcctagagtataaaatgtgaatgtttttgtagctaaattgtaattgaaactggctcattccagtttattgatttcacaataggggttaaattggcaaacattcatatttttacttcatttttaaaacaactgactgatagttctatattttcaaaatatttgaaaataaaaagtattcccaagtgattttaatttaaaaacaaattggctttgtctcattgatcagacaaaaagaaactagtattaagggaagcgcaaacacatttattttgtactgcagaaaaattgcttttttgtatcactttttgtgtaatggttagtaaatgtcatttaagtccttttatgtataaaactgccaaatgcttacctggtattttattagatgcagaaacagattggaaacagctaaattacaacttttacatatggctctgtcttattgtttcttcatactgtgtctgtatttaatctttttttatggaacctgttgcgcctatttatgaaataataaatataggtgtttgtaagtaaatttgttagtatttgaaagaggtttctttgatgttttaacttttgctggcaaaaaaaaattcacgcttggtgtgaatactttattatttagtttttacagtaacatgaataaagccaaacctgcttttcatttagcagcaaaaaaaaaaaaaattttattatatattanatt

SEQ ID NO: 336 - DNA, 376 bp, Homo sapiens
  SITE (333): n equals a,t,g, or c
  SITE (354): n equals a,t,g, or c
  SITE (375): n equals a,t,g, or c
ggggagatgcagcatcccagtttttggtcttctgtcaaaaacacagggatgaggtggtagctgagcacccagatgcttcaggtgaggagattgaagagctgctcaggtcacagtggagtctgctgagtgagaagcagagagcacgctacaacaccaagtttgccctggtggcccctgtccaggctgaagaagactctggtaatgtaaatggggaaaaaaagaaaccacacaaagaggatacaggaccctacagaagatgctgaagctgaggacacacccaggaaaagactycrggacggacaagcmcatytttcggaagagagacacattcantgacaaacggccagaacaagnctttacaaggccttggaggcnc

SEQ ID NO: 337 - DNA, 1354 bp, Homo sapiens
ggggttggaaaacgaccaaaacgaaagtgtcttcagtggcatccattgctagcaaagaaacttcttgatttttcagaagaggaagaagaggaagacgaagaggaggatattgataaggttcaacttcttggggccgatggcctagagcaagatgttggtgaaactgaagatgatgaatcaccagagcagcgagcccggagaccaatgaatgcatttcttttattttgcaaacgccatcgctctcttgtacgtcaggaacaccccaggcttgataaccgaggtgctaccaagatactagctgattggtgggctgttcttgatccaaaggaaaagcagaaatacacagacatggccaaggagtataaggatgcatttatgaaagcaaatcctggctacaaatggtgtcctaccacaaacaagcctgtgaaatccccaacacccactgtcaatccacgaaagaaactttgggccttcccatctgactcttcaagagacttgccaagccccaagaaagcaaagactgaagaaatgcctcagcttaactttggaatggctgatcctactcaaatgggaggcctgagtatgctgctgttagctggagaacatgctcttggcacaccagaggtatcctctggcacatgcaggcctgatgtttcagaatctcctgaattacgtcagaagtcaccattgtttcagtttgccgagatatcttcaagtacgtcccactctgatgcttctacaaagcagtgtcaaacatctgccttgtttcagtttgcagagatttcttcaaacacttcgcagttgggtggtgctgagcctgtaaaacgctgtggaaagtctgcactctttcaactggcagagatgtgcctggcatcagacgggatgaaaatggaagaatcaaagctaataaaagcaaaagaatccgatggtggaagaattaaagaattagagaagggaaaggaagaaaaagaaattaaaatggagaaaacagatgaaactaggttacagaaggaagcagaatttgaaaaatcggctaaggaaaatttaagagattctaaggaattgagaaattttgaggcattgcaaatagatgacataatggctataaaaatggaagatcccaaagaaattagaaaggaagagttagaagatcacaaatgtagtcattttcctgatttttcttattctgccagtagcaagataataattagtgatgttcccagtagaaaggatcatatgtgccatcctcatggaattatgatcattgaggatcccgcagcattaaacaagccagaaaagctaaaaaaaaaaaaaaaaaaaaaaaaaaaaaaaaaaaaaaaaaaaaaaaaaaaaa

SEQ ID NO: 338 - DNA, 365 bp, Homo sapiens
aaaaggagaagaagaaaaagaaggaaaaagagaaggagaagaaggagaaggaaagagagaaagagaagagagagcgagagaagagagaaaaagagaaggagaaacacaagcatgaaaaaataaaagtggaaccagtcgctctggccccgagtccagttatccccagattaactctccgagtcggtgctggccaagacaagattgtcatcagcaaggtggtccctgcccccgaggccaagccggcgccctcgcagaacaggccgaagaccccaccgccggcccccgcgcccgcccccggccccatgctcgtcagccctgcgcccgtgccgctgccgctgctcgcccaggccgccgcgggccctgcc

SEQ ID NO: 339 - DNA, 608 bp, Homo sapiens
  SITE (20): n equals a,t,g, or c
  SITE (23): n equals a,t,g, or c
  SITE (26): n equals a,t,g, or c
  SITE (86): n equals a,t,g, or c
acctggaaaatcttcgcagnaanttnggccatttcggccattacatccacttatagcagcctgctccggtacacctgtgggtcatntgtggaagccaccagggctgttatgaagcacctcgcagcagtgtatcaacacggctgccttctcggactttccatcgccaagaggcctctctggagacaggaatctttgcaaagtgtgaaaaacaccactgagcaagaaattctgaaagccataaacatcaattcctttgtagagtgtggcatccatttatatcaagagagtacatccaaatcagccctgagccaagaatttgaagctttctttcaaggtaaaagcttatatatcaactcagggaacatccccgattacttatttgacttctttgaacatttgcccaattgtgcaagtgctctggacttcattaaactggacttttatgggggagctatggcttcatgggaaaaggctgcagaagacacaggyggaatccacatggaagaggccccagaaacctacattcccagcagggctgyatctttgttcttcaactggaagcaggaattcaggactctggaggtcacactccgggatttcagcaagtt

SEQ ID NO: 340 - DNA, 560 bp, Homo sapiens
  SITE (525): n equals a,t,g, or c
caccagtgttagaagttttggtggggaagacaattgagcagtctcttctggaagtaatggaagaagaagagctggctaacctgcgggccagtcagcgtgagtatgaagaactacggaatagtgaacgtgctgaagttcaacgacttgaagagcaagagaggcgacaccgagaagaaaaagaacggcgtaagaaacagcagtgggaaataatgcacaagcacaacgagacatcacaaaaaatcgccgcccgagcatttgcacagcgttacctggctgaccttctcccgtctgtttttggcagcctcagggatagtggctacttttatgatcccattgaaagagatattgagataggatttcttccatggctaaygaatgaagttgaaaaaaccatggaatatagcatggtgggaagaacagtgcttgaacatgttgatccgtgagtggttgaaaaagaggcctgtgtatgtatgagccatggggaagacacacatcagtctccagaacccgaggatgagcctggtnggtccctgggagcaatgacagagttcactgggagg

SEQ ID NO: 341 - DNA, 2486 bp, Homo sapiens
tcgacccacgcgtccgggaccgtgtaacaactgaaattcagcttccttctcaaagtcctgtggaagaacaaagcccagcctctttgtcttctctgcgttcacggagcacacaaatggaatcaactcgtgtttcagcttctctccccagaagttaccggaaaactgatacagtcaggttaacatctgtggtcacaccaagaccctttggctctcagacaaggggaatctcatcactccccagatcttacacgatggatgatgcttggaagtataatggagatgttgaagacattaagagaactccaaacaatgtggtcagcacccctgcaccaagcccggacgcaagccaactggcttcaagcttatctagccagaaagaggtagcagcaacagaagaagatgtgacaaggctgccctctcctacatcccccttctcatctctttcccaagaccaggctgccacttctaaagccacattgtcttccacatctggtcttgatttaatgtctgaatctggagaaggggaaatctccccacaaagagaagtctcaagatcccaggatcagttcagtgatatgagaatcagcataaaccagacgcctgggaagagtcttgactttgggtttacaataaaatgggatattcctgggatcttcgtagcatcagttgaagcaggtagcccagcagaattttctcagctacaagtagatgatgaaattattgctattaacaacaccaagttttcatataacgattcaaaagagtgggaggaagccatggctaaggctcaagaaactggacacctagtgatggatgtgaggcgctatggaaaggctggttcacctgaaacaaagtggattgatgcaacttctggaatttacaactcagaaaaatcttcaaatctatctgtaacaactgatttctccgaaagccttcagagttctaatattgaatccaaagaaatcaatggaattcatgatgaaagcaatgcttttgaatcaaaagcatctgaatccatttctttgaaaaacttaaaaaggcgatcacaattttttgaacaaggaagctctgattcgggggttcctgatcttccagttccaaccatcagtgccccgagtcgctgggtgtgggatcaagaggaggagcggaagcggcaggagaggtggcagaaggagcaggaccgcctactgcaggaaaaatatcaacgtgagcaggagaaactgagggaagagtggcaaagggccaaacaggaggcagagagagagaattccaagtacttggatgaggaactgatggtcctaagctcaaacagcatgtctctgaccacacgggagccctctcttgccacctgggaagctacctggagtgaagacctccaccacaggtgtggccaccacacagtcccccaccccgagaagccattccccttcagcttcacagtcaggctctcagctgcgtaacaggtcagtcagtgggaagcgcatatgctcctactgcaataacattctgggcaaaggagccgccatgatcatcgagtccctgggtctttgttatcatttgcattgttttaagtgtgttgcctgtgagtgtgacctcggaggctcttcctcaggagctgaagtcaggatcagaaaccaccaactgtactgcaacgactgctatctcagattcaaatctggacggccaaccgccatgtgatgtaagcctccatacgaaagcactgttgcagatagaagaagaggtggttgctgctcatgtagatctataaatatgtgttgtatgtcttttttgctttttttttaaaaaaaagaataactttttttgcctctttagattacatagaagcattgtagtcttggtagaaccagtatttttgttgtttatttataaggtaattgtgtgtggggaaaagtgcagtatttacctgttgaattcagcatcttgagagcacaagggaaaaaataagaacctacgaatatttttgaggcagataatgatctagtttgactttctagttagtggtgttttgaagagggtattttattgttttttaaaaaaaggttcttaaacattatttgaaatagttaatataaatacataattgcatttgctctgtttattgtaatgtattctaaattaatgcagaaccctatggaaaatttccttaaaatctatcccccaatgggctttctggatccttccttctccccattattctgatttttaaaaaagcagttaatgttccctttttttgcttgatgaagggagctctatttttttttcccgaaatgttgctaagtaattccccatagaaaactgctttttttccttaatgaaaaataaccctggtttgtttactagaagtcttcttcagaaactggtgagcccttctgttccattgcctttgtaaataaacctgctggtgccttttaaaaaaaaaaaaaaaaaaaaaaaaaaaaaaaaaaaaaaaaaaaaaaaaaaaaaaa

SEQ ID NO: 342 - DNA, 481 bp, Homo sapiens
ggcacgagccggggagagctagtcactgcttcaaccacctgtgagaaattagaaaaagccaggaatgagttacaaacagtgtatgaagcattcgtccagcagcaccaggctgaaaaaacagaacgagagaatcggcttaaagagttttacaccagggagtatgaaaagcttcgggacacttacattgaagaagcagagaagtacaaaatgcaattgcaagagcagtttgacaacttaaatgctgcgcatgaaacctctaagttggaaattgaagctagccactcagagaaacttgaattgctaaagaaggcctatgaagcctccctttcagaaattaagaaaggccatgaaatagaaaagaaatcgcttgaagatttactttctgagaagcaggaatcgctagagaagcaaatcaatgatctgaagagtgaaaatgatgctttaaatgaaaaattgaaatcagaaaaaaaaaaaaaaaaaa

SEQ ID NO: 343 - DNA, 436 bp, Homo sapiens
cgttttacctcgccggggcgtaaaaagaaggggcgctgattaacgcctcagactgatgaaaacggcccaaaagtgcccggacagtcccctcgccccttcgggaaaagggttagggtgaggggaaaattgtgttcacactgacgagtgaaaatctcaggcgttgattgtggattagcgcctgccgcgcgtcgacgtatttgctgaccagctaaatgacgcttcaggatccggtttataagcctgctttttcttcaactggcgggcttttttcgcttcagcctcacgctcaaccattaatttatcgatgtaatctttcttaatgctgttggtttcggagttggtcaatacgcgaccatgcgcaatccgcgcccgatccagcagtgttttaagttcacgctgctcgcgttcagtcatctctttttgggtaatacggggg

SEQ ID NO: 344 - DNA, 1867 bp, Homo sapiens
gcggcgacgcgacgtcgcgaggaggaggaggcggcgggggtccaggaggccggccagcgcatggaggaggaggccatgaacggcgaccggactgagagcgactggcaggggctggtgagcgagtacctggtgtgtaagaggaagctggagagtaagaaggaagccctgctgatcctctccaaggagctggacacctgtcaacaggaaagggaccagtacaaactcagggccaatcagctccgggagcgccaccagtcactgaagaagaagtaccgagagctgattgatggagatccatcacttcctcctgaaaaaaggaaacaggctaatcttgcacaactattgagagattctcaggaccgaaataaacatctgggagaagaaattaaagaacttcagcaaaggcttggagaagtccagggcgacaacaagctcttgaggatgacgattgccaaacaaaggctcggagacgaagcaatcggcgtgcgacactttgcagcccatgagcgtgaagacttggtgcagcagctagagcgagctaaggaacagattgagtctctggagcacgacctgcaggcttctgtggacgagcttcaggatgttaaagaagaacggtcttcctaccaggacaaagtggagaggctcaaccaggagctgaaccatatcctgagtgggcacgagaaccgcatcattgacgtggacgccctgtgtatggagaacaggtaccttcaagagagattaaagcaactccatgaagaggtcaacctcttgaaatcaaacattgccaaatacaagaatgctctggagagacggaaaaactcgaagggccagggtaaatccagcagcagtgctctgacaggagtcctgtctgcaaagcaagttcaggatctgctatctgaggatcatggatgcagcctcccagctactccgcagaccatttctgacctgaaatctctggcaacagccctgttggaaacaatccacgagaaaaacatgggcattcagcaccagaggcaaaccaacaaaatcctatggaatcgggtggctgagctggaaaaaaaattaaaaactctggaagtttctgggttgtggagtcttccagggggcaaggacaccatactgttcagcgaccccactctttctagaggacagaggtcgagatccccactgctgaagtttgtcgagcagcccactgagaacaaagcagatcccaaggatggggaggctcacaagcacgaagaagatgaaagttgtgccgctgctgaggcgttgacagcgcctgaggatgctgggaggcccgctgtcaactccccagcaaatcagagccgcgggaaccaatgcaagctctttcatccttcattaccccagttaccttctgaggaagaagtaaacagccttgggagggaaataattaaactgacaaaggaacaggcagctgcagaactggaagaggtcagaagagagagtcccatagaaggtcagaggagtgagacggggccagccccgccaggcctgtccatccagggggagctccctaaatctcacctggactccttcgaggccagccggccagcagccaaagcttccacaccggaagacggcaaagggatcccagagggcggaggcatgaggagcaccgtgaaaacctgaaggggagagggatctgacacaatgacacattgaaagccccagagagggtcaagaatgaagcatcggaatggtgcgctcacgtcgccttctcctgaaatacctccgagtctgcaagtgagaaaacgcgctgatcctgttgcaaactgtgaatattctgatgatgccagtacagtttgatttattaaatgtaggtcctcaaaaaaaaaaaaaaaaaaaa

SEQ ID NO: 345 - DNA, 739 bp, Homo sapiens
ggcagagtgcagacagaaaaattcgctgcaagtacagcactttctagattgctcctggagtgtgggaacaacagtctctcctgtccacgttactgaatccagaaaaaaggtgaacttacgaacatgggaaaagaaatccagctaaagcctaaggcaaatgtctcttcttacgttcactttttgctgaattacagaaacaaattcaaggagcagcagccaaatacctacgttggctttaaagagttctctagaaagtgttcggaaaaatggagatccatctcaaagcatgaaaaggccaaatatgaagccctggccaaactcgacaaagcccgataccaggaagaaatgatgaattatgttggcaagaggaagaaacggagaaagcgggatccccaggcacccagacggcctccatcatccttcctactcttctgccaagaccactatgctcagctgaagagggagaacccgaactggtcggtggtgcaggtggccaaggccacagggaagatgtggtcaacagcgacagacctggagaagcacccttatgagcaaagagtggctctcctgagagctaagtacttcgaggaacttgaactctaccgtaaacaatgtaatgccaggaagaagtaccgaatgtcagctagaaaccggtgcagagggaaaagagtcaggcagagctgatggatccagtttgaaaaaacaaaatgccattcaaccgtaaaaaaaaaaaaaaaaa

SEQ ID NO: 346 - DNA, 530 bp, Homo sapiens
  SITE (477): n equals a,t,g, or c
  SITE (483): n equals a,t,g, or c
  SITE (511): n equals a,t,g, or c
gccggtgctttgttctgtctgaggccaggaagtttgaccgcgctgccatgccgaaccgtaaggcsagccggaatgcttactatttcttcgtgcaggagaagatccccgaactacggcgacgaggcctgcctgtggctcgcgttgctgatgccatcccttactgctcctcagactgggcgcttctgagggaggaagaaaaggagaaatacgcagaaatggctcgagaatggagggccgctcagggaaaggaccctgggccctcagagaagcagaaacctgttttcacaccactgaggaggccaggcatgcttgtaccaaagcagaatgtttcacctccagatatgtcagytttgtctttaaaaggtgatcaagctctccttggaggcattttttattttttggaacatttttagccatggcgagctacctcctcattgtggaacagcgcttcctcccttgtggaaattggctgtgttnaagtantctcttccaagaaggtattatgggcagntttccacagttttataaaa

SEQ ID NO: 347 - DNA, 424 bp, Homo sapiens
gtctagtaaacctcataaacatctgcctcctgcagccctacacctcattgcatactacaaagaaaacaaagacagggaggacaagaggagcgccctgtcctgtgttatctccaaaacagctcgtcttctctctagtgaagatagagctcgtctcccagaagaattgcgaagtcttgttcaaaaacgctatgaacttctagagcacaaaaagaggtgggcttctatgtctgaagaacaacggaaagaatatttgaaaaagaaacgggaggagctgaaaaagaagttgaaggaaaaagccaaagaacgaagagagaragaaatgcttgagagattagaaaaacagaagcggtatgaggaccaagagttaactggcaaaaaccttccagcattcagattggtggatacccctgaagggctgcccaac

SEQ ID NO: 348 - DNA, 1409 bp, Homo sapiens
accacgtagtccttcgccgcattggggcaaaataatcccttcatttttgtgaaggtaccgtggaaaatatttcatttttcttctcaccggagcaattgtaaatgctatgcggtaagaggagttacctgtggaaaggtggttaagagattaggtaaagaaaaggaaaggacaccaaaataaagtgctgcggaagaatttttgtccagctgtgagacgacgagtgcgtgaagtgaaggcgattgagaggggctgagggaattgtcctctgtggaagggactttcttttggccctaggccccttcctgcccctgtcgtcagcagagagatggaaaacttgatgactagctccaccctaccgcccctttttgcagatgaagacggttccaaggagagtaatgatctggctaccactgggttaaatcacccagaggttccatacagtagtggcgccacatcatccaccaacaatccagaatttgtggaggatctctctcaaggtcagttgcttcagagtgagtcttcaaatgcagcagaaggcaatgaacagaggcatgaagatgagcaacgaagtaaacgaggaggttggtccaaaggaagaaagaggaagaaacctcttcgagacagcaatgcacccaaatccccccttacaggatatgttcggttcatgaatgagcgtcgagaacaacttcgagcaaagagaccagaagtcccatttccagaaatcacaaggatgttaggcaatgaatggagtaaactgcctcctgaggaaaaacagcgctaccttgatgaagcagacagagataaggagcgttacatgaaggaactggaacagtatcagaaaacagaggcctacaaggtcttcagtaggaaaacccaggaccgtcagaaaggcaaatctcataggcaagatgcagcccggcagccactcatgatcatgagaaagaaacagaggtaaaggaacggtctgtttttgacatccctatatttacagaggaattcttgaaccatagcaaagctcgggaagcagagctccgccagcttcgcaaatccaacatggagtttgaggagaggaatgcagccctgcaaaagcacgtggagagcatgcgcacagcagtggagaagctggaggtggatgtgatccaggagcggagccgcaacacagtcttacagcagcacctggagaccctgcggyaggtgctgaccagcagctttgccagcatgcccttgsctggaagtggagagacacctacagtggacaccattgactcatatatgaacagactgcacagtattattttagctaatccccaagacaatgaaaacttcatagctacagttcgagaagttgtgaacagactcgatcgttagggaatggtgagtgctcactgataaatatttatatgccagcg

SEQ ID NO: 349 - DNA, 1564 bp, Homo sapiens
ggcacgaggaagaacaaggcagccaagggcagcgccaccaaagacttctctgtgtttttccagaagatccgggaaacaggggagaggcccagcaatgaggaaatcatgcgtttttccaaattatttgaggatgagctgaccctggacaacctgacacggccgcagctggtggccctgtgcaagctgctggagctacagtccatcggcaccaacaacttcctgcgcttccagcttaccatgcggctgcgctccataaaggcagacgacaagctgattgctgaggaaggggtggacagcctgaatgtcaaggagctgcaggcagcgtgtcgggcacgaggcatgcgggccctgggcgtcacggaagaccgcctgaggggtcagctgaagcagtggctggacctgcacctgcatcaggagatccccacatcgctgctcatcctgtcccgggccatgtacctcccggacaccctctctccagccgaccagctcaagtccacactgcagaccctcccagagattgtggcaaaggaagcacaggtgaaagtggccgaggtggagggcgagcaggtggacaacaaggccaagctggaggccacgctgcaggaggaggcggccatccagcaggagcaccgtgagaaggagctgcagaagcgctcggaggtggcgaaggattttgagcccgaacgtgtggtagctgctccccaaaggccggggaccgagccacagccagaaatgcctgacacagtcctgcagtcagagaccttgaaggacactgccccggtgctggagggcttgaaggaggaagagatcacgaaggaggaaatcgacatcctcagcgacgcctgctctaagctgcaggagcagaagaagtcactcaccaaggagaaggaggagctggagctgctgaaggaggatgtgcaggactacagcgaggacttgcaggagatcaagaaggaactttcaaagactggtgaagaaaaatacgtggaagaatctaaagccagcaagagattgacaaaaagggtgcagcaaatgatcgggcagatcgatggcttgatctcgcagctggagatggaccagcaggctggcaagctggccccggccaacggcatgcccacgggggagaacgtcatcagtgtcgctgagctcatcaacgccatgaagcaagtcaagcacattcccgaaagcaagctcaccagcctggccgcagcactggatgaaaacaaggatggcaaggtcaacatcgacgacctcgtcaaggtgattgagctggtggacaaagaagatgttcacatctccaccagccaggtggctgagattgtagcaacactggaaaaagaggagaaggtggaggagaaggagaaggccaaagagaaggcagagaaggaggtcgcagaggtgaagagctagaaccactggcctgggcacctgtcctcctgctgtgccgtcaccctggcaagggccgtgagggcgattgctttgtggtgattctcagtggctcatctaatttttggctggaataaatcagagacttccataatcaagtaaaaaaaaaaaaaaaaaa

SEQ ID NO: 350 - DNA, 636 bp, Homo sapiens
  SITE (4): n equals a,t,g, or c
  SITE (47): n equals a,t,g, or c
  SITE (54): n equals a,t,g, or c
  SITE (585): n equals a,t,g, or c
gaanaaaacctggagctccaccgcggtggcggccgctctagaactantggatcncccgttcaatcagcatatccagcttaccttccatcacttcatccaggcggtagagcgtcaggttgatgcggtgatcggtaacgcgcccctgcgggaagttgtaagtacggttacggtcgctgcgatcgccactccccagcaggttacgacgggtagacgcttcggcctgttggcgttttgccatttcagcagcgtggatgcgagcaccgagaacagaaagtgctttagctttgtttttatgttgtgaacgttcgtcctgacattcaacaacaatcccggtcggcaagtgagtaatacgaattgccgaatcggtggtgttaacgtgctgaccacccgcccctgacgagcggaaagtatcaatgcgtaaatctgctgggttgatgtccggcagttctgcgtcaggcagttctggcattaccgcaacggtacaagcagaagtatgaatacgaccctgcgattccgtagcaggaacacgttgcacgcgatgaccgccggattcaaatttcagacgaccatacacaccatcaccgntaattttggcgatgatctctttataaccaccatgttcaccctcgstggcgc

SEQ ID NO: 351 - DNA, 504 bp, Homo sapiens
  SITE (23): n equals a,t,g, or c
  SITE (35): n equals a,t,g, or c
  SITE (53): n equals a,t,g, or c
  SITE (78): n equals a,t,g, or c
  SITE (104): n equals a,t,g, or c
aatattcaacatgctgctggcgntcttcgatcggncagcgttaatgcttatcngcctgttctttctcatccgtatccnccgcttgattcattttggtcgccagncggcgcgcagtagctttcctgtcctgctttgtggagaagagggcgtgggcaaggcactgctaagtcaggcaattcataatgaaagcgagcgtgctgcaggtccttatatcgccgtcaattgtgagttatatggtgatgctgcgctggcggaagaatttattggtggcgatcgcacggacaatgaaaatggccgtctgagtcggctggaactggcacacggcggcacgctgtttcttgaaaagattgaatatctggcggtggagttacagtctgctttgcttcaggttatcaagcagggggttatcacgcgactggatgcgcggcgtttaataccaattgatgtcaaagtgattgcaacaacgaccgcggacctcgcaatgctggtggaacaaaatcgttt

SEQ ID NO: 352 - DNA, 2554 bp, Homo sapiens
  SITE (2505): n equals a,t,g, or c
  SITE (2533): n equals a,t,g, or c
gctcgaaattaaccctcctaaagggaacaaaagctggagctccaccgcggtggcggccgctctagaactagtggatcccccgggctgcaggaattckgcacgaggctgcggcgggaggaaaactgaaaaggaaagaactggcctactgaaaagtttcatcattttctattgggcttcccctccaaggtctgtgatgaggcatggacagtgaacacaggcagcctgtcttacacataggtaaagtgttgagagaggagaaccagtgcattgctcctgtggtttccagccgcgtgagtccagggacaagaccaacagctatggggtctttcagctcacacatgacagagtttccacgaaaacgcaaaggaagtgattcagacccatcccaagaagctcatagccaaactgaaaagcggaggagagataaaatgaataacctgattgaagaactgtctgcaatgatccctcagtgcaaccccatggcgcgtaaactggacaaacttacagttttaagaatggctgttcaacacttgagatctttaaaaggcttgacaaattcttatgtgggaagtaattatagaccatcatttcttcaggataatgagctcagacatttaatccttaagactgcagaaggcttcttatttgtggttggatgtgaaagaggaaaaattctcttcgtttctaagtcagtctccaaaatacttaattatgatcaggctagtttgactggacaaagcttatttgacttcttacatccaaaagatgttgccaaagtaaaggaacaactttcttcttttgatatttcaccaagagaaaagctaatagatgccaaaactggtttgcaagttcacagtaatctccacgctggaaggacacgtgtgtattctggctcaagacgatcttttttctgtcggataaagagttgtaaaatctctgtcaaagaagagcatggatgcttacccaactcaaagaagaaagagcacagaaaattctatactatccattgcactggttacttgagaagctggcctccaaatattgttggaatggaagaagaaaggaacagtaagaaagacaacagtaattttacctgccttgtggccattggaagattacagccatatattgttccacagaacagyggagagattaatgtgaaaccwactgaatttataacccggtttgcagtgaatggaaaatttgtctmtgtagatcaaagggcatcagcgattttaggatatctgcctcaggaacttttgggaacttcttgttatgaatattttcatcaagatgaccacaataatttgactgacaagcacraagcagttctacagagtaaggagaaaatacttacagattcctacaaattcagagcaaaagatggctcttttgtaactttaaaaagccaatggtttagtttcacaaatccttggacaaaagaactggaatatattgtatctgtcaacactttagttttgggacatagtgagcctggagaagcatcatttttaccttgtagctctcaatcatcagaagaatcctctagacagtcctgtatgagtgtacctggaatgtctactggaacagwacttggtgctggtagtattggaacagatattgcaaatgaaattctggatttacagaggwtacagtcttcttcataccwtgatgattcgagtccaacaggtttaatgaaagatactcatactgtaaactgcaggagtatgtcaaataaggagttgtttccaccaagtccttctgaaatgggggagctagaggctaccaggcaaaaccagagtactgttgctgtccacagccatgagccactcctcagtgatggtgcacagttggatttcgatgccctatgtgacaatgatgacacagccatggctgcatttatgaattacttagaagcagaggggggcctgggagaccctggggacttcagtgacatccagtggaccctctagcctttgatttttaactccaaaaatgagaaacattttaaagcatttcatttacgaaaaactgtctcaactattcttaagtactgtattgatattgtttgtatcttttattaatgttctaccactttttatagatttgcatcttcctgtcacagggatgtggggaaataygttttcctcccaagagaaccaagtttattatagactcctttattcagtgaaatggcttataatccactagttgccatatttttgctaaaatatttctaaccaagaatactacttacatattgttttggctttgttttatttttgatgcagttttttttagttgaggtaatgtaatatattgatgttttcctttgtgtctaagatycatttataatagtaggtttgtataatttggaacattttccattccytgcgaatttccttaattgaggatagggcttacacactttaagaaaacagtgagtacttgaacatttaaagggacagtgcaatttatagtcataatcacattgaatactgaatntgatctttggagacttaggcaagcacanagctgggatattcatgctcag

SEQ ID NO: 353 - DNA, 834 bp, Homo sapiens
  SITE (615): n equals a,t,g, or c
  SITE (816): n equals a,t,g, or c
  SITE (821): n equals a,t,g, or c
cagccgccaccgcctatggtcctgacgccaggcctgggcagagccccgggcggctggaggcgcttggcggccgtcttggccggcggaaaggctcaggacccaagaaggagcggagacgcactgagagcattaacagcgcattcgcggagttgcgcgagtgcatccccaacgtgccggccgacaccaagctctccaagatcaagactctgcgcctagccaccagctacatcgcctacctgatggacgtgctggccaaggatgcacagtctggcgatcccgaggccttcaaggctgaactcaagaaggcggatggcggccgtgagagcaagcggaaaagggagctgcagcagcacgaaggttttcctcctgccctgggcccagtcgagaagaggattaaaggacgcaccggctggccgcagcaagtytgggcgctggagttaaaccagtgagccgaggcccgcgccsagracctggccaggccagccactcctgaagccccgggaggagaggaaggcagcggcgaacgcaggctctgggctccggcgactggtgctacgcatcccgcggagcttctgctgagcgccggcagtcgtcggctgcaaccacacacttggnatcgcacgtgcaatgtcctttgaattttttttaatacattaagagaaagagaaatatatatatatccacccccagcccaaccgagggcggcccttggcggmcaacatgcaagaaggagggactktcgaacccaagggctcaaagacgsacttttccacccttttggagcgattttagaacctcagccctatcttccatttncctancttgggtctttct

SEQ ID NO: 354 - DNA, 498 bp, Homo sapiens
tgaaacgagacgacaccaaggatacctacaaattaccgcacagattaatagaaaagaaaagaagagaccgaattaatgaatgcattgctcagctgaaagatttactgcctgaacatctgaaattgacaactctgggacatctggagaaagctgtagtcttggaattaactttgaaacacttaaaagctttaaccgccttaaccgagcaacagcatcagaagataattgctttacagaatggggagcgatctctgaaatcgcccattcagtccgacttggatgcgttccactcgggatttcaaacatgcgccaaagaagtcttgcaatacctctcccggtttgagagctggacacccagggagccgcggtgtgtccagctgatcaaccacttgcacgccgtggccacccagttcttgcccaccccgcagctgttgactcaacaggtccctctgagcaaaggcaccggcgctccctcggccgccgggtccgcggccgctc

SEQ ID NO: 355 - DNA, 1960 bp, Homo sapiens
tgccagggcaaaatgacaatcgcccatgaggggagacaatcaagagtacaccaaagacagaagctgaagtggagcaggcagcaggcaacccaaggaaggacaccacctaaatcaagagtgctcatgaaggcagccatgaagcagagggagttttagacgtttgcccaaaaccatctttcaactttcatagtctacttatttattctcctaccccacttcaaacctggtaggagagggcagaaacctctgttagcaagctgggggagaaggaaaaacatcagagaggaacagaggagagaaggaccgtgccctccttaccaagcctgcagccagccctcgctcgggaaaggaaggagtctcagtgaagtgtactgattcctattttggactgacacttgtaattctgaattaagactgtgtttgtgacttgcaatgtccataggactttttattaactgagagtgaccagaaaaggcacaagatgcctgagtttttgcccaggagcagaaaaagaactacccccgcggcacaaatttaaaggcacgaatggagataaaaataaagttgctctcataattatatcccaggaggcctacttgttcaacttactggtgacccatttgtcagagataagagcatcaggcatggcccaatctttgaattcaagagacaagacacatctgtttgactgaaacgtatggtggatgggattttaacctgcactctggcacttccacccatattgcaaatcacagaggtgattctggggacacagaagattatgacatgatttaaaaagttacatttctctaataaatagctgtcaaaatatcttccttttgaaaagaaaaagtgccatggggtctaattttatctctgcctatccttctttcttcctaacatccttcctcaaacccaggctcagattaagaaatatccaagttgtctcatatacaaatcccacagagtacctgggcccacagagtacctgggcccacagagtattccaagtgtcacctagcaatttcttcccactgactcttaggatctggaagtttctaaggaatatctcccaaacactaggtatgaaatcagaagtgtcatgaaataagagtcctgtgttacagagctttggatttgcaaagttggctgacttgttcatgcttgagagaactcagggtgaatggtgtaagaatctcaagggaaaactgtcttcattgataaaaaaaaattctaaagccgccattcagttcaagccaaaacacgtacaacagcagtagttattcaattccacttggttagataagtccttttcttctccagcatgatgagaaaagttcatgtcctttagttttcttgtggatatgaatgccattttatacatgtctaatggcatatggaattttaaacattcccagacatgcccaaattatttctttaagttgtctctacatgtggtcccaaagggtgaagaagaagtgaatgttggcaacaaattgtgggggaagactgaaaggttgcagaatcaaattgcagaattttccctggttttctccttttctggtgcaatgtcagcttcgaaggctacctttcctctcccctctgccagttttgaaggaactacccacacgggaaggaaggggacacgacgccccgctgtgttggctccccagcctcactattcccccagaagcccactcagccactgcccaaaaagtcaagctcccaagagtcctgctgcttctctccaagggaactggaaggagaaggacttccaccaggaagctccctgagcaacaccactgtcctcagagctctgcccgagactcccatctccttccttgcctcagagccaccctggcttcgagtcagccttccccttaccatcaaagtccactggagcaagtcactttcctcgtgccgaattcgatatcaagcttatcgataccgtcgacctcga

SEQ ID NO: 356 - DNA, 1045 bp, Homo sapiens
ggcacgagcggcacgagcagctttgctcaggaccatcagctgcagaacatggacaaggaagatgcactgatctgttttgaggagcacatccgagctttggagagggaagaggaggaggaacgggagcgggcccggcttcgggagcgacgccaacaacgcaagaatcgggaggccttccagaccttcctggacgagctgcatgagacagggcagctgcactctatgtccacctggatggagctatatccagcagtcagcactgatgtccgctttgccaacatgctgggccagccgggctccacccctctggacttattcaagttctatgtggaggagttgaaggcacgattccatgatgaaaagaagatcattaaggacatccttaaggaccggggcttctgcgtggaggtgaacacggcctttgaggacttcgcccacgtcataagctttgacaagagggctgccgcactggacgcaggcaacatcaagctgaccttcaatagtctgctggagaaagcagaggcacgggagagggagcgggagaaggaggaggcacgcaggatgcggcgcagggaagctgcctttcgaagcatgctgaggcaggctgtgcctgctctggagctaggcactgcctgggaagaggtccgtgagcgttttgtgtgtgactcagcctttgagcagatcaccctggagtcggagcggatccggctcttccgggagttcctacaggtgctggagactgaatgccagcacctccacaccaaaggccgaaagcatggcaggaaaggcaagaagcaccatcacaagcgttcccactcaccctcaggctctgagtcagaagaagaggagctgcccccaccatctctccggccccccaagcggaggaggcggaacccctcagagtcaggctctgagccctcttcctcacttgattcagttgaaagtgggggtgctgcccttggaggacggggctccccttcctcccatcttcttggagcagatcatggcttcggaaagccaagaaaccaaaaaaaaaaaaaaaaaa

SEQ ID NO: 357 - DNA, 2744 bp, Homo sapiens
gggtcgacccacgcgtccggcgtcgcctaggaaacgaccgggcgaagcgactgccgcctcctccgagatcaaagccctgcagcagacccggaggctcctggcgaacgccagggagcggacgcgggtgcacaccatcagcgcagccttcgaggcgctcaggaagcaggtgccgtgctactcatatgggcagaagctgtccaaactggccatcctgaggatcgcctgtaactacatcctgtccctggcgcggctggctgaccttgactacagtgccgaccacagcaacctcagcttctccgagtgtgtgcagcgctgcacccgcaccctgcaggccgagggacgtgccaagaagcgcaagttgtgacttttcttcctcctctgcgagcccgaaggccacctcattagtgctcctgacactgcggaacttttctttctcaaggctgttgtcactggggatggttgaaagtgactattttcctaagaaaacagctggaggggacatgggagcaagaaggtgcttgggagcgcatctcagtgttgaggctcaaaacaggcagcgccatggcagagtcattccgccgtcaccctgaataaaccccatgcacacagacgagaacaatgtctcctcagagggagggtctgggagaccggacaccatgcagagacccccatcagctcatcagagagcttcacggagatgttctgggaggacaatcacattcataaatacgccggtgcctcggctctgccgctgactgcagcatgacatgaagccttttttaagaactggctgctgccgccaaagccttctgggatatgtctgcctggaacctgggcacctcctgggagcagtcactgggtggcctgtcaggggctgtggggtcctggggcagggccggcaactggaagccagccctggggaggaaaggagagaagggcaaggctgggctgctttcctcacagcccctggacactgagggaggagctgagttgggcctggggctgccatgtgtcagacagtggtgatgtgatggggggacacaggtcagtggcagggtactgggagtttcccctttcctttctcagttctttgcacccattttccatgggctgcctccccagatccagaagccccagcagcccctcaccccagcagtggaaaaagcccgtcattgacacggctgtgggtggccggctttgcaaaagcctcacatttggggctttggagggctttttgcatttcatctttacacaggctcctgcacctcattcctcttgccctcctctcagctttcctcccacttccagttagagagatggcagctctggcaggaccaaatattgatgtttatcacagttttagggccatttgtctcaccatctgaagggctcagcgcaggcccacgggatcctctctccttgagtgacctctgggggcaggtatctggtttggatgctggagctggtccctactcttcccttgggggccgtgcggccgggtgctcaagtgttttaacctcaggaccctgattagttatcatgaagctaccccaccagctcctgggtctgttcatggattagtggcataaaggacgtaatattgttttgcaaaatctgctctccctcccatgtctcctgcccaagaagttggtcttcgtggggccaaaggcaaggaggacccgaggaaggaagaggaaccactgtccccagcccctggtatggcatggcgtcagcctagtgaccagaaattgcttttgaactctgaggcttccagaggacaagaggaagaggaggacagggctgccctgcccactgctcagccttgagccctgcacctggcacagtgcgaggcctcagacagggtgtcagcaggccctggctccccacatcccatccttaaacaggccatgccctttctacctgccccagcagaccagaaagcagtttccatgggaaacaacaaaccttccttgtgctcccaggataagtgtttctagagggcgaagtcgggagccattctctcctttaacatcttgccacctctgcccagaattcacagccaccggcgcctgtcttagctgccctggctgtcagccccaccagagcccctcctggctgctctgctgaaagctggtcagactgcctcactccatcccctacttagctcccctaaggcctagggggctccctacaggccaagggatgaggccagactcaatagaacacctgataggccccccaagtgacctggccctggccggtcactccctatgtcccaatttacaccccagcagcacagaactccttgctcaaaggggctatttttggcctctgtgctcatgccatcccttctgcctggaatgcccttctccactgtctgcctggctaactcctgctcattctggaaggctcagctcctcctgaaagccctccctgaccccaaccccagctccttcctcagggtgtcgtagcacagggatgcttttggtctaattcaggagagcatcatgtgatatgcttttaaagtaatgagttaaaatgttagacaatatgaaactctattatgtgatatattagatttcatgtcattacattgtattatattatatttttaggtggtatgctatgtgacataggatgcgatgtgatattacatcccatgacactatgttacacggtgttggattaaatgcctgtgtctctggctagactgtgaaaaaaaaaaaaaaaaaaaaaaaaaaaaa

SEQ ID NO: 358 - DNA, 1423 bp, Homo sapiens
  SITE (12): n equals a,t,g, or c
  SITE (32): n equals a,t,g, or c
  SITE (1272): n equals a,t,g, or c
  SITE (1369): n equals a,t,g, or c
ataggccccatngagcttgaaaaaaaggatcngctaatgaaaggcattaccaaaaccagaaaagkggcaccyartggccacytagcagcttttctttakggcttccagcctaaycamagatgtcggcctgtctgccmgtaacattgtgctgggcaagtatgagtctccaatyccagggctcagtgatgacccacctgagggggagatacctcttggcagcatgatctgaaactggacactactaaacatggtctgggaactaaatattggctatttcttgtacctgtgccccagattttacggagatccctcaaagactatgacaacaaagacatccttttctgtcgtgacactgtaaataaacactttcytttaaattccatttatttactaaaagtctctattctgtactttcctgtttgtctttgtttcacaatagatttctaaatttagtgatgaccatataactcatttcacttgattccaagtatcatcctgtaataacacatctgatattttaaagtttattattttcaaaagtttaaatttggtaacatggatagagacttgttatttgatcttacagattcaaggatcaataaataattkttcttcaaacatggtatttaaggaaaaatatccttatggtataaactttggtctacttcaataataaccacttaatataatgttctagagcagcgctgtccaatagaaatataatctgagccacatgtataattttattttcttctagccacattaaaaaagtaaaaagatacaagtagaactaattttaatgttttaattcagtatatccaaaatatcatttgaacatgtaattaatataaaattattaatgtgatattttacattcttttggtaatactagtcttcaaaatctggtatgtatcttacattgatagcacatctcactttgtactagccacattgcaagtgctcagtagccacatgtggctagtggctactgcactggacagcacagttctaggttccaccctaacacccaagtcctgtggattagaatcccagaatcagagctggaagtaaacatagagatcaaacctccttttaaaaatgaggacgctgaggcacagagtttaaatggcttgcatgaggtcatacagctaaattcagcctcaacagggtcttctgattccaggcactcttcccactccactacattactgtagtggtaattcttagggttaaaaaaagtgtagagtaggccgggcgcagtggctcatgccngtaaatcttatatgcagaggttaatccccaagatctagggcccaagatccttccttttctgtaaggaaagctgaaactcttttgactttctgagttntaagtaagaaatcatctcacttaaaattcatcttaaagtgctcaactgagcata

SEQ ID NO: 359 - DNA, 2211 bp, Homo sapiens
ggcacgaggcggaacgcaagcagccgagagcggagaggcgccgctgtagttaactcctccctgcccgccgcgccgaccctccccaggaacccccagggagccagcatgaagcgagctcaccccgagtacagctcctcggacagcgagctggacgagaccatcgaggtggagaaggagagtgcggacgagaatggaaacttgagttcggctctaggttccatgtccccaactacatcttcccagattttggccagaaaaagacggagaggaataattgagaagcgccgacgagaccggatcaataacagtttgtctgagctgagaaggctggtacccagtgcttttgagaagcagggatctgctaagctagaaaaagccgagatcctgcagatgaccgtggatcacctgaaaatgctgcatacggcaggagggaaaggttactttgacgcgcacgcccttgctatggactatcggagtttgggatttcgggaatgcctggcagaagttgcgcgttatctgagcatcattgaaggactagatgcctctgacccgcttcgagttcgactggtttcgcatctcaacaactacgcttcccagcgggaagccgcgagcggcgcccacgcgggcctcggacacattccctgggggaccgtcttcggacatcacccgcacatcgcgcacccgctgttgctgccccagaacggccacgggaacgcgggcaccacggcctcacccacggaaccgcaccaccagggcaggctgggctcggcacatccggaggcgcctgctttgcgagcgccccctagcggcagcctcggaccggtgctccctgtggtcacctccgcctccaaactgtcgccgcctctgctctcctcagtggcctccctgtcggccttccccttctctttcggctccttccacttactgtctcccaatgcactgagcccttcagcacccacgcaggctgcaaaccttggcaagccctatagaccttgggggacggagatcggagctttttaaagaactgatgtagaatgagggaggggaaagtttaaaatcccagctgggctggactgttgccaacatcaccttaaagtcgtcagtaaaagtaaaaaggaaaaaggtacactttcagataattttttttttaaagactaaaggtttgttggtttacttttttcttttttaatgtttttttcatcatgtcatgtattagcagtttttaaaaactagttgttaaattttgttcaagacattaaattgaaatagtgagtataagccaacactttgtgataggtttgtactgtgcctaatttactttgtaaaccagaatgattccgtttttgcctcaaaatttggggaatcttaacatttagtatttttggtctgtttttctccttgtatagttatggtctgtttttagaattaattttccaaaccactatgcttaatgttaacatgattctgtttgttaatattttgacagattaaggtgttgtataaataatattcttttggggggaggggaactatattgaattttatatttctgagcaaagcgttgacaaatcagatgatcagctttatccaagaaagaagactagtaaattgtctgcctcctatagcagaaaggtgaatgtacaaactgttggtggccctgaatccatctgaccagctgctggtatctgccaggactggcagttctgatttagttaggagagagccgctgataggttaggtctcatttggagtgttggtggaaaggaaactgaaggtaattgaatagaatacgcctgcatttaccagccccagcaacacaaagaatttttaatcacacggatctcaaattcacaaatgttaacatggataagtgatcatggtgtgcgagtggtcaattgagtagtacagtggaacctgttaaatgcataacctaattttcctgggactgccatattttcttttaactggaaatttttatgtgagttttccttttggtgcatggaactgtggttgccaaggtatttaaaagggctttcctgcctccttctctttgatttatttaatttgatttgggctataaaatatcatttttcaggtttattcttttagcaggtgtagttaaacgacctccactgaactgggtttgacctctgttgtactgatgtgttgtgactaaataaaaaagaaagaacaaaaaaaaaaaaaaaaaaa

SEQ ID NO: 360 - DNA, 439 bp, Homo sapiens
tcgacccacgcgtccggcagctgaaaggagtcgaaaggctccaccaattcctctaaaactgaagcctgattactggagtgacaaactacagaaagaagcagaagcgtttgcttattatcgccggacacacactgccaatgagcggcggcggcgtggtgaaatgagggatctctttgagaaattaaagatcacattgggattacttcattcttccaaggtttccaaaagtctcattcttactcgagccttcagtgaaattcagggactaacagatcaggcagacaaattgataggacagaaaaatctcctgactcgaaaacggaatattctgatacggaaagtatcgtctctttcaggtaagacagaagaagtggtcctgaagaagctagagtatatttatgcaaaacagcaagcactagaggcacaaaaaaaaaaaaaa

SEQ ID NO: 361 - DNA, 948 bp, Homo sapiens
ggcacgagcccaaatccattcggatccagcaatccctttaaatccaaaagtaatgatcggccgggtcacaagcgttttcgaacgcaaatgagcaatcttcaactcaaggttctcaaggcttgctttagtgactaccgaactccaaccatgcaagaatgtgaaatgttagggaatgagattggtctgcccaaacgcgtagtccaggtgtggttccaaaatgcaagggcaaaggaaaagaaatttaaaattaacatagggaagcctttcatgatcaatcaaggcggaacggaaggcaccaaaccagagtgtaccctctgcggggtgaagtactctgcccgcttgtccatcagagatcacattttctccaaacagcacatttcaaaagtgagggagaccgttggcagtcagctcgatcgggagaaagattacttggctccgaccacggttcggcagctgatggcacagcaagaacttgatcgtataaagaaagcttcagacgtgctgggcttgacggtacagcagccaggcatgatggacagcagttctctccacggcatcagcctgccaacagcctaccccggactccccggccttcctccagtccttctccccggaatgaacggtccatcctccttgccgggatttccacaaaattcaaacactttaacacctcccggtgcaggcatgcttgggtttcctacttcagctacttcgtctcctgccctgtctctcagcagtgcccccaccaaacctttgctgcagactccaccacctccaccacctcctcctcctcctcctccttcatcctctctgtcaggacagcagaccgagcaacagaacaaagaatctgagaaaaagcaaactaagccaaacaaggtgaaaaaaatcaaagaggaggaattagaggccaccaaacccgaaaaacaccccaaaaaaaaaaaaaaaaaa

SEQ ID NO: 362 - DNA, 667 bp, Homo sapiens
  SITE (342): n equals a,t,g, or c
gcggaaacagcgccgggagaggacgacgttcactcgggcgcagctagatgtgctggaagcactgwttgccaagacccggtacccagacatcttcatgcgagaggaggtggcactgaaaatcaacttgcccgagtcgagggtgcaggtatggtttaagaatcgaagagctaagtgccgccaacaacagcaacaacagcagaatggaggtcaaaacaaagtgagacctgccaaaaagaagacatctccagctygggaagtgagttcagagaagtggaacaagtgccaattcactcccccctctagcacctcagtcccgaccattgccagcagcagtgctcctgngtctatctggagcccagcttccatctccccactgtcagatcccttgtccacctcctcttctgcatgcagaggtcctatcccatgacctatactcargcttyaggttatagycaaggatatgctggctcaacttcctactttgggggcatggactgkggatcatatttgacccctatgcatcaccagcttcccggaccaggggccacactcagtcccatgggtaccaatgcagtcaccagccatctcaatcagtccccagcttctctttccacccagggatatggagcttcaaagctttggggttttaacttcaaccactgattgg

SEQ ID NO: 363 - DNA, 1096 bp, Homo sapiens
  SITE (615): n equals a,t,g, or c
  SITE (660): n equals a,t,g, or c
  SITE (946): n equals a,t,g, or c
ctactatagggaaagctggtacgcctgcaggtaccggtccggaattcccgggtcgacccacgcgtccgggaagggcatgatctaagtcctgttaccaccaccacgctgggtcggctgccctgactcttactcgcctctgatgtcaccctcaacttatagcctgctcagcctgaggctcctaaaagcctcaaaggctccaccccagaagggcgggcaggtccggacgcgctgggccctggtcccttcggccgcaaacggcgcaagtcacgcactgcgttcaccgcgcaacaggtgctggagctggagcggcgcttcgtcttccagaagtacctggcgccgtccgagcgagacgggctagctacgcgactcggcctggccaacgcgcaggtggtcacttggttccagaaccggcgagccaagctcaagcgcgatgtggaggagatgcgcgccgacgtcgcctcgctacgcgcgttgtccccggaagtcctgtgcagcttagcactgcccgagggcgctccagatcccggcctctgcctcggccctgccggccctgactcccggscccacctgtcagacgaggagatacaggtggacgattgaagacaaagccgccgncaatcctgggctctggggccctggactyctcacctcgcgctctgnctctggccagagttccagggtggaggaaggaggtccacttgggcctcttccggcccacagtccagacgctcacctttcccggtttttttgtaagtttgttttgttgtctgagacagggcctcgctctgtcgcccaggctggagtgccgtggagcgatcaccgctcactgcagtcgcgacctcctgggctcaagcgatcctcctgcctcaacctcccgactagctggcattacaggcgtgcagcaccaccccaggctaatttaaaaaacttttttttttagagaggnggtcccgctatgttgtccaggctactttcccaatatttgagaataaagtcgagactctgccgcaaaaaaaaaaaaaaaaaaaaaaaaaaaaaaaaaaaaaaaaaaagggcggccgctctagaggatccaagcttacgtacgcgtgcatgc

SEQ ID NO: 364 - DNA, 355 bp, Homo sapiens
  SITE (327): n equals a,t,g, or c
  SITE (338): n equals a,t,g, or c
  SITE (354): n equals a,t,g, or c
gccggttaccatggtaacctcccagggtcaggtggtcacccaagcaatcccccagggagccatccasatccakaacacacaggttaaccttgacctcacctccctcctggacaatgaggataagaagtccaagaacaaacgaggagtcttgcccaagcatgccaccaatataatgcgttcttggctcttccagcatctcatgcacccctaccccacggaggatgagaagaggcagatcgcagcccagaccaacctyaccctcctgcaagtaaacaactggttcatcaatgcccggaggcgcatcctgcagcccatgcttgatgccancaacccagatnctgcccccaaaagccna

SEQ ID NO: 365 - DNA, 894 bp, Homo sapiens
tgagaaagaagtgaccgagcccgaggtgagaatggtgaatggcaaaccaaagaaagttcgtaaacccaggactatttattccagctttcagctgccgcattacagagaaggtttcagaagactcagtacctcgccttgccggaacgcgccgagctggccgcctcgctgggattgacacaaacacaggtgaaaatctggtttcagaacaaaagatccaagatcaagaagatcatgaaaaacggggagatgcccccggagcacagtcccagctccagcgacccaatggcgtgtaactcgccgcagtctccagcggtgtgggagccccaggstcgtcccgctcgctcagccaccaccctcatgcccaccctccgacctccaaccagtccccagcgtccagytacctggagaactctgcatcctggtacacaagtgcagccagctcaatcaattcccacctgccgccgccgggctccttacagcaaccsctggcgctggcctccgggacactctattagatgggctgctctctcttactctcttttttgggactactgtgttttgctgttctagaaaatcataaagaaaggaattcatatggggaagttcggaaaactgaaaaagattcatgtgtaaagcttttttttgcatgtaagttattgcatttcaaaagaccccccctttttttacagaggactttttttgcgcaactgtggacactttcaatggtgccttgaaatctatgacctcaacttttcaaaagacttttttcaatgttattttagccatgtaaataagtgtagatagaggaattaaactgtatattctggataaataaaattatttcgaccatgaaaagcggaatgtttctgaaaaatacttcattctgcccctctg

SEQ ID NO: 366 - DNA, 759 bp, Homo sapiens
  SITE (467): n equals a,t,g, or c
  SITE (705): n equals a,t,g, or c
  SITE (752): n equals a,t,g, or c
aattcggcacgagctactgcagaaacaaagccagcaacagcagcagttccaacttctcaaagtgtcaaacatgaaactgcattggtaaaccctgattcatttggcattcgggcaaaaaagacaaaagagcaactggcagaattaaaagttagctaccttaaaaatcagtttccccatgattcagaaattatcagacttatgaaaataacaggcctgacgaaaggagagattaaaaaatggtttagtgacacaaggtacaaccagagaaattcaaagagtaatcagtgcttacatctcaacaatgattcctctaccaccattattatagactccagtgatgaaaccacggaatccccaactgttggtactgcacagcctaagcaatcctggaatccttttcctgactttactccccaaaagtttaaagagaaaactgcagagcgcttcgtgtccttcaggcargtttnctcaacagctctgtacttacagatgaagaattaaataggttaagggcacaaaccaaacttaccagaagagaaatcgatgcttggtttacagaggaaggaaggaaatcaaaagctttaaaagggaaggaggaaaatgggaaatagatggaaagtaattgccaggtagttcccaaggaagrarctggagaaacttctcctgcaggttggattcttgggtggcaccttaagttccaggggngttaccagggccagggttttgttaaaaataaccaccttgaggccggntggcacc

SEQ ID NO: 367 - DNA, 1695 bp, Homo sapiens
ggcacgagctaccaatcaaaatgggagggagaataatgagcgattatctacatccaatggaaagatgtcaccaactcgctaccatgcaaacagcatgggtcagaggtcatacagttttgaagcctcagaagaggacctagatgtagatgataaagtggaagaattaatgaggagggacagcagtgtgataaaagaggaaatcaaagcctttcttgccaatcggaggatttcccaagcagttgttgcacaggtaacaggtatcagtcagagccggatctctcattggctgttgcagcagggatcagacctgagtgaacagaagaaaagagcattttaccgatggtatcaacttgagaagacaaaccctggcgctacactaagtatgagaccagcccccattccaatagaggaccctgaatggagacaaacgcccccccagtctctgccacatctggtactttccgactgcgacgagggagtcgatttacctggagaaaggagtgcctggctgttatggaaagttacttcaatgagaatcaatacccagatgaagcaaagagggaagaaattgcaaacgcttgcaatgcagttatacagaagccaggcaaaaagctgtcagatctggaaagagttacctccctgaaagtatataattggtttgctaacagaaggaaggagatcaagaggagagccaatattgaagcagcaatcctggagagtcatgggatagatgtgcagagtccaggaggccactcaaacagtgatgatgtcgacgggaatgactactctgagcaggatgacagtacgagccatagtgaccaccaagaccccatctcattagctgtggaaatggcagcagtcaaccacactatcttggcattggcccgacaaggagccaacgaaatcaagacagaggccctggatgatgactgatcagggaggttaaacatgacaagttaacttagtttagacgtagcaccttagcagactttcctcggtccttaacatgtgttcttacagtataacttgcagtttcttgtatgtcaggtagctgttagggtcttgttctgtgaagatggcatggtgccctcagcctttgcatatactctctcagtattaactcccagtaaataataaccaaccaaccaaccaaacttccctctcccagcccccgaggctagaaaatcttgctgctccgtcttagcattccaagaaagtgcttccaggtatttagatagccctcagttctcaaatattagactacgtgtaaaatcttgggtacctttagattcttgtaacactagtctgtactcccttttccttccccaagactgataggatgcaagctgaggtcgtggcacaggaatgacagacaccatttggggagtatccacagagtcaaaggaacactagaatccccacctcagcgtgaggataattgatttccagctgcaataagccgtgcctcattatagccacactgtggctagattatacttctttgggtgctgtgctaagaatgtcaatggaaaaagccgatctcagattttgtttgaagttaacatgcctgacacagacatcctttcctctcacaagctgtgtgacttagtagataaaatactgccttctgcctttgggaccatgattaaaaacaaagacaaaaaccaaaagtcattaaaaaaaaaaaaaaaaaaa

SEQ ID NO: 368 - DNA, 713 bp, Homo sapiens
  SITE (669): n equals a,t,g, or c
  SITE (699): n equals a,t,g, or c
gcggccgctccaacatcaggcgctccagccatggcgcgttcgctcgtccacgacaccgtgttctactgcctgagtgtataccaggtaaaaataagccccacacctcagctgggggcagcatcaagcgcagaaggccatgttggccaaggagctccaggcctcatgggtaatatgaaccctgagggcggtgtgaaccacgagaacggcatgaaccgcgatggcggcatgatccccgagggcggcggtggaaaccaggagcctcggcagcagccgcagcccccgccggaggagccggcccaggcggccatggagggtccgcagcccgagaacatgcagccacgaactcggcgcacgaagttcacgctgttgcaggtggaggagctggaaagtgttttccgacacactcaataccctgatgtgcccacaagaagggaacttgccgaaaacttaggtgtgactgaagacaaagtgcgggtttggtttaagaataaaagggccagatgtaggcgacatcagagagaattaatgctcgccaatgaactacgtgctgacccagacgactgtgtctacatcgtcgtggactagccctagaatgccatccttcttcaggagctagtttggagatgggtttttctggtgccactgacacctgggctgcccatgccgctnaggctacccttatctcctctgcacttatgntatcaataaagagg

SEQ ID NO: 369 - DNA, 690 bp, Homo sapiens
ggcacgagggcgagctttgcgttccctgtgcgccggaagtgatcccctgcgtggctgggctgctcgggttagatcgtcaggaaaagcctaaagattagactgtaagaaaagaaaatagaagccatgtttcgaagacctgtattacaggtacttcgtcagtttgtaagacatgagtccgaaacaactaccagtttggttcttgaaagatccctgaatcgtgtgcacttacttgggcgagtgggtcaggaccctgtcttgagacaggtggaaggaaaaaatccagtcacaatattttctctagcaactaatgagatgtggcgatcaggggatagtgaagtttaccaactgggtgatgtcagtcaaaagacaacatggcacagaatatcagtattccggccaggcctcagagacgtggcatatcaatatgtgaaaaaggggtctcgaatttatttggaagggaaaatagactatggtgaatacatggataaaaataatgtgaggcgacaagcaacaacaatcatagctgataatattatatttctgagtgaccagacgaaagagaaggagtagaaaggatgattcttctttggccatcatttggtacagtctcatttccaagtcatgtataatctttatggcttccaaggacaagaattaaaatactcttttacgtaaaaaaaaaaaaaaaaa

SEQ ID NO: 370 - DNA, 773 bp, Homo sapiens
cggatctaagtacaattaaacaaagactggaaaacaggttttacaggcgggtttcttccctaatgtgggaagttcgatatatagagcataatacacgaacatttaatgagcctggaagccctattgtgaaatctgctaaattcgtgactgatcttcttctacattttataaaggatcagacttgttataacataattccactttataattcaatgaagaagaaagttttgtctgattctgaggatgaagagaaagatgctgatgtgccaggaacttctactcgaaaaaggaaggaccatcagcctagaagaagattacgtaatagagcccagtcttacgatattcaagcatggaagaaacagtgtgaagaattgttaaatctcatatttcaatgtgaagattcagagcctttccgtcagccggtagatctccttgaatatccagactacagagacatcattgacactccaatggattttgctaccgttagagaaactttagaggctgggaattatgagtcaccaatggagttatgtaaagatgtcagacttattttcagtaattccaaagcatatacaccaagcaaaagatcaaggatttacagcatgagtttgcgcttgkctgcattctttgaagaacacattagttcagttttatcagattataaatctgctcttcgttttcataaaagaaataccataaccaaaaggaagaagaatctgaaaaacagaagcaaaaacagattaaaaaggaaaagaaaaaagtaaatgaag

SEQ ID NO: 371 - DNA, 2832 bp, Homo sapiens
  SITE (7): n equals a,t,g, or c
  SITE (13): n equals a,t,g, or c
  SITE (18): n equals a,t,g, or c
  SITE (100): n equals a,t,g, or c
  SITE (101): n equals a,t,g, or c
  SITE (2789): n equals a,t,g, or c
  SITE (2790): n equals a,t,g, or c
  SITE (2791): n equals a,t,g, or c
  SITE (2792): n equals a,t,g, or c
  SITE (2793): n equals a,t,g, or c
  SITE (2794): n equals a,t,g, or c
  SITE (2795): n equals a,t,g, or c
  SITE (2796): n equals a,t,g, or c
  SITE (2797): n equals a,t,g, or c
  SITE (2798): n equals a,t,g, or c
  SITE (2799): n equals a,t,g, or c
  SITE (2800): n equals a,t,g, or c
  SITE (2801): n equals a,t,g, or c
  SITE (2802): n equals a,t,g, or c
  SITE (2803): n equals a,t,g, or c
  SITE (2804): n equals a,t,g, or c
  SITE (2805): n equals a,t,g, or c
  SITE (2806): n equals a,t,g, or c
  SITE (2807): n equals a,t,g, or c
  SITE (2808): n equals a,t,g, or c
  SITE (2809): n equals a,t,g, or c
  SITE (2810): n equals a,t,g, or c
  SITE (2811): n equals a,t,g, or c
  SITE (2812): n equals a,t,g, or c
  SITE (2813): n equals a,t,g, or c
  SITE (2814): n equals a,t,g, or c
  SITE (2815): n equals a,t,g, or c
  SITE (2816): n equals a,t,g, or c
  SITE (2817): n equals a,t,g, or c
  SITE (2818): n equals a,t,g, or c
  SITE (2819): n equals a,t,g, or c
  SITE (2820): n equals a,t,g, or c
  SITE (2821): n equals a,t,g, or c
  SITE (2822): n equals a,t,g, or c
  SITE (2823): n equals a,t,g, or c
  SITE (2824): n equals a,t,g, or c
  SITE (2825): n equals a,t,g, or c
  SITE (2826): n equals a,t,g, or c
  SITE (2827): n equals a,t,g, or c
  SITE (2828): n equals a,t,g, or c
  SITE (2829): n equals a,t,g, or c
ttctgancgcagnccgtntggaaaaccctactaaagggaacaaaagctggagctccaccgcggtggcggccgctctagaactagtggatcccctggtttnnaggaattcggcacgaggtcaagggctatggaacacacctgatgaatcatttgaaagaatatcacataaagcatgacatcctgaacttcctcacatatgcagatgaatatgcaattggatactttaagaaacagggtttctccaaagaaattaaaatacctaaaaccaaatatgttggctatatcaaggattatgaaggagccactttaatgggatgtgagctaaatccacggatcccgtacacagaattttctgtcatcattaaaaagcagaaggagataattaaaaaactgattgaaagaaaacaggcacaaattcgaaaagtttaccctggactttcatgttttaaagatggagttcgacagattcctatagaaagcattcctggaattacacttctcattcagtgtttcactttgttgacgtataggagagacaggctggaaaccgagtggaaaagagaaaagtaaagagcccagagaccctgaccagctttacagcacgctcaagagcatcctccagcaggtgaagagccatcaaagcgcttggcccttcatggaacctgtgaagagaacagaagctccaggatattatgaagttataaggttccccatggatctgaaaaccatgagtgaacgcctcaagaataggtactacgtgtctaagaaattattcatggcagacttacagcgagtctttaccaattgcaaagagtacaacccccctgagagtgaatactacaaatgtgccaatatcctggagaaattcttcttcagtaaaattaaggaagctggattaattgacaagtgattttttttcccctctgcttcttagaaactcaccaagcagtgtgcctaaagcaaggtggtttagttttttacaaagaattggacatgatgtattgaagagacttgtaaatgtaataattagcacttttgaaaaaacaaaaaacctccttttagcttttcagatatgtatttaaattgaagtcataggacatttttattttatggaatagattttaatctatttactactattaaggtagattttctatggcatgtccattagctatttcatgatagatgattaggggtttcctcaaaacctgtgtgtgaggaaattgcacacagtagcaaaatttggggaaatccataacattttcagaccatgaatgaatgtttccatttttttctaatggaatgtgagagtttatttttattttattctgaaggactttaaggaagggatacatgattttaaaaaagcctgtaagaggtgaaatatgtgatgtttgaagtctctttatagactttttatatatattttttaaaacactcatctagatgaggtgctttgagcagttctgaaaaatgcagttccaggaaagcaactgctttggttcctaaggaagaaattctaaataatgcaaacttttaaaataagcatctaggtttttgataattctgtctacttacaacaaacttgttagtacataaccactattttaataattattttctctacacaaatgtgtaatatcatatttgactttgcttatgcaggccataagttccaaaagataatttccctgcccacaaaggcataaacttgaaaacacatgagattgaatcaacatgctttaataggaaaagatgtatggtctatatatgtatcaatctggtgaatcctcgttctaataaaggttctttttcttttctatgatacacacagccacgctgataatatgcaaatgaacattttcctttatgtctctccagataatgtttattgtctgaggtaaattaaattcccaccagggtttgctgtcagtattttaacacccacattagtatatgcgtccagggtcataaccccctaaaatccatcatgcaaccttattaatctgtcttgggattccagtttagtgcttggatttatttcctgattacactacatagaaaagtgagacatctgccattcccaactctgggaaaaccaactaatatacaaccatataaatgaaggccatcttgatggtctcaacactaatttttatgatgcaaatttatacactgatttttgtaaaggacaaagttttaaaagcgtatttaacttgatgttttctatcagcataaataaaatggtcatgaatagtcattaaaaacagttgccagtgataatctgcatgaaggaaaaagaaccctgcaaatggctattgagttggaagtattgtttttgatatgtaagagatattcagaatgctcacactgaaaatgcctcaactttttaaagtgtaagaaaccaccatgagtggtgtctagatttctaatgaagaatcatgatacagtttggattaagtatcttggactggttttaaacagtgctttgtaccggatctgctgaagcatctgtccagctggtatcctgtgaaagtttgttattttctgagtagacattcttatagagtattgtctttaaaatcagattgtctcttctatattgaaagcatttttatgttttctaatttaaaaattaatattttcttatagatattgtgcaataaagctgaagtagaatgtgtggtttttgcaaatgctttaacagctgataaaaattttacatttgtaaaattaatatattgtactggtacaaaatagttttaaattatattttaaaaagcttcaannnnnnnnnnnnnnnnnnnnnnnnnnnnnnnnnnnnnnnnnaaa

SEQ ID NO: 372 - DNA, 746 bp, Homo sapiens
  SITE (387): n equals a,t,g, or c
  SITE (646): n equals a,t,g, or c
  SITE (665): n equals a,t,g, or c
  SITE (736): n equals a,t,g, or c
tctccaaccccagcaagcccggccgcaagaccaaccagctgcagtacatgcagaatgtggtggtgaagacgctctggaaacaccagttcgcctggcccttctaccagcccgtggacgcaatcaaattgaacctgccggattatcataaaataattaaaaacccaatggatatggggactattaagaagagactagaaaataattattattggagtgcaagcgaatgtatgcaggacttcaacaccatgtttacaaattgttacatttataacaagcccacagatgacatagtgctaatggcccaagctttagagaaaatttttctacaaaaagtggcccagatgccccaagaggaagttgaaattattaccccctgctccaaagggncaaaggtcggaagccggctgcgggagcccagagcgcaggtacacagcaagtggcggccgtgtcctctgtctccccagcgaccccctttcagagcgtgccccccaccgtctcccagacgcccgtcatcgctgccacccctgtaccaaccatcactgcaaacgtcacgtcggtcccagtccccccagctgccgccccacctcctcctgccacacccatcgtccccgtggtccctcctacgccacctgtcgtcaagaaaaanggcgttgaacggaaagcanacacaaccactcccacgacttcgggcatcactgccagcggagtgagtcgccccgccgttgtcagacccaancaagccaaat

SEQ ID NO: 373 - DNA, 2653 bp, Homo sapiens
acctttttaccatttgccttcaaagaaaaaataccctgattattaccagcaaattaaaatgcccatatcactacaacagatccgaacaaaactgaagaatcaagaatatgaaactttagatcatttggagtgtgatctgaatttaatgtttgaaaatgccaaacgctataatgtgcccaattcagccatctacaagcgagttctaaaattgcagcaagttatgcaggcaaagaagaaagagcttgccaggagagacgatatcgaggacggagacagcatgatctcttcagccacctctgatactggtagtgccaaaagaaaaagtaaaaagaacataagaaagcagcgaatgaaaatcttattcaatgttgttcttgaagctcgagagccaggttcaggcagaagactttgtgacctatttatggttaaaccatccaaaaaggactatcctgattattataaaatcatcttggagcccaatggacttgaaaataattgagcataacatccgcaatgacaaatatgctggtgaagagggaatgatagaagacatgaagctgatgttccggaatgccaggcactataatgaggagggctcccaggtttataatgatgcacatatcctggagaagttactcaaggagaaaaggaaagagctgggcccactgcctgatgatgatgacatggcttctcccaaactcaagctgagtaggaagagtggcatttctcctaaaaaatcaaaatacatgactccaatgcagcagaaactaaatgaggtctatgaagctgtaaagaactatactgataagaggggtcgccgcctcagtgccatatttctgaggcttccctctagatctgagttgcctgactactatctgactattaaaaagcccatggacatggaaaaaattcgaagtcacatgatggccaacaagtaccaagatattgactctatggttgaggactttgtcatgatgtttaataatgcctgtacgtacaatgagccggagtctttgatctacaaagatgctcttgttctacacaaagtcctgcttgaaacacgcagagacctggagggagatgaggactctcatgtcccaaatgtgactttgctgattcaagagcttatccacaatctttttgtgtcagtcatgagtcatcaggatgatgagggaagatgctacagcgattctttagcagaaattcctgctgtggatcccaactttcctaacaaaccaccccttacatttgacataattaggaagaatgttgaaaataatcgctaccgtcggcttgatttatttcaagagcatatgtttgaagtattggaacgagcaagaaggatgaatcggacagattcagaaatatatgaagatgcagtagaacttcagcagttttttattaaaattcgtgatgaactctgcaaaaatggagagattcttctttcaccggcactcagctataccacaaaacatttgcataatgatgtggagaaagagagaaaggaaaaattgccaaaagaaatagaggaagataaactaaaacgagaagaagaaaaaagagaagctgaaaagagtgaagattcctctggtgctgcaggcctctcaggcttacatcgcacatacagccaggactgtagctttaaaaacagcatgtaccatgttggagattacgtctatgtggaacctgcagaggccaacctacaaccacatatcgtctgtattgaaagactgtgggaggattcagctggtgaaaaatggttgtatggctgttggttttaccgaccaaatgaaacattccacctggctacacgaaaatttctagaaaaagaagtttttaagagtgactattacaacaaagttccagttagtaaaattctaggcaagtgtgtggtcatgtttgtcaaggaatactttaagttatgcccagaaaacttccgagatgaggatgtttttgtctgtgaatcacggtattctgccaaaccaaatcttttaagaaataactgtggaccatgcccatcagctcatcaggtttgtccctcgggatgtgcctctgcctgtggttcgcgtggcctctgtatttgcaaatgcagataaaggtgatgatgagaagaatacagacaactcagaggacagtcgagctgaagacaattttaacttggaaaaggtatgcagataatagccacacagaaaaaattttacatctcaaaacacctattccagaaaataaatgaattaagtattcaaacttagaaaaagagcaacaacacaaaaccttagccaaacaggaagaaggaaactataacagaaagaaatttacactttcaaaactgtacattataatttaaaagtaaatcaggccaagtgcattggttcacgcctgtagtcccagcattttgggaggccaaggcgggcagatcacgagatcaggagttcgagaccagcctgaccaacatggtgaaacctcatctctactaaaaatacaaaaattagctgggtgtggtggcgcgtgcctgtaattccagctacccaggaggctgaggcaggagaatggcgtgaacctgggaggcggaggctgcagtgagctgagaccacgccactctactccagcctgggcaacagagtgagtctctgtctcaaaaaaaaaaaaaaaa

SEQ ID NO: 374 - DNA, 1829 bp, Homo sapiens
  SITE (1823): n equals a,t,g, or c
tgatagtctgtttcaatgctacaatgttcaatgaagaagaaagttttgtctgattctgaggatgaagagaaagatgctgatgtgccaggaacttctactcgaaaaaggaaggaccatcagcctagaagaagattacgtaatagagcccagtcttacgatattcaagcatggaagaaacagtgtgaagaattgttaaatctcatatttcaatgtgaagattcagagcctttccgtcagccggtagatctccttgaatatccagactacagagacatcattgacactccaatggattttgctaccgttagagaaactttagaggctgggaattatgagtcaccaatggagttatgtaaagatgtyagacttattttcagtaattccaaagcatatacaccaagcaaaagatcaaggatttacagcatgagtttgcgcctgtctgctttctttgaagaacacattagttcagttttatcagattataaatctgctcttcgttttcataaaagaaataccataaccaaaaggaggaagaaaagaaacagaagcagctctgtttccagtagtgctgcatcaagccctgaaaggaaaaaaaggatcttaaaaccccagctaaaatcagaaagctctacctctgcattctctacacctacacgatcaataccgccaagacacaatgctgctcagataaacggtaaaacagaatctagttctgtggttcgaaccagaagcaaccgagtggttgtagatccagttgtcactgagcaaccatctacttcttcagctgcaaagacttttattacaaaagctaatgcatctgcaataccagggaaaacaatactagagaattctgtgaaacattccaaagctttgaatactctttccagtcctggtcaatccagttttagtcatggcactaggaataattctgcaaaagaaaacatggaaaaggaaaagccagtcaaacgtaaaatgaagtcatctgtactcccaaaggcgtccactctttcaaagtcatcagctgtcattgagcaaggagattgtaagaacaacgctcttgtaccaggaaccattcaagtaaatggccatggaggacagccatcaaaacttgtgaagaggggacctggaaggaaacctaaagtagaagttaataccaatagtggtgaaattatacacaagaaaaggggtagaaagcccaaaaagctacagtatgcaaagccagaagatttagagcaaaataatgtgcatcccatcagagatgaagtacttccttcttcaacatgcaattttctttctgaaactaataatgtaaaggaagatttgttacagaaaaagaatcgtggaggtaggaagcccaaaaggaagatgaagacacaaaaattagatgcagatctcctagtccctgcaagtgtcaaagtgttaaggagaagtaaccgaaaaaagatagatgatcctatagatgaggaagaagagtttgaagaactcaaaggctctgaaccccacatgagaactagaaatcaaggtcgaaggacagctttctataatgaggatgactctgaagaggagcaaaggcagctgttgttcgaagacacctctttaacttttggaacttctagtagaggacgagtccgaaagttgactgaaaaagcaaaagctaatttaattggttggtaacttgtaccaaaatattttacttcaaaatctataaagcaggtacagttaaggaataagtagaactaaggcttctgcttccttgctgctgtggtggagtagggaatgttatgatttgatttgcaaaaaaaaaaaaaaaaaaaaaaaaaaangggggg

SEQ ID NO: 375 - DNA, 1205 bp, Homo sapiens
  SITE (1083): n equals a,t,g, or c
  SITE (1105): n equals a,t,g, or c
  SITE (1200): n equals a,t,g, or c
cgaaacctgkcttactgaacagtaacaataaggagcaggatggacggaatgatttctactgctgggtttgwcaccgggaaggccaagtcctttgctgtgagctctgtccccgggtttatcacgctaagtgtctgagactgacatcggaaccagagggggactggttttgtcctgaatgtgagaaaattacagtagcagaatgcatcgagacccagagtaaagccatgacaatgctcaccattgaacagttatcctacctgctcaagtttgccattcagaaaatgaaacagccagggacagatgcattccagaagcccgttccattggaacagcaccctgactatgcggaatacatcttccatccaatggacctttgtacattggaaaagaatgcgaaaaagaaaatgtatggctgcacagaagccttcctggctgatgcaaagtggattttgcacaactgcatcatttataatgggggaaatcacaaattgacgcaaatagcgaaagtagtcatcaaaatctgtgaacatgagatgaatgaaatcgaagtatgtccagaatgttatctagctgcttgccaaaaacgarataactggttttgtgagccttgtagcaatccacatcctttggtctgggccaaactgaaggggtttccattctggcctgcaaaagctctaagggataaagacgggcaggtcgatgcccgattctttggacaacatgacagggcctgggttccaataaataattgctacctcatgtctaaagaaattcctttttctgtgaaaaagactaagagcatcttcaacagtgccatgcaagagatggaggtttacgtggagaacatccgcagaagtttggggtttttaattactctccatttaggacaccctacacacccaacagccagtatcaaatgctgctcgatcccaccaaccccagcgccggcactgccaagatagacaagcaggagaaggtcaagctcaactttgacatgacggcatcccccaagatcctgatgagcaagcctgtgctgagtgggggcacargccgscggatttccttgttcggatatggccgcgntcccccatggaggcacaaattnttctgtggcacacggggttccgacgtgggagcagggtgttggaggaaggaagggccacgttcgagccattttcagttgcgaggcgagggattccntggga

SEQ ID NO: 376 - DNA, 1350 bp, Homo sapiens
gcacgagtgtgagctcttcattagggcaccaaagcgaagaaatcaaccagactattatgaagtggtttctcagcccattgacttgatgaaaatccaacagaaactaaaaatggaagagtatgatgatgttaatttgctgactgctgacttccagcttctttttaacaatgcaaagtcctattataagccagattctcctgaatataaagccgcttgcaaactctgggatttgtaccttcgaacaagaaatgagtttgttcagaaaggagaagcagatgacgaagatgatgatgaagatgggcaagacaatcagggcacagtgactgaaggatcttctccagcttacttgaaggagatcctggagcagcttcttgaagccatagttgtagctacaaatccatcaggacgtctcattagcgaactttttcagaaactgccttctaaagtgcaatatccagattattatgcaataattaaggagcctatagatctcaagaccattgcccagaggatacagaatggaagctacaaaagtattcatgcaatggccaaagatatagatctcctcgcaaaaaatgccaaaacttataatgagcctggctctcaagtattcaaggatgcaaattcaattaaaaaaatattttatatgaaaaaggctgaaattgaacatcatgaaatggctaagtcaagtcttcgaatgaggactccatccaacttggctgcagccagactgacaggtccttcacacagtaaaggcagccttggtgaagagagaaatcccactagcaagtattaccgtaataaaagagcagtacaaggaggtcgtttatcagcaattacaatggcacttcaatatggctcagaaagtgaagaagatgctgctttagctgctgcacgctatgaagagggagagtcagaagcagaaagcatcacttcctttatggatgtttcaaatcctttttatcagctttatgacacagttaggagttgtcggaataaccaagggcagctaatagctgaacctttttaccatttgccttcaaagaaaaaataccctgattattaccagcaaattaaaatgcccatatcactacaacagatccgaacaaaactgaagaatcaagaatatgaaactttagatcatttggagtgtgatctgaatttaatgtttgaaaatgccaaacgctataatgtgcccaattcagccatctacaagcgagttctaaaattgcagcaagttatgcaggcaaagaagaaagagcttgccaggagagacgatatcgaggacggagacagcatgatctcttcagccacctctgatactggtagtgccaaaaaaaaaaaaaaaaa

SEQ ID NO: 377 - DNA, 2706 bp, Homo sapiens
  SITE (90): n equals a,t,g, or c
  SITE (442): n equals a,t,g, or c
  SITE (2694): n equals a,t,g, or c
  SITE (2703): n equals a,t,g, or c
cggtttggccctaccgggaaagttggtacgcctgccggtaccggtccggaattcccgggtcgacccacgcgtccgggtactcccagtagnaccaccacctgagccaagatcactgacagcagaagaagtgaaacgactagaasaacaagaagaagatacatttagagaactgaggattttcttaagaaatgttacacataggcttgctattgacaagcgattcckagtgtttactaagcctgttgaccctgatgaggttcctgattatgtcactgtaataaagcaaccaatggacctttcatctgtaatcagtaaaattgatctacacaagtatctgactgtgaaagactatttgagagrtattgatctaatctgtagtaatgccttagaatacaatccagatagagatcctggagatcggcttattaggcatagagcctgngctttaagagatactgcctatgccataattaaagaagaacttgatgaagactttgagcagctctgtgaagaaattcaggaatctagaaagaaaagaggttgtagctcctccaaatatgccccgtcttactaccatgtgatgccaaagcaaaattccactcttgttggtgataaaagatcagacccagagcagaatgaaaagctaaagacaccgagtactcctgtggcttgcagcactcctgctcagttgaagaggaaaattcgcaaaaagtcaaactggtacttaggcaccataaaaaagcgaaggaagatttcacaggcaaaggatgatagccagaatgccatagatcacaaaattgagagtgatacagaggaaactcaagacacaagtgtagatcataatgagaccggaaacacaggagagtcttcggtggaagaaaatgaaaaacagcaaaatgcctctgaaagcaaactggaattgagaaataattcaaatacttgtaatatagagaatgagcttgaagactctaggaagactacagcatgtacagaattgagagacaagattgcttgtaatggagatgcttctagctctcagataatacatatttctgatgaaaatgaaggaaaagaaatgtgtgttctgcgaatgactcgagctagacgttcccaggtagaacagcagcagctcatcactgttgaaaaggctttggcaattctttctcagcctacaccctcacttgttgtggatcatgagcgattaaaaaatcttttgaagactgttgttaaaaaaagtcaaaactacaacatatttcagttggaaaatttgtatgcagtaatcagccaatgtatttatcggcatcgcaaggaccatgataaaacatcacttattcagaaaatggagcaagaggtagaaaacttcagttgttccagatgatgatgtcatggtatcgagtattctttatattcagttcctatttaagtcatttttgtcatgtccgcctaattgatgtagtatgaaaccctgcatctttaaggaaaagattaaaatagtaaaataaaagtatttaaactttcctgatatttatgtacatattaagataaatgtcatgtgtaagataactgataaatattggaactttgctagaacaagaccctgtagtaatagtaataatagttgaagtttggccaactcttaataaagttattttggtaactaatgttttatggcacttaagaataattagcagcgttaaattttgtttgtattaagcacttttaattttatccttcctaaaaatagtttattgtatctgacaagaaacttacttaaccattgtgtccttcccatcttttttgtcatctttgttttcttcaaatgccctcctcccatctgccttgagattccctygtcttcacttaaaagccagagtgcaagtcatgatttgcgggagggctcttgaaccacttctggctgcaccacaattctgtacttgagtatcacagtcattgtttttgagacaaacatttttataattctaatttgggttaataaagattttaaatatttcttggtttacttttgtaattatatacacaacaaatgtattaataactaccttgttaaacaccttttaatagcacaaggtttttatatttgcaagctgttgatatctttctaaaactgtttaggttatagtctattgatactttttatatacaattttataaatataaatattataattttatattaatggtaccaaaaatacatttcttaaggttaaaagcatgcacttccatgcatacttgcttttggggagagtggggagaagacattctaataatcagtttgtgaaatagcttctgttggaaaccttttgaggggaataaggaatggtcatctaaaatgagagattctggattttaatgcagttcaaagttgagctgtatttttgttgttgatttatctggattttttttaaagccttctaaaacccagtgaattcaataccttaattagtacatactatcttatgtaatgcataaagcaatgccagtcactgagaacatttaaatatatttatattcctggagatacacattctcatttttgttggtttattataaattattcttctagatgcatcttttataactaggatttcattttgtgtgtatagcttatgtaataaattttaaaggtgaaaactctcaaaaaaaaaaaaaaaaaaagggggggccgccccaagnggcccaagntta

SEQ ID NO: 378 - DNA, 1303 bp, Homo sapiens
  SITE (414): n equals a,t,g, or c
ggtcgacgtggtccatatctgtgtaacgaaagatatatagatgtgtatggctactgtatatttgtaagcaagcggaatgttcattactaatataaattaggaattatggtgtgtttaacatcccaataactattattcatggcagagcgttaattttaaatgatttttcatgtattatagtactgccaaatcwgtcgaaagggagataatgaagaactgcttcttctttgtgatggctgtgacaaaggctgtcatacctactgccatagacccaagattacaacaatcccagatggagactggttttgtccagcttgcattgctaaggcaagtggtcaaactctaaaaatcaaaaaacttcatgtcaaaggaaaaaagactaatgagtcaaagaaaggcaagaaggtaactttnaacaggagatactgaagatgaagactctgcatctacaagtaattcactaaaaagaggaaacaaagacctcaagaaaagaaaaatggaggaaaacacttctattaacttgtcaaaacaagaaagttttacttcagttaagaaacctaaaagagatgactccaaggacctagctctttgcagtatgattctgactgaaatggaaactcatgaggatgcatggccttttctacttcctgtaaacttgaaacttgttcctggttataagaaagttattaagaagcctatggatttttccacaattagagagaaactaagtagtggacagtatccaaaccttgaaacctttgctctagatgtcaggcttgtttttgacaactgtgaaacatttaatgaagatgattctgatataggcagagctggccacaatatgaggaagtattttgaaaaaaagtggacagatactttcaaagtgagctgaagttataataatctctttatttttttccttctaaacaaggacaaatgagaccagcaatgtgaactgtatttacataaacgtgcaaggcacatacataatgactttctttttccttaagtataaaaaaaaagtatcagaagaatgataccmtttttaaaggcttcattyctwcamccaaccaaggccctcggttattggtttgtgtgatttatcagctaatttaggtagaacagggaagcacacccaaagaattttcaaaggaaagggtgttatagtgcaatagcaattaaaatatatcaaatcgcmctgaatactcaacaccagagctytaatgtgggaaatggttttcctttccctctcaataaatatttatttttcattttaaaaaaaaaaaaaaaaaaaaaaaaaaaa

SEQ ID NO: 379 - DNA, 1351 bp, Homo sapiens
ggcacgagagagagagagagagagagaggacaaacacctctacgaggagccccgattttaatcgacgcgctttcctttcttttcttttctttttttaagagtatgtagagaagcccttgaagctggtcctcaaagtaggagggaacgaagtcaccgaactctccacgggcagctcggggcacgactccagcctcttcgaagacaaaaacgatcatgacaaacacaaggacagaaagcggaaaaagagaaagaaaggagagaagcagattccaggggaagaaaaggggagaaaacggagaagagttaagtgcgaatttgaaagaagaaaaccagatggaacaacgacgttgggacttctccatcctgtggatcccattgtaggagagccaggctactgccctgtgagactgggaatgacaactggaagacttcagtctggagtgaatactttgcaggggttcaaagaggataaaaggaacaaagtcactccagtgttatatttgaattatgggccctacagttcttatgcaccgcattatgactccacatttgcaaatatcagcaaggatgattctgatttaatctattcaacctatggggaagactctgatcttccaagtgatttcagtcattgcctgaagatgaaggccatactaggacacttgacacagcaaaagaaatggagattacagaagtagagccaccagggcgtttggactccagtactcaagacaggctcatagcgctgaaagcagtaacaaattttggcgttccagttgaagtttttgactctgaagaagctgaaatattccagaagaaacttgatgagaccaccagattgctcagggaactccaggaagcccagaatgaacgtttgagcaccagaccccctccgaacatgatctgtctcttgggtccctcatacagagaaatgcatcttgctgaacaagtgaccaataatcttaaagaacttgcacagcaagtaactccaggtgatatcgtaagcacgtatggagttcgaaaagcaatggggatttccattccttcccccgtcatggaaaacaactttgtggatttgacagaagacactgaagaacctaaaaagacggatgttgctgagtgtggacctggtggaagttgaggctgcctggtatttgattatatattatgtacatactttttcattcttaacttagaaatgcttttcagaagatattaaatatttgtaaattgtgtttttaattaaactttggaacagcgaatttggatgttccagaggttggacttgtattaggtaataaagctggacctgggaaaaaaaaaaaaaaaaaaaaaaaaaaaaaaaaaaaaa

SEQ ID NO: 380 - DNA, 906 bp, Homo sapiens
gggctgcaggaattcggcacgagggaggaccagggtgaagtatatgtgtcagagatggaagaccagcccccttcaggcgagtgtgatgatgcctttaacattaaggagactcccttggtggatacacttttcagccatgctacctcctcaaagctgactgatctaagccaggatgaccctgttcaggatcatttgctatttaagaagactctcctgccagtctgtaagatgattgccagtcacaggttcagcagtccatttctgaagcctgtgtcagaaaggcaggccccagggtacaaggatgtggtgaaaagacccatggacttaactagcctgaagagaaatctctctaagggtcggattcgcaccatggcccaattcctgcgagacctgatgctgatgttccaaaatgctgtaatgtacaatgactctgatcatcatgtataccatatggctgtggagatgcggcgagaagtcctggagcagattcaggtactgaatatctggttagacaaaagaaaaggctcaagtagtctggaaggagaaccagctaacccagtagatgatggaaaacctgttttctaacctggagctgctatcctgactttttctagagtttgaatctctcccggaactctgacctagagaggatcctggtacttctttgccatgtcctcattttcttttccaacaagaataataccttaactcacaaccaacgagtcaaagatgcatgtggacataatataaagaaaaaaaggggaagctgaggtttggatttatgccataaatgttgcccacatctttgttccatcggcttgatttaaagacaattccattagatcttttctaagccttttactctataaataaatgtatttacacaataaaaaaaaaaaaaaaaaa

SEQ ID NO: 381 - DNA, 802 bp, Homo sapiens
gggtcgacccacgcgtccgcccaaactcaagctgagtaggaagagtggcatttctcctaaaaaatcaaaatacatgactccaatgcagcagaaactaaatgaggtctatgaagctgtaaagaactatactgataagaggggtcgccgcctcagtgccatatttctgaggcttccctctagatctgagttgcctgactactatctgactattaaaaagcccatggacatggaaaaaattcgaagtcacatgatggccaacaagtaccaagatattgactctatggttgaggactttgtcatgatgtttaataatgcctgtacgtacaatgagccggagtctttgatctacaaagatgctcttgttctacacaaagtcctgcttgaaacacgcagagacctggagggagatgaggactctcatgtcccaaatgtgactttgctgattcaagagcttatccacaatctttttgtgtcagtcatgagtcatcaggatgatgagggaagatgctacagcgattctttagcagaaattcctgctgtggatcccaactttcctaacaaaccaccccttacatttgacataattaggaagaatgttgaaaataatcgctaccgtcggcttgatttatttcaagagcatatgtttgaagtattggaacgagcaagaaggatgaatcggtatgttttcaaagccattttcattttgaggatatgtgctatttaatacaaaacagatgaaagaaaaaaaaaaaaaaaaaaaaaaaaaaaaaaaaaaaaaaaaaaaaaaaaaaaaaaaaaaaaa

SEQ ID NO: 382 - DNA, 793 bp, Homo sapiens
  SITE (758): n equals a,t,g, or c
  SITE (763): n equals a,t,g, or c
gtggtgaaatgcaacttcaatgtggaggaggccctgcgaaggctgcggttcaacgtgaaggtgatccgagatgggctctgtgcttggagtgaagaggagtgcaggaactttgagcacggcttccgtgtgcatggaaagaactttcacctgatccaggccaacaaggtgcgcacacggtcagtgggcgagtgtgtcgagtactactacctgtggaagaagtcggagcgctacgactacttcgcccagcagacgcggctgggccggaggaagtacgtcccgtccggaaccacggacgcagaccaggacctggwtggcagcgaccccgatggccccggccgtccgcgcccggagcaagacaccctgactgggatgcgcacagatccactgagcgtggatggcacggccggtggtctcgatgagcccggagtggcctctgatggactcccgtcctcggagccagggccgtgttccttycagcagctggatgagtcccccgctgtacccctgtcccatcggcccccagccctggccgacccagcctcataccagccagctgtcactgctccggagycagacgccagcccaaggctggccgtggacttcgccctgcccaaggagctgcccctcatctccagccatgtggacctcagcggggatccggagggagactgtggccccagcacaggtggctttgtcggtcaccgaatttggactcatcggcattggggacttgaacccttcctggccgcccacccacntgccngccccgggctacactcggacccctgtcaca

SEQ ID NO: 383 - DNA, 248 bp, Homo sapiens
aaggggtccttttggcgaatagaccctgcctctraagccaagctcgtggaacaggcattccggaaacggaggcakaggggtgtctcctgcttccscacccccttcgggcctctgtcctcaaggagcgctccagcttcgcccacacaccccgggctgatgtcccctcgctccggcggactgcagaccccaragtgcctgtytcgggaagggctcccccattccacacgaccctragtttgggtccaagt

SEQ ID NO: 384 - DNA, 449 bp, Homo sapiens
  SITE (448): n equals a,t,g, or c
  SITE (449): n equals a,t,g, or c
ccataaatggaagcaggggatgtggtccaaggaagaaattgatattttgatgaacaatattgaacgctatcttaaggcacgcggaataaaagatgctacagaaatcatctttgagatgtcaaaagacgaaagaaaagatttctacaggactatagcatggggtctgaaccggcctttgtttgcagtttatagaagagtgcktcgcatgtatgatgacagaaaccatgtgggaaaatatacacctgaagaaattgagaagctcaaggagctccggataaagcatggcaatgactgggcaacaataggggcggcgctaggaagaagtgcatcttctgtcaaagatcggtgccgactgatgaaggatacttgcaacacagggaagtggacagaagaagaagaaaagagacttgcagaagtggttcatgagttgacaagcactgagccaggnn

SEQ ID NO: 385 - DNA, 806 bp, Homo sapiens
  SITE (633): n equals a,t,g, or c
gggggttttttttttttttyttytytgaaaaaggtagtgcccttcgtgacttccctgtcccttcccttggcttctccgaggcctggccaccggcagacccaggggcgttggactcgtggctccggagatgaggatgtcactggccgactcattggcctgtagtgtctgcgtggctttgactgccgctgcccgcctgctgcgctctcgcccctcttcctgctcctccttctcttggatctctggcacctcctcctccccctccttcctgggctccttcacctccctcttgggctccagcctctcttcacttggggactctcttctgggaagaggcacccttgggaacttttgggaagtcttaatatccacttcaacctcttcctgggccgacttctcatcgctcgtatccacatccccaaaggttagagtcccattgcggccgattttcacctgcttcttgtaggtgtagtagaactccacgcactgggccacggtcttggtctggatcagcttctgcaccaggaagaaatccttcttgtagatggcaatgcctttgttgaacagcttcctctcggccatcttccactggtcagagcctgtgtagtgataagttgccagcggatggttgtgggnccgcaggggcttcttcagcagcagcttattcagcgtttccaggatgtctcctctggattcgtgcagacagtgcagggccagctcctggttggtgccagcaccagggaaaatgctggagcaggcggctgtcagcaggtcttccactggatccacaggagcatgaggagggaggg

SEQ ID NO: 386 - DNA, 1642 bp, Homo sapiens
  SITE (1539): n equals a,t,g, or c
gggcagtggttggaagaattccatacgacataatctgtcattgaacaaatgtttccttaaagtgcctcgatctaaggatgaccctggaaaggggtcctactgggcaatagacaccaatccgaaggaagatgcgctgcctactcggccaaagaagagggcacgatctgtagaacgggcctcaactccatatagcatagattcagattctttgggaatggagtgtattatttcgggaagtgcctctccaactctggcaatcaacactgtgacyarcwaagtaacattgtataacactgatcaggatggtagtgatagcccacgcagtagccttaacaacagtctctcagaccagagtttggcatctgttaatttgaacagtgttggaagtgtgcatagttatacaccggtgacaagccatccagaatcagtctctcaatcattaactcctcagcagcaaccacagtacaacctttcagaaagagacaagcaactacttttctyagaatataattttgaagatcttagtgcctcatttcggagcctttataagtcagtttttgagcagtcacttagtcaacaaggtttgatgaacaycccttctgaatcttcccagcagtcccacacttcatgtacctatcagcactctyccagcagtacagtgagcactcacccacacagcaaccaaagcagcctgtccaacagtcatggcagtggcctcaacaccacaggcagtaattcggttgcacaggtctcactgtctcacccccagatgcacccacagccatctccacatcctccccatcgaccgcatggtttaccgcagcatccgcagcgttccccacacccagcaccacacccacagcaacacagccagctccagtcccctcacccccagcatccctctccacatcaacacatacagcaccatccgaaccatcagcatcagacgttaacacatcaggcacccccacccccacaacaggtatcctgtaattctggtgtttcaaatgattggtatgcgacacttgatatgctaaaagaaagctgtcgaattgccagcagtgttaattggtcagatgtagacctttcacagtttcaaggtctgatggagagtatgagacaggcagatctcaagaactggtctttagaccaggttcagtttgccgatctttgttcttctcttaatcagttctttacacaaactggccttatacattcacagagtaatgttcaacaaaatgtttgtcatggtgccatgcatccaacaaaaccttcccaacacattggaacaggaaatttgtacatagattctaggcaaaatctccctccttcagtgatgccaccccctggttatcctcatatcccacaggcactcagcactccaggaacaacgatggcaggccatcacagagccatgaaccagcagcacatgatgccttcccaagccttccagatgcsgcgttccctgcctccagatgacatccaggatgactttgattgggattcaattgtgtagggcttgtttctgcaagacaccanaccctaacgttacctttctgtgcagtgtagggaaaggtttaagagaatccagttgagaatacaaacttgctaatcactttaccaatgttatcaaattactttt

SEQ ID NO: 387 - DNA, 1195 bp, Homo sapiens
  SITE (3): n equals a,t,g, or c
  SITE (242): n equals a,t,g, or c
  SITE (1130): n equals a,t,g, or c
  SITE (1151): n equals a,t,g, or c
  SITE (1160): n equals a,t,g, or c
  SITE (1169): n equals a,t,g, or c
ggncggtttatggcggctccatattaacaccctcctcctcctcctccgccgccgccgtctcctcctcctcctcctctccctcccgcccgcactcgtaagccatctcccccttcaccctgacgcctaccgcttcccctcacctttccccctcccctcttctaccatgcccggcatgatggagaaagggcccgagttactggggaagaatcgatcggccaacgcagcgccaagagcccggcggnttcggcggcggcggcgcttcatccaccaacggcggggcaytactcmgagcccgagagcggctgcagyagcgamgacgagcacgatgttgggatgagagtcggagccgaataccaagctcggatccctgaatttgatccaggtgctacaaagtacacagataaagacaatggagggatgcttgtatggtctccatatcacagtatcccagatgccaaattggatgaatacattgcaattgcaaaggaaaagcatggctacaatgtggaacaggcacttggcatgttgttctggcataaacataacattgagaagtcccttgctgatctccctaatttcactccctttccggatgagtggacagtggaagataaagtcctatttgaacaagcctttagytttcatggaaagagctttcacaggattcagcaaatgcttccagataagacaattgcaagccttgtaaaataytactattcttggaaaaaaactcgctctaggacaagtttgatggatcgccaggctcgtaaactagctaatagacataatcagggtgacagtgatgatgatgtagaagaaacacatccaatggatgggaatgatagtgattatgatcccaaaaaagaagccaaaaaagaggtaatgatgatcactagaagtacttgtgattgttctacaaatctgctgaaaaagaatgaacagtacttcgtattaagaaaaactttttaatgtaatgctttatgagatagtaaatttcagtgttaattagcaatacagtcatacctagaaccccagttaaccaagttgttggaaagttggaaaataccgttggaaactgggaaaaagatctgagtttggtttaaacttagcattggccagttatggtgacntcattccagtttagtgacccncattcttcnggaaggaancccatggccctggggcccttccatca

SEQ ID NO: 388 - DNA, 852 bp, Homo sapiens
  SITE (621): n equals a,t,g, or c
  SITE (834): n equals a,t,g, or c
  SITE (836): n equals a,t,g, or c
atttattgtcgcggggaagctgcggccgcctcgcacccggaacaacaaagcaaggaagacggagtccgagcctcgggggctcctagcaacgggccggggcgggagttccatggagactggggagcgcgcccgtctcatcctcatccttgtcctccagcttctccttcgcatccgacgcaaccggcagcagcgctgccgccgcgtcctcagccaccgctccctcttcccacggatgtgatcttcgtggtggaaagctaaattttaaaaccaccccaatggatgcagacagtgatgttgcattggacattctaattacaaatgtagtctgtgtttttagaacaagatgtcatttaaacttaaggaagattgctttggaaggagcaaatgtaatttataaacgtgatgttggaaaagtattaatgaagcttagaaaacctagaattacagctacaatttggtcctcaggaaaaattatttgcactggagcaacaagtgaagaagaagctaaatttggtgccagacgcttagcccgtagtctgcagaaactaggttttcaggtaatatttacagattttaaggttgtaacgtttggcagtgtgtaacatgccatttgaaatccgnttgccagaattcacaaagaacaatagacctyatgccagttacgaacctgaacttcatcctgctgtgtgctatcggataaaatctctaagagctacattacagattttttcaacaggaagtatcacagtaacaggtattctatgatattgaaaccacacttatcaattatggattgaatgatacaagatgctcataccaaaataaaataatgtngnattggtcccttccaag

SEQ ID NO: 389 - DNA, 514 bp, Homo sapiens
cgtaatcatcccgcagcggcatgtagcccagctgctgctgctcagccacagagatgtccagcgggggcagcggggtggtgaggctgggtgagagggggcctccgctgggacaggtgtggtctgtcacgcggttggggatggtgtcggggatgcaggccttccccaggttcccgtggatgtacatgctcacgtaatgctccatcacctcttggggagtccgggaagcaccaacgtgggcagccatatcttcccagtttccgaagccgaactgctcgatggcgtccagcagcagctgctcctcgcgactggtccagccgccctcggcctcgggcccccagagcgtgaagcgcccgccgtccaccagctggtagccgtggtagcggcggtggtggccgatctcggcgccggccgagaagcactcggggcacagctcgatgtcctggcactcggtgcagcggaagcgcagcgggctcwcctcggccaggcagtacacgcagtacttcttccccagctc

SEQ ID NO: 390 - DNA, 463 bp, Homo sapiens
gagatctataactggttcaccaggatgttcgcctatttccgcagaaacactgccacctggaagaacgccgtgcgccacaacctcagcctgcacaagtgcttcgtccgcgtggagaacgtcaagggtgccgtgtggactgtggacgagcgggagtatcagaagcggagaccgccaaagatgacagggagccccaccctggtgaagaacatgatctctggcctcagctatggagcacttaatgccagctaccaggccgccctggccgagagcagcttccccctcctcaacagccctggcatgctgaaccctggctccgccagcagcctgctgcccctcagccacgatgacgtgggtgcccccgtggagccgctgcccagcaacggsagctagcagcctcctygsctctycccgscccartacarccaccargtgcaggtgaaggargagccagcagaagcagagg

SEQ ID NO: 391 - DNA, 1405 bp, Homo sapiens
  SITE (1386): n equals a,t,g, or c
  SITE (1392): n equals a,t,g, or c
caacaatcacagcagtttggatctgaccacgacatgtgtctcctcctctgcaccttccaagacctccttaataatgaacccacatgcctctaccaatggacagctctcagtccacactcccaaaagggaaagtttgtcccatgaggagcacccccatagccatcctctctatggacatggtgtatgcaagtggccaggctgtgaagcagtgtgcgargatttccaatcatttctaaaacatctcaacagtgagcatgcgctggacgatagaagtacagcccaatgtagagtacaaatgcaggttgtacagcagttagagctacagcttgcaaaagacaaagaacgcctgcaagccatgatgacccacctgcatgtgaagtctacagaacccaaagccgcccctcagcccttgaatctggtatcaagtgtcactctctccaagtccgcatcggaggcttctccacagagcttacctcatactccaacgaccccaaccgcccccctgactcccgtcacccaaggcccctctgtcatcacaaccaccagcatgcacacggtgggacccatccgcagcggtactcagacaaatacaacgtgcccatttcgtcagcagatattgcgcagaaccaagaattttataagaacgcagaagttagaccaccatttacatatgcatctttaattaggcaggccattctcgaatctccagaaaagcagctaacactaaatgagatctataactggttcacacgaatgtttgcttacttccgacgcaacgcggccacgtggaagaatgcagtgcgtcataatcttagtcttcacaagtgttttgtgcgagtagaaaacgttaaaggggcagtatggacagtggatgaagtagaattccaaaaacgaaggccacaaaagatcagtggtaacccttcccttattaaaaacatgcagagcagccacgcctactgcacacctctcaatgcagctttacaggcttcaatggctgagaatagtatacctctatacactaccgcttccatgggaaatcccactctgggcaacttagccagcgcaatacgggaagagctgaacggggcaatggagcataccaacagcaacgagagtgacagcagtccaggcagatctcctatgcaagccgtgcatcctgtacacgtcaaagaagagcccctcgatccagaggaagctgaagggcccctgtccttagtgacaacagccaaccacagtccagattttgaccatgacagagattacgaagatgaaccagtaaacgaggacatggagtgactatcggggcgggccaaccccgagaatgaagattggaaaaaaaaaaaaaaaaaaccccgggggtttttttaarrgggccgggggccctgntttttnccccggggggggg

SEQ ID NO: 392 - DNA, 805 bp, Homo sapiens
  SITE (5): n equals a,t,g, or c
  SITE (36): n equals a,t,g, or c
  SITE (789): n equals a,t,g, or c
gtctncgggggcataaggggcaacggaatsttctmngtaaagtcctttcacttgtaagaacccattgtacaaagttcaaggctaagagttctgaattctggcgtcagcttcctcaggattttcttcagttgcaagtacctttccactgaaaatatgagcatgcccgcctggctagtaggcatctgtaagagtgtcgccaggcccgcgccagctgaggcctcagactagccaggcaagagccgtctgaccagttggctggcggtggttctggtggagcacgagggagcccgggtggtgccctgagcctcgagctgctctctgtcactgtcttgaatcagactcagaaatggcttcttcccagccctgcctacaagtttttctctggggtcctctttcaaggatgtccacggtaccttcctcctgaaacttgaggaagtcttttgtcttccagctgctcagggttctctggtccaagaccctgctttaaagagagtctttggcgtgctcagactccagcgctccgttcttcaaggaggttgacttgcctctcgggccccgtaggtaccaagagactgtttacctcccagaatgtttgggcttgaagttacattaaagtgaagttatttgaaagaaagaaaacctcatcatttctaaggatgacttaattactgtgccttttcctttctttttacacatcctactgtcccttagggtaaaattttcagcattaaataaaacatttcaaatataaaaaaaaaaaaaaaaaaaaactcgagggggggcccgtanccaattcgccctatag

SEQ ID NO: 393 - DNA, 1387 bp, Homo sapiens
  SITE (1379): n equals a,t,g, or c
  SITE (1380): n equals a,t,g, or c
agcctggttagcagtcgctttctgatcccggaaaggaccctgagctgggaaatagcgagaggcggggatgttggggattttaaaacttatgtagatcaggcatgtagagctgctgaggagtttgtcaatatttactatgagacaatggataaaagaagacgggcactaaccaggctgtatctggacaaggccaccttaatatggaatggaaatgctgtttcagggctggatgccctaaataatttttttgacacattgccttctagtgagttccaggtcaatatgttagattgccaaccagttcatgagcaagcaactcagtcccaaactacagttcttgttgtgaccagtggaactgtgaagtttgatggaaacaaacaacatttcttcaaccagaacttcctgctgactgctcagtccactcccaacaatactgtgtggaagattgcaagtgattgcttccgttttcaagattggtctagtagttaaaggggcaaaagtccattctcatttggtccattagttccagcaattgaaatttatgtgaattattttgattgtagaagcactataatatgtgctgaaactaaatttctttaatattttctattcctgtcagcaccttttctagcagctgccagtttggagcattgccctctaagagctttaaaactatttttttacatgccttatatacattccactaatgacattcttataataatattaaacacatgatcttggtactaacatactcactgtgaacccagcctattgcaaaaataaaatctttttataatattatctatgggatgtcagcacaatataacactctgggaagaagtggagttttttggttattaggttaattttctagtaaaacacgttgcctgttttcagttaacactggtaatgccattttaatatatggctttttcaaatcagttcagtgaaaatagtacagatttaggtttacataactactctgacatactggaattgcatatagagatgttcagtggtcgtttttcattttaagtaatttttgttttggcatttttttgtgtgaagtaaattaatcaactagagaggtgcaaaacgttctcagttgatatctgagtattgggtgcatttggkggcttaaaagcaaagcttcctaaaaagatttttcttggcagctccaggtctatacatttaggtaatgaatggtagtagaactaatagctttaacaggagaatagggaatgagaaatagaaatccaaggctgaagccaaaagtaaggagggtggccaaatggtaaactattggtacttgttttctacctcctaaaaatgtagcttatttataggrgtagggcmattccctttsttcccgtganngaaggga

SEQ ID NO: 394 - DNA, 864 bp, Homo sapiens
  SITE (1): n equals a,t,g, or c
  SITE (7): n equals a,t,g, or c
  SITE (9): n equals a,t,g, or c
  SITE (15): n equals a,t,g, or c
  SITE (31): n equals a,t,g, or c
  SITE (837): n equals a,t,g, or c
  SITE (853): n equals a,t,g, or c
  SITE (863): n equals a,t,g, or c
ngtcctntncggggntcttaacgggggactnaacggaaataccctggtggagccctccttccatagaaccagagatggcatctgtggatttcaagacctatgtggatcaggcctgcagagctgctgaggagtttgtcaatgtctactacaccaccatggataagcggcggcgtttgctgtcccgcctgtacatgggcacagccaccctggtctggaatggcaatgctgtttcaggacaagaatccttgagtgagttttttgaaatgttgccttccagcgagttccaaatcagcgtggtagactgccagcctgttcatgatgaagccacaccaagccagaccacggtccttgttgtcatctgtggatcagtgaagtttgaggggaacaaacaacgggacttcaaccagaacttcatcctgaccgcccaggcctcacccagcaacacagtgtggaagatcgcaagtgactgcttccgcttccaggactgggccagctagtgggggtggcagaggtctctttgcttcattcagccctagctctgtagagaaatgcaaacctcgactctcaaggatgtgaggaacacaagttcatttctgttgttgcggagacactgcagactccactgtgccgaggttgaactcttttttgttgctcaagttctaggagtccctttcctgaatatatacttgtttgtcatagtttccttttcaaagtagtaaacttttctatttttctacttgcccagtagagactctgattctggaaattctgacaaataatttaataatacacatgttgcttcttaaaaaaaaaaaaaaaaaaaaaaaaagggcggcngctctagaggatccangcttacgtang

SEQ ID NO: 395 - DNA, 456 bp, Homo sapiens
  SITE (167): n equals a,t,g, or c
  SITE (177): n equals a,t,g, or c
  SITE (382): n equals a,t,g, or c
  SITE (450): n equals a,t,g, or c
caatatggctgcgttgggatctgttcaccttcaggctgagtcgagactgaggtgaaaaagcggaaaaacgcgagaaaaggtttccccgttgtacagaggctagagtgaggctcggctgaatcggttgcaggcgttggtgcctctgtcagcgtccaggtcactgccgntcccgccccnctcttccctggctgtgctggcggaggctgcgccgatgaacctgactgaggattatatggtttttgaggacgtggccatacatttctcccaggaggagtggggaattcttaatgacgttcagagacacctgcacagcgatgtgatgctggagaactttgcacttttgtcctcagtaagttgttggcatggagccaaggatgaagangcaccttccaagcaatgtgtttctgtaagagtgtcacaagtcacaactttaaagccagctttgtccanccagaa

SEQ ID NO: 396 - DNA, 629 bp, Homo sapiens
  SITE (24): n equals a,t,g, or c
  SITE (64): n equals a,t,g, or c
ggggccctgcttactctacccagntgagtgacccgtagtccagcagcagcctaccccagtgacnccgaaaaaataccctcttcggcagactcgttcatctggttcagaaactgagcaagtggttgatttttcagatagagaaactaaaaatacagctgatcatgatgagtcaccgcctcgaactccaactggaaatgcgccttcttctgagtctgacatagacatctccagccccaatgtatctcacgatgagagcattgccaaggacatgtccctgaaggactcaggcagtgatctctctcatcgccccaagcgccgtcgcttccatgaaagctacaacttcaatatgaagtgtcctacaccaggctgtaactctctaggacaccttacaggaaaacatgagagacatttctccatctcaggatgcccactgtatcataacctctcagctgacgaatgcaaggtgagagcacagarccgggataagcagatagaagaaaggatgctgtcttcacaggcaagatgacaacaacaggcatgcaaccaggcaccaggcaccaacggagaggcagctttcgattataagggaaaagttggcttgaacttcagggaagaaaagaaattcttgg

SEQ ID NO: 397 - DNA, 1720 bp, Homo sapiens
  SITE (411): n equals a,t,g, or c
gcttgagaaagaaacagcccctttgaggaaagatgcagatagttcaatatcagtcttagagatccatagtcaaaaagcacaaatagaggaacccgatcctccagaaatggaaacttctcttgattcttctgagatggcaaaagatctctcttcaaaaactgctttatcttccaccgagtcgtgtaccatgaaaggtgaagagaagtctcccaaaactaagaaggataagcgcccaccaatcctagaatgtcttgaaaagttagagaagtccaaaaagacttttcttgataaggacgcacaaagattgagtccaataccagaagaagttccaaagagtactctagagtcagaaaagcctggctctcctgaggcagctgaaacttctccaccatctaatatcattgaccactngtgagaaactagcctcagaaaaagaagtgggtagaatgccagagtacaagtactgttggtggccagtctgtgaaaaaagtagacytrgaaaccctaaaagaggrttctgagttcmcaaaggtwgraatggrtaatctggacmatgcccagacctctggcatagaggagccttctgagacaaagggttctatgcaaaaaagcaaattcaaatataagttggttcctgaagaagaaaccactgcctcagaaaatacagagataacctctgaaaggcagaaagagggcatcaaattaacaatcaggatatcaagtcggawaaagaagcccgattctccccccaaagttctagaaccagaaaacaagcaagagaagacagaaaaggaagaggagaaaacaaatgtgggtcgtactttaagaagatctccaagaatatctagacccactgcaaaagtggctgagatcagagatcagaaagctgataaaaaaagaggggaaggagaagatgaggtggaagaagagtcaacagctttgcaaaaaactgacaaaaaggaaattttgaaaaaatcagagaaagatacaaattctaaagtaagcaaggtaaaacccaaaggcaaagttcgatggactggttctcggacacgtggcagatggaaatattccagcaatgatgaaagtgaagggtctggcagtgaaaaatcatctgcagcttcagaagaggaggaagaaaaggaaagtgaagaagccatcctagcagatgatgatgaaccatgcaaaaaatgtggccttccaaaccatcctgagctaattcttctgtgtgactcttgcgatagtggataccatactgcctgccttcgccctcctctgatgatcatcccagatggagaatggttctgcccaccttgccaacataaactgctctgtgaaaaattagaggaacagttgcaggatttggatgttgccttaaagaagaaagagcgtgccgaacgaagaaaagaacgcttggtgtatgttggtatcagtattgaaaacatcattcctccacaagagccagacttttctgaagatcaagaagaaaagaaaaaagattcaaaaaaatccaaagcaaacttgcttgaaaggaggtcaacaagaacaaggaaatgtataagctacagatttgatgagtttgatgaagcaattgatgaagctattgaagatgacatcaaagaagccgatggaggaggagttggccgaggaaaagatatctccaccatcacaggtcatcgtgggaaagacatctctactattttggatgaagaaagaaaagaaa

SEQ ID NO: 398 - DNA, 614 bp, Homo sapiens
  SITE (548): n equals a,t,g, or c
tctacattgatgggacttttggtcgcggtggtcactcacgtctgatcctctcgcagcttggcgaagaggggcgtttgctggcgatcgatcgcgacccgcaggctatcgccgttgcgaagactattgatgatccgcgcttctccatcatccacggacctttctccgcgctgggcgaatacgttgccgagcgcgatcttatcggcaagatcgacggcattctcctcgatcttggcgtctcttcaccgcaacttgatgatgctgaacgtggcttttcctttatgcgcgatggtccgctggacatgcgtatggacccaacccgtgggcagtcagccgctgaatggctacaaaccgcagaagaagccgatatcgcctgggtattgaaaacctatggtgaagagcgttttgccaaacgcattgcccgcgccattgtcgagcgtaaccgcgaacagccgatgacccgcaccaaagaactggcggaagtcgtggctgctgcaacgccgtgaatatataagtttaaacatcccgcgacccgtaccttccaggcggtncgcatttgggtaaacagtgaactggaggagatacagcaggcgctaaaaagctcgctcaacgtgctg

SEQ ID NO: 399 - DNA, 363 bp, Homo sapiens
  SITE (353): n equals a,t,g, or c
acctggaggcggacatgttggtgagttgagccgccggacaaggggaaaagagctcggggggcgggttcggcaccattcatattcttccgctcggtaggaggtgaggacacgaccctcaaccgttgctcctgtagcttccgagtcctggtggtgtcggccaagttcgaggggaaaccgctgcttcagagacacaggctggtgaacgcgtgcctagcagaagagctcccgcacatccatgcctttgaacagaaaaccctgaccccagaccagtgggcactgagcgacagaaatgagggatgggatctgcacagccattaaatataaatctgggaaaaaaaaaaaaaaaaaattcnggggggggcc

SEQ ID NO: 400 - DNA, 405 bp, Homo sapiens
tgacccgagcgtttataacgatgccattcgtgggcaacatttgctggcaatgaaagccctgcggcagaaattcggcattaatgaaaacmtgacgcacgtagaaaaaggtctgccagaagaggtgattcctgatttggcggacacttacaggcggggattgtggttctgggcacggtaggacgcaccggtatttcagcagcattcctcggcaacacggcggaacaggtgattgatcatcttcgctgcgacctgctggtcattaaacctgaccagtatcagacacccgttgaactggatgacgaagaagacgattaacgactcttcaataamtgacaaggcccgakttatcgggccwattttttacttactgctcttcgccgccaaggaaataaattcccaacggga

SEQ ID NO: 401 - DNA, 889 bp, Homo sapiens
  SITE (398): n equals a,t,g, or c
  SITE (765): n equals a,t,g, or c
  SITE (811): n equals a,t,g, or c
ttgaagtgggctgtgtttgaggccggtgtaagaacgctcattctacccccaacccttgtctccaaggacctcggtttgtgcgtgcatatgtgccgggtacccggtggggcgggtgccagtaagtgctcggactcgcaggggaagcgcccacggggacggattggttgttttttcctgtatgaagcggttggcaccactgaagtgaccgaatgaggagccactggaagtgggaaatggtctgtacaatatgtcaagaagagtattcagaagctcccaatgaaatggttatatgtgacaagtgtggccaaggatatcatcagttgtgtcacacacctcatattgattccagtgtgattgattcagatgaaaaatggctctgtcggcagtgtgtttttgcnacaacaacaaagaggggtggtgcacttaagaaaggaccaaatgccaaagcattgcaagtcatgaagcagacattaccctatagtgtggcagaccttgaatgggatgcaggtcataaaaccaatgtccagcagtgttactgctattgtggaggccctggagactggtatttgaagatgctacagtgctgcaaatgtaagcagtggtttcatgaggcttgtgtgcaatgccttcaaaagccaatgctatttggagacagattttatacgtttatatgctctgtctgcagttctggaccagaatacctcaaacgtctaccmttacagtgggtagatatagcacacctatgccttacaacctaagtgttantcctaagaagaatactttgattctgaacttgagcttatgacatacntaatgaaaactgggatagattgcaccctggagagctggcagacacaccaaaatctgaaagatatgagcatgttctgga

SEQ ID NO: 402 - DNA, 487 bp, Homo sapiens
  SITE (450): n equals a,t,g, or c
  SITE (470): n equals a,t,g, or c
gtaaaatgatgcggtgtgtccgctgccccgttgcctatcacagcggggatgcttgtctggcagcaggatgctcagtgatcgcctccaacagcatcatctgcactgcccacttcactgctcggaaggggaagcgacaccacgcccacgtcaacgtgagctggtgcttcgtgtgctccaaaggggggagccttctgtgctgtgagtcctgcccagcggccttccaccctgactgcctgaacatcgagatgcctgacggcagctggttctgcaatgactgcagggctgggaagaagctgcacttccaggatatcatttgggtgaamttgggaactacagatggtggccggcagaagtttgccatcccaaaaatgttcccccaaatattcagaaaatgaagcacgagattggagaattccctgtgtttttctttgggtctaaagattattactnggacgcatcaggcgcgagtnttcccgtacatggaggg

SEQ ID NO: 403 - DNA, 634 bp, Homo sapiens
  SITE (513): n equals a,t,g, or c
  SITE (615): n equals a,t,g, or c
  SITE (622): n equals a,t,g, or c
  SITE (627): n equals a,t,g, or c
ggcacgaggttttaaaaaattcattagaagggactttttgcttgatgaagctaatggtcttttaccagatgacaagcttacattattttgtgaggtgagtgtggtccaagattcagtaaacatatcaggacatactaatacaaatactttgaaggtgcctgagtgtcgtctagcagaagatttaggtaatctctgggaaaacacaagatttacagactgcagttttttcgtgagaggacaagaatttaaagctcataaatctgtgcttgcmgctcgatctccagtttttaacgccatgtttgaacatgaaatggaagaaagcaaaaagaatcgagtggaaataaatgatttagaccctgaagtttttaaagaaatgatgagattcatttacacagggagagcaccaaaccttgacaaaatggctgacaacttgttggcagctgcagacaaatatgcactggaacggctgaaggtcatgtgcgaagaagctttgtgtagtaacctctccagtangagaatgttgcagatacccttgtccttgcagattttgcaccagtggcagaaccagtttgaaaagcacaagccatagactttattaataggtgccagtgtacntcggacnacttngggtggt

SEQ ID NO: 404 - DNA, 872 bp, Homo sapiens
  SITE (295): n equals a,t,g, or c
  SITE (815): n equals a,t,g, or c
  SITE (829): n equals a,t,g, or c
  SITE (863): n equals a,t,g, or c
  SITE (869): n equals a,t,g, or c
  SITE (870): n equals a,t,g, or c
gaagttcgtcccctttgtgaggcccgggatgggaggtgagttgcttgtggtgatgtctctcgtctcggctcggcctcggcggtagttccccgggtcgttctgtgccgagtcggggctagagtgcgcgtttgttaaaggggcctcgagggcagaccatgagccctgtcccttctcactctggcctgatcctctcctcgggggacgcggttgtgccacgggcggggtggtcgcggggtcctggggccagtgccccgagcgcggcagaatttgtccaaactcctgatgccccagcgtnaccttcttccaggcgcccgggtttcccccagggacagcttcaagcggtagggacagacatctgaggacccagcctcagggatgctgtccccgggcttccaggctccagcgccgtaggactgaggcagactccacggtgagaaagagacccgatctaacccaggcctttcatcagagcccaggagggaaggcaggaagtgggaccacgaggcccggggggcttctaactcgtctggccagggagatctgaattggggtgaagagcagaatctccagaacaaggaggaggtggtgatcatggagacagatttggctgaaatgcctgagaaaggagctctgtcttcccaggattctccccatttccaagagaagagcacagaagagggagaagtggctgctctgcgcctcacggccagatcccaggaaacagtgacattcaaggatgtggccatggactttacaccagaggagtgggggaagctggatcctgcacaaagggatgtgatgcttggagaactatngggaacctagtctnctttgtaagaatggattgtgattctggaatctgnttattnnga

SEQ ID NO: 405 - DNA, 437 bp, Homo sapiens
  SITE (400): n equals a,t,g, or c
  SITE (401): n equals a,t,g, or c
gaactcttgaaaaaaaaacaagtggaattatccatcacggtcatgatgatctttttgaagtcttttgaatcttcaatctgttccttgaacttgccatattaatatatgtttgttgccttcagagcatgaagactttttaacagttgcagagtcactgaagaaagaatttgatagtccagaaactgctgatctgaagtttcgaattgatggaaaatatattcatgtccataaagctgttttgaaaatcaggtgtgagcattttcgatccatgttccagtcgtattggaatgaagacatgaaggaagtgatagraatcgatcagttttcttacccagtgtatcgtgcctttctccagtacctctacacagacacagtcgacctgccgccataagatgctatnngtcttctggatttggcgacatcttactgtgaaaaca

SEQ ID NO: 406 - DNA, 603 bp, Homo sapiens
  SITE (596): n equals a,t,g, or c
  SITE (598): n equals a,t,g, or c
gctgaacatctttcagagttgtatcctaaacaaatccgagctatgctgggccagttcagccaggcagaagccttattaatgaaagctggagtgcagccaggaacttttgatggagttcttatggatcttgggtgttcctccatgcaacttgatactcctgaaagaggtttttcccttcggaaagatggccctttggacatgagaatggatggtggyaggtaccctgacatgcccactgctgctgatgttgtgaatgctttagatcaacaggcacttgcatctatcctaagaacatacggggaggagaagcatgccaagaaaatcgcttcagcaattgttcaggcacgcagcatctaccccatcaccagaacccagcagcttgccagcatcgttgcaggtagcctcattaatyctcaacagtgtctaagagaaaaaattatatttacatgtgtgtgtgcattaatcccccagactccctgagggattcatttgtacttgaaatccaggatagaatcttgcctatccttctctaatgtcagctttcttttgcttttgcatgcttctcccccaaaaaacctctcccccaaatacaatanantaaaa

SEQ ID NO: 407 - DNA, 845 bp, Homo sapiens
taccaatctgaagggggagctgccgggagttggagcctgcggagttcgagaccatgctgctgttctgccccggctgcgggaacgggctgatcgtggaggagggacaacgctgccaccgcttcgcctgcaacacgtgcccctacgtgcacaacatcacccgcaaggtaacaaatcggaagtacccaaaactgaaagaagtggatgatgtgcttggtggagcagctgcctgggagaatgttgactctactgcagagtcgtgtcccaaatgcgaacatcctcgtgcttacttcatgcagcttcagacccgctctgcagatgagccgatgaccaccttctacaagtgctgcaatgctcagtgtggacaccgctggagggattagggccaggatggcccagctgccctagtgtgtgcttgccttgtccctcggggtagatgcttagctggcagtatgagttgtgtgtcctgagggtctttgctagtgtggtggaaagataaaccttttgaggtgaagagccagggggtcaggaaatatggcctatctgccaggcagggtggatgaagtcatgaatgtctgggagtttttctgtgtggggaggagacagagacccataactaaatatgctctgtgtaaagtcctattctttcatcttccactttattggcagttgacattcccttactcccaatcaacactcttaaatatttgtactgtttgtaaaacttagtacatgtccctaaatatttaactgttacttgtaaacttgtgtaatttattatttattttaatcaaaattctgaatatttcatttaaatgaaagttggaatattaaaaaaaaaaaaaaaa

SEQ ID NO: 408 - DNA, 1396 bp, Homo sapiens
  SITE (1111): n equals a,t,g, or c
  SITE (1299): n equals a,t,g, or c
  SITE (1312): n equals a,t,g, or c
ggcacagagagtgctccgtgcgcgagtgcccggtgtgtgcgcgccggcgagagcaggggcccgcccggctccccgcccgccgcggcccgaactcatgcagctccgagcgagcgagcggcgcccagcccagcgcctcggccgaacccctccgcagcaggctgcctgctgtttcccggggagatcatgaaacgaggtcgccttcccagcagcagtgaggattctgacgacaatggcagcctgtcaactacttggtcccagaattcccgatcccagcataggagaagctcctgctccagacatgaagatcgaaagccttcagaggtgtttaggacagacctgatcactgccatgaagttgcatgactcctaccagctgaatccggatgagtactatgtgttggcagatccctggagacaggaatgggagaaaggggtccaggtgcctgtgagcccggggaccatccctcagcctgtggccagggttgtgtctgaagagaaatccctcatgttcatcaggcccaagaagtacatcgtgtcatcaggctctgagcctcccgagttgggctatgtggacatycggacgctggctgacagcgtgtgtcgctatgacctcaatgacatggatgctgcatggctggaactgaccaatgaagaatttaaggagatgggaatgcctgaactagatgaatacaccatggagagggtcctwgaggaatttgagcagcgatgctacgacaatatgaatcatgccatagagactgaggaaggcctggggatcgaatatgatgaagatgttgtctgtgatgtctgccagtctcctgatggtgaggacggcaatgagatggtgttctgtgacaaatgcaacatctgtgtgcaccaggcctgttatggaatcctcaaggtaccagagggcagctggctgtgccggacatgtgccctgggggttcagccaaaatgtctgctgtgtccgaagaagggtggagctatgaagcccacccgtagcggaaccaagtgggtccacgttagctgtgctctgtggatccctgaggtgagcattggcagcccagagaagatggagcccatcaccaaggtgtcacacattcccagcaagncggtgggcgctagtgtgcagcctctgcaatgagaagtttggggcctctatacagtgctctgtgaagaactgccgcacagccttccatgtgacctgtgcttttgaccggggcctggagatgaagaccatcttagcagagaatgatgaagtcaagttcaagtcctattgcccaaagcacagctcacatangaaacccgaaganagtcttggcaagggggctgcacaggaaaatggggccctgattttcccccccggaatccgctggaccctttgccacccttgaaca

SEQ ID NO: 409 - DNA, 388 bp, Homo sapiens
  SITE (112): n equals a,t,g, or c
  SITE (316): n equals a,t,g, or c
  SITE (337): n equals a,t,g, or c
  SITE (385): n equals a,t,g, or c
ttgctccggagcgtccagagtcctggccctgagcgggaatcgcagtggccgaggctgagcggcaggcggatcgccccgaccctcactcctggcgtctgagtctctggcgtancccatgctgagtgggcggytggtcctgggtctggtctccatggctggccgcgtttgtttgtgccagggcagcgcgggatccggggccatcggtccggtggaggccgccattcgcacgaagttggaggaggccctgagccccgaggtgctagagcttcgcaacgagagcggtggccacgcggtcccgcctggcagtgagactcanttccgcgtggctgtggtgagntttcgtttcgagggactgagccccttacaacgacaacggttggtccangca

SEQ ID NO: 410 - DNA, 905 bp, Homo sapiens
  SITE (490): n equals a,t,g, or c
gccgcctaacacaagtccctttcctggtccggaccctggctttcctggccctggtggtgaggatggggggaagcccttgaatccacctgcttctactgcttttccccaggagccccactcaggctccccggctgctgctgttaatgggaaccagcccagtttccccccgaacagcagtgggcggggtgggggcactccagatgccaacagcttggcaccccctggcaaggcaggtgggggctccgggccccagcctcccccaggcttggtgtacccatgtggtgcctgtcggagtgaggtgaacgatgaccaggatgccattctgtgtgaggcctcctgccagaaatggttccaccgtgagtgcacaggcatgactgagarcgcctatgggctgctgaccactgaagcttctgccgtctgggcctgcgatctctgcctcaagaccaaggagatccartctgtctacatccgtgarggcatggggcagctnggtggctgctaacgatgggtgacgctggtgaagtggcccagggaagtgcacatgtctctccctgctcttcccagggtgatttttttgatgtttggctcttggtccttgtttccactggctttccatacccatggggcagaaacagtggtcctgggagcagaaaaggaattgaggtgggcaggcagaagagcctggattgctcactgttttgggaaacttacatgttgagatctacagagatccaggaaaccaaagccctgctgagcagagccattttgtggctatttctggaggcccaggagtgtggctgcaagagaaaaggggctggaggaagatccggagggcaggggtgttccctctgctgatgatggatgcccctaacacctgtgcctaacacccctactgaaccccactt

SEQ ID NO: 411 - DNA, 305 bp, Homo sapiens
  SITE (15): n equals a,t,g, or c
  SITE (21): n equals a,t,g, or c
cgggggcgcgcggcncgaganccccccggccgccctcctcctttctttgttcctgtggctgggggggtatccctccctccacaacatggagccatctcctctgtctcccagtggggcagcacttcccctgccgctgtcgctggctccgccccactacccctgccagcagctgcagtggtacatgtgtccttccctgaggtgaccagtgccctcttggagtccctcaatcagcagcgtctgcagggccagctctgcgatgtatctatcagagtgcagggccgggagttccgggctcatcgggctgt

SEQ ID NO: 412 - DNA, 2787 bp, Homo sapiens
  SITE (2136): n equals a,t,g, or c
  SITE (2146): n equals a,t,g, or c
aagggaacaaaagctggagctccaccgcggtggcggccgctctagaactagtggatcccccgggctgcaggaattcggcacgagttttctttttcccttacaaacagaagcccaatcttgttcaggtatgggtgaccacttgcttaatggataactcctattccccagggagtgaatgttggttatttcaaagcattcatagtcaatctgtcctccttgccagggwttggtttaggmatggtcttgtgatgcaacccggaatagtaagacataactgaaagtccactagagtgttactgtaaggtttttctaactcttataagacacacacacacacacacacacacacacacacaaaggcacttcatgaggatcaaccctttctacatttggatgttgcaaatgagatgtggtatttgaagccagagcagtccttgcagtcatgagggaagagccaagagaatcacacagattccttagaaatgttgcacctttgaattaatcaatcttgaattaatctgttctagatttctgttaggagacatatggaattcattatattataatttaagatacttttatgtgctttactgaaacaatctgatcaccttgaccctctccacatgactctttggagaaaggtacaatagagaacaaagttaagtggatgtcccatccttcaaagcaaagcttcaaakgaggtcctctggtaagaagctcctgattatgaacaataaaaagctgattagagctgggattattcttaataaggtttgagaccttaacaacgtctttatgaaagataatattctttatgaacaaggggttaaagaaaactctgtaccttgctaagcttaagaaagctactttaggcgtggcgcattcaggttctcctggaccatagtggtagtcgctggcccgagttagaggccagctgagaagtcttcgtgcttcagatttgtttacctacaaaatgcttcggtatccatatttttgtagaatgtataaagaatgcctttcatgttggttggaatctggcatacctaatttaggtgtctggccaaaaagaatacatactacagcagaaaaatatagagaatatgaagcccgggagcaaacagatcaaactcaagtccaggagttacacagatctcaagatagagattttgaaactatggctaaattacatattccagtaatggtggatgaagttgttcattgtttgtcaccacaaaaaggacagatttttctagatatgacatttggttcgggagggcacacaaaagccattctgcagaaggagtcagatattgttctctatgccttggacagagacccaacagcttatgcattagctgaacatctttcagagttgtatcctaaacaaatccgagctatgctgggccagttcagccaggcagaagccttattaatgaaagctggagtgcagccaggaacttttgatggagttcttatggatcttgggtgttcctccatgcaacttgatactcctgaaagaggttcttcccttcggaaagatggccctttggacataagaatggatggtggcaggaacatttcctccctctgctatttatacacggaaagacttactacagcaatctacctatattgccaccaagactttccaggctcttcgcatatttgtgaacaatgagctcaatgaactctacacgggactgaagacagctcagaagtttctgagacttggtggtcgtcttgttgccctctccttccattcactagaggatcgcatcgtcaaaagatttttgcttggaataagcatgacagaaagatttaacctaagtgttagacaacaagtgatgaaaacatctcaattgggttcagatcatgaaaacacggaagaagtctctatgagaagagctcctttaatgtgggaaytgatacacaagaaggtacttagtccacaagatcaggatgtacaagataaccccagagggcgctcagccaagcttagagcagctatcaaattataagktaccatcatcttattcttcaaattttttctcacaatttctctaatctttactcatgttatgtccctgaatgtcttggtataggtttaagtgtgggacagtctgaaaattgatagcntttagcattnctttttctcaaaaagaaactgtaggaaatacatgacagagaaagttacactcagggagcagcagcacctccagactggaaaaatgtgttaatctttgcatcatattggactcttgaaggcaatccttcctctggccaggaaattttttaaaaaataatactgtgttgtgtttatctaaatacgtaaactcaagctaccaaagagaaagatgttgtaatcacatctgcatgtcctaaattttgaatttagatattccaatttgcatcagtctttctgtggctcaaataatgatgattatggaatgaattttaatgtccctacttgtgaataattagctttctcaaatgtaggctttttacaaattttaaattttaaaatattagtttaaatgtgtgttatactgataaaatttcatctttcaaattatagtctattattttaaagggatttttcagtatgatatgggccattttgttcatctatcgcaaagtaaaaatgwaaagtcgttacagagaattgtttcacaaaacttatatttcatgtcaattgtatttattttaataatagctcacaatgcctttagtaagtaataaagtctcttattagaaaaaaaaaaaaaaaaaactcgagggggggcccgt

SEQ ID NO: 413 - DNA, 836 bp, Homo sapiens
  SITE (127): n equals a,t,g, or c
  SITE (181): n equals a,t,g, or c
  SITE (801): n equals a,t,g, or c
gcggacatgggtggaatcgcagcacccagagaactgccaagaggtggtggccctggtagagggtgtgacctggatgtctgaggaggaagtacttcctgcaggacaacctgccgagggcaccacctgntgcctcgaggtcactgcccagcaggaggagaagcaggaggatgcagccatctgnccagtgacagtgctccctgaggagccagtgaccttccaggatgtggctgtggacttcagccgggaggagtgggggctgctgggcccracacagaggaccgagtaccgcgatgtgatgctggagacctttgggcacctggtctctgtggggtgggagactacactggaaaataaagagttagctccaaattctgacattcctgaggaagaaccagcccccagcctgaaagtacaagaatcctcaagggattgtgccttgtcctctacattagaagataccttgcagggtggggtccaggaagtccaagacacagtgttgaagcagatggagtctgctcaggaaaaagaccttcctcagaagaagcactttgacaaccgtgagtcccaggcaaacagtggtgctcttgacacaaaccaagtttcgctccagaaaattgacaaccctgagtcccaggcaaacagtggcgctyttgacacaaaccaagttttgytccacaaaattcytctagaaaacgrttgcgcaaacgtgactyacaagttaaaagtatgaaacataattcacgtgkaaaaattcatcagaagarctgtgaaaggcaaaaggccaaggaaggsaatggttgnaggaaaacctttaatcggagactaaaaaaaatacg

SEQ ID NO: 414 - DNA, 628 bp, Homo sapiens
  SITE (584): n equals a,t,g, or c
  SITE (594): n equals a,t,g, or c
gctccggtaaggggtgattcgccgaggggcrcggaccagacagacctcgggtcaggcccgggaaccccgagaggagagcccagcccctggtggaggcggcttggcggagattcggagccgtcagcagctcagccagacgtccaggatcccaccccttgcaaaagaccaggccgtggaagccatgttcccaccagccagggggaaggagctgctctcgtttgaggatgtggcgatgtacttcaccagagaggagtggssccacctmaactggggtcagaaggacctctaccgagatgtgatgttggagaactacaggaacatggtcttgctgggtaggacacggcttgaagattgggctttgtctgtgttctgagtgtctgtgcaagcccttagtcccttatctgcaattccagaatcagaaaaagcggtgaaaaccgaaaggtttttttataactcgtgtggctacaagccctgaccagacatcaccacagtgaacctgacttcatcctataggaaaccatttattgtctttatttttccaacttggtgtgcatatctgtatacccaacttcagaaataacaantctgagccancacggccggcctgttgtttttaagagagacaggg

SEQ ID NO: 415 - DNA, 603 bp, Homo sapiens
  SITE (546): n equals a,t,g, or c
  SITE (586): n equals a,t,g, or c
gggaggttgcagtgagccgagatcgcaccatgggaaacgtatgcaggaatcctatttataataattttacctaaaagggtactaagcttcctcagtatattaagtaacaatgtatgtgtatgattgtaaaataaatacaaataagagcatgagaacaaatatgtgtgctaattatgcatttcaaaagtaaggcagaattagggccttaataagaatcccttatagcattttgttttaaattctcaacagtaaacataatgagttagtttccgaaaacgttttcctttccttgattctgaacactcagattaattagaaatgcgctgttacaggcatcagtgtcattccaggacgtgactgtggaattcagccaggaggagtggcagcacatgggccctgttgagaggaccctgtacagagatgtgatgctggagaactacagccacctcgtctcagtgggtgagcacagcttaccatggggttccctccagagtgcagttctgtttctgcctctctttctctctcttccataccgtaaccatgtgnactccctcttacagtggcaattctggttttcccttttttnataattagtccactttt

SEQ ID NO: 416 - DNA, 623 bp, Homo sapiens
ctttattgtggtggagtccaccccgctgtgggcctcagataaccctgtacaaaggggaatggagattgcctgtatccacctagattcataagctgccctgaggcgatcttggcatcaagaaagacagcattgaggcacatctcaccatcagcttcagaggatgtcagcctttgatatgtcccatgggttttttcccagggaaccaatctgtccttttgaagaaaagacaaagataggaacgatggtagaggaccaccggtcaaattcttaccagtgaatattggtggaagtgttcattggctcaaaccagcatgtgtttgatgacttaggattcagtgacgtttgatgatgtggctgtggagttcaccccagaggagtgggctttactggacacaactcagaaatacctctacagagatgtgatgctggagaactacatgaacctggcctctgtggatttctttttctgcttaacttcagaatgggaaatacaacctagaaccaaacggtcatcacttcagcagggttttttgaagaatcaaatattcactgggatacaaatgttctgcatccccctccctgagccaaccccaggccctttctgcacccactctgattggaac

SEQ ID NO: 417 - DNA, 557 bp, Homo sapiens
  SITE (456): n equals a,t,g, or c
  SITE (499): n equals a,t,g, or c
  SITE (513): n equals a,t,g, or c
  SITE (536): n equals a,t,g, or c
  SITE (552): n equals a,t,g, or c
aggccattttggatcacagtrattagctttgtatttaaggattgggtaaatcctgacaaggtaaatgggtctctctcttcttttattaatatgttccccaaagcaggatcaaatatgcacgttcatttggggtgagcaggtgtgagtggccccctcagcttcttgactctaatctgtgacccctgtcatctgtccagggactgaaggccgctatgcagattcagagggtggtgataccagtgcctacwctgggccaccgcaacccatgggtggccagggattctgstgtgcctgcacgtgaccctgcctggcttcaggaggacaaagtggaggaagaagctatggctcctgggctgccaaccgcctgttcacaggaaccagtcacctttgcagatgtggctgtggtgttcaccccagaagaatgggtggttctggactctactcagaggagcctgnatagagatgtgatgctggagaactacaggaacctggcctctgnggctgatcaactgngcaaacccaatgcggtggcttanttggaagaaagagganagcaa

SEQ ID NO: 418 - DNA, 610 bp, Homo sapiens
  SITE (69): n equals a,t,g, or c
  SITE (530): n equals a,t,g, or c
actgcactggggtccttgggggcggctcctccagacgtctctgcgggttgtcggttgctgccgagttgngttgggggacgctacaggtagtgggtccggagcagcggctggcccctcatctcactgcccttcctcggaccccaccgtcctctggaagcttgtgcagggcacctgccactgtgaccacctggacgcagatacctgctttcccacaacagcaaggaagaaccatggcccaggggtcactgtcattcggggacgtggctgtgggcttcacccggaaagagtggcagcagctggacctggagcagaggaccctgtacsaggatgtgatgctggagaactacagccacctgctctytgtgggctgaactgtctgcttgcttrgaaggcccagctggctcagcacaaatcctttaaccgtttctccccaagagggtgtcaagtcagcaaaccagctgtgatctccagtttggagcaggggaaggagccatggatggaggaggaagagataaggacgtggagctttnccmgaaagctgacttyatgagaccgaggatctcgttcgwtgatcgatgctwcatawttcagcatkttagataatgaggtt

SEQ ID NO: 419 - DNA, 683 bp, Homo sapiens
cgcatgctggtgtcggctccgagagctctggcttatcaggactccatagttctccaacagagaaatcttgaaaaggactgaccagtttttgcagttctaaaaccatggcccatggttcagtgacattcagggatgtggccatagacttctcacaggaagaatgggaattcctggatcctgctcagagggacttatatagggatgtaatgtgggagaactacagcaacttcatttcactagsaggaccttccatttctaaaccagatgtgattaccttattggatgaagaaaggaaggaacctgggatggttgtgagggaagggacaagaagatactgccctggtgagtgagggctgagcaggcattgagaaatcactactgcaggtaatagctaaactgattagggtggaggcacacccttgagatgttggggtctctcttcaaaaagcccctggcctatggaggcagggcttgggacttgaagcaaattaagatcttttaagcctggactagcaaaggaactttctattgatcttgaatgcaacactgtttctcatctttcatatttctatcctactttaaagagaagaactattcctggtagaagaaaaaataaataaatataagagcagaaatcagcaaaatagaaaagaaataaagaaaattaataaagccaaaaaaaa

SEQ ID NO: 420 - DNA, 493 bp, Homo sapiens
  SITE (438): n equals a,t,g, or c
  SITE (447): n equals a,t,g, or c
  SITE (491): n equals a,t,g, or c
cactggctgtgtcagcgscctctgaggtttcaggctcttggcggtgaaggtcagagtgcagacctgagaccactgctcaccgacttcagactccagtttatctgtgccccagcttcctcacttagtctcagaagacttaggctgaggctcagaaggagatctccatcctttgtccagagcagaacaggatggccatgtcccaggaatcattgaccttcaaggacgtgtttgtrgacttcaccctggaggagtggcagcaactggactctgcccagaagaacctctacagggatgtcatgcttgagaactacagccacctggtgtccgtggggtatctagttgcgaagccagatgtgatcttcaggttgggaccaggtgaagagtcctggatggcagatggggggaccccggtacggacctgtgcagaagtctggcaangttgatgancagatagatcactacaaggaaagccaaagacaaactttcttggnaa

SEQ ID NO: 421 - DNA, 565 bp, Homo sapiens
  SITE (387): n equals a,t,g, or c
  SITE (405): n equals a,t,g, or c
  SITE (505): n equals a,t,g, or c
  SITE (552): n equals a,t,g, or c
cacggtgctgctacctcgtttgctcgtgcgtgcgtgcgygcgcagatgtgggccccgcgggagcagctactgggctggrctgcggaagctctgcctgccaaggattctgcctggccctgggaagagaagcctagatatctgggaccagtgactttcgaggatgtggctgtgcttttcactgaggcagagtggaagagactgagccttgagcagaggaacctatacaaagaagtgatgctggaaaatctcaggaatctggtctcattggcagaatcaaagccagaagtccatacctgcccttcttgccctctggcctttggcagtcagcagttcctcagccaagatgagctacacaatcatcctattccaggtttccatgcaggaaantcaactccacccaggaantcctggcccagaggatcagccacagttcacaaaatccttttggataaaattcacaggggggggtgaagcagaagatcaacgagtgggaaggaggcgtcanaccttgttttggggtacaatggaaaaggggggcttaatgggtttctntagctgttccaga

SEQ ID NO: 422 - DNA, 704 bp, Homo sapiens
  SITE (444): n equals a,t,g, or c
  SITE (573): n equals a,t,g, or c
  SITE (690): n equals a,t,g, or c
  SITE (691): n equals a,t,g, or c
  SITE (695): n equals a,t,g, or c
  SITE (700): n equals a,t,g, or c
cggcacgagccacttccctgaaaccacgagctggaagctgtggaccagctggtcactgctgggcctgctaggagcccacacggaagctgcccacagccagacaccagagcctcaaaggccgccatcttgaaaaaccaaccctgacctccacaatgattgattttcaaatgttgaaccagctttgcagaactataataaacccaagtktgataccctgtctcaagtattgcggtgatcaaataggaccagtgactttcgaggatgtggctgtgcttttcactgaggcagagtggaagagactgagccttgagcagaggaacctatacaaagaagtgatgctggaaaatctcaggaatctggtctcattggcagaatcaaagccagaagtccatacctgcccttcttgccctctggcctttggcagtcagcagttcctcagccaanatgagctacacaatcatcctattccaggtttccatgcaggaaatcaactccacccaggaaatccctgcccagaggatcagccacagtcacaacatccttctgataaaaatcacaggggggctgaagcanaagatcaaccgagtggaaggaggcgtcagacccttggtttggagtacaaatgaaaggggggctttagtgggttcttctagcctgttccagagaccaccataaagcttcttggggagnnaccngaatnttta

SEQ ID NO: 423 - DNA, 615 bp, Homo sapiens
  SITE (513): n equals a,t,g, or c
  SITE (536): n equals a,t,g, or c
  SITE (569): n equals a,t,g, or c
  SITE (588): n equals a,t,g, or c
  SITE (597): n equals a,t,g, or c
  SITE (610): n equals a,t,g, or c
agcgttcccagtcccgtcgctccgagagggtctagagatctgcgtccatttcggattaaaatcgttctgaagtgggtactggccccgacctttttgctttagcccacacaatatgacctcggggaggatgcgaggaagatgaactgtgatgatccacttcttcttaatgaatgactgacttacctgagaaagaaactcagaggaagaggaaagaaagaagaggagggaatggctctttctcagggactgtttacattcaaggatgtggccatagaattctctcaagaggagtgggagtgcctggaccctgcccagagggccttgtacagggacgtgatgttggagaactacaggaacctgctttctctcgatgaggataacatccctccagaagatggtaaccacccttgtacatctttacatttttccttgtgagtctcttgggaggccctkatgtgyttgtctgaatccgatccctgttctaaaaggggagattgaaactctttgattganagtggaaaggcttcataatgtancatatagactttaaacttccccttttctttcanaagttcttgcgcataatcnggtttgacnaagtggtgggttncagaa

SEQ ID NO: 424 - DNA, 530 bp, Homo sapiens
  SITE (446): n equals a,t,g, or c
  SITE (475): n equals a,t,g, or c
  SITE (488): n equals a,t,g, or c
  SITE (516): n equals a,t,g, or c
caagctctaatacgactcactatagggaaagctggtacgcctgcaggtaccggtccggaattcccgggaggaagcggccacggcagagcctggtgcctgaagaggagtcggagatggcggctgcagaggctgtgcatcacatacacctgcagaacttctcacgctctctgcttgagaccctcaatgggcagaggcttgggggacacttctgtgacgtgactgtgcgcattcgtgaagcttcgctgcgtgcccaccgctgcgtgctggcggccggctcacccttcttccaagacaagctgctgctcggccactctgagatccgtgtgcctccggtggtgcccgcgcagacagtgcgacactggtagagttcctgtacagcggttcgctcgttgtggcgcarggtgaagccctgcaggtgctcacggccgcgtcagtgstttcgcatnacagacakttatcgacgaatgcacgcagnttatcgcccgcgnttcgagccccggggcactytgsggccangcccctgcccaacc

SEQ ID NO: 425 - DNA, 754 bp, Homo sapiens
  SITE (713): n equals a,t,g, or c
  SITE (749): n equals a,t,g, or c
  SITE (750): n equals a,t,g, or c
aaaggccttatcgctgtgtgtgtgtttcagtctacgtggattaaacattacttcgctccgtctgcctggattaaacgtgcactttgcagtcctcacttctccgtaccagtgatctggggatcgctacggaccttaaaatacccatagccccttcgcccctgcaacaggcacttcyccccacgtttgatgtgtgaataattacattgactgagaaagaaacccagaagaggaagaagaggaaggaaaaggagtcagtgatggctactcaggggcatttgacattcaaggatgtagccatagaattctctcaggaggagtggaaatgcctggagcctgtgcagaaagctttgtacaaggatgtgatgttggagaactataggaacctggtcttcctaggtatctctcctaaatgtgtgatcaaggaattaccaccaacagagaacagtaatacaggagaaaggttccaaacagtggcactggaaagacatcaaagctatgatattgaaaatttatacttcagggaaatacagaaacatctacatgaccttgaatttcaatggaaagatggtgaaacaaatgataaagaagtgccagtgscccatgaaaacmatcttactggtaaaagagatcaacatagtcaaggggatgtagaaaacaatcatattgaaaaccagcttacatcaaactttgagttcacgtctggcttgaactgnaggaagtttcaaacttgatggggtggacttttttgnnttgt

SEQ ID NO: 426 - DNA, 498 bp, Homo sapiens
  SITE (117): n equals a,t,g, or c
  SITE (414): n equals a,t,g, or c
  SITE (451): n equals a,t,g, or c
  SITE (477): n equals a,t,g, or c
gaggcgaccggcgccggaaggcacggtggcgactcacgctgttctcgccgctcagaggcgggtctgaggctcggtggcggcgcccagggtggcccgggccctttcctcggtcattgnctcccctccagctctactcacaggctccgatggcggcggccgccctgagggaccccgctcagcagggctatgtgacctttgaggatgtggctgtctacttctcccaggaggaatggagattgcttgatgacgctcagaggctcctctaccgcaatgtgatgctggagaactttacacttctggcctctctgggacttgcgtcttccaagacccatgaaataacccaagctggagtcatgggaggagcccttcatgcctgcttgggaaagttgtgacttcagccataccgagagcagncaaagtcctgtggaaagccatttgcagaggattgtgntgggggacactggctcttcttcctgngctatacccatccttgcatct

SEQ ID NO: 427 - DNA, 477 bp, Homo sapiens
  SITE (388): n equals a,t,g, or c
  SITE (426): n equals a,t,g, or c
  SITE (459): n equals a,t,g, or c
  SITE (472): n equals a,t,g, or c
gcctcggcgcaggtgtctgtgacctttgaggatgtggctgtgacattcacccaggaggagtggggacagttggatgcagcccagagaaccttgtatcaggaggtgatgctggagacctgcggacttctcatgtctctgggctgtcctttgttcaaaccagagctgatctaccagttggatcacagacaggagctatggatggctacaaaagacctctcccaaagctcctatccaggtgacaacacaaaacccaagaccacagagcctaccttttctcacctggccttgcctgaggaagtcttactccaggaacactgacacaaggagcctcaaagaactcccaattagggcaatccaaggatcaggatgggcccatcttgaaatgcangaaagtccactttgaaaaataggggatagggcccccanccggggggaaacttgcttggaagaaaaatgaanttcttgaaccgtnaatgg

SEQ ID NO: 428 - DNA, 1014 bp, Homo sapiens
  SITE (931): n equals a,t,g, or c
gctgtaacgcttgtgtgggccgcaggtggaggtgttgggaaagcgcggaggagatgttgtccccagtgtcccgagacgcgtctgatgctctgcagggacggaagtgcctgcrtccccgatcgaracgcctgccgctcccggcagctgtccgcgcccacggtcctatggcggactaacggactccgcgcggggctgtgtggtctttgaggatgtgtttgtatacttctctcgggaagaatgggarcttcttgatgatgctyagagacttttgtaccatgatgtgatgctggagaactttgcacttttagcctcactgggaattgcattttccagatcacgtgcagtcatgaaactagagcgaggagaagagccctgggtgtatgaccaggtggatatgacttcagccacagaaagagaggcccagaggggacttagacctggttgttggcatggagtggaggatgaagaggtatcttctgagcagagcatttttgtagyaggagtgtcagaggtcaggactctcatggcagagctggagtctcacccatgtgacatatgtggcccaatattgaaagataccttacacctggctaaataccatgggggaaaagccaggcagaaaccatacttgtgtggggcatgtggaaagcaattctggttcagtacagactttgaccagcaccagaaccagcccaatggagggaaacttttcccaaggaaggagggcagagactctgtgaaaagctgcagagtccatgtgccagagaagaccctcacatgtgggaaaggtaggagagacttttcagccacatctggccttcttcagcatcaggcctctytcagcagcatgaagccccacaagagcactaagcttgtgagtggctttctcatgggacagaggtatccagtgtkgtgatgtgggaaagccttnacccgcaaagacacacttgctcggcatcagagaatccacactggagaaaggccttatgagtgtaacgaatgtgggaaattctt

SEQ ID NO: 429 - DNA, 692 bp, Homo sapiens
  SITE (66): n equals a,t,g, or c
  SITE (67): n equals a,t,g, or c
  SITE (655): n equals a,t,g, or c
  SITE (664): n equals a,t,g, or c
  SITE (674): n equals a,t,g, or c
tttaggtgaaacgccccgcaggtaccggtccggaattcccgggtcgacccacgcgtccgggatgcnnttccttcgcgcgtgaggctgcggctctgacgccccataggctccttcaatttccgtgatcctcggagtccccaggagaccaggtgatggcagcagccagactcctgccagtgccggcaggaccccagcccctgtcgttccaggccaagctgaccttcgaggatgtggctgtgctcctctcccaggatgaatgggaccgcctgtgccctgctcagaggggcctctacagaaatgtgatgatggaaacctatgggaatgtagtctcattgggacttccaggatccaagcctgacataatctcccagctggagcgaggggaagatccctgggtcctggacaggaagggggctaagaagagccagggcctgtggagtgactactcagacaacctcaaatatgaccacactacagcctgtacacaacaagacagkttatcttgkccatggggaatgkggaaaccaagggagagagtcaaaatacagacttgagttccgaggccattaatttcaggggcaaacatgattttgggggaaaacaaccttggggaggtttgttcaggaattattggaaccaagcaagttttgtctgngtccaaatntttgaccccngagttaagtttagccagt

SEQ ID NO: 430 - DNA, 884 bp, Homo sapiens
  SITE (7): n equals a,t,g, or c
  SITE (689): n equals a,t,g, or c
  SITE (765): n equals a,t,g, or c
  SITE (774): n equals a,t,g, or c
  SITE (786): n equals a,t,g, or c
  SITE (874): n equals a,t,g, or c
gaacgtncaagttagcagtcgtttcccaaatttaggagacaatgatgcaggcccaggaatccctaacactggaggatgtggctgtggacttcacctgggaggagtggcagttcctgagccctgctcagaaggacctgtaccgggacgtgatgttggagaactacagcaacctggtggcagtggggtatcaagccagcaaaccagatgcactctccaaattggaacgaggagaagaaacttgcacaacagaagatgaaatctactctcgaatctgttctgattcaggaggtgcatcaggaggtgcatatgcagaaatcaggaaaattgatgatcctctgcagcatcacttgcaaaatcaaagtattcagaagagtgtgaaacagtgccatgaacagaatatgtttggaaatattgttaatcagaacaaaggtcatttcctgctgaagcaagattgtgataygtttgacttacatgaaaaacctttaaaatcaaatttaagttttgaaaaccagaaaaggagctctggcctaaagaactctgctgagtttaatagagatgggaaatccytttttcatgctaaccataaacaattttatactgaaatgaagtttcctgcaattgcaaaacctattaataagtcccagttcattaagcaacagagaactcacaacatagagaatgcccatgtntgcagtgaatgtgggaaagcctcctcaagttgtctcagtttattgatcatcagagagttcacactgggagaaaaanctcatgttntgcaagtatgtnttgggaaaagctttctccagaaaaatccagaataaatggaaccatccagaaaaactccttcccgaaacttgaaaacatttattgaaantggccactgg

SEQ ID NO: 431 - DNA, 618 bp, Homo sapiens
  SITE (392): n equals a,t,g, or c
  SITE (397): n equals a,t,g, or c
gttgttccgcgccgatggcgagatccttgttcctcagatagcgttcatcgcccgtcgtggtcaacgggccagccgagtctggagtggttgcgaacccttctggctgcagatctggaggtggaggcagtaccctggactctattctgctgccccttcagggtttggaggagccggagcatccctcgcgtyctgtcacttcagcgaggcacacaaaactgaccgtagggatggccaccagggtccggacagcttctatttgggtcccacctctccaagaacgaaacagttcatgggataggatcagaaagctccaaggtcaggaatccatcttgggccaagggactcctggtctgcaacctctccctggaacacccaggcagaagcagaagagncgcanaatagagaaagtcctagagtggctgtttatttcccaagagcagccaaaaatcaccaagtcctggggacctttgtcattcatggatgtgtttgtggattttacctgggaggagtggcagctgctagacccagcacagaagtgcctgtacaggagtgtgatgttggagaactatagcaacctggtgtccctagggtaccaacacacccaaacctgatatcatc

SEQ ID NO: 432 - DNA, 690 bp, Homo sapiens
ggaaagatgactgatttaatgcacattgatggatgttttcaatacaatttttgttctcacaaagttaaacataaataatggacaccctaaacagctagttttccacaaacctagtaaaataacttgaaattggatgagcatattgtatttcagggacctttgtcattcatggatgtgtttgtggattttacctgggaggagtggcagctgctagacccagcacagaagtgcctgtacaggagtgtgatgttggagaactatagcaacctggtgtccctagggtaccaacacaccaaacctgatatcatcttcaagttggaacaaggagaagagctgtgtatggtgcaggcccaagttccaaatcagacctgtccaaacacagtctggaaaattgatgatcttatggattggcatcaggaaaataaagacaagctgggaagtacggcaaaaagctttgaatgcactacatttggaaaactatgtcttcttagtacaaagtatctttcaagacaaaaacctcataaatgtggcacgcatggaaagagtttgaaatatatagatttcactagtgattatgctagaaataatcctaatgggtttcaggtacatggaaaatcattcttccattctaaacatgagcaaactgttattggaataaaatactgtgaaagtattgaatctgggaaaaac

SEQ ID NO: 433 - DNA, 694 bp, Homo sapiens
ggcagaggttcgcgcgaggttttggtttgtgaggatcggcgagtggcgcccaccatctctgcttgctgaaaagctgcagaggccgccagagcccacgcacctgagacttttacctttacccagaaaggaataaaagaggtcagatgatgacagctgtgtccttaacaaccaggccccaggaatcagtggcttttgaggacgtggctgtgtacttcactacgaaggaatgggccatcatggtgcctgccgagagggccttgtacagggatgtgatgctggagaactatgaggctgtggcctttgtagtgccacccacttccaaaccagctttggtctctcatctggagcaagggaaagagtcctgtttcacccagccacagggagtcctaagcaggaatgactggagagcaggctggataggatacttggaactaagaagatatacttacttagctaaagcagtgttacgtagaatagtatcaaaaatttttcgaaatcgtcaatgctgggaagacaggagaaaagcttaattcttgacatttaaataccagttttccaagtaaggagttgatgtaagagccaccttaaacgatgtcaaatacacattttctttttctgtagactggtagatttaatgtttttcattcattaaaataactcattttgatgtacaaaaaaaaaaaaaaaaaaaaaa

SEQ ID NO: 434 - DNA, 639 bp, Homo sapiens
  SITE (639): n equals a,t,g, or c
gggctgcgcagcgggctggccgggggtctcctgaacccgggccccgccgccccgaccgcccggccccgccgccggggctgtccccgccgcgtccgtagcgcgtcctgccagggctgaaatctctttaatgatggagggaagcaggcagacgcgagtgtctcggccatacaagatcagcgaatcatcaaaggtataccgctgggccgaccactcaagcacggtgctgcagcggctgaacgagcagcgtctccgcgggctcttctgcgacgtcgtcctggtggccgatgagcagcgtgtgccagcccatcgcaacctgctggccgtgtgcagcgactacttcaactccatgttcaccatcggcatgcgggaagctttccagaaggaggtggagctgatcggcgcctcctacattgggctcaaggccgtggtggacttctgtacggcggggagctggtgctggatggcggcaacattgactamgtcctggagacggctyacctkctgcagatctggacggtkgtagacttytkctgtgagtacctggagcaggaagtkagcgaggacaactacctgtacctgcaggagctggccttcatctacagcctcaaacggcttgatgccttcatcgatggctttatn

SEQ ID NO: 435 - DNA, 1533 bp, Homo sapiens
  SITE (1524): n equals a,t,g, or c
ggtgcattcgtgaaattctgcagcacatcggcgaaagtgatttaaatctaccacccagctgtagttgaatctacaatctgctcagggatttatactcaatgccaatttgatatcatgctgggagggactgattgcagaaccttcttgacaagccacataaatctaaagaaaacgttgtgtgacgtgatcctcatggtccaggaaagaaagatacctgctcatcgtgttgttcttgctgcagccagtcatttttttaacttaatgttcacaactaacatgcttgaatcaaagtcctttgaagtagaactcaaagatgctgaacctgatattattgaacaactggtggaatttgcttatactgctagaatttccgtgaatagcaacaatgttcagtctttgttggatgcagcaaaccaatatcagattgaacctgtgaagaaaatgtgtgttgattttttgaaagaacaagttgatgcttcaaattgtcttggtataagtgtgctagcggagtgtctagattgtcctgaattgaaagcaactgcagatgactttattcatcagcactttactgaagtttacaaaactgatgaatttcttcaacttgatgtcaagcgagtaacacatcttctcaaccaggacactctgactgtgagagcagaggatcaggtttatgatgctgcagtcaggtggttgaaatacgatgaacctaatcgccagccatttatggttgatatccttgctaaagtcaggtttcctcttatatcaaagaatttcttaagtaaaacggtacaagctgaaccacttattcaagacaatcctgaatgccttaagatggtgataagtggaatgaggtaccatctactgtctccagaggaccgagaagaacttgtagrtggcacaagacctagaagaaagaaacaygasctaccgcatagccctatttggaggctctcaaccacagtcttgtagatattttaacccaaaggattatagctggacagacatccgctgcccctttgaaaaacgagagatgcagcatgcgtgttttgggacaatgtagtatacattttgggaggctctcagcttttcccaataaagcgaatggactgctataatgtagtgaaggatagctggtattcgaaactgggtcctccgacacctcgagacagccttgctgcatgtgctgcagaaggcaaaatttatacatctggaggttcagaagtaggaaactcagctctgtatttatttgagtgctatgatacgagaactgaaagctggcacacaaagcccagcatgctgacccagcgctgcagccatgggatggtggaagccaatggcctaatctatgtttgtggtggaagtttaggaaacaatgtttctgggagagtgcttaattcctgtgaagtttatgatcctgccacagaaacatggactggctgtgtccatgattgagccaggaggatcatgggtggtatttttaaagacagtattttgctgtggggtggtccagattggttttaggtngtcttggac

SEQ ID NO: 436 - DNA, 1005 bp, Homo sapiens
gcccacgcgtccggggcagggctcgggttctgcccggrgacgcagcccagttggtagcgtcgctccctgagcgtttctaagggggccgcccggccttgtctttcggcagtggccgagccaccgccgcctgccgcgcgttccagagctgggcgctgcagctgcactgccgatcgccgtgtttggtcgatagaatccccagtgtgcccagagagtgcgacccctcgcccggcccggcgagccccgggcgtgaaccgagctgagggaggatggcagcctctggggtggagaagagcagcaagaagaagaccgagaagaaacttgctgctcgggaagaagctaaattgttggcgggtttcatgggcgtcatgaataacatgcggaaacagaaaacgttgtgtgacgtgatcctcatggtccaggaaagaaagatacctgctcatcgtgttgttcttgctgcagccagtcatttttttaacttaatgttcacaactaacatgcttgaatcaaagtcctttgaagtagaactcaaagatgctgaacctgatattattgaacaactggtggaatttgcttatactgctagaatttccgtgaatagcaacaatgttcagtctttgytggatgcagcaaaccaatatcagattgaacctgtgaagaaaatgtgtgttgattttttgaaagaacaagttgatgcttcaaattgtcttggagaagcagaaaaagttgatcagagccttccagagtgtggtatgcttttcactgtgtgatgatccttagtggcacatgaatgaacgtccagatgtttgtgcagtagcccacccttatctgcaggatacgttccaagacccccagtgaatgcctgaaactgcagatagtactgaatcctatatatactgtgttttttatgatacatacatgcctatgatgaagtttaatttctaaattagacagtaaaagattaacaacaataataataaaatagaacaactttaacaataaaaaaaa

SEQ ID NO: 437 - DNA, 682 bp, Homo sapiens
  SITE (39): n equals a,t,g, or c
  SITE (552): n equals a,t,g, or c
  SITE (573): n equals a,t,g, or c
  SITE (582): n equals a,t,g, or c
caggtaccggtccggaattcccgggtcgacccacgcgtntgcgatgttgatggcaggacaaaggggcgcctggaccatgggtgatgtggtcgagaagagtttggaagggcccctggcaccttctacagatgagccctcccagaaaacaggagacttggtcgagatcttaaatggggaaaaggtcaaatttgacgacgcgggactctccttaattcttcagaatggcctggaaaccctgcgaatggaaaacgctctgacagatgtcatcttgtgtgtggacattcaggaattctcctgccaccgcgtggtgcttgccgcagccagcaactatttcagggccatgttctgcaacgatttaaaggaaaagtatgagaaaaggatcattattaaaggggttgatgctgagaccatgcacactctgttggactacacgtacaccagcaaggcgctkatcaccaagcagaatgtccagcggktcctgraggctgstaacctyttccagttcctgcggatggtgggatgcctgtgccagcttcctcactgaagccttgnaacccagaaaactgcgttggnaatactganggctggctgacacacactcgctggaacagttctaaagaagccaggttccagagttaacatccattccaaaactttgtggcagattctggaactctgagga

SEQ ID NO: 438 - DNA, 514 bp, Homo sapiens
  SITE (442): n equals a,t,g, or c
  SITE (461): n equals a,t,g, or c
  SITE (485): n equals a,t,g, or c
cgcggcacgagtgaggatccagcccaggctccagttgtccgcggttcctcctcctgtcgctgcccgtgtgattactgagactcagatggaccacacatccccgacctacatgcttgctaacttaacccacttgcattctgaacaacttctgcagggcttgaatcttcttcgccaacatcacgaacyctgtgacatcattcttcgagtaggtgatgttaaaattcatgctcacaaagtggtacttgccagcgtcassccgtatttcaaagctatgttcactggaaacctttctgaaaaagagaacagtgaggttgagtttcaatgcattgatgaaactgctctccaggccattgtggagtatgcctatacagggactgkttttatttctcaggacacagttgaatctctcctgscagagcaaactactccagataaaacttgncctgaaagaaagggtgggnatttcttgaaaagccaacttgatnctgggaaattggatttggaaatttcttcg

SEQ ID NO: 439 - DNA, 411 bp, Homo sapiens
  SITE (40): n equals a,t,g, or c
ggccaagggggcgttgtcgtgatgattccgcggccagatncgctgcgaagtggccttgaaggcagctgctgcaggtgaagagtaggcggcggggcagagagcggcctccgagggtcacctgaatggttgagcatggaccctgttgctacccacagctgccatctgctccagcaactgcatgagcagcgaatccaaggcctgctttgtgactgtatgttggtggtaaaaggagtctgctttaaagcgcataagaatgtcctggcagcattcagccagtattttaggagcctctttcagaattcttcaagccagaagaatgatgtttttcactggatgttaaaatgtcatggcataaggcagatcctggactcatgtacacttctcatcagatcttaaccaggacaatataca

SEQ ID NO: 440 - DNA, 517 bp, Homo sapiens
  SITE (517): n equals a,t,g, or c
ctctcggcacctagggatggcggagcagagtgaagaaactgtgttccccccttgggttgctatcgatcaagggtaaaattccattctgatatcaaaatgcagtattcgcaccaytgtgagcaccttttagagagactgaacaaacagcgggaagcaggttttctctgtgactgtaccatagtgattggggaattccagtttaaagctcataggaatgtgctggcctcctttagtgagtattttggtgcgatctacagaagcacttctgagaacaatgtctttcttgatcagagtcaggtgaaggctgatggatttcagaaactgttggagtttatatacacaggaactttaaatcttgacagttggaatgttaaagaaattcatcaggctgctgactatctcaaagtggaagaggtggtcactaaatgcaaaataaagatggaagattttgcttttattgctaatccttctctacagagatatctagtattactggaaacattgaattgaatcaacn

SEQ ID NO: 441 - DNA, 735 bp, Homo sapiens
  SITE (17): n equals a,t,g, or c
  SITE (27): n equals a,t,g, or c
gcccacgcgtccggttntcccaagatngcggagacagagtgaagaaactgtgttccccccttgggttgctatcggtggtagaagtgttgccattcaccgtcacttattgatgtgtccaaaggattgtgttagttgatcaagatcaagggtaaaattccattctgatatcaaaatgcagtattcgcaccactgtgagcaccttttagagagactgaacaaacagcgggaagcaggttttctctgtgactgtaccatagtgattggggaattccagtttaaagctcataggaatgtgctggcctcctttagtgagtattttggtgcgatctacagaagcacttctgagaacaatgtctttcttgatcagagtcaggtgaaggctgatggatttcagaaactgttggagtttatatacacaggaactttaaatcttgacagttggaatgttaaagaaattcatcaggctgctgactatctcaaagtggaagaggtggtcactaaatgcaaaataaagatggaagattttgcttttattgctaatccttcttctacagagatatctagtattactggaaacattgaattgaatcaacagacttgtcttcttactctgcgagattataataatcgagagaaatcagaagtatctacagatttgattcaggcaaatcctaaacaaggcgcgttagmgaaaaagtcatctcaaacggaaaagaggaggagggtttcaactcc

SEQ ID NO: 442 - DNA, 554 bp, Homo sapiens
  SITE (505): n equals a,t,g, or c
  SITE (535): n equals a,t,g, or c
gtggctgcggcggcggcgcaggagcagaaaccggtgcggcgcagaagccccagaggcgggcggggcggagcggagggccagcgggccccggcgtgggtctcccgccaggccgccggatttaacccttagtggcttctgaagaaaatggcagaaacatcgccagagccttctgggcagcttgttgtacactcagacgctcacagtgacactgtgctggccagttttgaggatcagaggaagaaaggcttcctctgtgacattactttaatcgtggagaatgtacatttccgggcccacaaagccttacttgctgccagtagtgaatacttctcaatgatgtttgcagaagarggggaaatcggccaatccatttatatgctggaaggcatggttgcagacacctttggtatcctgctggaatttatctacacaggttatctccatgccagtgaagaaaagtacagggcaaatcctgggtactgcttcagttcttaaaagtctatgncctggtaaaggcttacacagacttccaaantaatcatagctccccaaag

SEQ ID NO: 443 - DNA, 495 bp, Homo sapiens
  SITE (7): n equals a,t,g, or c
  SITE (484): n equals a,t,g, or c
  SITE (485): n equals a,t,g, or c
gggctgngctggcctcctgcagcccattcttccagcttttctacaaggagcgggaattggacaagagggatctggagtgtattcacaatgaaattgwcacagycccagcctttgggctgcttctggactttatgtatgctggccagctgaccctgagaggggatacccctgtggaggatgtgctggcagctgccactaacttgcacatgaatgacatcgtcaaggtgtgtaagcggcggcttcaagcccgggmcctggcagaggcagacagtaccaagaaggaggaggaaaccaactcacagcttcctagtttggagtttttgtctagtacttcccgtggcacccaaccttcgttgkcatctgctgagacatcaggccactggggcaaaggggaatggaaaggctctgctgctycctcamctactgtccktcctccagatgagccaccaatgtctagtgggggctggacactacacagcctggnnatgggagatt

SEQ ID NO: 444 - DNA, 567 bp, Homo sapiens
gagtgagtcacctgaccgatggcctcgccgcccgccggcatctcgcttcagtcagtcgggccgcgcgcgcctcagctctggttgatgataattagaagcatgctttccactgaacttcccgacaacatttgttatgcagaatgtctctgagtgagaactcggtttttgcctatgaatcttctgtgcatagcaccaatgttttactcagccttaatgaccagcggaagaaagatgtgctgtgcgatgtcaccatctttgtggagggacagcggttccgcgctcaccggtccgtgctggcggcatgcagcagttacttccactcaagaatcgtaggccaggctgatggagagctgaacattactcttccagaagaggtgacagttaaaggatttgaacctttaattcagtttgcctacactgctaaactgattttaagtaaagagaatgtggatgaagtgtgcaaatgtgtggagtttttaagtgtacataatattgaggaatcctgctttcagtttctgaaatttaagtttttggactccactgcagaccagcaagamtgcccaagaa

SEQ ID NO: 445 - DNA, 614 bp, Homo sapiens
  SITE (517): n equals a,t,g, or c
  SITE (524): n equals a,t,g, or c
  SITE (537): n equals a,t,g, or c
  SITE (589): n equals a,t,g, or c
cgagaggcagaggcggyggcggcggggwggacagcacggccgaggctgcccagmggcgcctcctccacaccccccgcygcrgcagcaccggcgacagattttttaaaaaatggatttggccaaccatggacttattctactgcaacagttaaacgctcagcgagagtttggtttcctgtgtgactgcacggttgcaatcggcgatgtatacttcaaggcacacaaatcagttcttgcttcattctccaattactttaagatgttgtttgtccatcagaccagtgagtgtgtccgcttgaaaccaactgacatacagcccgacatcttcagctatctcttacacttgatgtacactgggaagatggcgcctcagctcatcgacccggttcgattagaacagggcatcaagtttctgcamgcctamccgctcattcaggaagccagcctcgccagccaaggagccttttctcamcctgaccaagttttcccactggcttcttcattgtatggcattcanattgcanatcatcagttganacaagccaccaagattgcttcagcaccctgaaaaaactccggggaaaatccnccgggccacaagaacctcccaagga

SEQ ID NO: 446 - DNA, 534 bp, Homo sapiens
ggggaggcggcggcttccggtctgggacggagctgtagcggcactgtaactgcgagggcagcgcgcgtgtgtaacggcgggggcgtgtcggcgggaaggacaatcgggccgggactcgcggtgtccgggtgaccgcggcttcccgggagcagacctctgtgggcactgtgaggcggaacggagcggcggggcaggagctgttstgggcagccttcatcccgcgtggagtctacccccaagcccttctcctcttcccaattcttgtcaccttcgaggaggccatggaaaccccaacacctttgccgcctgtacccgcctccccgacctgcaacccagccccacggacaatccagatcgagttcccacagcatagctcgtcgctgctggaatctctgaaccgccacaggctagagggaaagttctgtgatgtgtccctcctggtgcagggccgggaacttagggctcataaagcagtgttagctgtgcctctccttacttccatgacaagctgcttctgggggatgcgcctggtct

SEQ ID NO: 447 - DNA, 604 bp, Homo sapiens
gcctctcccacggcggcggctctcggtcccccgctccgcgtctttcgggcatacagtgacctcgggcggcgggtcacgtcggccgggcatggctgcatggagcccggccgcggcagcgcctctcctccgcgggatccgcgggcttccacttcaccatcggatgtttgccactcagactgagggggagctcagagtgacccaaattctcaaagaaaagtttccacgagctacagctataaaagtcactgacatttcaggaggttgtggggcgatgtatgaaattaaaattgaatcagaagaatttaaggagaagagaactgtccagcagcaccagatggttaatcaggcactaaaagaagaaatcaaagagatgcatggattgcggatatttacctctgtccccaaacgctgaccacgccctggctgcatagatgctgctgcttaagaccttggatgaacttcactgacatcattcttccctaagcagtcaccaaaaaatttatatattttgctcatatacatttccatattataattatagaagatgtataatctatttagatgttaattaaaggaaacaaacaactgaagcttttgaagggtc

SEQ ID NO: 448 - DNA, 1956 bp, Homo sapiens
  SITE (502): n equals a,t,g, or c
  SITE (1924): n equals a,t,g, or c
  SITE (1925): n equals a,t,g, or c
gcccagagcgagaggcaktgacactgagcgggcgcagggggccgagtcggagaccgtgccggagttcgggagcggcaacagagtgggcatagacactccgagcagcctcgccgtcgtctctgcgttcctgttgactgcctggctgccccctcccctactcctcggttcctggtgaagaggctgcgcgctgctgtttggggagggggtgtgtggagccgggtcctgtgtccgcagtggctgctgtcggggggtcgcctgttcgcggaggtgcggagagactccttgggggtcgagcacataacggggttcgggtgtctcgtgtgtgaacatcacagggtttgtggatgcacttagatgtttgcaatgagcactgtggctggcatgccccagtgttttggataccaatgcataggactccatagtaatcgaatttaccagaggcgaacgtcatgagcatagtgatcccattgggggttgatacagcagagacgtcatacttggnaaatggctgcaggttcagaaccagaatccgtagaagctagccctgtggtagttgagaaatccaacagttatccccaccagttatataccagcagctcacatcattcacacagttacattggtttgccctatgcggaccataattatggtgctcgtcctcctccgacacctccggcttcccctcctccatcagtccttattagcaaaaatgaagtaggcatatttaccactcctaattttgatgaaacttccagtgctactacaatcagcacatctgaggatggaagttatggtactgatgtaaccaggtgcatatgtggttttacacatgatgatggatacatgatctgttgtgacaaatgcagcgtttggcaacatattgactgcatggggattgataggcagcatattcctgatacatatctatgtgaacgttgtcagcctaggaatttggataaagagagggcagtgctactacaacgccggaaaagggaaaatatgtcagatggtgataccagtgcaactgagagtggtgatgaggttcctgtggaattatatactgcatttcagcatactccaacatcaattactttaactgcttcaagagtttccaaagttaatgataaaagaaggaaaaaaagcggggagaaagaacaacacatttcaaaatgtaaaaaggcatttcgtgaaggatctaggaagtcatcaagagttaagggttcagctccagagattgatccttcatctgatggttcaaattttggatgggagacaaagatcaaagcatggatggatcgatatgaagaagcaaataacaaccagtacagtgagggtgttcagagggaggcacaaagaatagctctgagattaggcaatggaaatgacaaaaaagagatgaataaatccgatttgaataccaacaatttgctcttcaaacctcctgtagagagccatatacaaaagaataagaaaattcttaaatctgcaaaagatttgcctcctgatgcacttatcattgaatacagagggaagtttatgctgagagaacagtttgaagcaaatgggtatttctttaaaagaccatacccttttgtgttattctactctaaatttcatgggctagaaatgtgtgttgatgcaaggacttttgggaatgaggctcgattcatcaggcggtcttgtacacccaatgcagaggtgaggcatgaaattcaagatggaaccatacatctttatatttattctatacacagtattccaaagggaactgaaattactattgcctttgattttgactatggaaattgtaagtacaaggtggactgtgcatgcctcaaagaaaacccagagtgccctgttctaaaacgtagttctgaatccatggaaaatatcaatagtggttatgagaccagacggaaaaaannaaaaaaaagggggyckktctagaggcggggg

SEQ ID NO: 449 - DNA, 311 bp, Homo sapiens
  SITE (98): n equals a,t,g, or c
tccttcgcgcgtgaggctgcggctctgacgcccataggctccttcaatttccgtgatcctcggagtccccaggagaccaggtgatggcagcagccagnactcctgccagtgccggcaggaccccaggccaagctgaccttcgaggatgtggctgtgctcctctcccaggatgaatgggaccgcctgtgccctgctcagaggggcctctacagaaatgtgatgatggaaacctatgggaatgtagactcattggacaacctcaaatatgaccacactacagcctggcacaacaagacagtttatcttgggca

SEQ ID NO: 450 - DNA, 506 bp, Homo sapiens
gcggccgcggaggcccgtccgattgctgctccgcgctccgagcggctgtcggcgtgcgctatcgccccgccctggttagtgtctagccggccggcgaggcctgcgcagttgcagcggccggggaagatggtggaggacggcscggaggagctggaggatctggtgcacttctccgtgtctragttgcctagtcgcggctaggcgtcatggaggagatccggcggcagggcaagctgtgcracgtgaccctcaagattggggaccacaaattcagtgcccaccggattgtcttagcagcctcgatcccgtatttccatgctatgtttacaaatgacatgatggagtgcaagcaggatgagattgtaatgcaaggaatggacccaagtgccctggaggctctgatcaactttgcctacaacggcaaccttgccattgaccagcaaaatgtccagtcattgctgatgggggcgagcttcctgcagctgcagagcatcaaagacgcctgc

SEQ ID NO: 451 - DNA, 462 bp, Homo sapiens
  SITE (419): n equals a,t,g, or c
  SITE (434): n equals a,t,g, or c
gggcacgagatagaggggtctgtccagctcagctgcagtgtgaaggaggagcccaatgtcgatggacaggaagtggcaccctccagccctccacttgcagcacagtcccctgaggggmaccatggacaccaagaaccagcctccacatccttccacccacccaggattcaggaggagtgggggctgctggaccggtcacagaaggaactgtactgggatgcgatgctggagaagtacggcacagtggtctccctggggttaccgccccaccagccagaggcacaggcccagtcagagctggggatgctgctcacggggacaggcgtctgcagaagcctgcgctcgggaaatgagagtgagggtccacctggctgcccagaggccagccgcccaaggccagggccggcagcttggagggnttgtctgggctgcantctgccccactgtgggccagggcaacgc

SEQ ID NO: 452 - DNA, 317 bp, Homo sapiens
gagacttctccaaaatatcatacttgcatcaccaggtagacacatttccttctacacagaattatcttcagagcttcttaaagcaaataaagcctgcttcaaggactgrgtccctagacgaattcccggraggagtggagcctgtcatattggattcagtgacttttgatgatctggctgtggacttcaccccagaagaatggactttactggacccaactcagagaaacctctacagagatgtgatgctggagaactacaagaatttggccacagtaggrtatcagctcttcaaacccagtctgatctcttggctg

SEQ ID NO: 453 - DNA, 1166 bp, Homo sapiens
  SITE (1114): n equals a,t,g, or c
gggaggaggaccaggtgggagggtggcggctcactcaggacccagcgggggcagcgcgatgaggcgggtgaccctgttcctgaacggcagccccaagaacggaaaggtggttgctgtatatggaactttatctgatttgctttctgtggccascagtaaactcggcataaaagccaccagtgtgtataatgggaaaggtggactgattgatgatattgctttgatcasggatgatgatgttttgtttgtttgtgaaggagagccatttattgatcctcagacagattctaagcctcctgagggattgttaggattccacacagactggctgacattaaatgttggagggcggtactttacaactacacggagcactttagtgaataaagaacctgacagtatgctggcccacatgtttaaggacaaaggtgtctggggaaataagcaagatcatagaggagctttcttaattgaccgaagtcctgagtacttcgaacccattttgaactacttgcgtcatggacagctcattgtaaatgatggcattaatttattgggtgtgttagaagaagcaagattttttggtattgactcattgattgaacacctagaagtggcaataaagaattctcaaccaccggaggatcattcaccaatatcccgaaaggaatttgtccgatttttgctagcaactccaaccaagtcagaactgcgatgccagggtttgaacttcagtggtgctgatctttctcgtttggaccttcgatacattaacttcaaaatggccaatttaagccgctgtaatcttgcacatgcaaatctttgctgtgcaaatcttgaacgagctgatctctctggatcagtgcttgactgtgcgaatctccagggagtcaagatgctctgttctaatgcagaaggagcatccctgaaactgtgtaattttgaggatccttctggtcttaaagccaatttagaaggtgtggatatggaaggaagtcagatgacaggaattaacctgagagtggctaccttaaaaaatgcaaagttgaagaactgtaacctcagaggagcarctctggcaggaactgatttagagaattgtgatctgctgggngtgatcttcaagaagccaacctgagaaggtccaacgtgaaaggggctatatt

SEQ ID NO: 454 - DNA, 434 bp, Homo sapiens
ttgtgaagccgcctgttgcagattccctggcaaacccccttcagttaacacctatgaacagtctggccacctctgtattcagcatagctattctgtttgatggtgatgaagacagtgcatctgggggaggtgttgtagccattgacaacmaaatagaacaagcaatggatctggtgaaaagccatttgatgtatgcagtaagagragragtggaagttttaaaggaacaaataaaagaattagttgaaagaaactctttacttgaacgagaaaatgcactgttaaaatctctttcaagcaatgatcaattatcccaactcccaacccaacaggccaatcctggtagcacttctcaacagcaagcagtgatagcacagcctccgcagccaacgcaacctccacagcagccgaatgtctcctcagcataaagcttt

SEQ ID NO: 455 - DNA, 2322 bp, Homo sapiens
ctgaaaataagcctgttgtgaagccgcctgttgcagattccctggcaaacccccttcagttaacacctatgaacagtctggccacctctgtattcagcatagctattcctgttgatggtgatgaagacaggaatccttcaactgctttctaccaagcgttccatttgaacacgttaaaggaatcaaagagcctctgggatagaattttttttagaattcagcatcggaggaggaatgtgacataataatgatcgaaagccgaaagtttaaaagttgtgatgccctcacatggttggagggttattctagcttctaaggactgaatgttgtccacaagagtgtcatcaggtcataaattgtgcatctgggggaggtgttgtagccattgacaacaaaatagaacaagcaatggatctggtgaaaagccatttgatgtatgcagtaagagaagaagtggaagttttaaaggaacaaataaaagaattagttgaaagaaactctttacttgaacgagaaaatgcactgttaaaatctctttcaagcaatgatcaattatcccaactcccaacccaacaggccaatcctggtagcacttctcaacagcaagcagtgatagcacagcctccgcagccaacgcaacctccacagcagccgaatgtctcctcagcataaagctttcttaagcctcattaagaaaaaaactgaaagcaatctatccttgtgtgccactggtgttctttccactttatacgaaagcaagtagccatgctttggttgtgtgtttggccttttcagtattagacaatcattctacaagagcttttcctctctctgagatgtcatgcagcgctgttgatgtccagttctatgtcatcagtacacaaggagaataatagatggggtttattaaagcgagcaaagtctgcattttacctggtgcgcatgagtggggtctttaagagttttggtggctctcccatgtttcctattacccatggatttaccctgagccttcctatcacattataaataacagttcatctaawgagccacttttctttctgattcagtaacatttgcctacataagttttcatttatttgtgttttatttattacagggctgctattttcataatgtacatgaacaatgtcacagaacttttttaatttttttgaataattataagtatcagtaaaggaagtgaaagacaggattgcatttaatagataaaacgtttaggcaataattgaacaaaagaatcctggcatatttctaacactaatggcaatttacttatggtatttattttcagtagtaaagacccagcttgaatgtaaattttgtatagtgtaagtatgaagaacatagtgcaactgtacaggtagtcaccagttattgtgatatgataaataattgggctattttgatgaagaaaactttgttcatttgtttctactttctaagagaaattgccacgattcctctgcttttcaacatttcgtatgacttttttttcgggtgggaataaaaagctgtgaaattgttcaacctactttgtaaccaaagaagcaaagctgtgtaatggagtttggtttttttttgttgttttttttttttgtctttttttttttttataatgcacattctttatgtatttttatttagtgttttctcagtcacaattttctttactgtctagcatgatctgcatgacctataatctttgaaccactttcgtacctcatgtttttatccagcactcttattgtaatatgtactagtctgtgaacaatgtcaaataaaagagaacgaacaggtagtttggtggagctgagctagtgtacaatacactagttgtaaaaaaaaaaaaaaaaagtgagccatcttttgttcatttaaaatggtgttttgaatttcgtatgcagaaaacgttttgttacattgcagattttaatgtatttaataaatgcaacatgcagattaagtgcagtgtatactgagtatttaaattaaaatgtacatttcataaatacagtttcaaaagaaagcatcattttgtgtatactaacacattaagtgtatgtcagaaattgatgtataaatatatattttaacattttctgaaattaaactgcagttttgttgaaatatttggctctatatgtgttcaaaatttgactagatttgtattttcacagttcaaaatactccttaaagacctgttaataatgacttactgatagttcttaaattttcaaagtaaaacaatttaaagaatgcaaaaatagtgagcaatatttgtactcaatattcatatta

SEQ ID NO: 456 - DNA, 1223 bp, Homo sapiens
  SITE (545): n equals a,t,g, or c
  SITE (1104): n equals a,t,g, or c
  SITE (1184): n equals a,t,g, or c
gtgacactatagaaggtacgcctgcaggtaccggtccggaattcccgggtcgacccacgcgtccgggcttttccggaaggagcggctcggtgttggggctaggccggtattctaggcccaagcccaggcccaggcctgtgttcccggcccttgctcaaagacaggccggtggccgctgcgacactctaggtacagcggagggcgcagcgggccgttcgctgaggtgtccggacccgccgccgagcgggccgtggagccacagtacgtggcggcgcctcttccttgcccgaagcggaactgctgaaggagcggcagcgcaggccggacgaggtgaaccaggtcatttaaccgccttcaggtgatgaatcatctgtctaataatcagatttgaggtccacagccctttgtggtcctgctacagggtgattttcagtggatgactgactggcgtggcccgaggggtgccgcagtgactgccttcccttgataaggaaacgagctttctgttctttctggacacctcgttacctgtaaaacattccggntataacttctttatccggcttgcatctctgtgcaagaggaaagctttyacatgaaagtgtcccttggtaacggcgaaatgggcgtctctgcccatttgcagccttgtaaggcaggaaccacacgcttttttaccagcaatactcacagttcggtggtattgcaaggctttgatcagcttagaatagaaggattgctttgtgatgtgaccctggtaccaggtgatggagatgaaatcttccctgttcacagagctatgatggcgtctgctagtgattatttcaaarccatgttcacaggtggaatgaaagaacaagatttgatgtgcattaagcttcatggggtgaacaaggttggtctgaagaaaatcattgattttatttatactgcaaaactttctcttaatatggacaatcttcaggacacacttgaagctgctagctttttacaaatattacccgttttggatttctgtaaagtatttcttatatcaggagtctctttggataactgtgttgaggttggacgaattgctaacacctacaatcttatagaagtggntaaatatgttaataatttcatcctgaagaactttcctgctttattgagtactggggagtttctaaaactcccttttgaangacttgcatttgtgctttccagtaatagcttaagcactg

SEQ ID NO: 457 - DNA, 1817 bp, Homo sapiens
ttttttttttttttaaagagcccactctgctttatttacaacacgcaggctgtctgtacaaacagcggccgatattattaaaaacaaaagaggtgagtgagaatcgtcacctttctgctttccttcctcacttggccaggctctagtactccacctttgagctgccatgcccaataggggaagtccaaaattaaaaatacaaccggtgtagaagaaaataaatggggagtgaaatagaagaaaagatgagggaggggagtgctaatatttacactagagttttatagacaactgtcccattccatcccaattccaatcctgacccagaaagtgatggtggcaggtccaagagacagagattatgtgtcgggacacagacagcctcccatccccaaccgtaatggattcaatttcaagtccacagagtggggaggaaggatagggtgggaaagtgagacactcattttcaaacaagtctcccttgagaattcctgccttgaagtgcagacagtatccaagctccaggggataggctgaggaccctgaggctcagttcccaaatcatgttgtcatttggaagttccaggctaaagttggtgccatcagggctctccagatttgggaggcccccctaaccgccgggcctctggcctcagttccttgcatttctggcaataaaagaagtcggggacgttggtcttcttaatcttagcacaggagaggtggatccacgtcccacacaggctgcactcaatcatgggccgccctgcaaagggctttcgacagtaacatgtgatcagatcccatgagtcatcacctgattctaccatgatgtcctcgtccatgacccgcatctcgccttcactggagctggcatctccatcttggcttgtttcagtgctgcccacctccttgctttcactgtcagcaggagggactccttcagggtgcactgtggcagggggcctaggagcctcagggggtgttggcagcacagggactggggcttcaccccctaccactgttgccatctcttcttcttcttcctcttcctcctcttcctcctcctcttcagagtctgtatcactggggggtgcctggggaggcccaggaggtgggagtctatccccccgttctgccttttttaacttccgcttcttgctcttcttgattcgagatctcttttccccatccccaggagttggccgaggcctccgaagcaccccaaagccagccccagctcctggccccaactttcggttctttcggtccttctttcgaggaggatgggagaggtccccctgggaaaggggcacgggggtaagagcagcagggggccgggaggtatgtgtcagggatgtgggggacaaaggagatgccactttgggcccatccagatcaaagagagagtccttgagcttcatcttctcaagcaaggtagcactgtcgggggcctgcagacgagagaaagtggaccttgggggtcctggctgggtgggacctgcttgagctgcccttctcttggatgactttgctttcttaacaaaagtctggatggttcgaagatctgagggggccgagtcccagccatcactgtcggccgcactctctcctcgcaatggagagctggagccagaggctggccagtcactttcctctttgctagggggaatgtaaccagcatatgccaaaacaaaactgcagaatttgttgaaatcctcaattgttctccgccgtttctctggtggctgagtctctggcttaagggtcgraggtggataggcacacgcatccaacgctacttcacggccgggacc

SEQ ID NO: 458 - DNA, 2772 bp, Homo sapiens
tatagggagagagctatgacgtcgcatgcacgcgtaactttgggcccctcgagggatcctctagagcggccgccctttttttttttttttgagatggagtctcgctcttgttgcccaggctggagtgcagtggtgcgatcccggcccactgcaacctccgccttcccaggttcaagcgattctcctgccttggcctcctgaatagctgggatcacaggctcccgccaccacacccggctaatttttttttcgtatttttagtagatacggggtttcaccatgctggccaggccggtctcaaactcctgacctcgtgatccacccgcctcggcctcccaaagtgctgggattgcaggcgtgagccaccacgcccggctagcacttccctttttaagctagtgctggcatgccaccttcccctcaaagcagagtcaacttccttttgtttgagagttttgtactggcctctgtaggyyttttcaggatacaaaataaagtgcccttcagcatccacatgcgagtgggttgccttccagtgtcagatctgtgttccagagtttggtcaatgcatctttacaagaataaaaccacatgcctacacacacagacgagcctggaaatggctttctggacagggttacttgttatcttgacacttcccctaaaagaaattactttcttggtgtaagatgattaggacattgaatgacctactctcaacttctggaagggcagcttgttttgtccatttttcaatgagggagtgggaagaacccaacattttcagttacaacaataagattttgtttttttttttttaaaaaagggtcctatgtggaaatgagtgggacaatgataaaaataaacaaataattaaaattccaaatcaaaacataactcctggccctgagatccccagttaatcctctaagaccacaatctccacattgtgaacttgatgctggtgttcttccatctcagccacaactttctcctcagtcctcagctctgtctccaagatgactgctttgccctcagtatcttcagcttctgggtccggggctggatcaatctcaatgatggtctgcccatcctctgaggtgctttcaacagcctgaattgccgaggttaggccggactccatggccaccaattccacagggctaaccatggtggtcatgttgcccagtgtactcccatcctgcatggcagtagagctcagcagcgccaagctagatgaagggtggatggtcactgtgtctggtgagctgctcttggcagaggagaccactgtggcatagcggaagagctgagggccagaaggcagtgtgtggacagtcacaggactggagccctggctgagggtggccactggaatattgcccatggaaaatgactgacccactggggtgatggtgatgggtgaratgactgtgaactgaggctgctggacaggaggagaagggctcaagacagtggtggaggctggccgctggagccggggcctttttggaggcttaggagtgctcacaggcatcagtaccacattttgaactgtctgagatttcagcctgtgatcctggccttgcttcttctgctcctccaactggcgttccaagtctgtcagagtatagagaaactgttcttctccctgctctacttggttccttctgttgtctaaaaccttcttgactgtgtccattaggccaaatgtgtgtgctacattgttgagaacagcagcatctgtgacttggaagggagcctggatgagccgctgctgaactcccctgagtagctcctctatttccttctgtatattgcagacaacctcttccatcagccctacatcagctattcctttccagaacatcaaagtgtcctctgaaatttcctctgagtctttctttacaccctcctccgtggccatggtgacagcagcggtgagagctgagttccattccagccctgcctcttccatgctctcttctgagatggcaatctgcgtgatgctaccatcagccgaagtgggtgtctgcaccacacttgtctgctgtcctggcactggagctcttgcactgctgatcagaagatcaaatttggtgcttctgcaggtattggagcaaactttgtcatgttggtaaaaatcaatctgtccggagtccatcattttcctgagcatgatcccacccagacgaatagctctcttccagtccttcagagtggacttgccagccagatgaacaaagtgcttggggctgatcaactgatcattgaacttgacacacttcacgtttattcctggacatacaaacttcttccagaggaggatggctttgctctccccacaagttatggggtaagcaatttccatatcctcatttgcttctatagtgcctgtatcaatcccttcttcaattttgtgtatcgtgtgagtttctactgctacaactgccgtgttgttctccgacccagcttcataaatcccttgttgcacaggctgtaactgcaaaatcacttgggttttagtgtcttcaggattctccccttcatttccttcagtaggtaccacaaccacatcccccactgggacactcacttctgcattagccatctttcacatgaagtcagatagctgggactgcgtctccgtcgggcgggcgggcggcgagcggccacccacgcgtccgcggacgcgtgggtcgacccgggaattccggaccggtacctgcaggcgtaccttctatagtgtcacctaaatagctttttgcaaaa

SEQ ID NO: 459 - DNA, 668 bp, Homo sapiens
  SITE (59): n equals a,t,g, or c
  SITE (149): n equals a,t,g, or c
cgcctgcaggtaccggtccggaattcccgggtcgacccacgcgtccgggtaaagctgtncctattcctccacatccaatatacattccgccttctatgatggaacatacgcttcccccacctccatccggactgccttttaatgcgcanctagagagcggttaaaaaaccctaatgctcctatgttaccgccacctaaaaacaaagaggattttgagaagactctgtcgcaagccatagtcaaagtggttatcccaacagaaaggaatttgctcgccctgatacatcgaatgatagagtttgttgtacgtgaagggccaatgtttgaagctatgattatgamcagagaaatcaacaatcctatgttcaggttcttatttgaaaaccagacaccagcccatgtttactataggtggaagctttattctattctgcagggagattctccaactaaatggcggacggaagattttcgtatgtwcaaaaatggatctttttggaggccaccaccattaaatccgtacttgcatggaatgtcagaagagcaagaaacagaagcttttgtagaggaaccagtaaaagggagcacttaaggaagaacagagggataaattggaagaaatcttgcggggattaactccaaggaaaatgatattggagagccatggg

SEQ ID NO: 460 - DNA, 495 bp, Homo sapiens
  SITE (277): n equals a,t,g, or c
tcaacgctccggggccgctcgctcgcctttcttccctcgcctttctctcctcttgcttcaccctccccccttcttttcacgttgctggttttttttgttgttgttttatgctttaggggttttgttcctcggctcgagctcatgggtgtacattatcatgctcttcttttgtagagcagcccgacggccatggaggctgaagagacgatggaatgccttcaggagttccctgaacatcataaaatgatcctcgaccgattgaatgaacagcgagasnaggaccggtttactgacatcaccctaattgtcgacggacaccattttaaggctcacaaggctgttttggctgcttgtagtaagttcttctacaaattctttcaggagtttacccaagaaccattggtggagatagaaggtgttagtaaaatggcctttcgccatttaattgagttcacatatacagcaaaattaatgatacaaggagaagaagaagcc

SEQ ID NO: 461 - DNA, 396 bp, Homo sapiens
  SITE (223): n equals a,t,g, or c
  SITE (264): n equals a,t,g, or c
  SITE (328): n equals a,t,g, or c
atggcttcccttccgttttcgcgtsgttcttttgcaagctctggattctctggagtttgaatgtttccagtattggaaccccaccaagtaggactgatcaggtcttacaattctaaaaccatgacctgtaactggggaagacctttgaagttctgtccaacaaagtatatgaagtttcaggaattagtgacattcagggatgtggccatagacttctctcggnaggagtgggaatacctggaccctaatcagagggacttatanagggatgtgatgttggagaactatagaaacctggtatcactgggaggacattccatttctaaancagttgtggttgatttactggagcgaggaaaagagccctggatgattttgaggggaagaaacacagta

SEQ ID NO: 462 - DNA, 520 bp, Homo sapiens
  SITE (384): n equals a,t,g, or c
  SITE (417): n equals a,t,g, or c
  SITE (450): n equals a,t,g, or c
  SITE (454): n equals a,t,g, or c
  SITE (482): n equals a,t,g, or c
tacaaagaggaatggagattgcctctatccacctagattcataagctggcctgaggtgatcttggcatcaaggaagggatgcacatcatcacaccatcagcttcagagaatggcagccatttatttgtcccgtgggaaccaatctgmccttttgaagaaaagacaaaggtagaaaggatggtggaggactacctggcaagtggttatcaggattcagtgacgtttgatgatgtggctgtggacttcaccccagaggagtgggctttactggacacaactgagaaatacctctacagagatgtgatgctggagaactacatgaacctggcctctgtggaatgggaaatacaacctagaaccaaacggtcatcacttcagcagggntttttgaagaatcaaatattcagtgggatacanatgacaagaggctacagtggatggaaactctgngacngtaagaattgtggagaggtcttcagggnaacagtttttgccttaagacccacatgagagttcagaa

SEQ ID NO: 463 - DNA, 3082 bp, Homo sapiens
  SITE (3061): n equals a,t,g, or c
  SITE (3072): n equals a,t,g, or c
aagcttgcggccgcaggggccagacccggaacggctccagagcctccagagcctccgggtctgggcggcgcttcggctcctcccgagccgcctgctagccccgcgccgcactccatccccacaggctggggacgggcccggtgcggctgtgtgggttcgggagcggagttgcagaatccaaggacccattttgttctttctccgcactgctttatgggaggcattatggcccccaaagacataatgacaaatactcatgctaaatccatcctcaattcaatgaactccctcaggaagagcaataccctctgtgatgtgacattgagagtagagcagaaagacttccctgcccatcggattgtgctggctgcctgtagtgattacttctgtgccatgttcactagtgagctctcagagaaggggaaaccttatgttgacatccaaggtttgactgcctctaccatggaaattttattggactttgtgtacacagaaacrgtacatgtgacagtggagaatgtacaagaactgcttcctgcagcctgtctgcttcagttgaaaggtgtgaaacaagcctgctgtgagttcttagaaagtcagttggacccttctaattgcctgggtattagggattttgctgaaacccacaattgtgttgacctgatgcaagcagctgaggtttttagccagaagcattttcctgaagtggtacagcatgaagagttcattcttctgagtcaaggagaggtggaaaagctaatcaagtgcgaygaaattcaggtggatyctgaagarccagtctttgaggctgtcatcarytgggtgaagcatgccaagaaagagcgggaagaatccttgcctaacctgctacagtatgtgcggatgcccctactaacccccaggtatatcacagatgtaatagatgctgagcctttcatccgctgtagtttacaatgcagggatctggttgatgaagcaaagaagtttcatctgagscctgaacttcggagtcagatgcagggacccmggacaaggsctcscctagatatgawctatgtctctggaggctttgatggaagcaggcgtcacaccagtatggagcgctatgatccaaacattgaccagtggagcatgctgggagatatgcagacagcccgggaaggtgccggactcgtagtgkccagtggagtgatctactgtctaggaggatatgacggcttgaatatcttaaattcagttgagaaatacgaccctcatacaggacattggactaatgttacaccaatggccaccaagcgttctggtgcaggagtagccctgctgaatgaccatatttatgtggtggggggatttgatggtacagcccacctttcttccgttgaagcatacaacattcgcactgattcctggacaactgtcaccagtatgaccactccacgatgctatgtaggggccacagtgcttcgggggagactctatgcaattgcaggatatgatggtaattccctgctaagtagcattgaatgttatgaccctatcatcgacagctgggaagtcgtgacatccatgggaacccagcgctgtgatgctggtgtttgtgttctccgcgagaagtgaccattgttggagcaccatccagagctagtgaccagtccagtggacagttagtgggagaatcaaaaatcctttccagaatgtctgtttctcactatgtgcaccgggtgattacaggcaccagtgcagtgatgattgtacttatttgacacatactccccgtcgtcctggttcttgttcctgagaagggtgggtaaatattccaggaaaaagaatgcacattgaatggatgtgagagaccacattgcctctcccactgctttggggagcactttcctgtcatttctaacttaccacatgcttggtgtactatatgtatgttgtgcctcatatgttgcaaagaactaaggtgagtatagcctactagatatgggcaatatccagcctagatgattggaaagataccagtttaagtaaacttggtaaaatccaagtcttttttttttttttccaggaacaactacattttctcatatacaggtagctaggggcaacacagttccattctagagggaaacaaaagggagagccccacaaaactttggggacaagggagagagagactcatctgacacttcttttggaggtcaggatttgtatatcagaattgaagttagaattaagtgaattaaactgaatttgattgtgagtgaacctagaacagcactgaagtattacataacctggaagactgagaagggtatattatttgaaggatctttttatttccccgaggtctttcgcactggagacagcataaaagagtgaacaaatgttgggatgagagaagatgacatcaatgtgggagttcagtataactggggataaactagaagaacctgtgattttacagtcatcttattacctgccagggctcatctagccatggcaatgtttgccttgaatgggggtgaaagcctttctttgttggatcaaatactactacactattacacttccacactatttatttggggatgggctgggagtgacagtagcctagtagttcagctacctgattactgccccattcttttagaagcacatgtctgccaaggagtggtttgtactgctgtgtttggtacatctagtcttttttctgctataagttttccttacctgtcctttagtgtagattttattcatcacaggacagaataatcaaggacaaccaaaatccttttgttagtttcagtacctcagctatcaacatttctgagctaccattcaatgttcctctgtgtcatggagtgaaattcttgttttgtgggtattaggagtgtgggaatgtgataacctaaacaacctttgctctgaaattccatttttccctctttccctgagttgtattgacctacagagttaatttcctttgtatttttttaagaaaatattaaaaatcaacggtctcaaaaaaaaaaaaacggacgagctcggcaattcctgnacccggggtcnctagttttaa

SEQ ID NO: 464 - DNA, 903 bp, Homo sapiens
  SITE (889): n equals a,t,g, or c
gccgaccccggccccacgggcggacactcggccgggcagccgcgggccgagcgcagcgcctccgccaccgatgcgcctggtggccagactccaagtgggaccggcggacacgcagcctcgcgtgtcaggggaagctgatggagaatcgagctctggatccagggactcgggactcctatggtgccaccagccacctccccaacaagggggccctggcgaaggtcaagaacaacttcaaagacttgatgtccaaactgacggagggccagtatgtgctgtgccggtggacagatggcctgtactacctcgggaagatcaagagggtcagcagctctaagcaaagctgcctcgtgactttcgaagataattccaaatactgggtcctatggaaggacatacagcatgccggtgttccaggagaggagcccaagtgcaacatctgcctagggaagacatcagggccgctgaatgagatcctcatctgcgggaagtgtggcctgggttaccaccagcagtgccacatccccatagcgggcagtgctgaccagcccctgctcacaccttggttctgccgacgctgcatcttcgcactggctgtgcgggtgagccttccatcctccccagtccctgcctctcctgcctcctccagtggggcagaccagagactcccatcacagagyctgagctccaagcagaagggccacacctgggctttggagacagatagcgcctctgccactgtccttggccaggatttgtagactccctgagcctcagtttcctcaactgtaaagtggagatgggtttggtgtcgggaataacgggaccaataaatgatgctttactattaaaaaagaaaatccatgtaaataaaaaaaaaaaaaaaaangggcggccgtttta

SEQ ID NO: 465 - DNA, 983 bp, Homo sapiens
  SITE (712): n equals a,t,g, or c
  SITE (890): n equals a,t,g, or c
  SITE (939): n equals a,t,g, or c
  SITE (965): n equals a,t,g, or c
gcacccgcgttccgtgagtgccctataggcagtcagcatgcccctctgcgtgtccctgtgttacggggacgccggctgggagccgcagagctatctcagaactagggcgctctcctttgggcacctccaggccattttcctttcattcgagcccacagggttagagacaaccctcactccgttgcttggggacaagggcttcactccctgtcccgagcttgcggctgagcttgagggtggctgggtcatcctggccccccactggatgggaattggctgctctggtgatttctgtgacatcccagaccccaactgtggggctctggagcggactgcgcttcacttcgtggggagggtgtttccacctaggccactcttatttctcttcacatccccagatctgtcttctgagactttgcccttctccaggaagagcactcaggagaccaggaaaatggccacagggctcctgagagccaaaaaagaggcgttcgtggcattcagggatgtggctgtgtacttcacccaggargagtggaggttgttgagccctgctcagaaggaccctggcacagggaggtgatgctggagacttataaccatctggtctcactggaaattccatcttctaaaccaaaactcattgctcagctggagcgaggggaagcgccctggagagaggagagaaaatgtccactggacctctgtccanaatcgaagccagaaattcaacttagtccctcctgccctctgattttctccagtcagcaagctctcagccaacatgtgtggctgagtcatctctctcagctgttttcaagtttatgggcaggaaatcctctccacctggggaaaacactatccagaaagatcagaaaccaacagcaggntccattctgctttaatgggcaagcagatgggttccaagagggagaaganccagatcctgtttggggaggtaagcnaaatgggctttcaaaggc

SEQ ID NO: 466 - DNA, 889 bp, Homo sapiens
  SITE (859): n equals a,t,g, or c
  SITE (871): n equals a,t,g, or c
  SITE (878): n equals a,t,g, or c
  SITE (879): n equals a,t,g, or c
  SITE (884): n equals a,t,g, or c
ggcacgagggaaaggaatgagaagacagaagtcagagacaagaagaggctaacatgactgataccactataatttagtgaactgcctcttttctaaagaggactccaaaggaaggactggtcatctctttcatatctcaaaaccatggctcagggatcagtgtctttcaatgatgtgactgtggacttcactcaggagragtggcagcacctggatcatgctcagaagactctatatatggatgtgatgttggaaaactatgcccacctcatctctgtggggtgtcacatgaccaaacctgatgtgatcctcaagttggaacgagagaaagagccatggacatcatgtgcaggtcatacctgcttggaagaaaactggaaagctgaagactttttagtgaaattcaaggaacaccaagagaagtattctagatcagttgtaagcatcaaccacaaaaaactggtgaaggagaagagtaaaatatatgaaaagacatttactctaggcaaaaaccctgtgaattcaaaaaatctacctcctgaatatgatactcatggaaggattttgaaaaatgtttcagaattaatcatcagtaatctaaatcctgcaagaaagagacttagtgagtataatggatatgggaaatcactcctgagtactaaacaagagactactcatcctgaagtcaaatcccataatcaaagtgccagagctttcagtcataatgaagttcttatgcagtatcagaaaacggaaactycagcacagtcatttggatataatgactgtgagaaatcattccttcaaaggggaggcctgattacacatagtagaccttacaaaggagaaaacccccaantttttccctttngggggtnnaaaantttaa

SEQ ID NO: 467 - DNA, 2254 bp, Homo sapiens
  SITE (64): n equals a,t,g, or c
gggaaaatctctcttacaacagctagagaatgttacaaaggaaagacagattaagttactacancagcagaatgacatcacaggcctttcccggcaggtgaagcatgttatgaacttcacaaattgggcaattgcaagtggcagcagcacagcactactatacagcaagcgactgattactttccagttgcgtcatattttgaaagcacggtgtgatcctgtccctgctgctaatggagcaatacgtttccattgtgatcccaccttctgggcaaagaatgtagtcaatttaggtaatctagtaatagagagtaaaccagctcctggttatactcctaatgttgtagttgggcaagttcctccagggacaaaccacattagtaaaacccctggacagattaacttagcacagcttcgactccagcacatgcaacaacaagtatatgcacagaaacatcagcagttgcaacagatgaggatgcagcaaccaccagcacctgtaccaactacaacaacaacaacacaacagcatcctagacaagcagcccctcagatgttacaacaacagcctcctcgattgatcagtgtgcaaacaatgcaaagaggcaacatgaactgtggagcttttcaagcccatcagatgagactggctcagaatgctgccagaataccagggatacccaggcacagcggccctcaatattccatgatgcagccacacctccaaagacaacactcaaacccagggcatgctggaccctttcccgtagtatcggtacacaacaccacaatcaacccaacgagccctactacagcaactatggcaaatgcaaaccgaggtcccaccagcccatctgttacagcaatagrgctaatcccctcagttaccawtccagaaaaccttccatcgctgccagatattccacccatacagttggaagatgctggctcaagtagtttagataatctactaagtagatacatctcaggcagtcacctacccccacagcctacaagcaccatgaatccttctccaggtccctctgccctttctccgggatcatcaggtttatccaattctcacacacctgtgagacccccaagtacttctagtactggcagtcgaggcagctgtgggtcatcaggaagaactgctgagaagacaagtcttagtttcaaatctgatcaggtgaaggtcaagcaagaacctgggactgaagatgaaatatgtagcttttcaggaggtgtaaaacaagaaaaaacagaggatggcaggaggagtgcttgcatgttgagcagtcctgagagtagcttgacaccacctctctcaaccaacctgcatctagaaagtgaattggatgcattggcaagcctggaaaaccatgtgaaaaytgaacctgcagatatgaatgaaagctgcaaacagtcagggctcagcagccttgttaatggaaagtccccaattcgaagcctcatgcacaggtcggcaaggattggaggagatggcaacaataaagatgatgacccaaatgaagactggtgtgctgtctgccaaaacggaggagatctcttgtgctgcgaaaaatgtccaaaggtctttcatctaacttgtcatgttccaacactacttagctttccaaggtaccagtgaaataattgatttttggtgttgattttcataagctaaaaataaataacagaagaatgttcagggcagatggccttctaaccagtgcatagtatttctataaaacagggagcctgttattcttttggtattagcttccagagaaactaacaataaaatatctaagatctaagtagtacattaatgttaaagagtagatttcatctcctggcctttagtttatattcagtataaggaaaatagataaaactctaaattaatagggggctaaggttacaaaacctgcagtctggttctaattctgtagtaagcttgagcaattcactaattatcagggatcagtttttgcatctacaagtggtaggttttggtttagcagagctgtagttcttcccttccatttattattttatgttcatgcaacctcttgtctcttgatttcagagaccataaaatagtagagtcatacttgtttttttcagtcttctccttcctctcttgtcccccaatttctttttggtgaaagtaagtcagtattcttggggtaaacccagcttttttcttgctataaattgaaaaaaaaaaaaacaaaaaagggcggccgct

SEQ ID NO: 468 - DNA, 981 bp, Homo sapiens
  SITE (644): n equals a,t,g, or c
  SITE (863): n equals a,t,g, or c
ttttttttttttttttttttttttttttttttttttttttttttttttttttgaagagctgaatttggaatttctggtttttcacaatacaagtagatgatgaccaccaaccatggtttctgaatgaactgggttcaaaacatatctggttgcaacagagggcttccttggaccctaacatttgaaattaaacagaggtaatttgaggagctgcgattttacacagtggtggcatcctggggagcttctattccatcagtcaattttaatatctcacaatcgtggaaaaggagtttccgagcagggacgagcaatatcgatgggaagccgatacttgggccatctcttggagattcctgctgtaaggacggcaagtgtttctccagagaaagcacttgcctgggtatgactcagggccgggcaggaattcacactatgaatccgggtggtgggaaggcggagaagtatgcccagtgagaccacgttcccataattctctaacatcacttctctgtagaggtccctctgaacagggtccaggtatccccattcctctcgagtaaggtgcacagccacatcctcgaatgtcacaaactcctggtacctggctgtcaagagcgcagctgcctggtctcctgggcttncctcacggggaagagcaggcacctgaggaacaggtggagccccagtgagtccctgttccatgtcggtgtcctgcacaaactgaggctctggggacagacactcagactgggtctccaaagactgaaactggacccttggtgaccctgctgcttcctgggctggtatttcctccatcactgctctggaggacaatgaccatcacgaggggagggtgcggncctggccgctgtcctgtcacctacacactcgcgctcggggccaccwcwgcctctcccgggccgctgtagacagccccgaggccggcgcttctcggtggcacttccggcgacggagtgc

SEQ ID NO: 469 - DNA, 814 bp, Homo sapiens
  SITE (182): n equals a,t,g, or c
  SITE (762): n equals a,t,g, or c
  SITE (786): n equals a,t,g, or c
  SITE (809): n equals a,t,g, or c
  SITE (814): n equals a,t,g, or c
ggcacgagtataattccaactacataactgtcctattattacttacctgacatcacattcccagtcattgtcacagctcctgaatcttgttccatttcctccacaagcaggctaattttaccccttcttcagtgacagaagaggcctgggctatggctgagcctaaatatatttgctatttnaggtgacatttagtgatgtggctatagacttctctcatgaagagtgggcatgcctagattctgctcagagggacttatacaaggatgtgatggtccagaattatgagaacctggtctctgtaggtaagggatatcaccccttccactccaataggggacacctttcttttgccaccctggaattgctggaggattctcctaagtaaatggctgaattctgtaccatgstcccgaggraatgtgcagctctgttgtgccctgcctaaagcttatctttccatttcagtgaacacccttcatccattcctgtggtccctcttgtgatggcctctcataatagaggaccacagcttaaacaattctatatttktcctgtaagcaggtctttccgtaactaagccatatgtgatcatgttattggaggatggaaaagagccctggatgatggagaaaaaactgtcaaaaggtatgattccacatgagtcatggtgamcgagacaarggaagattttgttaaagatgtttatagtgagtgtggaagcattttagggatactgtcttcaaagatctcagatagaantgaaaaattgaggkrtattwagcntagatttwcaaaacaattgtccnccctn

SEQ ID NO: 470 - DNA, 827 bp, Homo sapiens
ggcacgagggccctgccgcgccgctgcggctcctcctccctccttccgtcctccgcgccttccgtcggtcggtccttgcttcctgcttcgcctccgcgcctcgcgctatgggacagagcccccgatccgccagcaccacctgaggatccagaaaccgccccagcgatggaagaggatcaggagctggagagaaaaatatctggattgaagacctcaatggctgaaggcgagaggaagacagccctggaaatggtccaggcagctggaacagatagacactgtgtgacatttgtattgcacgaggaagaccataccctaggaaattctctacgttacatgatcatgaagaacccggaagtggaattttgtggttacactacgacccatccttcagagagcaaaattaatttacgcattcagactcgaggtacccttccagctgttgagccatttcagagaggcctgaatgagctcatgaatgtctgccaacatgtgcttgacaagtttgaggccagcataaaggactataaggatcaaaaagcaagcagaaatgaatccacattctagtcctttatgcagtatacaaggagaactgtcctgtaggatattctcttcctgatggtgcagaacccagaattagaagtttgtggttacagcatactctgtccttcagaaaggcgtgattctagctgttgaccccttgcagctgttggaatctctgcaagaacctctgtattcttctaataaattccctcttttatttaaaaaaaaaaaaaaaaaaaaaaraaaawaaaaccagaccttgttctaaaaaaaaaaaaaaaaaa

SEQ ID NO: 471 - DNA, 915 bp, Homo sapiens
  SITE (894): n equals a,t,g, or c
  SITE (903): n equals a,t,g, or c
  SITE (905): n equals a,t,g, or c
  SITE (914): n equals a,t,g, or c
agatggcggcgctgaggggtcttgggggctctaggccggccacctactggtttgcagcggagacgacgcatggggcctgcgcaataggagtacgctgcctgggaggcgtgactagaagcggaagtagttgtgggcgcctttgcaaccgcctgggacgccgccgagtggtctgtgcaggttcgcgggtcgctggcgggggtcgtgagggagtgcgccgggagcggagatatggagggagatggttcagacccagagcctccagatgccggggaggacagcaagtccgagaatggggagaatgcgcccatctactgcatctgccgcaaaccggacatcaactgcttcatgatcgggtgtgacaactgcaatgagtggttccatggggactgcatccggatcactgagaagatggccaaggccatccgggagtggtactgtcgggagtgcagagagaaagaccccaagctagagattcgctatcggcacaagaagtcacgggagcgggatggcaatgagcgggacagcagtgagccccgggatgagggtggagggcgcaagaggcctgtccctgatccagacctgcagcgccgggcarggtcagggacaggggttggggccatgcttgctcggggctctgcttcgccccacaaatcctctccgcagcccttggtggccacacccagccagcatcaccagcagcagcagcagcagatcaaamggtcagcccgcatgtgtkgtgartgtgargcatgtcggcgcactgaggactgtggtcactgtgatttctgtcgggacatgaagaagttcgggggccccaacaagatccggcagaagtgccggctgcgccagtgccagctgcggcccgggaatcgtacaagtactttccttcctcgntcttaccantnacgcccttna

SEQ ID NO: 472 - DNA, 667 bp, Homo sapiens
  SITE (624): n equals a,t,g, or c
ggaaagcggaaccaccaaaaggagtgatgatcaacgatctcatgataaatctggatgctagttctcatgcctcaggacatcctactgggaacgacacaccagctcctgggatcagactttcatctacttaggacccctctttgcccagactactaaagccagtcttcactagccacgaatggctacccaaaggaaacacttggtgaaagattttaatccttacattacctgctatatctgtaaagggtatctgatcaagccaacaacagtgacggaatgcctccatacattctgtaagacttgtattgttcagcactttgaagatagcaatgattgcccaaggtgtggcaaccaagttcatgagacaaatccattagaaatgttgaggttggacaatacattagaggaaattatatttaagctggtccctggactacgrgaacaagaacttgagcgtgaatctgaattttggaagraaaataagcctcaagraaatggacaagatgatacttcaaaagctgacaaaccgaaagtagatgaagaaggtgatgaaaatgaagatgataaagattatccacaggaagtgacccacaaattggctatctgtctaggttgttttacggnattaatggggccattcgggggacatgttggtaaagggttttaa

SEQ ID NO: 473 - DNA, 2287 bp, Homo sapiens
  SITE (2248): n equals a,t,g, or c
gctttttttttttctccctccgsgtctcctttttgactccctccccctttatgctcgcccagccctccccctgctgctgaraagtgggggagggtctcggcctccaggttcccgccccaccgsgcmcgggcgagcatggggggcaagcaragcacggcgrcccgctcccggggcyccttcccgggggtctccaccgatgacagcgccgtgccgccgccgggaggggcgccccatttcgggcactaccggacgggcgrcggggccatggggctgcgcagcgctcggtcagctcggtggcaggcatgggcatggaccccagcacggccgggggggtgccctttggcctctacacccccgcctcccggggcaccggcgactccgagagggcgcccggcggcggagggtctgcgtccgactycacytatgcccatggcaatggttaccaggagacgggcggcggtcaccatagagacgggatgctgtacctgggctcccgagcctcgctggcggatgctctacctctgcacatcgcacccaggtggttcagctcgcatagtggtttcaagtgccccatttgctccaagtctgtggcttctgacgagatggaaatgcactttataatgtgtttgagcaaacctcgcctctcctacaacgatgatgtgctgactaaagacgcgggtgagtgtgtgatctgcctggaggagctgctgcagggggacacgatagccaggctgccctgcctgtgcatctatcacaaaagctgcatagactcgtggtttgaagtgaacagatcttgtccggaacaccctgcggactgacctgcgggcttgcttgctgactcctctcaaagggacagagcgcccctgctccagggaggaggctcaccggaccctggggcagagctgagcttgggacaccagcgggaacagggcaccccttctgcactgacttccagatcatggttctcccttcctccctgaggacaccaaattggatgagagcaagtttgagagaagaatgaatcaactgctatccttcccctcacccctcagcccaggagggaaagggcattttctttttcatctttgaaaggcattgtgggtctgtctttaaagtgtttacaaaaaaaaattatataaaaaaaaagtctagtgtcgactggtgktttccctcgtgatgtttacagcttgctgtttgctgcccagccataacccactcagtgacagacgaacacagctaaggcctcgctgccagccttctgacggcgggcgagcacacggtctcttcccctgccccaactggccctctccaccaccaacttctctactttgggtttgtttggttttttccctctatttttctggctggttttttgctcttttctccccttgagaccctaatatcttgacttcattgccaaaaaacaacccattgagaactttcttcctactgatcccatctcttttcccttctttcctcctggttccggtcagttcagaggatttaacaatcacaagtgtcctgcaaaaatgcctgaacattattcttaggccctcgtggattttttttttcagaaaacttaaacaaaaaaagacttactaagaaatatgtacagctacccctgttttcaggcactatgtttgagaacattttagccattgatgttcacacgtggcatcagcccatgcaagataggtttctgtatttatatattaaaatacaaaaaaaaacttataaaatgtttaaaaaaatgttcaaagcttgggagaaaagctttcttcattagtcaaggtgttttgatatggtattaaaatgtctaataaaagatggcactgcgtgattttattttaatgaagtgttatacaatcaagaaatgggggcaagggcctgccccccactccctcacctacctccttagcattccttcaggctgctactcggggctccaggtgtgtgaattggtcctcagatagtcaggcctgggtggagggagtggcaagtcaggcgtgcctcctacaagcttcctaacctcttaagcatcatggaaccagtcagccctctgtggagtcattgtgccggacctctgaaaagatctgcaggggccaagatgttgcagccaccggaggctgcaaggatgtgggttcttccaggtgtgggcccagcccccctccttccagccttttgctccccatcccacgttccactcgcccttgcctgttgtttcagttttgcgtcttcagtgcttgantcacggggcatgctttcatttgagggcccaggaagaagg

SEQ ID NO: 474 - DNA, 1284 bp, Homo sapiens
  SITE (722): n equals a,t,g, or c
ggaagggggtcaaaggaacggtgattatcacctgtgaggggaaagggggtgctgtcctccctccttcccttttcctcagcctgcaccccctgcaatcccccacctttcggggtctccccctccttgttgctaaggcccggaccgtcatcccagcaacagcctcagtcatgtgaccggcaatggcggcgctgacgagagtcctggtcagctgagtggaaatagaaggatttctgctgccatcatcttccatgggctttccaggtcacacgasctaacaagtagggagcagggaaagaagartgagcctgcatgccaattctaagctcttcaggatcaaaaatggcagctgtggaggcacctgcaagaacaaagtgactgtgtccaagcccgtgtgggacttcctgagcaaagagaccccagcccggctggcccggcttcgggaggagcaccgtgtgtccatcctcatagatggcgagacttctgacatctatgttctccagctttccccacagggtcctcccccggcccctccaaatgggctctacctagcccggaaggctctcaaggggctgctaaaagaggcagagaaagagctgaagaaagctcagaggcagggggagctgatgggctgcctggctctggggggtggaggggagcaccctgagatgcaccgcgcaggcccaccccctctccgagcagccccacttctgcccccaggagcntcggggctcccccctcctcctccccccctgcccccacctcttcctcctcgccttcgggaggaggcagaagagcaggagagcacctgccccatctgtctgggggagatccagaatgccaagacattggagaagtgccggcattcattctgcgagggctgcatcacccgggctctgcaggtgaaaaaggcctgccccatgtgcggccgcttctatgggcagctggtgggcaaccagccccagaatgggcggatgctggtctctaaggacgccaccctcctactgcccagctatgagaagtacggcaccattgtcatccagtacgtcttcccgcccggtgtccagggggtaagaagaccatggcctgcccttaccctttggctttccccaagctctgacctaggaaaaccgggtgagggtgagtgtgcttgttagatgtgagacagtcttgctgtcttccactgtgccctcctactcagtgccctggacctaggaggtccccgtgagcccagcctttccatccctgtgatcccaaggcacacgtgaaaatcagatatgagctagg

SEQ ID NO: 475 - DNA, 1791 bp, Homo sapiens
  SITE (923): n equals a,t,g, or c
cccaaaggcatccaagagaccgaggagatgctgaaggtgggggccaccctcacaggggttggcgaactggtcctggacaacaactctgtccgcctgcagccgcccaaacaaggcatgcagtactatctaagcagccaggacttcgacagcctgctgcagaggcaggagtcgagcgtcaggctctggaargtgctggcgctggtttttggctttgccacatgtgccaccctcttcttcattctccggaagcagtatctgcagcggcaggagcgcctgcgcctcaagcagatgcaggaggagttccaggagcatgargcccagctgctgagccgagccaagcctgaggacarggagagtctgaagagcgcctgtgtagtgtgtctgagcagcttcaagtcctgcgtctttctggagtgtgggcacgtttgttcctgcaccgagtgctaccgcgccttgccagagcccaagaagtgccctatctgcagacaggcgatcacccgggtgatacccctgtacaacagctaatagtttggaagccgcacagcttgacctggaagcacccctgcccccttttcagggatttttatctcgaggcctttggaggagcagtggtgggggtagctgtcacctccaggtatgattgagggaggaattgggtagaaactctccagacccatgcctccaatggcaggatgctgcctttcccacctgagaggggaccctgtccatgtgcagcctcatcagagcctcaccctgggaggatgccgtggcgtctcctcccaggagccagatcagtgcgagtgtgactgaaaatgcctcatcacttaagcaccaaagccagtgatcagcagctcttctgttcctgtgtcttctgtttttttctggtgaatcgttgcttgctgtggacttggtggaggactcanaggggaggaaaggctgggccccgagtacaacggatgccttgggtgctgcctccgaagagactctgccgcagcttttcttctttttcctcatgccccggkwaacagtctttcttcagaattgtcaggctgggcaggtcaacttgtgttcctttcccctcacctgcttgcctccttaacgcctgcacgtgtgtgtagaggacaaaagaaagtgaagtcagcacatccgcttctgcccagatggtcggggccccgggcaacagattgaagagagatcatgtgaagggcagttggtcaggcaggcctcctggtttcgccactggccctgatttgaactcctgccacttgggagagctcggggtggtccctggttttccctcctggagaatgaggcgcagaggcctcgcctcctgaaggacgcagtgtggatgccactggcctagtgtcctggcctcacagcttccttgcaaggctgtcacaaggaaaagcagccggctggcaccctgagcatatgccctcttggggctccctcatccagcccgtcgcagctttgacatcttggtgtactcatgtcgcttctccttgtgttaccccctcccagtattaccatttgcccctcacctgcccttggtgagccttttagtgcaagacagatggggctgttttcccccacctctgagtagttggaggtcacatacacagctctttttttattgcccttttctgcctctgaatgttcatctctcgtcctcctttgtgcaggcgaggaaggggtgcctcaggggccgacactagtatgatgcagtgtccagtgtgaacagcagaaattaaacatgttgcaaccaaaaaaaaaaaaaaaaaaaaaaaaaaa

SEQ ID NO: 476 - DNA, 2273 bp, Homo sapiens
ggcacgagggagtgtccgctgtgcctggtgcggctgccgcctgagcgggccccgcgcctcctcagctgtccgcaccgctcgtgccgggactgcctccgccactacctgcgcctggagataagcgagagcagggtgcccatcagctgccccgagtgcagcgagcgactcaacccgcacgacatccgcttgctgctcgccgacccgccgcttatgcacaagtacgaggagttcatgctgcgccgctacctagcctcggaccccgactgccgctggtgcccggccccggactgcggttatgctgttattgcctatggctgtgccagctgcccgaagctaacttgtgagagggaaggttgccagactgagttctgctaccactgcaagcagatatggcatccaaatcagacatgcgatatggcccgtcaacagagggcccagactttacgagttcggaccaaacacacttcaggtctcagttatgggcaagaatctggaccagatgacatcaagccatgcccacgatgcagtgcatacattatcaagatgaatgatggaagctgtaatcacatgacctgtgcagtgtgtggctgtgaattctgttggctttgtatgaaagagatctcagacttgcattacctcagcccctctggctgtacattctggggcaagaagccatggagccgtaagaagaaaattctttggcagctgggcacgttgattggtgctccagtggggatttctctcattgctggcattgccattcctgccatggtcattggcattcctgtttatgttggaaggaagattcacagcaggtatgagggaaggaaaacctccaaacacaagaggaatttggctatcactggaggagtgactttgtcggtcattgcatccccagttattgctgcagttagtgttggtattggtgtccccattatgctggcatatgtttatggggttgtgcccatttctctttgtcgtggaggcggctgtggagttagcacagccaacggaaaaggagtgaaaattgaatttgatgaagatgatggtccaatcacagtggcagatgcctggagagccctcaagaatcccagcattggggaaagcagcattgaaggcctgactagtgtattgagcactagtggaagccctacagatggacttagtgttatgcaaggtccttacagcgaaacggccagctttgcagccctctcagggggcacgctgagtggcggcattctctccagtggcaagggaaaatatagcaggttagaagttcaagccgatgtccaaaaggaaattttccccaaagacacagccagtcttggtgcaattagtgacaacgcaagcactcgtgctatggccggttccataatcagttcctacaacccacaggacagagaatgcaacaatatggaaatccaagtggacattgaagccaaaccaagccactatcagctggtgagtggaagcagcacggaggactcgctccatgttcatgctcagatggcagagaatgaagaagaaggtagtggtggcggaggcagtgaagaggatcccccctgcagacaccaaagctgtgaacagaaagactgcctggccagcaaaccttgggacatcagcctggcccagcctgaaagcatccgcagtgacctagagagttctgatgcacagtcagacgatgtgccagacatcacctcagatgagtgtggctccccccgctcccatactgcagcctgcccctcgacccccagagcccaaggtgcaccgagcccaagtgcccatatgaacctctctgccctagccgagggacaaactgtcttgaagccagaaggtggagaagccagagtatgaagtggaatgaatgctcctgttctgagaagcacacttgtaactgcatcttttggaatttttttttttttttttccaaggggtagagatttatgtattttatttcacagattctctggtcacaggtttttgcccagggaaattctgagaaattcacaatttcttaccagataaaacatgaaaagtttgccgttagttcccctcccctcccctccctctttttagttttaatttattggttaaactgatggcagcaatccatgaggtgtgtcaaagagtgtacatatgtatgtgtgtatattgaatgctaaacatattactgaaagacacattttaataaagatttctgtcataattcaaaaaaaaaaaaaaaaaaaaaaaaaaaaaaaaaaaaaaaggggccgctcgcgatctagaactag

SEQ ID NO: 477 - DNA, 894 bp, Homo sapiens
  SITE (846): n equals a,t,g, or c
  SITE (874): n equals a,t,g, or c
ctgttatcaggacatgaaatctgctgtgatcacgccttgcagtcattttttccatgcaggctgtcttaagaaatggctgtatgtccaggagacctgccctctgtgccactgccatctgaaaaactcctcccagcttccaggattaggaactgagccagttctacagcctcatgctggagctgagcaaaacgtcatgtttcaggaaggtactgaacccccaggccaggagcatactccagggaccaggatacaggaaggttccagggacaataatgagtacattgccagacgaccagataaccaggaaggggcttttgaccccaaagaatatcctcacagtgcgaaagatgaagcacatcctgttgaatcagcctagaggagaagcagcaggaatgatgctttgatactctggaggagaagttaactcaagatggaattcatgttctgatttgaggaatgaaaatgagatgatcaggcaggaaactgacattccaaggatctaatccaggaagtactctcagtggggaccacctgctttcatcccctgacattgtgggagaaattttgcaatgtatgctaatcaaaatgtatttatatgttctctgctgatgttttatagaggtttgtgaagaaaattcaacctcagcaacttcagaaactgcccctgatacgtgtgagagagaaataaaatcagattttgagtgttgaagggactgaggaagtgaggataaagagcatgaggacagcatggaaagaaggaggcagaagtggaactgaactttcactctccatgggacagatcaatctcattatcaagtctgaatagcaaccagccctctccttcancccgttctcctcagttaattgggagccncattgcaagtaaggggccgt

SEQ ID NO: 478 - DNA, 1117 bp, Homo sapiens
  SITE (998): n equals a,t,g, or c
  SITE (1065): n equals a,t,g, or c
  SITE (1091): n equals a,t,g, or c
agcccctcaaacagaaacaagtagtagacggggtcagctacctccttcaggrgatctatggaattgaaaacaagtacaacacacaagattctaaggtggctgaagacgagtgagtgataacagtgccgagtgtgtggtgtgtctctcggatgtccgggacaccttgattctgccctgtcgccacctctgcctctgtaacacctgtgcagacacgctgcgctaccaggccaacaactgccccatctgccgactgcccttccgggcactgcttcagatccgagccatgaggaaaaaattgggccccttgtccccaaccagctttaaccccatcatctcatcccagacatctgactctgaagagcatccatcctcagagaatattccaccaggctatgaagtagtatctcttctggaggccctcaacgggcccctcaccccgtccccagcagttcctccacttcacgtgcttggagatggccacctctcaggaatgctcccttcatatggcagtgatggccacctgccccccgtcaggacgatctcgcctcttgaccgcctgtctgacagcagcagtcagggactcaaactcaaaaagagtctctccaaatccacttcccaaaactcttccgtgctgcatgaagaggaagatgagcattcctgcagcgagtcggagacacagctctctcagagaccgtcggttcagcatctcggagaggaatgtggtgtgactccagaaagtgagaatctcaccytgtcgtcatctggagctattgaccagtcgtcttgcacagggacgcctctgtcatccactatttcctccccagaaggccctgccagcagcagcttggcccagtctgtcatgtccatggcatcctcccagatcagcactgacaccgtctcctccatgtctggctcctacatcgcccctggcactgaarargarggagaggctctctcttccccccagcctgccagcagggccccctcagaagaagganaggggctgccagcggagtctccagacagcaactttgctggcctcccagctgggagagcaggatgcanagggaaatgatgttatagaggaagangatggatcacccacgcaggaaggcca

SEQ ID NO: 479 - DNA, 899 bp, Homo sapiens
  SITE (496): n equals a,t,g, or c
catcctgaaaagttccctgagctaccggctgcctcctgcttcccgcctgctccccggcccaccccaactctggcacccaagcgtgcctggccctcagacacagagatcwttgtcaaccaggcctgtgggggggacatgcctgccttggaaggggcaccccataccccgccactgccacggcggccccgtaaggraagctcggagctgggctttccccgcgtggccccagaggatgaggtcattgtgaatcagtacgtgattcggcctggcccctcggcctcggcggcttcttcggcggcggcaggcgagcccctggagtgccccacctgtgggcactcctacaatgtcacccagcggaggccccgcgtgctgtcctgcctgcactctgtgtgtgagcagtgcctgcagattctctacgagtcctgccccaagtacaagttcatctcctgccccacctgccgccgtgagactgtgctcttcaccgactacggcctgnccgcgctggctgtcaacacgtccatcctgagccgcctgccgcctgaggcgctgacggccccatccgggggtcagtggggggctgagcccgagggcagctgctaccagaccttccggcagtactgtggggccgcgtgcacctgccacgtgcggaacccactgtccgcctgctccatcatgtagtagcgcctgcctgcccgccactgcccgctgagcctcgctcgctgcttcttcagggacccggccctgccctgccgcccgctgacccttccttccccaccatggcttccggccccaccccgagtggcattgtcgctgcagccaactttgccattaaaactctttgccaaagttaaaaaaaaaaaaaaaaattgagggggggccggtaccaattgcccaaaggg

SEQ ID NO: 480 - DNA, 496 bp, Homo sapiens
  SITE (354): n equals a,t,g, or c
gtgcggagtggactctggctttgaggccccacgcctgggtgagcagggcggggactttggctacggcgggtacctctttccgggctatggcgtgggcaagcaggatgtgtactacggcgtggccgagactagccccccgctgtgggcgggccaggagaacgccacgcccacctccgtgctcttctcctctgcctcctcctcctcctcctcttccgccaaggcccgcgctgggcccccgggcgcacaccgctcccctgccacttccgcgggacccgagctggccggactcccgaggcgccccccgggagagccgctccagggcttctctaaacttggtgggggcggcctgcgganccccggcggcgggcgggattgcatggtctgctttgagagcgaagtgactgccgcccttgtgccctgcggacacaacctgttctgcatggagtgtgcagtacgcatctgcgagaggacggacccagagtgtccgtctgccaca

SEQ ID NO: 481 - DNA, 2066 bp, Homo sapiens
  SITE (2050): n equals a,t,g, or c
ttgggcttgggagccggcaggtgcgggccgagggcgggcacagcggccggcggagctgaggcgcgcggcggggaaagctcggccggcctcccgggccccagccttctccagaacccctgctacccacgactaagccccgaacaatctgcccttgggcttgwtctcttcgcagttgtcggccctgggccgggagctggagtcccagactcataggtcccggcccagcccccgaagagccgcctcagccggggggagttgctcggactcaaacgtccagtcctcgtgcgaccgcgctgggtcggaagtgagcaggctgaggccaccatggagcagtgtgcgtgcgtggagagagagctggacaaggtcctgcagaagttcctgacctacgggcagcactgtgagcggagcctggaggagctgctgcactacgtgggccagctgcgggctgagctggccagcgcagccctgccaggggacccctctctcagccaccctctctctggtgatgtcacagtgctgccggaagatcaaagatacggtgcagaaactggcttcggaccataaggacattcacagcagtgtatcccgagtgggcaaagccattgacaggaacttcgactctgagatctgtggtgttgtgtcagatgcggtgtgggacgcgcgggaacagcagcagcagatcctgcagatggccatcgtggaacacctgtatcagcagggcatgctcagcgtggccgaggagctgtgccaggaatcaacgctgaatgtggacttggatttcaagcagcctttcctagagttgaatcgaatcctggaagccctgcacgaacaagacctgggtcctgcgttggaatgggccgtctcccacaggcagcgcctgctggaactcaacagctccctggagttcaagctgcaccgactgcacttcatccgcctcttggcaggaggccccgcgaagcagctggaggccctcagctatgctcggcacttccagccctttgctcggctgcaccagcgggagatccaggtgatgatgggcagcctggtgtacctgcggctgggcttggagaagtcaccctactgccacctgctggacagcagccactgggcagagatctgtgagacctttacccgggacgcctgttccctgctggggctttctgtggagtccccccttagcgtcagctttgcctctggctgtgtggcgctgcctgtgttgatgaacatcaaggctgtgattgagcagcggcagtgcactggggtctggaatcacaaggacgagttaccgattgagattgaactaggcatgaagtgctggtaccactccgtgttcgcttgccccatcctccgccagcagacgtcagattccaaccctcccatcaagctcatctgtggccatgttatctcccgagatgcactcaataagctcattaatggaggaaagctgaagtgtccctactgtcccatggagcagaacccggcagatgggaaacgcatcatattctgattcctacctggaaggaattttgttgaaaggggttttcacctgtgagccttggtctgtctcggtagggtggtcaacttcagtggactgtggttggtttcagagcgcctggctgaggagttccactgaggggagcactggagcagccctttggcagaggctgaggagggagatggaccagcccacgcctggcacctggctccatggcataaggaaagggagatgctggcctctgtgctcctgctgtcttttcctgtttctgtttgcgtttgacttagtagcaaccgacagagtggcaagggatttggtcttcagcagtagacatccttccacccctgccctcagccaagtctcttgctgccatgccaatgctatgtccacccttgcccctcggcccaagagtgtccagcggtggcccacctcttcctcccactacagcctcaacagtatgtaccatctcccactgtaaatagtcccagttagaacggaatgccgttgttttataactttgaacaaatgtatttactgcccttctcatttctcctngggcaacctttaggct

SEQ ID NO: 482 - DNA, 446 bp, Homo sapiens
  SITE (362): n equals a,t,g, or c
  SITE (400): n equals a,t,g, or c
ggaaggaagccaacaggatccgacccggtgttttgtgacaaaggcaagacccccaggtctacttagagcaaagttagtagaggaggcagctaggcgtggctctcattccttcccacagaatggattataagtcgagcctgatccaggatgggaatcccatggagaacttggagaagcagctgatctgccctatctgcctggagatgtttaccaagccagtggtcatcttgccgtgccagcacaacctgtgccggaagtgtgccaatgacatcttccaggctgcaaatccctactggaccagccggggcagctcagtgtccatgtctggaagccgtttccgctgccccacctgccgccacgangtgatcatggatcgtcacggagtgtacgggctggcaanaagaactgctgggtggaaaacatcatccacatctacaaacaaggaa

SEQ ID NO: 483 - DNA, 693 bp, Homo sapiens
  SITE (11): n equals a,t,g, or c
  SITE (13): n equals a,t,g, or c
  SITE (623): n equals a,t,g, or c
  SITE (640): n equals a,t,g, or c
  SITE (670): n equals a,t,g, or c
  SITE (687): n equals a,t,g, or c
  SITE (690): n equals a,t,g, or c
cggacggggcnangccctgcatgcacacgttctgcgcggcttgctactcgggctggatggagcgctcgtccctgtgtcctacctgccgctgtcccgtggagcggatctgtaaaaaccacatcctcaacaacctcgtggaagcatacctcatccagcatccagacaagagtcgcagtgaagaagatgtgcaaagtatggatgccaggaataaaatcactcaagacatgctgcagcccaaagtcaggcggtctttttctgatgaagaagggagttcagaggacctgctggagctgtcagacgttgacagtgagtcctcagacattagccagccatacgtcgtgtgccggcagtgtcctgagtacagaaggcaggcggcgcagcctccccactgcccagcacccgagggcgagccaggagccccacaggccctgggggatgcaccctccacgtccgtcagcctgacgacagtcaggattacgtgtgccctctgcaaggaagccacgccctgtgcacctgctgcttcagcccatgcccgaccggaragyggacgcgarcaggacccgcgtgkcgccctcamcwttstgccacctgtactggggctgcacccggaccggctgctacgnttgctggccccgtttgngactcaactgggtgacagtgtctggacggntgctgacaacacagctncantca

SEQ ID NO: 484 - DNA, 2273 bp, Homo sapiens
ggccagagagaaaagactgcgaggtggccgcagctgtggccggagaggtgggagtcggagcgaggccctctcgggggagcagggtgaacgccggccactctaggatcctcactcggggagaggaggcatagctcgcggtgtcacctccagccgcaacgtactccgggtcggccttgcgctcggggcctgagaggggcggcggcggggtcaggggccgcacaaagaatgaaccagcagtggaagagaaaatactgtaagctggctgactgctggtgaagaaaatgctttatttttgtggcaggcatctgtgggatctgtaatagaaatgatggctggctgtggtgaaattgatcattcaataaacatgcttcctacaaacaggaaagcgaacgagtcctgttctaatactgcaccttctttaaccgtccctgaatgtgccatttgtctgcaaacatgtgttcatccagtcagtctgccctgtaagcacgttttctgctatctatgtgtaaaaggagcttcatggcttggaaagcggtgtgctctttgtcgacaagaaattcccgaggatttccttgacaagccaaccttgttgtcaccagaagaactcaaggcagcaagtagaggaaatggtgaatatgcatggtattatgaaggaagaaatgggtggtggcagtacgatgagcgcactagtagagagctggaagatgctttttccaaaggtaaaaagaacactgaaatgttaattgctggctttctgtatgtcgctgatcttgaaaacatggttcaatataggagaaatgaacatggacgtcgcaggaagattaagcgagatataatagatataccaaagaagggagtagctggacttaggctagactgtgatgctaataccgtaaacctagcaagagagagctctgctgacggagcggacagtgtatcagcacagagtggagcttctgttcagcccctagtgtcttctgtaaggcccctaacatcagtagatggtcagttaacaagccctgcaacaccatcccctgatgcaagcacttctctggaagactcttttgctcatttacaactcagtggagacaacacagctgaaaggagtcataggggagaaggagaagaagatcatgaatcaccatcttcaggcagggtaccagcaccagacacctccattgaagaaactgaatcagatgccagtagtgatagtgaggatgtatctgcagttgyctgcacagcactccttgacccaacagagacttttggkttctaatgcaaaccagacagtacccgatcgatcagatcgatcggaactgatcgatcagtagcagggggtggaacagtgagtgtcagtgtcagatctagaaggcctgatggacagtgcacagtaactgaagtttaaataaaaatgtcttcagctccatgctcaaggttgaaagggttacctgtaaatttctgcccacataacattatactcatccctagtagtgcattttgggagttggggtgggaaggggtatgggaaggatagactcataattaaaatgtctaacatgtctctgttgagaaatttatttaatgtaaggaacttgggtgttaatagttgagagctgtttagtaataacccagttttcttgaggtctgtttactttatactttttaaaaacttctgtagttcttttggccagtgtgtttgtattatctgtgcattaatggtcctcatctgactcctgcattgtgtcttatttttctgcatggattggcataagaccattactaaaatttggcacctgtgagatgtttgatattatgaacaggaaacataatttaatgtatgaatagatgtgaatttgggatttcaaaatagatgaataacaactattttatagtaaagttattgaaatggaaatgaaaacagccagtaacttatgtttcagaatgtttgtaacacacttcatggtgttcccataggctttgctgtctagtcttatagtttgaggtttttttggtctgcatttttctttttgattacaaaatttataatttaataaatactagagtttatcaaaaacagtttgtctcttgtttgagggtggaaagggtgtggaaacattttgacatttgtgaccaaaggtcacttaaaaagtggtggttttaattggttgttttcagcttaatcacctgctcagaaaagtttgatttttttcttagagattatttaaacagaatctataggcagtgtgtatataataaacatgtatggaaataaa

SEQ ID NO: 485 - DNA, 619 bp, Homo sapiens
caccatcggaacccggaacttgcagaaatatgtgagccgcacttcggttgtgtttgtctccatctccttcattgtcctgatgatcatttccctcgcatggctcgtcttttattacatccagaggtttcgatatgcaaatgccagggataggaaccagcgccgactgggggatgcagcaaagaaagccatcagcaaactccagatcaggaccatcaagaagggtgacaaggaaacagagtctgattttgacaactgtgcagtttgtattgaagggtacaagcccaatgacgttgtccggatcctgccctgccggcatcttttccacaagtcctgtgttgacccctggcttctagaccatcgtacctgtcccatgtgcaagatgaacattcttaaaagccctagggattccgcccaatgccgactgcatggacgacttgcccactgacttcgagggctctctgggaggtcmacccaccaaccagatcacaggtgccagcgacacaacagtgaatgaaagttcagtcactttggaccctgctgtccggactgtgggagccttgcaggtggtccaggatacagaccccatcccccaggagggagacgtcatcttttaactact

SEQ ID NO: 486 - DNA, 1679 bp, Homo sapiens
  SITE (1677): n equals a,t,g, or c
gcaacgggytgggggcacagctgcctggcttgcagccgtcggacacgtcgggctcctcctcttcgtccagctcctcctccagctcttcatcctcttcctccgggcttcggcgtaaaggcagccgcgactgctccgtgtgcttcgagagcgaagtgattgccgcgctggtgccctgtggccacaacctcttctgcatggagtgcgccaatcgcatctgtgagaagagcgagcccgagtgcccggtctgccacaccgcggtcactcaggccatccgcatcttttcttaaaggcagcgggcgctgctagtgcgcaccgtgctgggggaagggggaacccctccccatcctctttccccagcgctcgcctgcctccctgggtgccccccctctgcccttgctccttcccggccccaccaacactctgagatccgagaggagcttggaaagctgtagtatccgctcatttttaaaatttaatttttaagtaaaggaatttgccaggatatctgcatcaagagtactgtagcctgggaaacctgaacacctgaaatgcatgctctataaataataggaacggcgacattctagtaatgatagtttttacactgtacttaataggaagcttccaaaagaagaaaaccccacaagttttccattttcttaaagtaggaaaaaatgaacagtaataattatgatgaagatgatagtagtgctatgggatgtgtggactgtttagtgtgttcccctttgtgggtgggttcctatgatacttattatagaacacagtggatcctttttgaatgttcgtggaagggccaggagttcctgtgaaaccaggatactgcagctttattaaagttaaagaaactgtaacatatctcttatatattaaaaacgtttaaaagttttaaagagaaattgcattaatacagattgaagtattttattcttttttgacttgaaaaattatatttcatattgcaaagatgtttacaagtattttaatttaagttcagtgaacttttttgtagctgggttaaatctttttattttagtatggccttatggcaaagaacactgtattattttaataatcacacaattgtgacggaattacaaccataaaatgtgtaatgttttgaacagtattctgttgggatggagattttataggttcagacaaatcttctagatctgcttcacccagcatattttctattcagtgatataaagcatattttattctatattattacaaaaacggaaatgtataaacatgtcaaaaagaactgttgatgctttctaacatttgtataaatagaattcagtgcaagttacaaaaattctgttgcaccactctagttttagtatttctattttaatacatttgtttaccacttgtttatgtatatgtaggtgatgttacttgagcttaaatgtactttactgagcaaagtttaaaaaacaaagtatattttattttatgataaagggcctttaacctcatggtcaaatactaatattatatttgctgagacaagatttgaaattgtatcaagagttttatttttctgacatttaaagttctacataataaaggtaaaacttaagtaatggtgctacttcattttttaagtatttctatataaataaaatattgaagaaaatcttaaaaaanaa

SEQ ID NO: 487 - DNA, 472 bp, Homo sapiens
  SITE (437): n equals a,t,g, or c
gagactcggcgggcgctgttgagggagtcgggccgcgactgtggtcgtttttataccttcccgcgcggacgccggcgctgccaacggaagggcggagacggagtttcgtcatgttggccaggcccatttgagatctttgaagatatcctcaacgtgaggctctgctgccatgaaggtgaagattaagtgctggaacggcgtggccacttggctctgggtggccaacgatgagaactgtggcatctgcaggatggcatttaacggatgctgccctgactgcaaggtgcccggcgacgactgcccgctggtgtggggccagtgctcccactgcttccacatgcattgcatcctcaagtggctgcacgcacagcaggtgcagcagcactgccccatgtgccgccaagaatggaagttcaaggagtkargcccgacctggnttctcgytggargggcatctgagactcctcatgtt

SEQ ID NO: 488 - DNA, 705 bp, Homo sapiens
  SITE (142): n equals a,t,g, or c
  SITE (638): n equals a,t,g, or c
  SITE (651): n equals a,t,g, or c
  SITE (681): n equals a,t,g, or c
  SITE (690): n equals a,t,g, or c
  SITE (695): n equals a,t,g, or c
ccggagagcacaaagaatgaaccagcagtggaagagaaaatactgtaagctggctgactgctggtgaagaaaatgctttatttttgtggcaggcatctgtgggatctgtaatagaaatatattggagtaattcaagattctntggttggcccttttgactgctctctctacaggtttaatttgggcatttactcattttcatggctccaaggaccatgtatgtgttggggatcttcaatattcatgttattttctcctttggtcttatatgattgttacctttatgaagctttagtgattacaaagcactttttttgtccatttttacctgagctttgtaaactctgatttgcaggatggctggctgtggtgaaattgatcattcaataaacatgcttcctacaaacaggaaagcgaacgagtcctgttctaatactgcaccttctttaaccgtccctgaatgtgccatttgtctgcaaacatgtgttcatccagtcagtctgccctgtaagcacgttttctgctatctatgtgtaaaaggagcttcatggcttggaaagcggtgtgctctttgtcgacaagaaattcccgaggatttccttgacaagccaaccttgttggcaccagaagaactcaangcagcaaagtatnaggaaatggcgaatatgcatggtatttatnaaaggaaanaaatnggtggtggca

SEQ ID NO: 489 - DNA, 356 bp, Homo sapiens
cccagttcgagcggtccccgggaggcggacctgcagctccggtatcttcttcctgctcttcttctgcatcttcgtctgcttcttcctcctcttcgtccagctcctcctccagctcttcatcctcttcctccgggcttcggcgtaaaggcagccgcgactgctccgtgtgcttcgagagcgaagtgattgccgcgctggtgccctgtggccacaacctcttctgcatggagtgcgccaatcgcatctgtgagaagagcgagcccgagtgcccggtctgccacaccgcggtcactcaggccatccgcatcttttcttaaaggcagcgggcgctgctagtgcgcaccgtgctgggggaa

SEQ ID NO: 490 - DNA, 3314 bp, Homo sapiens
  SITE (116): n equals a,t,g, or c
  SITE (244): n equals a,t,g, or c
  SITE (293): n equals a,t,g, or c
  SITE (305): n equals a,t,g, or c
  SITE (394): n equals a,t,g, or c
  SITE (403): n equals a,t,g, or c
  SITE (439): n equals a,t,g, or c
  SITE (448): n equals a,t,g, or c
  SITE (3305): n equals a,t,g, or c
  SITE (3311): n equals a,t,g, or c
ggccaggcccgagtgcctgggcgccctggtggactgcctggtgttcaactaccggctccgccacgggctgggctggagcgcggccccggttgcaggcgctgacggcggcgccgcgnggctcctcagatgcctgggctgccggggcttcctgagcgagccggtgaccgtgccctgtggccacagctactgccgccgctgcctgcggagggaactccgggggcccgtgccgctctgccgggaccgntgccgccgccaccgccagtgccactgatgctgaagggaccgccccgcgnccgccgctctgncgccgccwtcgccgcttcagacttcagaaccagcgtcgtcctcaaccacctggccgagaagtggtttccgggccagcgcgacggccggngrccggcanckcggggagctactgcaccaggggcgctaccgggangccctggcngccgcctgcgaggcgctgcgagcagaacccagtgacttgattgtaaaaatttacagagcggaatcatatgctggtctccaagagtttaaagcagccatagaagatttaaatgcagttctttttcaacttccagattggcctgaggtctacttcaggaaaggaaaagtactctgcgatgctggttttttaggtgatgccttacaactctttcttcagtgcttagcccttgatgaagattttgcacctgcaaagctgcaagtacrmmmgatyttatgtgatttattattacctgaaaacttaaaagaaggcctgaaggaatcttcctggagttcattaccatgtactaaaaacagaccttttgattttcattcagtgatggaagagtctcagtctctcaatgaacctagcccaaagcagagtgaagaaataccagaggtcacttcagagcctgtcaaaggaagcttaaaccgtgctcagtcagcacagtctataaattcaacagaaatgcctgccagagaggactgtttaaaaagagtgtcctcagaacctgttctgtcagttcaagaaaaaggtgttctgctgaaaagaaagttgtctcttttagaacaggatgtgattgtaaatgaagatggaagaaataagctgaaaaaacaaggagaaactcccaatgaagtctgtatgttttccttagcttatggtgatattccagaagaattaatcgatgtctcagatttcgagtgttctctctgcatgaggttgttttttgagccagtaacaaccccttgcggacattcgttctgtaagaattgtcttgagcgttgtttagatcatgcaccatattgtcctctttgcaaagaaagcttaaaagagtatctagcagataggaggtactgtgtcacacagctgttggaagaattaatagtgaagtatctgcctgatgaactgtctgagagaaaaaaaatatatgatgaagaaactgctgaactctcacacttgaccaagaatgttccaatatttgtttgcactatggcctaccccactgtgccttgccctctccatgtatttgagccaagatacagattgatgattcgaagaagtatacagactggaaccaaacagtttggcatgtgtgtcagtgatacacaaaatagttttgcagattatggttgtatgttacaaattagaaacgtgcatttcttaccggacggaaggtctgtggttgatacagttggaggaaagcggtttagggttttaaaaagaggaatgaaagatggatattgcactgccgacattgaatatctggaagatgttaaggttgagaatgaagatgagattaagaatctcagagagcttcatgatttggtttactctcaagcctgcagctggtttcagaatttaagagacagatttcgaagccaaattcttcagcatttcggatcaatgcccgagaggaggaaaaccttcaggcagcccctaatggacctgcatggtgttggtggcttcttgcagttctccctgtagacccacgataccagctgtcggttttgtcaatgaagtctttgaaagaacggttgaccaagatacagcatatactgacctatttttctagagaccaatctaagtaactaactctttggatctccctttaaagtgaccctaatctggctgcattgatggccagattgtctgctgcctttgcacatctagtgctggtttcagaaatttaatgaaacttttctttttccttcgacctcctgaatcatgtggttctgcaaatgaataccttcaactaggatttagaccactaagaacttgcacagaaaaacacgcattgaatgtgtgtcgaacctctacattgtgaagttgcactatgtaccatactctaaaatgaaataagaactctttatgtctgtgagagagtgtgtgtgtgtgtgtgcgtgcgtgtgtgcttgtgggggttgggtagtgtgtgtgtattttctctggctttaaaattttaaaacaaacaaacaaaaaagccatagagagcagaacttgccgagggtcatttattgcccaagtttacaagagtagcgatacaagtttttgcaaattgaatttgcctcagatatatctgtcctaatgcttatatttgcacaagtatgtaaaatatcgtgttgaggatcattctttgttggaaatactgctcttgctgaactgtcttgaccattgactatgacacagtttcttatttatgtaaatacttgcatcacagtggccgacaggcattggatgcagaacctagagccagttttcaggaacaattgtaaacctgacatggtactgtgcatctattcataaaacactcaaaactgtgaaaatatggtttacatttaattgtacataaaggtaaagggagaactcaattcagtaccagttagtttgtacattttagggggcttttcacattaactgcccatttgtgtaatttatagtttgacatgatgtgtttgttttaaaaaaaaatgcatagtataaacccattaaggatctgggaaaagagaagaagtttaatatagaactaagcttttaaagtttgtttttgtttttaattctggtctcggtgcaaatgttagttatgccttattcatatcacagttagatcaccatgctgcaacatggtttatattcatgctgccctagaaacttttgtaattatttgttgcaaatttgtgactgtccttattaactttcttttatgtaagtaatttgtaaaagtttcttaaaatttttgcttttgcttatttaattttgaataaaagctaaattcctaataaaaaaaaaaaaaaaaaaaaaaaaaaaaaaccccggggggggncccggnccc

SEQ ID NO: 491 - DNA, 1399 bp, Homo sapiens
  SITE (5): n equals a,t,g, or c
  SITE (1340): n equals a,t,g, or c
  SITE (1364): n equals a,t,g, or c
ggccnasgcggcrgcggctgcgagaggcggcggcacgacgacggtccctcagcccagccaccatgagcaccaagcagatcacttgcaggtattttatgcatggtgtgtgtcgggaaggaagtcagtgcctattctcacatgacttggcaaacagcaaaccgtccaccatctgcaagtactaccagaagggctactgtgcctatggaactcggtgcagatatgaccacacgaggccctctgctgcagctggaggtgctgtgggcaccatggcccacagtgtgccctccccagctttccacagtcctcaccctccttccgaggtcactgcatccattgtgaaaactaactcacatgaacccggaaagcgtgaaaagagaacattggttcttagagaccgaaatctctctggcatggctgaaaggaagacccagccgagcatggtgagtaatccaggcagctgcagcgacccccagcccagccccgagatgaagccgcattcctacctggatgccatcaggagtggccttgatgacgtggaggccagcagctcctacagcaacgagcagcagctgtgcccctacgcagctgctggggagtgccggtttggggatgcctgtktctacctgcacggggaggtgtgtgaaatctgtaggctgcaagtyttgcacccattcgacccagagcagaggaaggctcaygaaaagatctgcatgttgacgttcgaacacgagatggaaaaggcctttgccttccaggcaagccaggacaaagtgtgcagtatctgcatggaagtgatcctggagaaggcctctgcttctgagaggagatttgggattctctccaattgcaatcacacgtactgtttgtcctgcatccggcagtggcggtgtgccaaacagtttgaaaacccaatcattaagtcttgtccagaatgccgtgtgatatcagagtttgtaattccaagtgtgtattgggtggaagatcagaataaaaagaacgagttgattgaagctttcaaacaggggatggggaaaaaagcctgtaaatactttgagcaaggcaaggggacctgcccatttggaagcaaatgtctttatcgccatgcttaccccgatgggcggctagcagagcctgagaaacctcggaaacagctcagttctcaaggcactgtgaggttctttaattcagtgcggctctgggatttcatcgagaaccgagaaagccggcatgtccccaacaatgaagatgtcgacatgacagagctcggggacctctttcatgcacctttctggagtggratcatcagaaccctaaagagtagatggttgccctgcatcttngggstycmtcgggccgaaactttncccaagccaggggtgtgcgggcttttcccttgtta

SEQ ID NO: 492 - DNA, 676 bp, Homo sapiens
  SITE (12): n equals a,t,g, or c
  SITE (52): n equals a,t,g, or c
  SITE (591): n equals a,t,g, or c
  SITE (601): n equals a,t,g, or c
gaacagctgctncagagctacagtgaggaccctgagccactgctgctggcantggggctgtgcgtaccccaggctcaggctgtacccgtacggcctgaccactgccccgtctgtgtgagccccctggggtgtgacgacgacctgccctctctctgctgcatgcactattgctgtaagtcttgctggaatgagtacctgacaactcggatcgagcagaaccttgttttgaattgcacctgccccattgccgactgccccgcccagcccaccggagccttcattcgtgccatcgtctcctcgccagagtcatctccaagtatgagaaggcgctcctgcgtggctatgtggagagctgctccaacctgacctggtgcaccaacccccagggctgcgaccgcattcctgtgccgccaggcctgggctgtgggaccacctgctccaagtgtggctgggctcttgcttcaactgtagcttccctgaggcacactaccctgctagctgtggccatatgtctcagtgggtcgacgacggtggctactatgacggcatgagcgtggaggcgcagagcaaggcacctgggccaagttcatnttccaagcgntgttcccagttgttcaaggttcccttcgagaagaacgaggggtgcctgcaaatgaacttttgccaaatgttaacc

SEQ ID NO: 493 - DNA, 587 bp, Homo sapiens
cgtccgcaatgtcctccaccragagaaacgtaaaggacacttgatcacacaatccctggaataatatccaggaaacacttgctggagccactcgcagcacccttccctggcagcacacttggggacagcgaggagatragcgcatctctgaattacaaatctttttccaaagagcagcagaccatggataacttagagaagcaactcatctgtcccatctgcttagagatgttcacgaaacctgtggtgattctcccttgtcagcacaacctgtgtaggaaatgtgccagtgatattttccaggcctctaacccgtatttgcccacaagaggaggtaccaccatggcatcagggggccgattccgctgcccatcctgtagacatgaagtggttttggatagacatggggtatatggacttcagaggaacctgctggtggaaaatatcattgacatctacaagcaggagtccaccaggccagaaaagaaatccgaccagcccatgtgcgaggaacatgaagaggagcgcatcaacatctactgtctgaactgcgaatacccacctgctctctgtgcaaggtgtttggt

SEQ ID NO: 494 - DNA, 586 bp, Homo sapiens
  SITE (556): n equals a,t,g, or c
catccagtaccctgcctgactctgacatgcccccagcctcccccagctctgcagggagccctggtsccagagaccttcctcccatttctccctatgggtgcctgacctgagggcagagacatctgagtgtgtataagcacagcaggacaccaggacctggcctgaagacatttcctctcctcccctctggatttctcagagactgttctgcgatgaccacagcaaggtaccggcccacctgggacctggccctcgacccgctggtgtcttgcaagctctgtcttggggagtacccagtggagcagatgacaaccatagcccagtgccaatgcatcttctgtactctgtgcctgaaacagtatgttgagctcttgatcaagaaggattagaaaccgcaattagctgccagatgctgcctgcctaaacagggcactacaggagaacgagattgatgcatgggtgcagctgaaattatgccaagatataaaaagctacaatttgaaagaagkaggtgctggtatatctgscggktatgattcctgkaatgkgtgaatgnggataattttgggggggaagttcttttggg

SEQ ID NO: 495 - DNA, 2428 bp, Homo sapiens
  SITE (19): n equals a,t,g, or c
  SITE (206): n equals a,t,g, or c
  SITE (2421): n equals a,t,g, or c
ggtcgacccacgcgtccgnggacgcgtgggttgctcggcagcttgcaaagcctgacaacaccttgtttgtaaacagaacactttttgatcaggtccttgaattcctttgtagtcctgacgatgactcccgacactctgaaagacagcaggtccttttagaattgctgcaggctggaggcatagttcaatttgaagagagtcgactnatccggatggcagaaaaagctgagttctatcaaatttgtgaatttatgtatgaaagagaacaccaatatgacaaaattattgattgctacttacgtgaccctctgcgagaggaagaagtctttaattacattcacaatatcttatccattcccggacacagtgcagaggagaagcagtctgtatggcagaaagcaatggatcatattgaggaactcgtgtccctgaagccttgtaaagctgcggagctggttgccacccacttttctggacatattgaaacggtcattaaaaaacttcagaaccaggttttgcttttcaaatttttgaggagtcttcttgacccaagggaaggtattcatgtaaatcaagaattactgcaaatatctccttgtatcacagagcagttcattgagctgttgtgtcagttcaacccaacccaagttatagagactctgcaagtccttgagtgctaccgtctggaagaaactattcagattactcagaagtatcaacttcatgaagtcaccgcttatctattggaaaagaaaggagatattcatggtgccttcctaataatgttagagagactacaaagcaaacttcaagaggtaacacatcaaggtgaaaataccaaagaggatccctcattgaaggatgttgaagatactatggtggagaccattgctctttgccagagaaattcacataatttgaaccagcagcaacgtgaggccctttggtttccgttattggaggcaatgatggcccctcagaagctgtccagttcagccattcctcatctacactctgaagctctgaagtctttgaccatgcaagttttaaatagcatggcagcatttattgcccttccatcaatcttgcaaagaatcttacaggatccagtttatggaaaaggaaaacttggagaaatccagggacttatcttgggaatgttagatacctttaactatgaacaaaccctgctggaaacaacaaccagccttytaaaccaagatctccattggtcattgtgtaacctgagagcttcggtcaccagaggactgaatcccaaacaagattactgctctatatgtttgcagcagtacaagagacgccaagaaatggctgatgaaataattgtctttagctgtggccatttgtatcactcattctgcctacaaaacaaagaatgcactgtggaatttgagggccaaacaagatggacatgctacaaatgcagttcaagtaacaaagtaggaaaactcagtgaaaattcatctgaaattaaaaagggaaggataaccccatcacaggtaaaaatgtctccatcgtatcatcagtccaaaggggatcccactgctaaaaagggaacctcagaacctgttctggatccacagcaaatccaagcatttgatcagctttgccgtctctaccgaggaagctccaggctggctctcctcacggaactctcccagaatcgcagcagcgagagctataggccattcagtggctcgcagagtgctcctgctttcaacagcatcttccagaatgagaacttccagctgcagctcattcctccacctgtgactgaggattgatgactccatggagcctggcccaggagaaccagagatgatcccgaggcagctggggagaggccccgcctctggtgggcttggcctccaccacctcccaygcttctgagaagaggttccaaattgggctyctgtgcccagagcgtccacagcaccattcccagtgtagactcccagtcttctccacattgctgtcatggcgtcagttcaccagactcattgattttgttttgcttgttaagcaaaggaatgtcacatacctctgtccagctttttaggaaatacatttcgcctattgcgactttttccatttaccctgaagcctagaaagtaggtggaactcacacaaatggcattccagagtctgccatactccgtctcctccagctgctggataatacagaggaacttcaacttctacagggaacagtggttggccaggctgcagtataactgaagcatgccttggagagagcagacactgtgggggccagggccatctccctttaatgtgttcatgttaaaacctatttgagtgtaagacttgccctttctaacaataaatgctcygtgtttaagttcwaaaaaaaaaaaaaaaactcggggggcccgtacccanttgccct

SEQ ID NO: 496 - DNA, 246 bp, Homo sapiens
gtggatgatgacctagtctgccatatttgccttcaacctctgctgcagccactagacacaccctgtggacatacattctgctacaagtgcctcagaaactttttacaagagaaagatttctgtccgttggaccggaaaagacttcattttaagttgtgcaagaagtctagtattctagttcataaactcctagacaaattattagttttatgtccattttcttcagtgtgcaaagatgtaatgcaa

SEQ ID NO: 497 - DNA, 607 bp, Homo sapiens
aatttgcccctggagccacaaaattccgccgcgaggagggagtcgggccgcgactgtggtcgtttttataccttcccgcgcggacgccggcgctgccaacggaagggcgggcctctgctgccatgaaggtgaagattaagtgctggaacggcgtggccacttggctctgggtggccaacgatgagaactgtggcatctgcaggatggcatttaacggatgctgccctgactgcaaggtgcccggcgacgactgcccgctggtgtggggccagtgctcccactgcttccacatgcattgcatcctcaagtggctgcacgcacagcaggtgcagcagcactgccccatgtgccgccaggaatggaagttcaaggagtgaggcccgacctggctctcgctggaggggcatcctgagactccttcctcatgctggcgccgatggctgctggggacagcgcccctgagctgcaacaaggtggaaacaagggctggagctgcgtttgttttgccatcactatgttgacacttttatccaataagtgaaaactcattaaactactcaaatcttraaaaaaaaaaaaaaagkgcggccgtctagaagatccctcg

SEQ ID NO: 498 - DNA, 836 bp, Homo sapiens
  SITE (45): n equals a,t,g, or c
tcatttttaggtgacactatagtaggtacgcctgcaggtaccggntccggaattcccgcggcgccgccatggccgacgtggaagacggagaggaaacctgcgccctggcctctcactccgggagctcaggctccaagtcgggaggcgacaagatgttctccctcaagaagtggaacgcggtggccatgtggagctgggacgtggagtgcgatacgtgcgccatctgcagggtccaggtgatggatgcctgtcttagatgtcaagctgaaaacaaacaagaggactgtgttgtggtctggggagaatgtaatcattccttccacaactgctgcatgtccctgtgggtgaaacagaacaatcgctgccctctctgccagcaggactgggtggtccaaagaatcggcaaatgagagtggttagaaggcttcttagcgcagttgttcagagccctggtggatcttgtaatccagtgccctacaaaggctagaacactacaggggatgaattcttcaaataggagccgatggatctgtggtcctttgggactcatcaaagccttggtttagcattttgtcagttttatcttcagaaattctctgcgattaagaagataatttattaaaggtggtccttcctacctctgtggtgtgtgtcgcgcacacagcttagaagtgctataaaaaaggaaagagctccaaattgaatcacctttataatttacccatttctatacaacaggcagtggaagcagtttcagagaactttttgcatgcttatggttgatcagttaaaaaagaatgttacagtaacaaataaagtgcagtttaaaaaccaaa

SEQ ID NO: 499 - DNA, 264 bp, Homo sapiens
attcggcccagagcggaagtcgtctggcctccccgcggccgctcgcagcttgctggcctctcccgcgcctcacgtcggactccgtctccgcggcagggaagcagcatggaagctgaggacatccaggaggagttgacctgccccatctgcctggactatttccaggacccggtgtccatcgagtgcggccacaacttctgccgcggctgcctgcamcgcaactgggcgccgggcggcggccgttcccctgccccgaatgtctgc

SEQ ID NO: 500 - DNA, 1020 bp, Homo sapiens
  SITE (940): n equals a,t,g, or c
  SITE (950): n equals a,t,g, or c
  SITE (970): n equals a,t,g, or c
  SITE (988): n equals a,t,g, or c
  SITE (999): n equals a,t,g, or c
agagagaaaagactgcgaggtggccgcagctgtggccggagaggtgggagtcggagcgaggccctctcgggggagcagggtgaacgccggccactctaggatcctcactcggggagaggaggcatagctcgcggtgtcacctccagccgcaacgtactccgggtcggccttgcgctcggggcctgagaggggcggcggcggggtcaggggccgcacaaagaatgaaccagcagtggaagagaaaatactgtaagctggctgactgctggtgaagaaaatgctttatttttgtggcaggcatctgtgggatctgtaatagaaatgggatcttcaatattcatgttattttctcctttggtcttatatgattgttacctttatgaagctttagtgattacaaagcactttttttgtccatttttacctgagctttgtaaactctgatttgcaggatggctggctgtggtgaaattgatcattcaataaacatgcttcctacaaacaggaaagcgaacgagtcctgttctaatactgcaccttctttaaccgtccctgaatgtgccatttgtctgcaaacatgtgttcatccagtcagtctgccctgtaagcacgttttctgctatctatgtgtaaaaggagcttcatggcttggaaagcggtgtgctctttgtcgacaagaaattcccgaggatttccttgacaagccaaccttgttgtcaccagaagaactcaaggcagcaagtagaggaaatggtgaatatgcatggtattatgaaggaagaaatgggtggtggcagkacgatggagcgcactagtagagagctggaagatgctttttccaaaggtaaaaagaacactgaaatggtaattgctggctttctgtatgtcgcttatcttgaaaacatgggtcaatataggagaaatgaacatggcctcgcangaagattaancgagatataatagatttccnaagaaggagagctggacntagctaactgngatgcttaaccgaaacctaca

SEQ ID NO: 501 - DNA, 2426 bp, Homo sapiens
  SITE (481): n equals a,t,g, or c
  SITE (2426): n equals a,t,g, or c
agagagagagagagatggcggtcgtggcggtcggagatccgagagctctgcttctctgaaaagcgtgtggctttctggacttgtttcaggccacccacgagccagcgggaaaggattgccagccagagaaagacgaactccgaagtcccaatgcacagatcagcccccagtcaaaccaccaagaggagccgatcgccattttccactactcgtcgtagttgggacgacagcgagagttcgggaaccaacctgaatattgataatgaggactattccaggtatccgccaagagagtacagagcttcgggtagcagaagaggaatggcctatggacatattgactcttatggggcagatgatagtgaggaggagggggctgggcctgttgagcgaccgccagtgagagggaaaactggcaagtttaaagatgataagctgtatgacccagagaaaggggcaaggtctttggctgggccacctncacatttctctagktttagccgtgatgtgagagaggagcgagacaagttagacccagtccctgcagcaagatgctcarctagcagagctgagcttcctgccacaaagtagtgtggcctcacagtcgtcttctgaaggcaagctggctacaaaaggtgacagctcggagagggagagaagggagcaaaatttacctgcacgtcccagcagggctcctgtgagtatttgtggtggtggggaaaacacctcaaagagtgcagaggaacctgtggtcaggcccaaaatcagaaacctggcawgtccaaactgcgtgaaaccaaaaattttttttgatactgatgatgatgacgatatgccacacagtacttccaggtggagggataccgccaatgacaatgagggccactcggatggcctggcaagaagagggagaggcgagagttcaagtggctatcccgagccaaagtaccctgaagacaaacgggaagcgaggagtgaccaagtgaaaccagaaaaggtgccgagacgacgacgcaccatggccgaccctgacttctggacgcacagtgatgattactacaaatactgcgacgaagactctgacagtgacaaagagtggattgctgctctgcgtcggaaatatcgaagccgagagcaaaccctgtcctccagtggcgaaagctgggagactctgccggggaaagaagagcgggaacctccacaggctaaggtgagtgccagcactggcaccagccctggccccggtgctagtgccagtgccggggctggcgccggggccartgctggcagcaatggcagcaattaccttgaagaagttcgagaaccatctcttcaggaagagcaggcatccctggaagaaggagaaattccttggctccagtaccatgagaatgacagtagcagtgagggggataatgattctggtcacgagttgatgcaacctggggtattcatgctggatggaaacaacaaccttgaagatgactccagtgtgagcgaagacctagaagtggattggagcctctttgatggatttgcagatgggttaggagtggctgaagccatttcctatgtggaccctcagttcctcacctacatggcacttgaagaacgcctggcccaggcaatggaaactgcccttgcgcacttggagtctctcgcagtggatgtagaggtggccaatccaccagcaagcaaggagagcattgacgctcttcccgagatcctggtcactgaagatcatggcgcagttggtcaggagatgtgctgccccatctgctgtagcgaatatgtgaagggggaggtggcaactgagctgccgtgccaccactatttccacaagccgtgtgtgtccatctggcttcagaagtcaggcacctgccccgtgtgccgctgcatgttccctcccccactctaaagaccaaggccgtttactcctggtctgattattttccccatctgaaatccacaatactgcaggagccctcttgaaattaacaatggaaataaaaccaatcagtcagttagcctaaacctattgattcctcgtgattatttccaatgtgaaaacagttgtgtatgattgcattaaaaatcatatcatcttttagaggttagaaaagggaaaactaaactttctaaatgctacttgagattgcagtaagaagatacgttttctaacctgaaagttaaatcgcatttgttttcttcagtagaatgggaatgtgttgctgttacttgtaatgtcaagtttatctgttaaatatgtccaaaaggcaaaatcatttttgttgcatgttatgggtcgatgttcctgtaattgcagtgccgtaaaagcttattaaagttgttcttttggttttamaaaaaaaaaaaaaaaaaaaaaaaaaaaaaaaaaaaaaaaaaaccccgggggggggccgggn

SEQ ID NO: 502 - DNA, 442 bp, Homo sapiens
  SITE (284): n equals a,t,g, or c
  SITE (441): n equals a,t,g, or c
ggggaaggtacgtcagcctgtcatatgcatcaacaaccatgtattttgttcgatttgtattgatttgtggttgaagaataatagccagtgtccagcttgcagagtccccatcactcctgaaaatccttgcaaagaaattataggaggaacaagtgaaagtgaacctatgctaagccatacggtcaggaagcatcttcggaaaactagacttgaattactacacaaagaatatgaggacgaaatagattgtttacagaaagaagtagaagagcttaagagtaganatctcagcttggagtcacagatcaaaactattctggatcctttaaccttggtgcagggcaaccaaaatgaagacaaacatctagtcacagataatccaagwaaaaaaaaaaaaaaaaaaaaaaaaaaaaaaaaaaaaaaaaaaaaaaaaaaaaaaana

SEQ ID NO: 503 - DNA, 515 bp, Homo sapiens
gggaatttcgagtggtgttggagcgccggaggctagtgggtggctgacccccagcatcctcgagagcgaccatggactccctggccgagtctcggtggcctccgggctggcagtcatgaagacaatagatgatttgctgcggtgtggaatttgcttcgagtatttcaacattgcaatgataatacctcagtgttcacataactactgytctctctgtataagaaaatttctgtcctataaaactcagtgtccaacttgctgtgtgactgtcacagagccggatctgaaaaataaccgcatattagatgaactggtaaaaagcttgaattttgcacggaatcatctgctgcagtttgctttagagtcaccagccaaatctcctgcttcttcctcttcagagaatcttgctgtcaaagtatatactcctgtagcctccagacagtctttaaagcaagggagcaggttaatggataatttcttgatcagagaaatgagtggttctacatcagagttgt

SEQ ID NO: 504 - DNA, 1414 bp, Homo sapiens
gcggacgcgtgggcggacgcgtgggtttttttttttttttttaagcatggtactttacaatttttaatgcattcatacaacagtgcattggaaaagtactgagcctctacaaaatagctttacatttttaaacaaatgaatgtgattttttttcacttacacaagcataggctttttaatatttccacaagataaatatctcaattaaactataagctcactctacagtgtgccacagtgatgggcttaggagacagttatacacttagaagatcctaaccttagtgttatttacactgacatgtccagtatcaccaagtctgaaaggtgaacaaacaatactcagaatgtggctgaatttgtgttaactaataactgggaatgatatagctttaatcacttatgaaacacatactgtaacttagtctaaactggtaatttcctttgctcctctcttatggtgtgggaaaatttaaagatcaacatgaaaaaggagccattgctaaggcagatcttttaagataacaaaggaaaaattgacaagtgtatatgataaattatcagtaacagtgatgctaccaatttaactggtacggaaatcagatttttaggtcctataacgtggcttttaaaatatttccttttattctggaacaaaaactggagaaaggacaatgattccttcagaaagcaatgactcaattcaggttgttactttacatttaagtaccactcaaaaagtggacataaaagcaagtgattcctgtttgcccatcactatatcagctacatagctragagttcagatcttaattacacaacactttctctgttaccagaagctaagactgctytgcgacaaataggacaggtagaattctcagataaccagcgatcgatgcagtggacatggtactcatgggaacaaggtagtttacgaagtttgttgccttctgtatattctgtaatgcaaacactacaggtttttaatgcatcattttcaccaaaacttctcattgccaagttgtcaatctgttctttggtgagtcctctaggttggtcatcatcatcctcatttaagaggaaaaactgagccaggctaaggaagggcaaagagccactttcatcaaatgtgactggggccctatgtcgaccctctcgcctggcacctgatgagcctgatgatgagcttccttcattactgccttcaaataaatctgagctagtttctgaactttcaccaccggaactggaactaggactggaactggaacttgaactggaactggaactcgaactggaactggaactcgaactggaaccagaactactaccaccaccagaacctcctcttccactccgtgactctgccctttccatatttcgatttgagactgagccagtaggctctgac

SEQ ID NO: 505 - DNA, 828 bp, Homo sapiens
  SITE (787): n equals a,t,g, or c
  SITE (819): n equals a,t,g, or c
  SITE (827): n equals a,t,g, or c
ggcacgagagatggcggcgcaacagcgggactgcgggggtgctgcgcagctggcggggccggcggcggaggctgaccccctaggacgcttcacgtgtcccgtgtgcttagaggtgtacgagaagccggtacaggtgccctgcggacacgtcttttgctctgcatgcctgcaggaatgtctgaagccgaagaagcctgtctgtggggtgtgtcgcagcgctctggcacctggcgtccgagccgtggagctcgagcggcagatcgagagcacagagacttcttgccatggctgccgtaagaatttcttcctgtccaagatccggtcccacgtggctacttgttccaaataccagaattacatcatggaaggtgtgaaggccaccattaaggatgcatctcttcagccaaggaatgttccaaaccgttacacctttccttgtccttactgtcctgagaagaactttgatcaggaaggacttgtggaacactgcaaattattccatagcacggataccaaatctgtggtttgtccgatatgtgcctcgatgccctggggagaccccaactaccgcagcgccaacttcagagagcacatccagcgccggcaccggttttcttatgacacttttgtggattatgatgttgatgaagaggacatgatgaatcaggtgttgcagcgctccatcatcgaccagtgagcagagtccgtgcttgctatctgtctcatgttacagagcttccattacatattaaacgtgaaatctatgaaaaaaaaaaagggggggggncccggttaccccaatttcggccctattaggtnaagtcgtna

SEQ ID NO: 506 - DNA, 1114 bp, Homo sapiens
  SITE (1073): n equals a,t,g, or c
  SITE (1083): n equals a,t,g, or c
  SITE (1106): n equals a,t,g, or c
gggcgcgtcggccggcgagggagcagcaaacggccggcggcgggtgccgcgcggggggcgggcggcgcggagtaggtrgcggcggccatggccgaggcgtcgccgcatcccggacggtacttctgccactgctgctccgtggagatcgtcccgcgcctgccggattatatctgtccaagatgcgagtctggttttatcgaggagcttccggaagagaccaggagcacagaaaatggttctgccccctccacagctcccacagaccagagccggccaccgctggagcacgtggaccagcacctgttcacgctgccgcagggctacggacagtttgctttcggcatcttcgatgacagcttcgagatccccacgttccctcctggggcgcaggctgacgacggcagggaccctgagagccggcgggagagagaccatccgtcccggcaccggtacggcgcccgacagccccgcgcccgcctcaccacgcggcgggccaccggccggcacgaaggcgtccccacgctggaagggatcatccagcagctcgtcaacggcatcatcacgcccgccaccatccccagcctgggcccctggggagtcctgcactcaaaccctatggactacgcctggggggccaacggcctggatgccatcatcacacagctcctcaatcagtttgaaaacacaggccccccaccggcagataaagagaaaatccaggccctccccaccgtccccgtcactgaggagcacgtaggctccgggctcgagtgccctgtgtgcaaggacgactacgcgctgggtgagcgtgtgcggcagctgccctgcaaccacctgttccacgacggctgcatcgtgccctggctggarcagcacgacagctgcccgtctgscgaaaaagcctcacgggacagaacacggscacgaaaccccctggcctcaatggggtgagcttctcctcctcgkcgkyaatcgkccttcttccaagcttcggccaagcaacgaagaamcgscccaagcaaattcgttgaagcccaacgttcgggccgttcggggaaaagcaacggggggcnttttcccaanccaaaccttaaggccaagggggnaaaaaggg

SEQ ID NO: 507 - DNA, 367 bp, Homo sapiens; identical to SEQ ID NO: 52
  SITE (302): n equals a,t,g, or c
  SITE (305): n equals a,t,g, or c
  SITE (320): n equals a,t,g, or c

SEQ ID NO: 508 - DNA, 634 bp, Homo sapiens
  SITE (614): n equals a,t,g, or c
ggcacgagcgctatcgascasggtccgagggctgtgtcagaaggctgggcagccatggcgtcctatttcgatgaacacgactgcgagccgtcggaccctgagcaggagacgcgaaccaacatgctgctggagctcgcaaggtcacttttcaataggatggactttgaagacttggggttggtagtagattgggaccaccacctgcctccaccagctgccaagactgtggttgagaacctccccaggacagtcatcagaggctctcaggctgagctcaagtgccccgtgtgtcttttggaatttgaggaggaggagactgccattgagatgccttgccatcaccttttccattccagctgcattctgccctggctaagcaagacaaattcctgtcccttgtgccgctatgagctgcccactgatgacgacacttatgaggagcacagacgagataaggctcgaaaacagcagcagcaacaccgactggagaacctccatggagccatgtacacgtgaggaggttggggctgagtgctggccctctgcgtcttccttattaaccttgaatcctcattaaaggtttctttacccamaaaaaaaaaaaaaaaaaaacncgactcgtgccgaatttggg

SEQ ID NO: 509 - DNA, 1183 bp, Homo sapiens
ggcagcgcaatgccaagacagagctgctggcggcggcgggcgaatctccctgcaccatgagccgtcggctccggccccgttcmgtaagcacagcgcacgccgccctccatttgccccggggcctcggctgcgaaratascggcggccggacaggaagctcraggaaagcgctgggccgggtctctacgaacacgtgaaggaaaagcagctccgtccacaacgccgcttcggggctcctagggagtcgggccccgggccgccaccgtcacctcggccgctgccgctgtcgccatcgccttgtttccccatcccccgccatggccgaggacctctctgcggccacgtcctacaccgaagatgatttctactgccccgtctgtcaggaggtgctcaaaacgcccgtgcggaccacggcctgtcagcacgttttctstagaaaatgtttcctgactgcaatgagggaaagcggagyacattgtcccctatgtcgtggaaatgtgactagaagagagagagcatgtcctgaacgggccttagaccttgaaaatataatgaggaagttttctggtagctgcagatgctgtgcaaaacagattaaattctatcgcatgagacatcattacaaatcttgtaagragtatcaggatgaatatggtgtttcttctatcattccaaactttcagatctctcaagattcagtagggaacagcaataggagtgaaacatccacatctgataacacagaaacttaccaagagaatacaagttcttctggtcatcctacttttaagtgtcccctgtgtcaagaatcaaattttaccagacagcgtttactggatcactgtaacagtaatcacctatttcagatagttcctgtgacatgtcctatttgtgtgtctcttccttggggagatcctagccagattaccagaaatttcgttagtcatctaaatcagagacatcaatttgattatggagaatttgtgaatcttcagctagatgaagaaacccaataccaaactgctgttgaagaatcttttcaagtaaacatctgaaggctgtagacatctctgcatctttgtacctgcaagtgccatctttaagggggaaactacatgaagtcaccgttacagtaacttgatgtgtatattaataaaagtaattcagtcaaaaaaaaaaaaaa

SEQ ID NO: 510 - DNA, 3113 bp, Homo sapiens
ttttttttttttttttttttttttttttttttttttttttttttcaagttaatggaaacaagtctttattaagtaacttttaatatcagaaaaataaaactcttataattctctttacagcaaatatataatatcagtgctttggccatcttaagttaaaggccctttatcataaaatatatggttttaaattttactcaaattgaatttataatccctatgacttccctacatatacataacaaaagagtgtagtaaaattagcaaatactaaactatattgataatttatcattcttagtttgtggtttttagaaacagtacacgcacctaatatatgtcgattccttggcttattagttgcagtgtacaatgcaacaaaatacaaaatacatgcttggtgaacattcgttcatatctacaagacggcagctagagattaggtttcaatactgaccatttactatcctacaagcaattagcattacatcataatatgccatcaaggcaactttttttatactgaaaaaatcaaaataaaaaccgttatttgtaaacttttatacgaaatgtaactcttcaagtggaaataaaaaataaaatttgtctatttactattgaatacacataggatttcaattttcattataccgagaaaaaagctcttttgtgttgggaaaataatgcttcaaaaaataattagtagaaaaacccactagtataatgttttgtcctttcaatgccagcacagatttgggaacatactgaggatgaagttatagacatccacaggtgaaatgtacgagtatattttaaataaatctttccttgtgattggaaatagttttgaaatgaagtaaactgattggaggttgtcacagctgcttttgtgaawtatgccaagggcatcattatccctttctccctcctccctcccctaaattactaaaaaataaaaatatatttataatgtgcaagacaaatatggattgaacataaaatgtttcacattttgatctatagtctaaaaattaacagctcgatcacactaatgaatggaatgtttgcatcctcaattatcagccaatataggtgccatcccaaagcccttcctgatatgggaaaacccaggtggccatttccacattcaccaagagaggcaatgggcaggaattcacaattgcattcctgatccactgatcataccagccttgagcactctgggcgagatgaaagttgatgtagcagtttttgtcccaaattataaccagtgatctagtaaactgccatcagccctatcattaccaataagtaatcacaatgcattaaaaagttacttgcaatcctgcagaattaggcatatgttgttgtaaaataaaaaacaaacctgttttgtcaaaactggcagtgtaaagaaggcagcactggaagtgtatgaatcgtctgtaatgccaagtaccctccataaactcttaaagtggttaggctttgggacccattgttttgaaatcttagacgtatacactttttcataggctcacacaacctatgattatcttcactcagccaagttgaacttcagctttagcaattcttatataaactatgtctctgggtctacaggatagtactaataattcaaaccaaactaatagacaagagaccacttaggtttagtgttaccatagcagccttttataagtttactaacaactttagcctaatcccaataaagcctgataacagtcataagaaatcattaggaagtttactggggggtaccattatacccatgcctttacgagtccatatagagatatagtatttatgtatatatatatagttaagagtgaatttggattgcctgagtaacagctgtctggcaaactggacatgatggcgttctcttttcacagatcttgttggcacattccatgcagaagaggttgtggccacatggaactagggcagcaataacctcattctcaaagcaaatcacacagtcgtgctttcgtcttgattctggaggtgagctagaggtggaaccaccattggaagaggagtaactattggtaccattagaaaaagcagggatatatattggaaggccaacatggttgcctgtactaggtgggtcgctcctaaccctccgagcaagtggatgttctatgctctcaggaaatgtaggagacagacgaggagtagatggctgacttcctctgcgctgagtcttcatgttaccagaaggatcactcccaaagccagagagtgggttaactggttcaaatggagtccasatagtttgagcagatgttggtaaagagtcaaaggcaggagagtcaactgctaggtcttctgagcctacagatggtagtgtayctccaaaccagaagtttcctgtgctaaatgggcttgttggactaaagtcagccagcctattgcttccaaagtaggaatctgtagagccacttcctagagaactggaactatcatttcgataattggatatcattcttgcgcggctaggaggaacaggattggaggagagccacgcagagccaagagtgccaccttcaaagcttacatcggtaccattgtaatggaaatcattctcttcattgagctctatatagtttcctgtacgcatggcaatatgcatttctatttcttcccgtgctcggtcaacattttcaggcatccctgtcacttcaaagacaggttccttatctctgctcggagttactatgtaggtgtgggtctgctgctgaattcttttaatagttgctcctttgggtccaaccactaatcctaccacacgataagggaccctgacttggacggtggtttgaccgggcagattaggactacatgataatcctcccagggcaggcccatttttgtttcgagatgcacgaatcatggagaagtgctctgcagctgagaggatctctcttttggccatggcaacatcttctttccttccagtgacaacaaaaatgggctcttcaccacgaacaggagtcttgatatacgtgtttgtcttggctctcagtgctttaattttacaacctttgggatggcaagcagtggaaggtgaaagctgctcgtgccgc

SEQ ID NO: 511 - DNA, 473 bp, Homo sapiens
  SITE (322): n equals a,t,g, or c
  SITE (372): n equals a,t,g, or c
  SITE (471): n equals a,t,g, or c
gagagaaggggcagagaccaggcagtggtgcaggcgtccagctgcacttcccacttctgactctgtgcctgctgttccctgctgggaagaagaaaagccagtgatgctggcttgaggccatagtgggaggcccagtggatcctgagaagctagcccgggcagtgagtgtggatggcttggcaggtgagcctgctggagctggaggactggcttcagtgtcccatctgcctggaggtcttcaaggrgtccctaatgctacagtgcggccactcctactgcaagggctgcctggtttcccttgtcctaccacctggacaccaangtgcgcttgccccatgtgcttggcaaggtggtggaccggcagcaacttcnttgcccaacgtctccctgggcctgggtgatcgaaagcccttgaggctcccttggggaccccggagccccaaggtctgcgtgcacccaccgggaacccgntt

SEQ ID NO: 512 - DNA, 618 bp, Homo sapiens
  SITE (596): n equals a,t,g, or c
tagagcatgagctcaggcaagagtgcccgctacaaccgcttctccggggggcccagcaatcttcccaccccagacgtcaccacagggaccagaatggaaacgaccttcggacccgccttttcagccgtcaccaccatcacaaaagctgacgggaccagcacctacaagcagcactgcaggacaccctcctcctccagcacccttgcctactccccgcgggacgaggaggacagcatgccccccatcagcactccccgccgctccgactccgccatctctgtccgctccctgcactcagagtccagcatgtctctgcgctccacattctcactgcccgaggaggaggaggagccggagccactggtgtttgcggagcagccctcggtgaagctgtgctgtcagctctgctgcagcgtcttcaaagaccccgtgatcaccacgtgtgggcacacgttctgtaggagatgcgccttgaagtcagagaagtgtcccgtggacaacgtcaaactgaccgtggtggtgaacaacatcgcggtggccgagcagatcggggagctcttcatccactgccggcagtgccgggtaacgggcaagcnggaaagcccccatctttgaagt

SEQ ID NO: 513 - DNA, 766 bp, Homo sapiens
  SITE (510): n equals a,t,g, or c
  SITE (716): n equals a,t,g, or c
  SITE (733): n equals a,t,g, or c
  SITE (738): n equals a,t,g, or c
  SITE (757): n equals a,t,g, or c
tacgcttctgggcataatactgaaacacaaaactgcttttgctctctctgtggttggccgaaaataggattctttttcgtgcaggtgtcgttgtttagtcggctttactaacatattgaaatggctctacccaaagacgccatcccctcgctgtccgagtgccagtgcgggatctgcatggaaatcctcgtggagcccgtcaccctcccgtgtaaccacacgctgtgtaaaccgtgcttccagtcgaccgtcgaaaaggcgagtttatgctgtcccttctgtcgycgccgggtatcgtcgtggactcggtaccatacccgaagaaattctctcgtcaacgtggaactgtggacgataattcaaaaacactatcccagggagtgcaagcttagagcgtctggccaagaatcagaggaagtggctgatgactatcagccagttcgtctgctcagtaaacctggggaactgagaagagaatatgaagaggaaataagcaaggtggcggcagancgacgggccagcgaggaagaagaaaacaaagccagtgaagaatacatacagaggttgttggcagaggaggaagaagaggaaaaaagacaggcagaaaaaaggcgaagagcgatggaagaacaactgaaaagtgatgaggaactggcaagaaagctaagcattgatattaacaatttctgtgagggaagtatctcggcttctccctntgaattccagaaaaatntggtnccagttacacccaagtctngaaaaagga

SEQ ID NO: 514 - DNA, 1785 bp, Homo sapiens
gctcgtgccgctcgtgccgaagaaaaccaaggtggagccctacagtctcacggcccagcagagcagcctcatcagagaggacaagagcaacgccaagctgtggaatgaggtcctggcgtcactcaaggaccggccggcgagcggcagcccgttccagttgttcctgagtaaagtggaggagacgttccagtgtatctgctgtcaggagctggtgttccggcccatcacgaccgtgtgccagcacaacgtgtgcaaggactgcctggacagatcctttygggcacaggtgttcagctgccctgcctgccgctacgacctgggccgcagctatgccatgcaggtgaaccagcctctgcagaccgtcctcaaccagctcttccccggctacggcaatggccggtgatctccaagcacttctcgacaggcgttttgctgaaaacgtgtcggagggctcgttcatcggcactgattttgttcttagtgggcttaacttaaacaggtagtgtttcctccgttccctaaaaaggtttgtcttcctttttttttttatttttatttttcaaatctatacattttcaggaatttatgtattctggctaaaagttggacttctcagtattgtgtttagttctttgaaaacataaaagcctgcaatttctcgacaaaacaacacaagattttttaaagatggaatcagaaactacgtggtgtggaggctgttgatgtttctggtgtcaagttctcagaagttgctgccaccaactctttaagaaggcgacaggatcagtccttctctcgggttctggcccccaaggtcagagcaagcatcttcctgacagcattttgtcatctaaagtccagtgacatggttccccgtggtggcccgtggcagcccgtggcatggcgtggctcagctgtctgttgaagttgttgcaaggaaaagaggaaacatctcgggcctagttcaaacctttgcctcaaagccatcccccaccagactgcttagcgtctgagatccgcgtgaaaagtcctctgcccacgagagcagggagttggggccacgcagaaatggcctcaaggggactctgctccacgtggggccaggcgtgtgactgacgctgtccgacgaaggcggccacggacggacgccagcacacgaagtcacgtgcaagtgcctttgattcgttccttctttctaaagacgacagtctttgttgttagcactgaattattgaaaatgtcaaccagattctagaaactgcggtcatccagttcttcctgacaccggatgggtgcttgggaaccgtttgagccttatagatcatttacattcaatttttttaactcagcaagtgagaacttacaagagggtttttttttaatttttttttctcttaatgaacacattttctaaatgaattttttttgtagttactgtatatgtaccaagaaagatataacgttagggtttggttgtttttgtttttgtattttttttcttttgaaagggtttgttaatttttctaattttaccaaagtttgcagcctatacctcaataaaacagggatattttaaatcacatacctgcagacaaactggagcaatgttatttttaaagggtttttttcacctccttattcttagattattaatgtattagggaagaatgagacaattttgtgtaggctttttctaaagtccagtactttgtccagattttagattctcagaataaatgtttttcacagataraaaaaaaaaaaaaaaaaaaaaaaaaaaaaaaa

SEQ ID NO: 515 - DNA, 812 bp, Homo sapiens
  SITE (789): n equals a,t,g, or c
gcaggaacttcttcagtgttacttgaaggatttcattctcttgaccatgcgtgtgtcaacggaggaggaattaaagtttctgcagatggctctgtggtcctgcactaggaaactgaaagcggcgtcagaagcgcccgaggaagaggtttccttaccgtgggtgcaccttgcctaccagcgtttcagaagccgtctgcagaacttttccagaatcctgaccatctaccctcaggttctccacagcctgatggaagcccgttggaaccatgagctggctggatgtgagatgaccctggacgcatttsccgcaatggcctgcacggagatgctgacaagaaacaccctgaagcccagtccccaggcgtggctacagttggtgaagaatctttccatgccgctggagctcatctgctccgatgagcacatgcaaggcagcgggagcctggcccaggctgtcatcagggaagtcagagcccagtggagtcggattttctccaccgcactcttcgtggagcacgtgctcctaggaaccgagagccgcgtccccgagttacaggggctggtgaccgagcacgtcttcttactagacaagtgtcttcgagagaactctgacgtgaagacgcacgggccttttgaggccgtgatgcgcactctctgtgaatgcaaggagacagccagcaagaccctcagcaggtttgggattcagccgtgctccatctgcctgggagatgcaaaggaccccgtctgtctgccctgcgaccacgtgcactgsctgcgctgsctcaaggnctggkttgctcaaaagctattat

SEQ ID NO: 516 - DNA, 1743 bp, Homo sapiens
gctttaaggaaatctaatcacaactcctgaagacttacctttcttagatctgaaacttaagatcagtgtattataaaatggaatctcttagcagtcacagctacataaattgggattttaatagttgtctgtgctttgaattcttttcctttaaatgtctgtttcttttatgtaaagtttttcagtttggggaacgtgtagtcttcccctcccttttaatttctcaccaggatctaaaccccccttctctgtgaagcttaaatctgcattgtactctccctcctccccccccatcagtatccagcaggttacccttcagataaagaagggaagaagcctaaaggacagtcaaagaagcagcccagtggaaccacaaaaaggccaatttcagatgatgactgtccmagtgcctccaaagtgtacaaagcatcagattcagcagaagcaattgaggcttttcaactaactcctcaacagcaacatctcatcagagaagattgtcaaaaccagaagctgtgggatgaagtgctttcacatcttgtggaaggaccaaattttctgaaaaaattggaacaatcttttatgtgcgtttgctgtcaggagctagtttaccagcctgtgacaactgagtgcttccacaatgtctgtaaagattgcctacagcgctcctttaaggcacaggttttctcctgccctgcttgccggcatgatcttggccagaattacatcatgattcccaatgagattctgcagactctacttgaccttttcttccctggctacagcaaaggacgatgatctgcctgctttcactgtgttgttcatggtggctttttggacaataaagaatctaaaatgggtggggagggtggaagaaatggtggactgtatctctcacgttctgaagcagctaatcctctttcccacatagccatcatcttgtgtgtgtagtaagaggcccatttctcaactgtcttttaaatatctaaaggtagttcctgtaacaactagttttaatgagtaaaaagtcaaagcctcagctctagttgatatccaagttatgatttattttgcaactacctcaggacagaaaagatttatggggattttaaaaatcattgaataactagttaaatgaaattttagctacacactgcctcccaaatattagttgtgcctggttcttgtaatttgattttacagaaaaggaaatgacacttgagatccttggaatgaacacagcttctaaagtgtgcatatacttttttaacgtctcttcttccattacaatgtgtgttttgcaaggacaggttcattttttttagcccactttgtgaactccattgtgcttttttctggtgttttatgcaagttgactactaatgactaatgagaacaataatgaatgcattgttgctgcattagtgtaatgtggtgtggttttgcacttaaaagaggtattcatatgctctagttgtaaatgttcatgaaaatccacttctctactagtcgaactgcttttagtgtctcaccagtggttttacatctgcagagttttgagggctgtgctgacctttgagaggatttgaaattgcttcatattgtgatcctaaattttatattcactatattccctaaagtataccttaataaatattttatgatcagaaaaamaaaaaaaaaaaaaaaaaaaaaaaaaaaaaaaaaaaaactcgagggggggcccgtacccaatcgccctat

SEQ ID NO: 517 - DNA, 585 bp, Homo sapiens
ctttttttttttkywtgacagaccaggcttggcagtttatttcggtttcacaacccccttccagcccttggggctcccttgagcagcacatctgggtgccctggccttcaggccggggcagggtcctggggtcccagcgcagctggaggggagttcccctttaggagtctcactttcggctgggcatttctgggcttcctggggggcagatctggccgtgggggcaatggaggagccgaaaggggcacctgccccagctccaactccctgccttcctggtcactgctgttccctgagtcctcagcagtagcctgaccgtggaactggtagatactcacggcctcccagcccttgatctcgcagcggcagaaggggcaggtctggctgtccgagtgctgccaggcagccaggcagcagctgcagagcaggtgcccgcacggctcaatcttcacatccttgttgctctcagcacagatcttgcagagctcaaatgtggagtccatggcccagtagagctgcagctgctcctctgacacgtggatgcgctgctggggttctgcctggccgaactcagtcaggtctggg

SEQ ID NO: 518 - DNA, 933 bp, Homo sapiens
  SITE (826): n equals a,t,g, or c
  SITE (835): n equals a,t,g, or c
  SITE (874): n equals a,t,g, or c
  SITE (919): n equals a,t,g, or c
cttaactggaaacgcccccatcttttagttcgacgtcttcaccaggctctttcagccatggccaacactcctcaagaactggcagctcctggcagtcaaccacccaggctacatggccttcctcacctatgatgaggtccaagagcgtctgcaggcctgcagggacaagccaggcagttacatcttccggcccagctgtactcgcctggggcagtgggccatcggctatgtgagctcagatggcagcatcctgcagaccatccctgccaacaaacccctgtcccaggtgctcctggagggacagaaggacggcttctacctctacccagatggaaagacccacaacccagacctgactgagctcggccaggcagaaccccagcagcgcatccacgtgtcagaggagcagctgcagctctactgggccatggactccacatttgagctctgcaagatctgtgctgagagcaacaaggatgtgaagattgagccgtgcgggcacctgytctgcagctgctgcctggctgcctggcagcactcggacagccagacctgccccttctgccgctgcgagatcaagggctgggaggccgtgagtatctaccagttcyacggtcaggctactgctgaggactcagggaacagcagtgaccaggaaggcagggagttggagctggggcaggtgcccctttcggctcctccattgcccccacggccagatctgccccccaggaagcccagaaatgcccagccgaaagtggcacttttggccctccccagacttcgggcccctcttctcttgccaagaattaagggttgtggcctnaccgcgcangaagccaccttcagcccccaagtggtctgggacttccanagacttctaaaggggaacttcccttcagctgcgctgggaccccangaccctggccccgg

SEQ ID NO: 519 - DNA, 1250 bp, Homo sapiens
  SITE (540): n equals a,t,g, or c
  SITE (1242): n equals a,t,g, or c
gtcgacccacgcgtccgctgtaacccgcacacgaatttcacggtgcccacggtttggggaagcaccgtgcaagtctcttggttggccctcatccaacgcggcgggggctgcaccttcgcagacaagatccatctggcttatgagagaggggcgtctggagccgtcatctttaacttccccgggacccgcaatgaggtcatccccatgtctcacccgggtgcagtagacattgttgcaatcatgatcggcaatctgaaaggcacaaaaattctgcaatctattcaaagaggcatacaagtgacaatggtcatagaagtagggaaaaaacatggcccttgggtgaatcactattcaattttttttcgtttctgtgtccttttttattattacggcggcaactgtgggctattttatcttttattctgctcgaaggctacggaatgcaagagctcaaagcaggaagcagaggcaattaaaggcagatgctaaaaaagctattggaaggcttcaactacgcacactgaaacaaggagacaaggnaaattggccctgatggagatagttgtgctgtgtgcattgaattgtataaaccaaatgatttggtacgcatcttaacgtgcaaccatattttccataagacatgtgttgacccatggctgttagaacacaggacttgccccatgtgcaaatgtgacatactcaaagctttgggaattgaggtggatgttgaagatggatcagtgtctttacaagtccctgtatccaatgaaatatctaatagtgcctcctcccatgaagaggataatcgcagcgagaccgcatcatctggatatgcttcagtacagggaacagatgaaccgcctctggaggaacacgtgcagtcaacaaatgaaagtctacagctggtaaaccatgaagcaaattctgtggcagtggatgttattcctcatgttgacaacccaacctttgaagaagacgaaactcctaatcaagagactgctgttcgagaaattaaatcttaaaatctgtgtaaatagaaaacttgaaccattagtaataacagaactgccaatcagggcctagtttctattaataaattggataaatttaataaaataagagtgatactgaaagtgctcagatgactaatattatgctatagttaaatggcttaaaatatttaacctgttaacttttttccacaaactcattataatatttttcataggcaatttcctctcngtagtgat

SEQ ID NO: 520 - DNA, 1829 bp, Homo sapiens
ggttgcccggatctcaaacagccgggaagaagcaccgtggctgctattatctgctctccgcgcctgacccctcccaggactcgtgatgccaaggccgctgcgagcggctacgaagagtcggggttgagccccagctgagccgagggctcgcactcttctggtctcccaggcccaacccacctgaagaaatgagtggtggattggctccaagtaagagcacagtgtatgtatccaacttgcctttttccctgacaaacaatgacttgtaccggatattttccaagtatggcaaagttgtaaaggttaccatcatgaaagataaagataccaggaagagtaaaggggttgcatttattttatttttggataaagactctgcacaaaactgtaccagggcaataaacaacaaacagttatttggtagagtgataaaagcaagcattgctattgacaatggaagagcagctgagttcatccgaaggcgaaactactttgataaatctaagtgttatgaatgtggggaaagtggacacttaagttatgcctgtccgaaaaatatgctcggagaacgtgagcctccaaagaagaaagaaaaaaagaaaaaaaagaaagctcctgaaccagaagaagaaattgaggaagtagaagaaagtgaagatgaaggggaggatcctgctcttgacagcctcagtcaggccatagcattccagcaagccaaaattgaagaagaacaaaaaaaatggaaacccagttcaggagtcccctcaacatcagatgattcaagacgcccaaggataaagaaaagcacatatttcagtgatgaggaagaacttagtgattaaaatcttgccccagcacagtaataaaaatcaagatttgttagtaacaatcttgaagagctaattttaataaaaataagaaaaattaatactatcatgttaatactattattgtcatcccaagaaaaaagatattttaaaaatttatttgaaaagttcattataagggctttattcatgcctgatttgtttacatgaggacttctgaaattaatccttaaaacaaacttcctgaagaccgaaaagttgaatgatttattgttacttatattaataaacttttcaagagaattttgtctttaaatatgggtgttttgtcatcatatttcttgtagctttatcccaatctggataaattgtaaatacctataaaataaattataaatacctataaaatataaagtaacatagctctaaaaggcttaaaatcaaacmcaggtgttaatttggtctggccctacccataggcaccaaattccattccctagaagaaactacttacatgtgcacacatgtagctaaataaagtacatatatttcagtcacttaataaaagaataaaggagaattattcaatctcttatacttctcctaccttcctcaatattcccaatgtggctgtattaaaaatttgggggaatccatatatatcttttttaataaccaagtaaatacttttcatttctgagccaaggaatatgctatgattacgttttttcctagagttaataattgtctattttttttccatgtattgtctttgtatttatgactaaatcttcccattctgtctgcaggtgggtatatggtaatgggattagagagcctttaattttctgctttgtatatttctatattgtttaactttgtaagaatgcccattacttttttaactagtaaaagcaatagaaataagttaatactatcatagtaatattattattgtcatcccaagaaaaaatatattaaaaagatatttgaaatttcaaa

SEQ ID NO: 521 - DNA, 1025 bp, Homo sapiens
  SITE (953): n equals a,t,g, or c
  SITE (1015): n equals a,t,g, or c
  SITE (1016): n equals a,t,g, or c
  SITE (1023): n equals a,t,g, or c
cgtgcgcggtaagaagctgcgcggtagcgcggtgaggtgtgtttccattgtagaaaacctggtcatggaattgcagattgccccgccgcccttgaaaatcaagacatgggcactgggatatgttacaggtgtgggtccacagagcacgaaataaccaagtgtaaggctaaagtagacccggctcttggcgaatttccttttgcaaaatgttttgtttgtggagaaatggggcacctgtctagatcttgtcctgataatcccaaaggactctatgctgatggtaagtactgttaccctcatatagcagaaatggtgagtcatcgtgcagttgtgatttaatttacactcaatcacagttcttgaataaattcttgaataaattgcaaaaccttgagaattacattatttttatcaagtgctatcatatgtactaggctttttgtgcaatttgacttcagatgttaataaaacaaatcagaaaaaactaaggtgtatatttccaactgtgcttgcttcatcatttgtgagactatgtcatacatttctacttttagacataacagaagcagagagattatatctcaagctaatatgaggtttttaaaatcgtattatatattcagcctcagccagcatatcattttggtggaggggtgggtacagatgattcaatattgtagtaatgtttgcttctgaattttttttcttagttatttgtctggtatgggatcatgtagcttttttctctttaactcgggtaattaaggttcacacagtaaagtctatgcggtctaaagctttaaggcggaggttgttatctgttaatgtgatggctggtgccatcaggctctagacgtttcttgtgtcatgtcctgggtttccctcctggagaagtycagtgaaaaagcatagcttttggagttggtcagacttgggytacagcgccgcactgncactcactagctggggggctttggccaactaccaaactctgatctccgtttccttacctatnnagtgganat

SEQ ID NO: 522 - DNA, 422 bp, Homo sapiens
  SITE (285): n equals a,t,g, or c
  SITE (393): n equals a,t,g, or c
  SITE (398): n equals a,t,g, or c
  SITE (422): n equals a,t,g, or c
atggcgactcccatgcatcggctaatagcccggagacaagcattcgacacagagttgcagcctgtcaagaccttttggatcctgattcagccatccatcgttattagtgaagcaaataagcaacatgtaagatgtcagaaatgcttggratttggacattggacttatgaatgcacaggaaaaagaaaatacctacataggccctcaaggacagcagaactaaagaaagctttaaaagaaaaagaaaacagattattattgcaacaaagcattgggagaaaccantgtagaaagaaaggccaagaaaaaaaggtctaagagtgttaccagttcccagtagcagtagcagttgacagttctgccagtggttcttcatcagagggtggaggaacnctacnctttcctcctccgggggccgtggn

SEQ ID NO: 523 - DNA, 465 bp, Homo sapiens
  SITE (431): n equals a,t,g, or c
  SITE (462): n equals a,t,g, or c
  SITE (465): n equals a,t,g, or c
ggcacgagtgtgtatgcctagcccaccccttctggagcagttgaaaacaggcctcagaagactcaaaggaattcttttaactcctagcagggccacggggtcaatgtcagatttagtcatgctgttattttagcccagtggtccagagagatgactgaaaagtaatacctagcaaatacagaaagagagataaagcaagcaagctgttttgaaagtgtctaatattggctgatgtagagctataggagaagatggtataaactggtccatcagtgacaaagacattgaggcccagatagctaataaccgaacacctggaagatggacccagcggtactattcagccaacaaaaacattatctgtagaaattgtgacaaacgtggtcatttatcaaaaaactgcccctttaccacgaaaattcgtcgctggnttcctgtggctccaggagagggacatctccngtn

SEQ ID NO: 524 - DNA, 397 bp, Homo sapiens
  SITE (394): n equals a,t,g, or c
ggcctccggataatgtgaagctgagtgagcctccgccatccagcatgacaaactgtggccgaccgcagctgtgccgtggcacgatggcgaggaagccagccccaaggaaacactgaaaacacatatcacgccaatgccgtgtggttttgtttgaatataaaattggtgaaagtgttggtttttttaaggcagtaatttttttgtttgtttttttgcgatttcattccattcttgaccaaagcttctctttaagtagtttattatggaaaattgtcacactaacttaaaagacagggtgagggagatatgtaaattgtccactagaaaattaaataaaagaactgaatgtgaaaaaaaaaaaaaaaaacycgagggggggcccggaacccattcnccc

SEQ ID NO: 525 - DNA, 305 bp, Homo sapiens
  SITE (290): n equals a,t,g, or c
gggcctccggggccgaggtgggcctgctcattggaagatcgcatcgcagccatgagcagtaaggatttcttcgcgtgtggacactctggccattgggctcggggatgccctagaggaggagctggagggcgaagaggtggaggccatggcagaggttctcaatgtggttccaccaccctatcttacacctgttactgctgtggtgagtccggtcgtaatgctaagaactgtgtccttctcggaaacatctgctacaactgtgggagaagcggccacatcgccaaaggctntaaggatcctaaacg

SEQ ID NO: 526 - DNA, 929 bp, Homo sapiens
  SITE (69): n equals a,t,g, or c
  SITE (896): n equals a,t,g, or c
  SITE (897): n equals a,t,g, or c
  SITE (898): n equals a,t,g, or c
  SITE (902): n equals a,t,g, or c
  SITE (907): n equals a,t,g, or c
tcgacccacgcgtccgcttgtgggtggaaacgcgctggctgactggggtcggcgtttagttcagcgcanascttcggggacctggagctgacgcctagacacttgtattagctttaatagaagagaaatggaggagccatagaatattaaggatgaattcaggaaggcctgagaccatggaaaacttgcctgctctctacactattttccaaggagaggttgctatggtgacagactatggggcctttatcaaaatcccaggctgtcggaagcaaggtctggtccatcgaactcatatgtcatcctgtcgggtggataagccctctgagatagtagatgttggagataaagtgtgggtgaagcttattggccgagagatgaaaaatgatagaataaaagtatccctctccatgaaggttgtcaatcaagggactgggaaagaccttgatcccaacaatgttatcattgagcaagaagagaggcggaggcgatccttccaggattacactgggcagaagatcacccttgaggctgtcttgaacactacctgcaagaagtgtggctgtaaaggccactttgcaaaagattgtttcatgcaaccaggtgggactaaatactctctgatacctgatgaggaagaggaaaaggaagaggcaaagtcagcagagtttgagaagcctgaccctacaaggaatccttctagaaaaagaaagaaggagaagaagaaaaagaaacatagagataggaagtcatctgactctgacagctcagactctgagagtgatacaggcaagagggcaaggcacacatcaaaagacagcaaggcagcaaagaagaagaaaaaraarawgaagcacaagawgaagcacaaggwgtgagagtataaagagtggtannngggntgtgnaagtaagaaaccaggaaccttg

SEQ ID NO: 527 - DNA, 2109 bp, Homo sapiens
  SITE (315): n equals a,t,g, or c
gtttctctagaagggcaagaaatacaagtaaaggcaaaaaggccaaagcctcactgtttcaattgtggttctgaagaacaccaaatgaaagattgcccaatgcctcggaatgctgctcgaataagtgaaaagagaaaagagtatatggatgcctgtggagaagcaaacaatcagaatttccagcagcgataccacgcagaagaagtagaagaaagatttggaagattcaagccaggagttattagtgaggaacttcaagatgcactaggtgtgacagacaagagtcttccaccttttatctatcggatgcgccanctagggtacccaccagggtggctcaaagaggctgaattggagaattcggggcttgcactctatgatggaaaagatggcactgatggggaaacagaagttggagaaatacaacagaataaaagtgtcacttacgatctctcaaaattggtcaactatcctggttttaatatatctactcccagaggaattccagacgaatggaggatctttggttccataccaatgcaggcatgtcagcagaaggatgtgtttgccaattaccttacttctaacttccaagcgccaggtgtgaagtctggcaacaagaggtcttcatctcactctagcccaggtagtccaaagaagcagaagaatgaaagcaactcagcgggatctcccgccgacatggagctcgattcagatatggaggtaccacatggttctcagagcagcgaaagttttcagtttcaaccaccattacctcctgacactcctccactcccccggggaactcctccacccgtcttcacccctccactcccaaagggcaccccgccgctgactcccagtgactcaccccagaccagaacagcatctggagctgtggatgaggacgcactgactctagaagaacttgaagaacagcagaggcggatctgggcagctcttgagcaggccgagagcgtaaacagcgactccgacgttcctgtggacacacctttaactggcaattccgttgcctcatcaccttgtccaaatgagctagacctccctgtcccggagggaaaaacatctgaaaagcagacgctggatgagcctgaggtaccagagatttttacaaagaaatcagaagctggacatgcctccagtccagactctgaggtgacatcactttgtcagaaggaaaaagcagagttggctccggtaaacactgaaggtgcccttcttgataatggcagtgtcgtaccaaactgtgacatcagcaatgggggcagccagaagctctttcctgcagacaccagtccttcaacggccactaaaattcatagccctatacctgacatgagcaaatttgcaactggaatcacgccatttgaatttgagaatatggcagaatctactggaatgtacctcaggataagaagcttgttaaagaactcaccccgaaaccagcagaaaaacaaaaaggcctctgaataatggcttgacttagcactgagagctatttaataactttgttccgttaattagtactaattaagtggatagatagaatggttttcctgtttgtccctcccatgtttaaaaatctatccaaggttcatgttccaaagtcaagcctattttaaagaaagactgagctcactagttcagtatattttattctcactgacaaaacttggggggagatgtgaatatgacctggtttagagagggtttgttaaggtttatactatttttggattgtgactatccgtcgagagtgatggtttttatctgtcttttgtacattgttttccctttctacattttgctaattatcctgtatataagtttaatatatcactttttaaaagaaaaaattctaccattttaaattcatgtttcaactcctacaaccaaatgagaaaaatcagggatgagcagctttatcccatttggggtatttttgtaagtgatttacatgtgtcaattttagtaatacttttacttttttgtaacttcatccttcatatatgcttgctatacaggtatgttcatctttgtgtacagaggtttaataaattagttttcatatacataaaaaaaaaaaaa

SEQ ID NO: 528 - DNA, 598 bp, Homo sapiens
  SITE (521): n equals a,t,g, or c
  SITE (562): n equals a,t,g, or c
gcccggctcgccaactcggctgctctgggggattcgtgcgcggtaagaagctgcgcggtagcgcggtgaggtaccactgatgaaattatgaccaggtgggcccgagttagtaccacatataacaagagacccttgcctgcaacatcatgggaggacatgaagaagggatcctttgagggaacaagccaaaacctaccaaagcgtaaacaacttgaagccaataggctatccctcaaaaatgatgcaccccaagcaaaacataaaaagaacaaaaagaaaaaagagtacttaaatgaagatgtgaatggattcatggaatacctaagacagaattcacagatggttcacaatgggcaaattatagcaacagacagtgaggaagtaagggaagaaattgcagttgctttaaagaaagacagtcgacgggaaggaagaagattaaaaagacaagcggcaaagaaaaatgcmatggtgtgtttccattgtagaaaacctggtcatggaattgcagattgccccgncgccttgaaaatcaagacatgggcactgggatatggtacangtgtgggtccacagagcacgaaataaccaagtgtaa

SEQ ID NO: 529 - DNA, 1148 bp, Homo sapiens
  SITE (1037): n equals a,t,g, or c
gcccacgcgtccgcccacgcgtccggtcgtgcatgcatccacgctggacagggtgctgaagacagcacagcaaccggccctggtcgtggagaccagcacggccgccacggggacgcccagcacagtcctccacgccgcccgtccgcccatcaaactgctgctgtcgtcatctgttcctgctgattctgccatttctgggcaaacttcctgtcctaataatgtgcaaataagtgtgccccctgcaataataaacccccggactgctctgtacacagccaacaccaaagttgccttttctgcaatgagcagtatgccagtgggccccctgcagggtggcttctgtgcaaacagcaacactgcctctcccagcagccacccctccacgtcctttgccaacatggccacgttgcccagctgcccagcccccagctccagcccggcgctgtcctccgtccctgaaagcagtttctatagcagcagtggcggtggcggctccacaggaaacattcctgcctcgaatccgaaccaccaccaccaccaccaccatcagcagcccccggcacccccgcagcccgccccacccccgccaggctgcattgtgtgcacgtcctgtggctgcagcggcagctgcggctcgagtggcctgactgtcagctacgccaactacttccagcacccgttctccggtccgtccgtgttcaccttccccttcttgcccttcagtcccatgtgcagcagcggctacgtcagcgcccagcagtacggcggcggctccaccttccccgtcgtgcacgccccttacagcagcagcgggaccccagaccctgtcctgagtgggcagtccacgtttgccgtgccacccatgcagaacttcatggcagggacrgcaggggtgtaccagacccaaggactggtgggcagtagcaatggttccagtcacaaaaagagcgggaacctatcttgttacaactgcggggccactggtcaccgcgcccaggactgcaaacagccgtccatggacttcaaccggccaggtntagagcgcgccatggccgcgcccaccagstcccgcaggaccagtgcacacaaatgcttggtttttatgaagagtaaacttctttctttgtaaagcaaaaaaaaaaaaaaaa

SEQ ID NO: 530 - DNA, 546 bp, Homo sapiens
  SITE (494): n equals a,t,g, or c
  SITE (523): n equals a,t,g, or c
  SITE (536): n equals a,t,g, or c
gagagcctttgccgccagcgccttcgctctttggctccctgagttagtccggttgtttgcgatcgccgcggccggggctgcgaaccgaaggctcgctccgcgccgcctgggtctctacctcatccgtagtgtggccctgatggtgtggcaggctctggactcctaaagctctggagcgaatttaagattttattcatgtgcatggcatagaagatgaattcttccacttccaccatgagtgaagagcctgacgctctatcggtagttaaccagttacgggatctagcagcagatccgttaaacagaagagccatcgtccaggatcagggatgtctgcctggccttattttatttatggacyatcccaaccctccagtcgtccactccgctttgcttgctcttcgatacttggcagaatgccgtgcaaacagagaaaagatgaaaggagaactgggkawgatgttgagcttacaaaatgttatacagaaaactanaacttcaggagaaacaaaaactttttggncttttgaaactangacattcttt

SEQ ID NO: 531 - DNA, 322 bp, Homo sapiens
ctttgtctagcaaacatgtctgcagagtacaccagtaaagtgcaaatatttgaacatgggggattagagccactcatcagactactgagtagccctgacccggatgtaaagaagaactctatggaatgcatttacaacttggtgcaggattttcagtgtcgagctaaacttcaagaactaaatgcaatacctcctatcttagatctcttgaagtcagaatatccagtgattcakttgttggctctcaaaaccttaggtgttattgcaaatgataaggagtctcgaacaatgctaaagagacaatcaaggattgggccatctt

SEQ ID NO: 532 - DNA, 502 bp, Homo sapiens
  SITE (19): n equals a,t,g, or c
  SITE (73): n equals a,t,g, or c
  SITE (163): n equals a,t,g, or c
  SITE (309): n equals a,t,g, or c
gtgctccaccgcggtgcgnccgctctagaactagtggatcccccgggcttcaggaattcggcacgagcacctncgcagccatacccaggagaaagtggtagcctgccccacctgtgggggcatgtttgccaacaataccaagttcttagatcacatccgtcgncagacctcattggatcagcagcacttccagtgttctcactgttccaagagatttgccacagagcggctattgcgggaccacatgcgcaaccatgtgaatcactataagtgccctctgtgtgacatgacctgcccgctgccttcctncctccgcaaccacatgcgctttcgtcacagtgaggaccggccctttaaatgtgastgttgtgactacagctgcaagaatcttatygacctccagaagcacctggatacccacagcgaggagccagcctacaggtgtgattttgagaactgcacttcagtgcscgatcccttgctctatcaagtcccattaccg

SEQ ID NO: 533 - DNA, 510 bp, Homo sapiens
acaaatcccagggagatctccatggattttaggagagcccttcccagtgagttaaagctcattgctcatcagcaaactcaaacaggagtgagamcctamtgatgcaatcaatgtcaaaaagccttcattacaaattcagggcttgtgtatcatcagaaaactcatcatagagaagggaaagtctgtacatgcagcaaatgtggagaagttttcccttggaagtcagaactcattttatgtcaaagaaatcattcaggagagagaccgttcatttgcaaagtatgtgataaaggctttgtggttaggacacatctcactgtacatcagagagctcacacaggagagaaaccatatgcttgctcagattgtgaaaaagccttctcaaaaaaggctttattcatgattcatcagtgaattcacacaggagagataccctattaatgcattcaatgtcaaacagctttgaagaccagatctgagctcagttatcctcagaaagttcttcatagg

SEQ ID NO: 534 - DNA, 463 bp, Homo sapiens
ggtgggagggcctttagtcaaggtggacatcttagaattcatcagagagttcatactggcgaaaaaccatataaatgtaaggaatgtgggaagacttttagtaggcgctcaaatcttgttgaacatgggcagtttcatactgatgagaagccatacatatgtgagaaatgtggaaaggcctttagaagaggtcaccagcttactgtacatcagagagttcacactggtaaaaagccatatgagtgtaaagartgtgggagggctataccactgcctcatactttcttctacatcagagaattcataarggtggaaaaccctatgaatgtaaggrgtgtaagaaaacctttactttgtatagaaatcttactcggcatcagaatattcatactggtgagaaactttttgaatgcaagcaatgtgggaagacctatactactggttcaaaactctttcaacatca

SEQ ID NO: 535 - DNA, 474 bp, Homo sapiens
gaaactcgagactacatcttcaaaaaacaactttgcagtatttgaattttacattatactgcccttcatttctgacagccaaataactttattgatatttattgcttttgtagttgttataactaataatttctttgraaatgtgttgtagtttatgtttttcaaagggttttggtagtgtttgtgatagaatggttytgcatatgattattataggggatatatttatagagctctacttgtatactttgtgacttacattatgaaaacttcaaagttcctcaatccatacagttagtatttgtatcccagagtgtttaagaaaaaaatctgtcttatattttwagtatataggagccagtgttgcttctatttgttttgaatacaaaatccagttttctttgcatattagatcccatatgtaagaaacaaccttaaacaataatttgtatgctggtaatactctgccgaatt

SEQ ID NO: 536 - DNA, 1696 bp, Homo sapiens
  SITE (1451): n equals a,t,g, or c
  SITE (1509): n equals a,t,g, or c
ttccttccttccgcccgcccgccggcccgccctaagagttgaccacgccgcaatgaagagcttcttacagtgaaagcaaagtaggtcgagtccactgaaaatgcctttaagggacaaatactgtcagactgaccaccatcatcacggatgctgtgaaccagtttatatcctggaacctggagatcctcctttgttacagcaaccactacagacatccaaatctggtattcaacaaataattgagtgctttcgatcaggaactaaacaacttaagcatattttattaaaagatgtggacactatttttgaatgtaagttatgccgcagtctcttcagaggattaccaaatttaattacccataaaaaattctactgcccaccaagtctccagatggatgacaaccttcctgatgtaaatgataaacaaagccaagccataaatgatctcctagaagccatatatccaagtgtggacaaacgagaatatattattaagctagaacccatagaaactaatcaaaatgcagtatttcaatatatttcgaggactgataatcctattgaagtcacagagtcaagcagtactcctgaacaaaccgaagttcagatacaggaaactagcactgaacagtcaaaaacagtaccggttacagatacagaggtggaaactgtagagccccctcctgttgagattgttacagatgaagttgcacctacatctgatgaacaacctcaggagtcgcaggctgacttggaaacttctgacaattctgattttggtcaccagttgatatgttgkctttgtrgaaaagaattcaattctagmcgaggtgttcgccgtcacattcgaaaagtacacaagaaaaagatggaagaactaaaaaagtacattgaaacacgaaagatccaaaccaatcctctaaaggacgcagtaagaatgttctagttccattaagtaggagttgtccagtatgttgtaaatcatttgctacaaaagcgaatgtaaggaggcattttgatgaagttcatagaggactaaggagggattcaattactcctgatatagcaacaaagcctgggcaacctttgttcctggattctatttctcctaaaaaatcttttaagactcgaaaacaaaagtcttcttcaaaggctgaatacaatttaactgcatgcaaatgcctcctttgcaagaggaaatatagttcacaaataatgcttaaaagacatatgcaaattgtccacaagataactctttctggaacaaactctaaaagagaaaaaggccctaataatactgccaacagttcagaaataaaagttaaagttgaaccagcagattctgtagaatcttcacccccttccattacccattctccacagaatgaattaaagggaacaaatcattcaaatgaaaaaaagaacacaccggcagcacagaaaaataaagntaaacaagactctgaaagccctaaatcaactagtccgtcggctgcaggtggccagcanaaaaccagaaaaccaaaactttcagctggctttgactttaagcaactttactgtaaactttgtaaacgtcaggttacttccaaacagaacttgactaaacacatcgagttgcacacagatggaaataacatttatgttaaattctacaagggcctctttgccttatgaaactcgcggaaacgtgatg

SEQ ID NO: 537 - DNA, 577 bp, Homo sapiens
  SITE (493): n equals a,t,g, or c
  SITE (511): n equals a,t,g, or c
  SITE (519): n equals a,t,g, or c
  SITE (547): n equals a,t,g, or c
  SITE (564): n equals a,t,g, or c
aggcaatggcccaaatgcagggagaagagtcgcttgacttgaagagaagacggattcaccaatgtgactttgcaggatgcagcaaagtgtacaccaaaagctctcacctgaaagctcaccgcagaatccatacaggagagaagccttataaatgcacctgggatggctgctcctggaaatttgctcgctcagatgagctcactcgccatttccgcaagcacacaggcatcaagccttttcggtgcacagactgcaaccgcagcttttctcgttctgaccacctgtccctgcatcgccgtcgccatgacaccatgtgagccgcacaggtcacactagagaagctgcgctggtatctttcctggtcgtgtgctgaggttgggacaattttttcctctttgacttcagcttgcatatggggttgaagcagcccactgagccaagttgaggagactggaggaaaagagagctggtctcccstggggctytttcawanttctaccttcamtttttncactgttncagacccttttttttcaaccttcacatngggttgaatttccagtnttggcaaccatgg

SEQ ID NO: 538 - DNA, 558 bp, Homo sapiens
  SITE (240): n equals a,t,g, or c
ggaggaggagcctgggggtctcggtccgcagctgggatgagctcccggatgagaaaagggcagacacctacatcccagtgggcctaggccgmctgctccacgacccccccgaggactgccgcagcgacggcggcagcagcagcggcagcggcagcagcagcgcgggggagcctggaggagcagagagcagctcgtccccgcacgcccccgagagcgaaacccccgagcccggcgacgccnagggccccgatggacacctggcgaccaagcagcgccggtcgcagatcgaaaatcaagttcaccacaggcacgtgcagcgactcggtggttcacagctgtgacctgtgtggcaagggcttccgtctgcagcgcatgctgaaccgtcacctcaagtgccacaaccaggtgaaaagacacctgtgcaccttctgcggcaagggcttcaacgacaccttcgacctgaagaggcacgtccgsacacacacaggcattcgtcctacaaatgcaacgtctgcaataaagccttmaccagcgctgctctctggagtcccacctgaa

SEQ ID NO: 539 - DNA, 737 bp, Homo sapiens
gaaatcttccgctggagggtcaacttcatccggcatctgcggagccgcagggagcaggagaagccgcacgagtgctcggtgtgcggggagctgttcagcgacagcgaggacctggatgggcacctagagagccacgaggcccagaagccttaccggtgtggtgcctgcgggaagagcttccgcctgaactcccacctgctctcccaccggcggatacacctgcagccggacagactccagccggtggagaagagagagcaggcggcatccgaggacgcggacaagggtcccaaagagccgctggaaaacggcaaggccaaactgagcttccagtgctgtgagtgtgggaaggccttccagcggcacgaccacctggctcggcaccgcagccactttcacctgaaggacaaagcccggcccttccagtgccggtactgcgtcaagagcttyacgcagaactatgacctcctccgccacgagcgcctgcacatgaagcgccgttccaagcaggctytgaactcctactgagcctctccgcctggggcggcctcaccctggctggtgctgccccctcaccttggtactgatcagcgcccccacccaggacataccttccccaggatagagagcacacctccctcctgtccttgctctcaggtagtgagcgttcgggtggtgccatgggagcactctccctcccccaggtaatgaaagagtggccaagtgaaaaaaagaaa

SEQ ID NO: 540 - DNA, 471 bp, Homo sapiens
  SITE (425): n equals a,t,g, or c
gcacagacctaatagacacggcctttcctctctgcctctggctttatgtctctttcatcctcctctgcctttcccctgcccttgatcccttctgcaggtcttggctggtttcaggaaacgggtcccatcccatggactcccactctggggagcctgcgctcctgccctgtgggacctgtgacatggttttccgctcctcagctctgttagccacccatactcagcgcttctgcattggccacccgacccaagagatgacatttggagcacaggcatcagttgccactgaaccccagcgggccgcggttgtgccacaagaacaccarggcgtgccacaagaaccccagggsctyccagaccagcakgccartagatytgctctaaagargttaacagaggagtacagytamctaccttcccccaangctcaaaacggttgagcgtcttccccaaacctgtagatcatacttt

SEQ ID NO: 541 - DNA, 686 bp, Homo sapiens
ttccagatgctctctgtgtgggtatgtgtgtagccatcctccttctttgaagtctcatatgtggaaacatgcaagtgaccaaaattacaactacgaacaagtaaacaaggctattaacgacgcgatttcacaaagtggcagagttctggggaaatcccctggaaagactcaattaaagagcagtgaagagagtgcagatcccgtcactggaagttcggaaaatgcagtgtcatcttcagaactgatgtcccagactcccagtgaagttctgggtaccaacgagaatgagaaactgagccctacaagtaatacctcatatagtttagaaaaaatctccagtctggcccctcctagcatggagtactgcgttttactcttctgctgttgtawttgtggttttgaatcaaccagcaaagaaaacctcttggatcatatgaaagagcacgagggtgaaattgtaaacatcatcctgaataaggaccacaatacagctctaaacacaaattaggtggaataatgactcgagcaggaaagcagtagaagaggattccttcaccacagtttcacctttacgctgtcagacaacttcctgccacagaagaagtcgttgatgtgatttttgaggaaatgacagatgtgactttggaaccaaacttgtaataaaaggaattccaaatggaaaaaaa

SEQ ID NO: 542 - DNA, 644 bp, Homo sapiens
agcctagacacagtgccaacataaacctacatcgtaaactgttgaccaaagaactcgatgacatgggcctggactcgtcgcagccctcccttagcaaggacctccgcgatgaatttttggtgaagatatatggtgcccagcacccatggggctcgatgtcagggaagacgcctcctctcccgcagactgaagactcccacctgaacgggtatgggagaggcatggcagaggactacatggtccttgacttgagcaccacctccagcctccagtccagcagcagtatccattcctccagagaatccgacgcaggcagcgatgaggggattcttctcgatgacattgacggggcgagtgacagtggggagtcggcacacaaggccgaggcccctgccctccctggcagcctaggggctgaagtttcaggatctcttatgttcagcagcttgtctgggagcaatggtgggatcatgtgcaacatttgccacaaaatgtacagcaacaaggggaccctgagagtgcactacaaaactgtgcatttgagagaaatgcacaagtgcaaagtcccaggttgcaatatgatgttttcctctgtcgaagccgaaatcggcacagtcagaaccctaatctccacaaaaacattc

SEQ ID NO: 543 - DNA, 414 bp, Homo sapiens
  SITE (385): n equals a,t,g, or c
  SITE (403): n equals a,t,g, or c
  SITE (410): n equals a,t,g, or c
ggcacgagaaaataaatgggctatgactggttaaatgtccaaaaggtgaattctcatttcattcaaacaaagacagatttgcgcattcactcaagcagaatgtggccatgaatattcagcccctgcatacatacaaagatgtacgcatgattccccccaccaagcacacacacagtcacacacgcacacacacacacatgcacacacgcgcgtgcacacasgacacatgcacacacacacgcacacgtaaacacatkgcacacatgcacacacgtgcacacattgcacacacgcacacacttgtcacaggccctgggctctttcaagcatwatcmtggtagttcttcagttgaaagacctttggaggtttaagacagcaagtccnttgacaaatatggttccnggtctanttgg

SEQ ID NO: 544 - DNA, 1293 bp, Homo sapiens
  SITE (5): n equals a,t,g, or c
ggcanggggtgagagccagagggaagagggaccacagggtgacccagaaacaccctcctttcaaagggagccctgagtaagtttgggaagggtggggtgagttggggagcacagggtagtttgatggaggcaacctctgggtggggaagggagcaatgtctcaggatctagtgtgtctaggttctgaagaatgataaattggactggggctgaggttgccctggggtttgagggaacagggctccctgggtatggctctccagggtaagaggaggagacttcccagttcagcctgactgcttcccccacccctccaggtcctgagcctttgcctccaaaaggtctgcagtatctggtgctcttgtctcatgcccacagccgagagtgcagcctggtgcccgggcttcgggggcctggcggccaagatggggggcttgtgtgggagtgctcagcaggccataccttctcctggggaccctctttgagccctacaccttcagaggcacccaagccagcctcccttccacatactactcggagaagttggtgttccgaggccacgagtgggcaggagcttgcagatttggaatctgagcatgatgagaggactcaagaggccaggttgcccaggarggtgggacccccaccagagaccttcccacctccaggagaggaagarggtgaggaagaagaggacaatgatgaggatgaagargagatgctcagtgatgccagcttatggacctacagctcctccccagatgatagtgagcctgatgcccccagactactgccttcccctgtcacctgcacacctaaagagggggagacaccaccagcccctgcagcactctccagtcctcttgctgtgccggccttgtcagcatcctcattgagttccagagctcctccacctgcagaagtcagggtgcagccacagctcagcaggacccctcaagcggcccagcagactgaggccctggccagcactgggagtcaggcccagtctgctccaaccccggcctgggatgaggacactgcacaaattggccccaagagaattaggaaagctgccaaaagagagctgatgccttgtgacttccctggctgtggaaggatcttctccaaccggcagagccagcctgtgggaagtctttcaactttaagaaacacctgaaggagcacatgaagctgcacagtgacacccgggactacatctgtgagttctgcgcccggtctttccgcactagcagcaaccttgtcatccacagacgtatccacactggagaaaaa

SEQ ID NO: 545 - DNA, 320 bp, Homo sapiens
  SITE (289): n equals a,t,g, or c
  SITE (309): n equals a,t,g, or c
  SITE (312): n equals a,t,g, or c
cgacactagtggatccaaagaattcggcacagtattatctgagaaatgtccttttacaatggttttatttaaacagaatccaaataagcttcacaccttgctttttttttttgtatatatctcttaagtctttatttttccataaccccttctcttttaaaaatgccacttacatgttgaagaaactgggtcgtttgtcttgaggaattcacacattatagatttggctgatttcatcccgttgggtgtgtttaacacttttttaaaaaatcaattgtatttcccaatnaaggggttaggtattaaaanggnattgggtt

SEQ ID NO: 546 - DNA, 1670 bp, Homo sapiens
agaaagattgagttacaagagcagccttatcagtgtgatatctgtggaaaagcctttggttatagctcagacctcattcagcattacagaactcatacagcagagaagccctatcaatgtgatatatgtagagaaaatgttggccagtgttcccacaccaaacaacatcaaaaaatctactccagcacaaaatcccatcaatgtcatgaatgtggcagaggcttcactctgaagtcacatcttaatcaacatcagagaatccatactggtgagaaaccttttcaatgtaaagaatgtggaatgaatttcagctggagttgtagcctctttaaacacctgagaagccatgagaggacagatcccataaataccttaagtgtagaggggtctctgttgtagaatagctcttaattttagagaaaccttcctggagggaaaccatactcctataatgagcaaagtaacaacttcaagcatttttccagcgttaccatcaaactcacaaataggttgaaatcctttagttataactcagcctttaggaacaccggagaacccacaataatagaaatcttttcgtgttccccattgagaaatgctttagttagcatcttcatgcttggaaatctagacaagaagagaatccatggatggacatggtcgaggaattcggaaagcctgcagttgacattcagtcttcacttgaaactcaaaactgacactaggaacagcttcatgagttcagtagaagtaagctttatttgtagcttctgccttgtttgacggcgtatctattcagggaagcgcacagtaaaagaattccttagcatgatgtctgttttggtacctcagcaatgaaccttttctagaaattattattccaaccactagaataccctagtcactattcccactttgagcattaacccctttgaaaagaaatggacttaaagtatctctgttttggcaaaattcaggttcaggggctggatggtatgtgtttctgctgccttattcaatccaccacttctctgtgaaacactctaccttgtttttggtttgattctactgatgtcagggtttagccggtagaaggagtagttcagtttgtcaattcaggagaaactgtactggtcagtcacatcttacggcgaagggagagggaccttaggggagcagagaagacaggcaaagttgtggactgtttgatcttgtattacccacaggaatgagggcagctaaacccatagaaggagttggaccaaggcgaattacgagtcctggtcccagcagtatgtgtgctgacttctgggtgccccagaaatagacctctcctgtagagtggtgatatacagaatgagtttcagtttgcattgcagctgggattgaaagtaatcagtcrtgagcaggcaggcaggaggtcctgttagccctgccttccaggaaggttggggtgggagttttgagtgggaaagaggatgacatgtgtgagagagttctgagcctgtttgctagggagagtgagtgagtgctcttgggcactgctcaggccgtttctgctgacttgcctggcttacaataaatgcccaataaatatttgttgaccataaaaaaaaaaaaaaaaaaatcgccttacctgttgaaactgaaaataaagcttgtttatttcc

SEQ ID NO: 547 - DNA, 1146 bp, Homo sapiens
tccccctcccccagcccctcctctcctcaccccacccggcctccctccctccctcgcccgcccggcgctcgcagaaccgacaccaggggggctctggatgtagcaccatgacaggcatcgccgccgcctccttcttctccaatacctgccgattcgggggctgcggactccacttccccaccctggccgacctcatcgagcacatcgaggacaaccacatcgatacagatccacgggttttagaaaaacaagaattacagcagccaacctatgttgccctgagttacataaatagattcatgacagatgctgcccgccgagagcaggagtccctaaagaagaagattcagccgaagctctcgctgactctgtccagctcagtgtctcgagggaatgtgtccactcccccacgccacagcagtggaagccttactcyccccgtgaccccacccatcaccccctcctcttcattccgcagcagcactccgacaggcagcgagtatgacgaggaggaggtggactatgaggagtcggacagcgatgagtcctggaccacagagagtgccatcagctccgaagccatcctcagctccatgtgcatgaatggaggggaagagaagccttttgcctgcccagttcctggatgtaaaaagagatacaagaatgtgaatggcataaagtatcacgctaagaatggtcacagaacacagattcgtgtccgcaaaccattcaagtgtcgctgtgggaagagttacaagacagctcagggcctgcggcaccacacaatcaatttccatcccccggtgtcggctgagattatcaggaagatgcagcaataacatgctggtcataactgtgccaagaaatcctcaccagcagttgctgattttgaaaacagccaccttttttcaggggaagcattcagcaaccctttaaagaaaaagaattaaatgcatgctttaaattttttctgtaattttggaatgatgtatctttgtagagttaatgattttgtacatttgcacatgtaatcatcatacccattttcattactttgatataaggtgctaaacaaaaaaagctctaggttcttcagcacatttcccccaaaacaaaataaaattgagggcatgttgcaaaaaaaaa

SEQ ID NO: 548 - DNA, 534 bp, Homo sapiens
  SITE (434): n equals a,t,g, or c
  SITE (447): n equals a,t,g, or c
  SITE (500): n equals a,t,g, or c
actgaggcctgggagcaggaacctgtaggcagcgcttgagggtagcgggatagcagctgcaagcgcgcgtgggaggcgggggctctgggcggaacaaaaatcacaggatgtcagaggatgtttcccgggaagaactgggataaaggaagggtcccagcaccatggaggacccgaaccctgaagagaacatgaagcagcaggattcacccaaggagagaagtccccagagcccaggaggcaacatctgccacctgggggccccgaagtgcacccgctgcctcatcaccttcgcagattccaagttccaggagcgtcacatgaagcgggagcacccagcggacttcgtggcccagaagctgcagggggtcctcttcatctgcttcacctgcgcccgctccttccctcytccaaagcctaatcaccaccagcgcagnayggtcmasccgncaagccaccttgccggtkgaaccactatgccagccacttcttgkctgatgtgnaagactttggcagstgttcttgagcggaccagat

SEQ ID NO: 549 - DNA, 339 bp, Homo sapiens
  SITE (13): n equals a,t,g, or c
  SITE (214): n equals a,t,g, or c
gttccgctgccantgtgcggccagagctttacacagtcttggtttctcaagggccacatgcgtagacaaggcctccttcgatcatgcgtgtccggtgtgcggccgctgcttcaaggagccctggttccttaaraaccacatgaaggtgcacgccagcaagctgggcccactgcgtgccccggggcctgcctccgggcctgcccgcgccccccancctcctgacctcggcctgctggcctatgaccgttgggcccaacgctcctcttggccccggctcccacccgggccgaacgccgtgagccccgagcctcttgggctacttgaaccctgcaacttggc

SEQ ID NO: 550 - DNA, 1584 bp, Homo sapiens
aaatttggcaaagctttgctttttccccagatcttgctaaacatataagacttagaactagaggaaaacactatgtttgtaatgaatgtggcaaagaatttacttgtttctcaaaactcaacattcacataagggttcacactggagaaaaaccgtatgagtgcacaaatgtgggaaagccttcactgattcatcaggtcttataaacacaggcgaactcacactggrgaaargccttatgaatgtaaggaatgtgggaaagcttttgctaactcttcacatcttactgtacatatgagaactcacactggtgagaagccttatcaatgtaaggaatgtggaaaagcctttattaattcctcttcctttaaaagtcacatgcagactcatcctggtgtaaaaccctatgactgtcaacagtgtgggaaagccttcattygatcctcatttcttattcgacatttgagaagtcacagtgcagaaaggccttttgaatgtgaggaatgtgggaaagcctttagatactcctcgcaccttagtcaacataaaagawtacatacaggggagaggccatataaatgtcaaaagtgtgggcaagccttcagtatctcatcaggccttacagtacacatgagaactcacactggtgaacggccctttgaatgtcaggaatgtgggaaagcctttactcggtccacatatcttattcgacatctaagaagtcatagtgtggagaaaccatataaggaatgtgggcaaacctttagtaattcctcatgccttactgaatgtgtgtgaattggggctgatacttggaaagaatgtggtaaagccactacttcctcacacttactgaacatgtactcattcatagtggcaatgtacacagtcataaggaatgtgggaagccttccttggtgtctcagatcttaacaattccaatagaagagaagacatatgaatgtaaggaatgtgggaaaatcttggctccttccataggccttactattcatgtgtctgtgcatcctaggaaacaaactgaacgtaggaaacctgtcgatgcttacatcttactgagtctgtttgaactcatgctggagagaaatgctatgaatgtgaggaaggtggaaaagctttcattattttcctcgggccttactgagcttgtgagcacattggatataaatgcacgtcctctggctgtaaggaatgtgttgaaacctttcrctctgccttataccttaatattcagctgtgatctcacaagtgtgaaaaatcttatgaatgtaaaatgtgtggagattcttctttgtttttagcttccactttgggaacatgtcaaagcacacattgagaagtcccatgagtgaaagagatgttggaaagcccttgaacttggtcgttaggaaacatccacactgaagaggaacctgactgtatggaaggtcaaaaaggctgtattaatttacatgcaaaaagtcacactagaggaatgccatatcagaatgcttttggtaaatatacatgttttaaagaggttatatatcattaataaaaatatctagctggtctgaaaaaaaaaaa

SEQ ID NO: 551 - DNA, 1250 bp, Homo sapiens
aattcggcacgagctctcccttcggcttctctctttcggccggcgccgccagttcctggggcacacccagaggtccccttctcgccgccgcctgcaactgcgagggtagcccggggccgcttggagtcgcccggacctgagaggctgctgcactgggcctcagccagccctccggatgctggtgctgccatccccctgccctcagcctctggcattttcctccgttgagaccatggagggccctccccgtcggacttgccgctccccagaacctggaccttcctcctccatcggatctccccaggcttcatctcctccaaggcccaaccactacctgcttattgacactcagggtgtcccctacacagtgctggtggacgaggagtcacagagggagccaggggccagtggggctccaggccagaaaaagtgctacagctgccccgtgtgctcaagggtcttcgagtacatgtcctaccttcagcgacacagcatcacccactcggaggtaaagcccttcgagtgtgacatctgtgggaaggcattcaagcgcgccagccacttggcacggcaccattccattcacctggcgggtggtgggcggccccacggctgcccgctctgccctcgccgcttccgggatgcgggtgagctggcccagcacagccgggtgcactctggggaacgcccgtttcagtgtccacactgccctcgccgctttatggagcagaacacactgcagaaacacacgcggtggaagcatccatgagccgggctgccgggtgccccaggtaccacaggactttgcagggagcctggactcctgtccagacacctggtgagagcctgaggctggtgttcagggccctggacacagacacagagcagccgcatctcaaaggcagagccctgcctgaaggaggaatccgtgagtaatcttcaggtcctccgtgttctggagctgagatgggaatgagcccctacacagaatggagtcctctagcctaaagatatcagctgttccatggcagagccttgactggatggaggtggggagtgtggtgtgtaaagtctctggcctcataaaaggtggctgtgggtcgtcaggaatctgcgccatcttcctggggcttctgcgctgttgttggggaagggaccccagtcctgccttccaccccccaaccaggcctgagactgatcaaacaataaacacgtttcccactctgaaaaaaaaaaaaaaaaaaaaaaaa

SEQ ID NO: 552 - DNA, 2489 bp, Homo sapiens
  SITE (1565): n equals a,t,g, or c
  SITE (1569): n equals a,t,g, or c
  SITE (2412): n equals a,t,g, or c
ttttttttttttttttttttttttttttttttttgcaggttctcatgttttattgtaaagcaacaagaaactcttatgtacactgtccgtcttggggcgcctccatcctgtgccatcttctctaccaggccaggcaggcatgggtggggcgctcagagtcctctgccctgtccctgcccggccaggaccccgcagacctcatgctagacgatgaccgtctgcacctccagctggccctccggcgaggcgatgaccagctcgcctgcatgctccaggatctcgatgtcctctgatgacaccatggtcacagtggcctgttcagtgccacttgtccctgcccgggcggcaagcacagtgccctcgctgatggccgaggccagcgtcatggccacctgctctgtcaggctctcgggggtggcaatggtgatggtgtcggcggcagccgcctctgggcccagcgccgtctcctcgtccatggtgacgttctgcacgatgatctggtggccggcgctagcctggtgcacgatctgctgcaccaccttcatgatgtggctgtccacctctgtctgggtgccctcgatgatctccgtggcctcwctggtctccgcatcgtccgcagtggcctcgatgatatactcctgggtgtcagctaccacggacgagaactccaccaacactgtgtgcgggtcttccgtgaggacggtggtggctgccgcggggctgtcctcagacaccagcaactcctccacctccagcaggcagccccctttggtgcgcaggtgccggttcagcgtgccgtgctcggcgaagccacggccgcacttgtagcacttgaacggcttctcgcctgtgtggtgtcgcacgtgccgcaccagtgagcccttctctcggaagccacggctgcagaactggcacacgtgcggcttctcctccaggtgtgtcctgaagtgcacctgctgtgcgttcttagtcttgtagcgcttgccacacttgggacaagggtagggccgctcgtctgagtggacgcgccggtggccacgcacatgggcaatggtcttgtagagcttcccgcagtcgccacagcggaagcggcgctcacgcacgtkcacctcctggtgcttcttgagcaggtaggccttggggaaggccttgccacatgsgcgcaggcgaacggcctcggcccggtgtggcccctcttgtgggcctccagggtggctgctgtcgggaaggtctcactgcactgaggacatgggtgggtcctgggcaccgctgaggcctcgctggccacctgtgtctccagcggctgcacttccagtaccggcagctgcggggctgccactgccaggggctggggactggacccggagcagagctggctccagggcaccctcctccccagcagcgcgctcaaggacgatgccggagttctgcatggcctggtgcagcaggttctcacggctgccctcgctggagcaggggagctcctgggagacggggggctctggggccagggctttcatgcccagggacagctcctgcatctggacgtggacttcgtggatganggtnccttggcatctgtcaccaggtgaatcacgggtgaagtctctataggctcgcctgtcaccgatgatgtggctgtccccaagccggcagctccagctccagaacytgcacgtgcgtcctctttgctgacaaccacgtccttgctcacactgaagcggattttctctgtgcagggggtgagagacttgaggtgccgggtcagtgcacccgactcccggaagctctttccacacttggagcacttgtaggggcgctcatccgtgtgccgccggtggtgccggatgagtgagcccttggtgcggaaggaggccccacagagcttgcactcgtggtccttgcggctgctgtgagtgaccatgtgggccttgaggatgctgcccgtcttgaaggtcttgtggcacagcgcacacacatagcggccatccttgttcaccagtagcttcacctgggcctgctcaccctcccctgcgagccccagcccctgctggtgggggctgcccggggcctcggccatctcaccgtctcccasstccgcctcagcagccacgatgacctctttgatgtgcccaccaccaacaaggtcagatgcgtggctgatgtctgctgccagagaggccgcctccaccacgatgtgggccacagtgatgggctcctctgggcctggtgctgccggcaccacctcctggcccagcaacgctgtggtggcaggggtggcaggcagggctccggaggggcccgctggcaggccttctgaatcttgtgctgaamaaaatcctccaaggcggtgaactctgcctggcagcggccgcatctgtgcacatcgtcctcatcttcctcgctgaaggncgccgggaggccgaggaagccgctggggcccaaggccgccgccaccgccgcaactgcaccctcgcccgctttcacac

SEQ ID NO: 553 - DNA, 361 bp, Homo sapiens
  SITE (278): n equals a,t,g, or c
  SITE (285): n equals a,t,g, or c
  SITE (360): n equals a,t,g, or c
gcctactgtgctcacatctcggagagacagctcttcccacgaggagacccccggctcccaccccctgtacggacacggagagtgcaagtggccaggctgtgagaccctgtgtgaagacctgggccagtttatcaaacacctcaacacagagcacgccctggatgaccggagtacagcccagtgccgggtacagatgcaggtggtgcagcagctggagatccagctcgccaaggagagcgagcggctgcargccatgatggcccacctgcacatgcggnccctcgngagcccaagcccttcagccagccactgaaaccggttcccgggcttctccttcattctccaaagtgaccgtctttng

SEQ ID NO: 554 - DNA, 1240 bp, Homo sapiens
acctgcggccgctgcctgcagaccttcccgttggaggccatcactgccttcatggaccacaagaagctgggctgtcagctcttcagaggccccagccgcggccagggctcagaacgagaggagctgaaggccttgagctgcctgcgctgtggcaaacagttcacagtggcctggaagctgctgcgtcacgcccagtgggaccacggactgtccatctaccagacagaatcagaggccccggakgccccgctcctgggcctggccgaggtggctgcagccgtgtcggcagtggtggggccagcagctgaggccaagagcccccgtgcaagtggcagcggcctcacccggcggacccacctgtcctgtgtgcaagaagaccctcagctccttcagcaacctcaaagtgcacatgcgctcacacacaggcgagcggccctatgcttgcgaccagtgtccctacgcctgcgcccagagcagcaagctcaaccgccacaagaagacccaccsgcaggtgccgscccagagccccctcatggccgacaccagccaggagcaggcctctgcatgccctccggagccggctgtccatgctgctgcccccaccagcacccttccatgcagcggtggtgaggggctggagccgccgccacagcaggtgtccaggaacccggggctcctggcagtggggctcaagccggscctggtggagacacttggggagccatcaccacggaacaaagaactgaccctgcaaacagccagaaggcatcacccaaaaagatgcccaagtcagggggcaagagccgcgggcccgggggcagctgtgagttctgcgggaagcattttaccaacagcagcaacctgacggtgcaccggcgctcacacaccggggagcgcccctacacctgtgagttctgcaactacgcctgcgcccagagcagtaagctcaaccgccaccgccgcatgcacggcatgacgcctggcagcacccgcttcgagtgcccccactgccatgtgcccttcggcctgcgagccaccctggacaaacamctgcggcagaagcaccctgaggcggccggcgaggcctgagcccaggaaagcccccctcactgtccctggtaccgctgccaacacccattgacctcctcgtttttgcccgccttctccaagtaaattttcccttttatttaaaaaaaaaaaaaaaaaaaaaaaaaaaaaaaaaaaaaaaaaaaaaaaaaaa

SEQ ID NO: 555 - DNA, 158 bp, Homo sapiens
cttcaaagaaaagtcaactgtcatcatacattacaggactcacacaggtgaaaaaccttatgaatgtaatgattgtggaaaagccttcactcagaagtccaacctcattgtccatcagaaaacccacactggwgagaaaacctatgrwtgcactaaat

SEQ ID NO: 556 - DNA, 818 bp, Homo sapiens
ggggccaaggtgttggaagttcctaattctttcctcggttaactgtgaaactctgcgtattgggaaggcctggcctcagtcatcaggccaggagaggtactggacgccgcgcacgcactcgtctgccagcgaggcccaaaggggaagcctagcggagtcagtgtggcagctgctggcctctgggccggttgtgcatctaatcatccaaaaaattcagctcaaaacctgactaaagatagtactttwaaacatgaaggyttctattcagagaacttaactgaatctagaaaattcctgaaaagtagggaaaaacagtccagcctgaccgaaataaaaggatctgtttatgaaacaacatacagtcctcctgaatgtccattctgtggaaaaatagaggagcacagtgaagatatggaaactcatgtgaaaacaaagcatgccaatcttttagacattccattggaagactgtgatcaaccactctatgattgtcctatgtgtgggctcatatgtacaaattaccatattcttcaggaacatgttgacttgcatttggaagaaaacagctttcagcaaggcatggatagagtccagtgttctggtgatctacaattggctcaccagcttcagcaagaagaagacagaaagaggagatctgaagaatcaagacaagaaatagaagaatttcagaagctgcagagacaatatggtttaggataattctggagggtaccaaccaacaacaactacgaaatatggagatagaagtaaataggggragaatgcctccatctgaatttcataggagaaaagctgat

SEQ ID NO: 557 - DNA, 2637 bp, Homo sapiens
  SITE (111): n equals a,t,g, or c
  SITE (143): n equals a,t,g, or c
  SITE (212): n equals a,t,g, or c
  SITE (499): n equals a,t,g, or c
  SITE (1631): n equals a,t,g, or c
gcgggacgggcggagaggagagagtggcgcgcagtccagcgagggcgggggttggctatgtggggggtggtgcaccccgcagtctagacagtctgatccgggctgggggcntgtacactcggcgcacctgcgagactacagancctcgggccggcacgtgtggggagtgtggacacgtctgctgcgccccgcttctcgctgctgaggggaanggagggggcgggcaggtgcagcggccgggctagtgggagggggcggcggccatggagcgggtgaacgacgcttcgtgcggcccgtctggctgctacacataccaggtgagcagacacagcacggagatgctgcacaacctgaaccagcagcgcaaaaacggcgggcgcttctgcgacgtgctcttgcgggtaggcgacgagagcttcccagcgcaccgcscagatgctggccgcctgcagcgagtactttgagtcggtgttcagcgcccagttggcgacaggcggantgcggacgggggtccggctgatgtagggggcgcgacggcagcaccaggcggcggggcgggggcagccgggagctggagatgcacactatcagctccaaggtatttggggacattctggacttcgcctacacttcccgcatcgtggtgcgcttggagagctttcccgaactcatgacggccgmcaagttcctgctgatgaggtcggttatcgagatctgccaggaagtcatcaaacagtccaacgtacagatcctggtaccccctgcccgcgccgatataatgctttttcgcccccctgggacctcggacttgggcttccctttggacatgaccaacggggcagccttggcagccaacagcaatggcatcgccggcagcatgcagccagaggaggaggcagctcgggcggctggtgcagccattgcaggccaagcctctttgcctgtgttacctggggtggaccgcttgcccatggtggctggacccctatccccccaactgctgacttccccattccccagtgtggcatccagtgcccctcccctgactggcaagcgaggccggggccgcccaaggaaggccaacctgctggactcaatgtttgggtccccagggggcctgagggaggcaggcatccttccatgcggtctatgtggtaaggtgttcactgatgccaaccggctccggcagcacgaggcccagcacggtgtcaccagcctccagctgggctacatcgaccttcctcctccgaggctgggtgagaatgggctacccatctctgaagaccccgacggcccccgaaagaggagccggaccaggaagcaggtggcttgtgagatctgcggcaagatcttccgtgatgtgtatcatcttaaccggcacaagctgtcccactctggggagaagccctactcctgccctgtgtgtgggttgcggttcaagagaaaagaccgcatgtcctaccatgtgcggtcccatgatgggtccgtgggcaagccttacatctgccagagctgtgggaaaggcttctccaggcctgatcacttgaacggacatatcaagcaggtgcacacttctgagcggcctcacaagtgtcaggtgtgggttgggagcagcagcggcctgccgcccntggaacctcttcctagcgacctgccatcatgggactttgcccagcctgctttgtggaggtcgtcccattcggttcctgacaccgccttttccctttctctaaaaaaatcattcccagcccttgaaaacctgggcccagcacactccagcaacactctcttctgcccagccccgccgggatatctgaggcagggctggaccaccccagagggcagcagggcctttacccagtggcctgttggctagcctgggcctccctggagagggttgacagtggaagggaacaggaggggcatttggcctgagacccctgcttttgggagaggctagcagggtggttcctgcccagcatgcccagctcctccctgggtgactcggagtctttcccatgtcagagcccccaaatgggggtagcaaggagcacctttctggaaccccctatagcatccaagtttctttctgggctctcttgccttttcccccctttcacagatggcacccctgggcatctgtccttgcctaggtgattttggaggttggtgccttcctgggaactagccaccagcttatctgcttcccttcccctggcatcacttcccataggcctggggtttctagactggggcctggccacccctttccccactccacgagtgagtcggcctccagagaagactggcacaattccaactagagtcaacccatgctgccctctgcccttcccactcagatctagatcctgctttcatttctggctagtgaagtagacttttgtgtttttgaggtttattagcaggtctgctcaggaaccaaactaatgagtagctttatattgggccaccccaatatatggctttgggggctgaaaaagcagatgtagaccccctccctcggatccttattggtgtgccctttagcactccgcagactctgcggggtgaacaggagtgatgataaaatttttcattctaacaaaaaaaaaaaaaaaaaaaaaaaaaaaaaaaaaa

SEQ ID NO: 558 - DNA, 465 bp, Homo sapiens
gagcaggcctccgggcccggcgccgccgcccgcaggctcagtagatgaaggcgtttctgagggcttgsctacacttcaaagcacgtctagcactaatgctcctccggatgatgatgatcgattggaaaatgktcagtatccctaccaactctacattgctccttccaccagcagtacagagcgaccaagtccaaatggtcccgacagaccttttcagtgtccaacctgcggggtgcgattcacccgtattcagaacctaaagcagcacatgctcatccactcaggaattaaaccatttcagtgtgaccgctgtgggaaaaagttcaccagggcttactcgctaaagatgcatcgcctaaagcatgaagtgatttcctagtaccggactacttaaaccaggaacaagaagagacccttgttcaatatgatcttggagaacacggttttgaaagcaactcctctgtt

SEQ ID NO: 559 - DNA, 1447 bp, Homo sapiens
  SITE (1401): n equals a,t,g, or c
tctctggagtcgattgccccgagacacatgggccaaggaggggtcagcggcgaattctttcggcctgttggggacccctcgtgtccccacgccagactggacctcccgtatgaacttctcttcgcatcggcggcggcttccgtcacctccgctcccccgatcctattcccagtcgtatgccagcttggagagtcacgtgagagcaagagagtagctttctggttgtcctggtgccctgctcaggcaaactgactgccattctctgaggatggcagctctgtcccccacatttgccacgtccacccaggattccacctgtctccaggactcagaatttcctgtttcttcaaaagaccattcctgtccccagaatttggacctgttcgtgtgcagtggtctggagcctcacacacccagtgttggttcccaggaatcggtgactttccaagatgtcgctgtggactttaccgagaaggagtggcccttgctggattcttctcagagaaaactgtacaaagatgtaatgctggagaactacagcaacctcacttcactggggtatmaggtcggcaaacccagcctcatctcacacttggagcargaggaggagccgaggacagaggagaggggcgctcaccagggcgcttgtgcagattgggagactccatctaaaaccaagtggtcacttcttatggaagatatttttgggaaggaaacgcccagtggtgtgacgatggaaagagccggtcttggagagaagtccactgaatacgctcacttgttcgaagtctttggcatggaccctcatctcactcagccaatgggaaggcacgctggcaagaggccctatcaccgccgcgactatggggtagcgttcaagggcaggccgcacctcactcagcacatgagcatgtacgacgggagaaaaatgcatgaatgtcatcagtgccaaaaagccttcaccacgagcgcgtccctcacacggcacaggagaatccacaccggggagaagccttacgagtgcagcgactgcgggaaagccttcaacgacccttcagcccttaggagccacgcaagaactcacctcaaagagaagccctttgactgcagtcagtgtggaaatgcattccggaccctctcggccctgaaaatccacatgcgagttcacactggcgagaggccttacaagtgtgatcagtgcgggaaggcttacggccggagctgccacctcatcgcacacaagagaacgcacaccggagagaggccctacgagtgtcacgactgtgggaaagctttccagcacccctcccacctcaaagagcacgtgaggaatcacacgggggagaagccctacgcgtgcacgcagtggacaaaagccttccgctggaagtccaactttantttgcacaagaagaaccacatggtgggagaagaccttacgattgtt

SEQ ID NO: 560 - DNA, 3849 bp, Homo sapiens
tgaaattattaaaactgctatgaattctcaaatacttgaggtaaaaagtggatctcagggtgctggtgaaacttcacaaaatgctcaaataaattataacattcagcttccttcagtaaacactgtgcaaaataacaaattacccgattcttctccgttttcctcctttataagtgtcatgccaacaaaaagtaacattcctcagtmysaagtatcacataaggaggatcaaatacaggaaattttagaaggcttacagaaattaaaattagaaaatgacctatccactccagcatcccaatgtgtactgataaatacatcagtgacactgactcccacgcctgttaaatcaactgcagatatcacagttattcagccagtttctgaaatgataaacattcaatttaatgacaaagttaataaaccctttgtgtgtcaaaaccaaggctgtaactacagtgctatgacaaaggatgcactatttaagcactatggtaaaattcatcaatacactccagaaatgattcttgaaattaagaagaatcaattgaaatttgctccctttaaatgtgtagtacctacatgtacaaaaacatttacaagaaattctaacctccgggcacactgtcagttggtgcatcattttacaactgaagaaatggtaaagttaaaaattaaaaggccttatggaagaaaatctcagagtgaaaatgtgccggcctcacgaagtacacaagtgaaaaaacagctagctatgacagaggaaaataaaaaggaatctcagcctgctttagaattgagagcagagacccaaaatacccacagtaatgtagcagtgatcccagaaaaacaacttgtagaaaaaaaaagtcctgacaaaacagaaagttctttacaagtgattacagttacttcagaacaatgtaatacaaatgcactcacaaacacacaaaccaaaggacggaagattaggaggcataaaaaagaaaaggaggagaaaaaacgaaagaagccagtttcccaatcccttgagtttccaacaagatacagtccttacagaccttatcgatgtgttcaccagggatgctttgctgcctttacgatacagcaaaayttgattctccattaccaggctgtacacaaatcagatctacctgcattttcagcagaggtcgaagaggaaagtgaagctggtaaagaaagtgaagaaactgaaactaaacaaactttgaaagaatttcgatgtcaggtaagtgactgttctcgaattttccaagcaattactggcctaatacaacactacatgaaacttcatgaaatgactcctggaagaaattgaaagtatgactgcttcagtggatgttgggaagtttccatgtgaccagttagagtgtaaatcttcatttactacatatttgaactatgttgttcatctagaggcagaccacgggattggactaagggcaagtaaaacagaagaagatggtgtatacaaatgtgattgtgaaggctgtgaccgtatatatgcaacccggtcgaatctcctccgacacatttttaataagcataatgacaaacataaggctcatttgattcgtccaagaagattaacaccaggccaggaaaatatgtcaagcaaggcaaaccaagaaaaatcaaagtctaaacatcgggggacgaagcacagcagatgtggaaaggaaggaataaaaatgcccaagaccaaacgaaagaaaaaaaataatttagaaaacaagaatgcaaagattgtgcagattgaagaaaataagccttattctctgaaacgtgggaagcatgtatattctataaaggctagaaatgatgccctgtctgagtgtacaagcagatttgtaacccagtatccatgtatgataaagggatgtacttcagttgttacaagtgaaagcaatataattagacattataagtgccataaattatctaaggcatttacatcacaacaccgaaatcttcttattgtattcaaacggtgttgcaactcacaagtaaaggaaacgtctgagcaagaaggtgctaagaatgatgtgaaagattctgacacgtgtgtatcagagagcaatgataattcaagaacaacagctacagtttcacaaaaggaagttgaaaaaaatgaaaaagatgaaatggatgaactaacagaattgtttattacaaaattaataaatgaagatagcacaagtgtagagacccaagctaatacttcttcaaatgtaagtaatgattttcaggaagataacctctgccagtcagaaagacaaaaagcaagtaatttgaagagagttaataaggaaaaaaatgtctcacaaaataaaaaaaggaaagttgaaaaagctgaaccagcatcagcagctgagttaagtagcgtgcgtaaagaagaagaaactgctgttgccattcaaaccattgaggagcatcctgcatcttttgactggagctcttttaagccaatgggatttgaagtatcatttctgaagtttcttgaggagtctgcagtgaagcagaagaaaaatactgacaaagaccatccgaatactggaaacaaaaaaggatcccattcaaattcaagaaaaaatattgataagactgctgtgactagtggaaatcatgtatgtccttgtaaagaaagcgaaacgtttgtacagtttgccaatccatcacagcttcagtgcagtgataatgtaaaaattgttttagacaagaatcttaaagattgcactgagcttgtcttaaagcaacttcaggaaatgaaacctaccgtcagtctgaaaaaacttgaagtacattcaaatgatccagatatgtctgttatgaaagatatcagtataggtaaagccacaggcagaggtcagtactgataattaatgtagtataaatacatcatttaccattttattttaaataggaagccatcaagcatgctagaattgtgaaactttcattatatttttttgttgttgacatgaattaacctggccaaaaacaaaaaagaaaaaaaaaacatgacatttgkcatgtaaaacttttttttatcctatgggacttgaggaacagaatcagtacttcagttattgtaaatagtgagctaaacctcaaatttctatcacccagttgcccttttcatgaactaaacaattatctgtgtgattggtatgtttcaccaggtcactgctcatgtataacagtactctttatttgtagataccttttttgtatatatttattattgtaaatcatgtgctgccaccagcagtctgtaagtctaaactattaaatgacacatttatatttggaattttaatttttaactaagcgatcaagttttttaaattgttcttttattgttttaaattaagaactttttgaactaaaaccagaaactctgccatagttcattgatttttacatgaaacatttatttacaagatgatatcaagattacttttcacaaaataggcacattatatcaacactttgctctgctttgtaaatttgccatccaggattttggggtggtattcatgtgaaattaaagcagattctctagcagtttcctatagctacagtttttttttttcattgcttctaattggatatagttactatgagtccatgaaatacaatggaaatgtgaataaagaatttactacattgaagattttaaacatttggtattaaaaaaaaatcctttgtgaatgtgatagaaaactagtagtgtggagcagtgtaaatatttgaggtggtgatttgtgaagtagcccagtattgccttaaataaaatcacatttcatttcttgttttaaaaaaaaa

SEQ ID NO: 561 - DNA, 471 bp, Homo sapiens
gcgaattcattcaggagagaaaccctatgaatgtagtaaatgtggaaaagtcttctctcggatgtcaaacctcactgtccactacagaagccattcaggagagaaaccctatgaatgtaatgaatgtgggaaagtcttttctcagaagtcatacctcactgtacactatagaactcattcaggagagaaaccctatgaatgtaatgagtgtgggaaaaaattccaccacagatcagccttcaatagccatcagagaattcatagaagaggaaatatgaacgtacttgatgtggaaaatctctgaagtcagatctcaatttttagaaaactctctgaatataatgaatatggggaatccaataggaagtcaaagcgtttatctgagagttcgtgttcctgaacggtgagaagcatttaggcattagagtcattttaatccaaattttcacagagaagaatcccgaggaatgt

SEQ ID NO: 562 - DNA, 476 bp, Homo sapiens
  SITE (441): n equals a,t,g, or c
  SITE (446): n equals a,t,g, or c
attgctctggagccagcaggggaagtgtgtacactatgtgcactgagggtgacacttctgagtgtgggggccctggctagggagtgggactggcaggcttgggtggggttcccaagctttaatcttcctaccccacagaatgttttctctgcccttcaggcagcctgagccgggcagggcccctgcctctgctacggcagcccccgatcatgcagcccccactggacctcaagcagatcctgcccttcccactcgagccagcccctacccttggcctcttcagcaactacagcacyatggaccctgtgcagaaggctgtgctctcccacacttttgggggacccttgctcaagaccaagcggcccgtcatttcctgtaatatctgtcaaatccgcttcaattctcagagccagggtgaagcgcactacaaaagtaaatcgncaagnccgaacgaagttaaaaggaatttaaggctg

SEQ ID NO: 563 - DNA, 566 bp, Homo sapiens
  SITE (454): n equals a,t,g, or c
  SITE (483): n equals a,t,g, or c
  SITE (532): n equals a,t,g, or c
  SITE (554): n equals a,t,g, or c
gckgccgcacacgcggcagttgtgcggcttcacctcgctgtgctgcatcatgtggcgcttcaggtggctggtctgggtgaaggccttgtggcacacctggcacttgtggggccgcgtgccctggtgggtcagcatgtgggtatgcaggtggctgagctgcttgaagagcttcccgcagtgcgtgcacgcgtgcggcttgatcccactgtggcccaggatgtgggtgaccaggttgtacttggaggtgtaggacttctcgcaggtggggcactgccagcgcttctgcgagccgcccacgtccacgtagtagctgtcatcgatctgcacgttcacgtccaccctctccaccttctgcttggtctcctcgctctcctggggctcggctttccggggcagcagakgttccgggggctgcttgggcaggaaggtgtgccggctgaaggggaagggcgangacgagggcacgaaaraagggggaacatnaggcccsgggtggactttggggtaattaggggtaaaggcctgggcaagnaattggaattgggcctttgctnggggccacacgg

SEQ ID NO: 564 - DNA, 446 bp, Homo sapiens
agcttctcggccatgcaccagtgcatcctcaagcgacacatgcgctcgcacacgggagagcggccctacccctgcgagatctgcgggaagaagttcacgcggcgcgagcacatgaagcgccacacgctggtccacagcaaggacaagaagtatgtgtgcaaggtgtgcagccgcgtcttcatgtccgccgccagcgtgggcatcaggcatggctccaggcgccacggtgtgtgcaccractgtgctggccgcggcatggccgggcccctggaccatggcggcggaggcggcgagggctctccagaggcgctgttcccaggcgacgggccctatctggaggaccctgaggacccacgaggggaggcggaggagctgggcgaggacgacgagggcctggcccctgaggatgcgctgttggcggacgacaaggatgaggaagactcgcc

SEQ ID NO: 565 - DNA, 399 bp, Homo sapiens
gaaagagggagagagagagggagagagacagagagagcagggatcaggtaaaggagtggggctgctgcagccattcagacctcaggagctgggtgtgaaggagcataagtgtgggatttgtgggcgggagttcaccctgctggccaacatgaagcgacacgtgctgatccacaccaacatccgcgcctaccagtgtcacctctgctacaagagcttcgtgcagaagcagaccctcaaggcacacatgatcgtccactctgacgtgaagcctttcaaatgcaagctttgtgggaaggaattcaaccggatgcacaacctgatgggccacatgcacctgcactcagacagcaaacccttcaatgsctctattgcccaagcaaattcaccctgaaggggaac

SEQ ID NO: 566 - DNA, 371 bp, Homo sapiens
  SITE (366): n equals a,t,g, or c
gggagggaaaccttacacatgtagccaatgtgggaaagccttcatcaagaagtgtcggctcatttatcatcaacgaactcatacaggagagaaaccccatggatgcagtgtatgtgggaaggccttctctacaaagttcagtctcactacacatcagaaaactcatacaggagaaaaaccttatatatgtagtgaatgtggaaaaggcttcattgagaagaggcgtcttaytgcacatcatcgaactcatactggtgagaaaccctttatatgcaataaatgtgggaaaggcttcaccttggaagaacagtcttatcacacatcagcaaactcatacaggagaggaaattatatacatgtagtggntgtgg

SEQ ID NO: 567 - DNA, 774 bp, Homo sapiens
  SITE (745): n equals a,t,g, or c
gggggccgtgctcggtgcgcttctgcaccggtgacgcaaccgctgtgtctccgccagtccgcgcaggccagcatccttcagaaaaagcatccccgaggaggaagacgaatcgttaaacatcttaggtcagctttaccagtgaggaaaccgacactgtgagctctagcctctcggaatttgtcttcttcagtggaaaccccgagaagactgatcagttcttcagttctaaaacaatggcccagggtttggtgacgttcgccgacgtagccatagacttttctcaggaggagtgggcctgtctgaactctgctcagarggacctgtactgggacgtgatgctggagaactacagtaacttggtctcactggatttggagtcagcatatgaaaataagagtttacctacagaaaaaaacattcatgaaataagggcttccaaaaggaattcagatagaagaagtaaatcccttggccgtaactggatatgtgaaggtacgcttgaaagaccacagcgctccagagggaggtatgtcaatcagatgatcatcaattatgtcataaggcctgctactagagaaggcacccctcctagaacacatcagagacatcataaggsgaattcctttgaatgtaaggactgtgggaaggcctttagtcgtgggytatcaacttagttcaacatcagaaaatccmtactggtggagaaaccytatggatgttaaaggattktaaggagggccttccntttggggccaatccagctttacttcaacc

SEQ ID NO: 568 - DNA, 526 bp, Homo sapiens
  SITE (12): n equals a,t,g, or c
  SITE (498): n equals a,t,g, or c
attttatcagtntctctataacaacaatacaaggcaacaaactgaagcaagagatgacctgcattgcccttggtgtactctgaactgccgcaaactttatagtttactcaagcatcttaaactctgccatagcagatttatcttcaactatgtttatcatccaaaaggtgctaggatagatgtttctatcaatgagtgttatgatggctcctatgcaggaaatcctcaggatattcatcgccaacctggatttgcttttagtcgcaacggaccagttaagagaacacctatcacacatattcttgtgtgcaggccaaaacgaacaaaagcaagcatgtctgaatttcttgaatctgaagatggggaagtagaacagcaaagaacatatagtagtggccacaatcgtstgtatttycatagtgatacctgcttacctctccgtccacaagaaatggaagtagatagtgaagatgaaaaggatcctgaatggctaagagnaaaaccattacacaaattgaagagtttc

SEQ ID NO: 569 - DNA, 1295 bp, Homo sapiens
  SITE (1276): n equals a,t,g, or c
  SITE (1277): n equals a,t,g, or c
gccaaaacaaaagctttctaaaaaacagaagaaaaagaaacagaaaccagcacagaattatgatgacaatttcaatgtaaatggacctggagaaggagtaaaggttgatccagaagatactaacttaaatcaagacagtgccaaagaattggaagatagtccccaggaaaatgtcagtgtcacagagatcattaaaccatgtgatgatccaaaaagtgaagctaaaagtgttcctaaacccaaaggaaagaaaaccaaagatatgaaaaaacctgtcagagtacctgctgaaccacaaacaatgagtgttcttatcagctgtacaacctgccatagtgaatttccatctcggaataaactttttgaccatctaaaggccacaggtcatgcaagagcaccttcatcatcgtctttaaacagcgcaacaagtagtcaaagcaagaaagagaaacgtaaaaacagatagagattctgcctgtgcttttgtttgactgtctctagattttgaaaccaaaaaactgaactgaaatcatctaaagagttaaaatttcagtgatctgcaattaattacattgtggaagattattttttatcttgtaaaaacacttttttggtttaatatatatttttaaaacatttcactagtgattgaattctacttttgccatctgaattgacttgaatgtcttaaaacaggtaaatactgtaaagtgtgtattcttgatgtttattggctcatgtggacagaaatgtacagggagaattacattattttaacacacagaagtgcaactttctgctttattttctgaatttcacattacttttacttaatgcttttgtgttttgttaatacttcataatatgtgaaaaactcggatcttttaaaaagcatcatagatcatttttccatatgacactggttccgattttaaaaattatttttaaataaccgattattgattactgtatttkttttctcaagaacagtgataggtagaaactaattgaacatttggtagtctttcaagaatagtgtctcttcaaggttttacttgwtttaatttgatattttactggtttaccagtaaggtgtattgttcagttttttgctccgatttgaattgtggaggtggaagcaaattagtttacatggcatgtcctccctaggcacagtgacagctgtaaagtatgacggaacaaggtagcagatggtacagaatttatactatttaaggaagagatgtggtgttcttcatgagtttttttcttcacnntttcagaagtttttgttc

SEQ ID NO: 570 - DNA, 1590 bp, Homo sapiens
ataaaaacagatttggatgcggatggatattaagggccaggaatcaagcagtgatcaagagcaggttgatgtggaatccattgattttagcaaagagaacaaaatggacatgactagtccagagcagtctagaaatgtgctacagtttactgaagaaaaagaagcttttatctctgaagaggagattgcaaaatacatgaagcgtggaaaaggaaagtattattgcaaaatttgttgctgtcgtgctatgaaaaaaggtgctgttttgcatcatttggttaataagcataatgttcatagcccttacaaatgcacaatctgtggaaaggcttttcttttggaatctctccttaaaaatcatgtagcagcccatgggaaaagtttacttaaatgtccacgttgtaattttgaatcaaatttcccaagaggttttaagaaacatttaactcattgtcaaagccggcataatgaagaggcaaataaaaagctaatggaagctcttgaaccgccactggaggagcagcaaatttgataacacagtgtgaatatttgttctacaaaggtgtttgttggaaccattctttgtaagtatagcttatcagatagcatagttggatcagtagatgacatgtatggtgtaccgtgtttcactgtctcagttgtgttactaagaatgagcatttgatcatttttttctggtctctgtctatgtgactatcttgtaagtcaataaatttctgtatagtccagatggattaaacttctcatttcttttaaatatgtatgaataataatacaaggaagtaggcattccatttaataatcaagagcaagttgtactcaaagcattcagttaaagtgtatctgtgtgtggaactaatttcagacaatagaaaatattagttgaaatgtttaagaattaggcatgaaaaataaatttgagaaattttgtttccttacatgtatttttaaatcataagagttattttctatctgatgtaaaattagtttataaatcttaatcagcttctagatgtttattagcttttatgtcatgaaatgttggagtctcagggttgctgattttctgctaatgggaaaaattgactaagtctttaaaatagtttgcagccttctcccacaggagacaagtgaaagataagtgtgattttagatctttcttgtccatagttgttttcagtggagtcttccattctgtatcttaccctaagatctggttcttccctccccatccccaccccccacccaccgcctgccagctcacactaatagatgattcttaattgccaaatgtgttagagtttgtatatcctactcctgggccttacatgtcgcctgttggggcttaagaccaggttgataagtaggaactgaaagtcttccagattcacagtagaaaattttatagacatttctgttaaagaaatatatcgattttatgtttttcaattatgttactgtaaataccttgtacctgttcatggattattttattctaaaatattttgtcaaatgtgtatcaaccaaattaaaaagaaaggttttcatgtcagcaaaaaaaaaaaaaaa

SEQ ID NO: 571 - DNA, 596 bp, Homo sapiens
  SITE (516): n equals a,t,g, or c
  SITE (544): n equals a,t,g, or c
  SITE (566): n equals a,t,g, or c
cttcagtcgaagctccagccttattcagcatgagagaattcacactggagagaagccccataaatgcaatcagtgtgggaaggccttcagtcagagctcaagccttttcctccatcatcgggttcatactggagagaaaccctatgtatgtaatgaatgcggcagagcctttggttttaactctcatcttactgaacacgtaaggattcacacaggagaaaaaccctatgtttgtaatgagtgcggcaaagcctttcgtcggagttccactcttgttcagcatcgaagagttcacactggggagaagccctaccagtgcgttgaatgtgggaaagctttcagccagagctcccagctcaccctacatcagcgagttcacactggagagaagccctatgactgtggwgactgtgggaaggccttcagccggaggtcaaccctcattcagcatcagaaagttcacagcggagagacttgtaagtgcaggaaaacatggtccaggctttggttcatggnttcaggcttacaagcaagatggacagantcccactggagagaagcacggnagagcctttaaccatggggcaaatctcaat

SEQ ID NO: 572 - DNA, 744 bp, Homo sapiens; identical to SEQ ID NO: 129
  SITE (603): n equals a,t,g, or c
  SITE (608): n equals a,t,g, or c
  SITE (639): n equals a,t,g, or c
  SITE (680): n equals a,t,g, or c
  SITE (689): n equals a,t,g, or c
  SITE (711): n equals a,t,g, or c
  SITE (721): n equals a,t,g, or c

SEQ ID NO: 573 - DNA, 473 bp, Homo sapiens
cgtccgcccacgcgtccgcccacgcgtccggcgaactcatactggggagaaaccttatatatgcaatgaatgtggaaagggcttcaccatgaagagtactctcagtatacatcagcaaactcatactggagagaagccatacaaatgcaatgaatgtgataaaaccttcaggaagaagacatgcctcatacaacatcagcgatttcacacaggaaagacttcctttgcatgtactgaatgtggaaaattctctttgcgcaaaaatgatcttattacacatcagagaattcacacaggagagaaaccgtacaaatgcagtgactgcgggaaagccttcactacaaaatcagggctcaatgktcatcaaagaaaacatacaggagagaggccctatggatgtagtgattgtgggaaagcttttkcgcacttgkctatccttgktaaacacargagrawttacaggtagkcatttt

SEQ ID NO: 574 - DNA, 564 bp, Homo sapiens
  SITE (11): n equals a,t,g, or c
  SITE (17): n equals a,t,g, or c
  SITE (24): n equals a,t,g, or c
  SITE (37): n equals a,t,g, or c
  SITE (549): n equals a,t,g, or c
  SITE (552): n equals a,t,g, or c
ctcgtcaagcnagacgnagagatnggaaaggcatttnacccaatgtaaccagctgaaaacgcatgtaagaactcatacaggtgagaagccatacaaatgtgaattgtgtgataaaggatttgctcagaaatgtcagctagtcttccatagtcgcatgcatcatggtgaagaaaaaccctataaatgtgatgtatgcaacttacagtttgcaacttctagcaatctcaagattcatgcaaggaagcatagtggagagaagccatatgtctgtgataggtgtggacagagatttgctcaagccagcacactgacctatcatgtccgtaggcatactggagaaaagccttatgtatgtgatacctgtgggaaggcatttgctgtctctagttctcttatcactcattctcgaaaacatacaggtgaaaaaccatacatatgtggtatttgtggaaaagtttatttcctcaggagagctcaacaaacacttcggcccatacaggagaaagaccattatctgcgaatatgtggaattcttacacagatattaanaantaaagaagcaca

SEQ ID NO: 575 - DNA, 1742 bp, Homo sapiens
  SITE (517): n equals a,t,g, or c
  SITE (663): n equals a,t,g, or c
gggaagtcggcgtgtcgagtggctcttcctggctgctgaggcgggttaaggtctgagggtcttgtggggccacggcgctgatcaccaggtgtttggcttggtcggttcttatttctcgcctggcaatggcgacgtacacctgcataacttgccgggtggcgttccgcgacgcggacatgcagcgggcccactataagacggactggcaccgctacaacctgcggcggaaggtggccagcatggccccagtgaccgccgagggcttccaggagcgagtgcgggcgcagcgggccgtcgcggaggaggagagcaagggctcggccacctactgcaccgtttgcagtaagaagtttgcctctttcaacgcctacgagaaccacctcaagtcccggcgtcacgttgagctggagaagaaggccgtgcaggcagtgaatcggaaagtggagatgatgaatgaaaagaacttggagaaaggactgggcgtggacagtgtggacaaggatgccatgaacgcggncatccagcaggccatcaaggcccagccgtccatgtctyccaagaaggcgcccccagcgcctgcaaaggaggccaggaatgtcgtggccgtgggtactggtggccgtgggacccacgaccgagacccgagtragaaaccaccccggntccagtggtttgaacagcaggcgaagaagttggcaaagcagcaggaggaggacagcgaggaggaggaagaggacctggatggagacgattgggaagatattgattctgatgaagaattggaatgtgaggatactgaagcaatggacgatgtggtggagcaggatgcagaggaggaagaggctgaggaaggcccaccccttggtgccatccctatcacggactgcttattttgttcccatcattccagctcgctgatgaagaatgtggctcacatgaccaaagaccacagtttctttattcctgatatagaatatctttcagatattaagggactgattaaatacttgggagagaaagttggtgttggcaagatttgcttgtggtgcaacgagaaagggaagtccttctactccacagaagctgtacaggcacatatgaatgacaaaagccactgtaagctcttcacagatggcgatgctgctttggaatttgcagacttctatgattttaggagtagctatccagatcacaaggaaggggaggaccccaataaggctgaggagttgccctcagaaaagaacttggaatatgatgatgaaaccatggaattgattctgccttctggtgccagagtgggtcatcgctccttgatgagatactacaaacagcgatttggcttgtcaagagctgtggcagttgccaaaaatcggaaggccgtgggccgagtacttcagcagtacagagccctgggatggactggcagcacaggagcggctcttatgcgagagcgagacatgcagtatgtccaaaggatgaaatcaaaatggatgctgaagacaggaatgaagaacaatgccaccaagcagatgcactttcgggtccaagtgagattctgagagtctgctgggattgagcaatcatctcctgcccaagtttcctccttgccctgaggaccagtgaaagacagatcataggagagacccttttgctgctacttcattcgttctgacctaataataaaagttagaaccataaaaaaaaaaaawaaaaaactcggaactagtctcgaggggggcccg

SEQ ID NO: 576 - DNA, 852 bp, Homo sapiens
ggccaacgtgaaataccagcttcgaaggacaggtggaacaaagttcctcaaaaacttggacactggccaccccgtcttcttttgtaacgattgtgcgtcccaaatcaggactccttccacgtacatcagtcacctagagtcacacttaggcttccggctacgggacttatccaaactgtccaccgaacagattaacagtcagatagcacaaaccaagtcaccgtcagaaaaaatggtgacgtcctcccccgaggaaracctggggacttcctatcagtgcaaactttgcaatcggacctttgccarcaagcacgctgttaaacttcaccttagcaaaacacacgggaaatctccggaagaccaccttctgtatgtctctgagttagagaagcagtagcatttgcttttgatagaaaggactgcagtttgctttgagggaaactgtggaaggcaccttcaggccccctctgacttgttgttcttggcacatgttcttattttaactgcagagaatcactctgggctggactgttttgtataactgtacagtgtttaatagaggtgcataatcagctgttgttactggtaaaatatgaaggttaaaatgcagtggtaagtgtttggaactttgtgtaaacgggatttagttgtgagcatcctcccgatgcttcaagctgcatgcattaacagacagtttaattaagcatttataacggaatcaggcacaccttttccacgagactcgagtgtgctggcatttctcaccctttcatctttagccctctgagtactttgaagcacttttgcattaatttggttaaaaaataaaataaaataataataaaaaaaaaa

SEQ ID NO: 577 - DNA, 741 bp, Homo sapiens
  SITE (409): n equals a,t,g, or c
  SITE (598): n equals a,t,g, or c
  SITE (601): n equals a,t,g, or c
  SITE (613): n equals a,t,g, or c
  SITE (691): n equals a,t,g, or c
gggagactatgtatccatttattgtaactttagaggggaatgctctccagggtcccattttgcaaaaagactatgtacagttagaaaatcaatgggaaacccccccagaggatttacagacagatttagcaaaactggtagatcagcagaaccccactctgggagagacacctgagaactccaacttggaagaacctctcaaccctaaaccccacaagaaaaagagtccaggagagaaacctcaccgatgtcctcagtgtggaaaatgttttgctcggaagtcacaacttactgggcatcagagaattcattcaggagaagaacctcacaaatgccctgaatgtgggaaaagattccttcgtagttcagacctttatagrcaccaacgactttcatacaggggagaganccctatgaatgcactgtwtgtaaaargcgattcactcggcggtcacatcttatagggcaccagagaacccattctgaagaagaaacatataaatgtcttgagtgtgggaaaagtttttgtcatggatcaagtcttaaaagacatctgaaaactcatacaggtgaaaaacctcatagatgtcataattgnggnaaaagttttagncgactgacagctcttactttgcaccagagaacgcatactgaagagagaccttttaaatgtaattattgtgggaaaagntttagacagagaccaagcctcggtattcatttaagaatccacacagggga

SEQ ID NO: 578 - DNA, 1057 bp, Homo sapiens
  SITE (707): n equals a,t,g, or c
ggtcaactccattgttgtcctcaatggaaagtgtcataaatccaaatataacttctcaggataaaaatgaacaaggtggtatgttatgttcccaaatggaaaatttacctagtactgccttgccagcacaaatggaagatctaaccaaaacagttctgcctttgaatattgacagtggctcagatcctttccttcctttacctgcagaaagtagttcaatgtctctcttcccttcaccagcagatagtgggactaattctgttttttcccaactggaaaataatacaaatcattattcctcacagattgaaggaaacactaattcctcctttctaaaggggggtaatggtgaaaatgcagtttttccttcacaagtgaatgttgcaaataacttcagtagcaccaatgcccaacagtctgcacctgaaaaagttaaaaaagaccgtgggcggggcccaaatgggaaggaaagaaaacctaagcacaacaaaagggctaaatggcctgcaattatcagagatgggaaatttatctgtagcaggtgttacagggcttttactaatcccagatcactgggtgggcacttatccaagcgatcttactgtaaaccactggatggagccgaaattgctcaagaacttctacagagtaatggacagccttctcttcttgccagcatgattctctccacaaatgcagtaaatttngcagcagccacaacaatctaccttcaatccagaagcatgttttaaagatccatcatttctacagcttcttgctgaaaatcgctcgccagcatttttaccaaatacatttcctcgatctggtgtgactaactttaataccagtgtcagtcaagaaggtagtgaaattattaaacaggctttggaaactgctggcattcccagtacatttgagggtgccgaaatgctttctcawgtttcaacaggttgkgkctctgatgcatcacaagtaaatgcaacggtgatgccaaatccaactgtaccacccctgttgcacactgtatgccatccaaacaccttgctgaccaaccaga

SEQ ID NO: 579 - DNA, 1713 bp, Homo sapiens
  SITE (81): n equals a,t,g, or c
ggtttccactcctgttcctccccctcctcccggggaggagaccaatctggtaagcatcttcctccgatgagcagcctgcgntccctcacaatagcccacgtcaagccaagcatcatgaagaggaatgggagctttccaaagtactatgcctgccacctgtgtggacggcgcttcactctccggagcagcttacgtgaacacctccagatccacacaggagtacctttcacatctagccaacagggagaaagtcgcgtccccctgactctctgtagcaatgcagctgacctcgggaaagatgccatggaagtgcctgaagccgggatgataagtgacagtgagctgcagcacatctctgattctcccatcatcgatgggcagcagcagtcggaaaccccacccccctcagacattgctgacattgacaacctggagcaggccgaccaggagagggaggtgaagaggcggaagtacgagtgcacaatatgtggacgcaaatttatccagaaaagccactggagggaacacatgtacatacacaccgggaagcctttcaagtgcagcacttgtgacaaaagcttttgcagggccaaccaggctgcccgccacgtgtgcctcaaccagagcatcgacacttacaccatggtggacaaacagactctggaactctgcacatttgaagaagggagtcagatggacaacatgctggtgcaaacaaacaaaccctacaaatgcaacttgtgtgacaaaacattctccactcccaatgaggttgttaaacattcatgccaaaaccagaactcggatgtttttgccctagacgaagggcgatccattctcctgggcagtggggactcggaagtaacggagcctgaccacccagtgttagcttccatcaaaaaggaacaagaaaccgtcttactagactgaatgtcacttatctttttaaaaaactctcatttttacaaagactatcttccctcccttccctgaattcagaactgtagttctccatggcatgatacaaacaggtccttgttctcttctcctcttccccttttccacatcccagccccacctctgtaaaggctttgtgcattataaacctggaatgtatcgactttctttcaggggatattggaaagataatggtcattatacttataaactcaaattttgagaggttttagattattcagaagcatacttggaactaatgaagggtatataataaaacaactggaatccaatttggtaagctaaaattatgactttccctgggtaaaaagtcttctcagaaaaacaatgtcagaaaataacagcgtgctgcttagaaatacggctgggctctgtactatgcaaaatctagaaagtgtggggaaactttaaacccaagaaaacgttcttagtattcatcctccaggtgtcttacttcagaatgcatcctttgagattatgtccacttaagagaaatcatcagttaagaaatctactttaacaaaacaaaaaggagaaaaagtaataatgtgatggcaatcttaatttttgggtacaacatgacaagctgtgagtttgtgtgtttgtaaragaaaaatgtgtgggtacttgctaataaacaggtgaattaatgcacatccttatctcattgctggcttctttccaagttkagcaacaacmaaatgctggtttgagttctgacaatttgttttaaaa

SEQ ID NO: 580 - DNA, 844 bp, Homo sapiens
gccttctccagggtaatgataggttccccaaggggaggagccagtaactttccttactaccgccgcatagctcccaaaatgccagttgtaacttccgtcaggagctcacagatcccagaaaactctaccagttctcagctaatgatgaatggagctacgtcctcatttgaaaatggccatccttcccagcctggccctccacagttgaccagggcatctgcagatgttctgtcaaagtgcaagaaggccttatcagagcacaatgttttggttgtagagggagctcgcaagtatgcctgcaaaatctgctgcaaaacttttctgactttgacagattgcaagaagcacatccgtgttcacacaggtgaaaagccttacgcctgcctgaagtgtggcaagaggtttagtcagtccagccacctgtataagcactcaaagactacctgcctgcgctggcagagcagcaatcttcccagcactttgctctagctgtttgtccttacaagacaacgctgaggccagttgtcagactgaatttcttttggtaagcagttaatgcctttgggttcgaggcttccagctgcccagtggctcttaaacagtttagcaactaataaccggagaactaacatgtagtatttgkgctgctgcatttctgagtgaagtgcacgtcttgggaaarggatgcaatccctgaaaccaggtgcttccttggggttgagtaatgcagtcagaaagtagtttgtaattgatattaaaagtggcacatttaaaaatttaaaaattgaagtgcaaaaaaaaaaaaaaaaaaaaaaaaaaaaaaaaaaaaaaaaaaaaaaaaaaa

SEQ ID NO: 581 - DNA, 1214 bp, Homo sapiens
  SITE (1149): n equals a,t,g, or c
  SITE (1174): n equals a,t,g, or c
  SITE (1184): n equals a,t,g, or c
gctagactccggacccgccrgkggtatggctgagccgactagtgatttcgagactcctatcgggtggcatgcgtctcccgagctgactcccacgttagggcccctgagcgacactgccccgccgcgggacaggtggatgttctgggcaatgctgccgccaccgccaccaccacttacgtcctcgcttcccgcagccgggtcaaagccttcctctgagtcgcagccccccatggaggcccagtctctccccggggctccgccccccttcgacgcccagattcttcccggggcgcaaccccccttcgacgcccagtctccccttgattctcagcctcaacccagcggccagccttggaatttccatgcttccacatcgtggtattggagacagtcttctgataggtttcctcggcatcagaagtccttcaaccctgcagttaaaaattcttattatccacgaaagtatgatgcaaaattcacagacttcagcttacctcccagtagaaaacagaaaaaaaagaaaagaaaggaaccagtttttcactttttttgtgatacctgtgatcgtggttttaaaaatcaagaaaagtatgacaaacacatgtctgaacatacaaaatgccctgaattagattgctcttttactgcacacgagaagattgtccagttccattggagaaatatgcatgctcctggcatgaagaagatcaagttagacactccagaggaaattgcacggtggagggaagaaagaaggaaaaactatccaactctggccaatattgaaaggaagaagaagttaaaacttgaaaaggagaagagaggagcagtattgacaacaacacaatatggcaagatgaaggggatgtccagacattcacaaatggcaaagatcagaagtcctggcaagaatcacaaatggaaaaacgacaattctagacagagagcagtcactggatcaggcagtcacttgtgtgatttgaagctagaaggtccaccggaggcaaatgcagatcctcttggtgttttgataaacagtgattctgagtctgataaggaggagaaaccacaacattctgtgatacccaaggaagtgacaccagccctatgctcactaatgagtagctatggcaktyttttcaggktcanagagttagccagagggaacttcccntcaaggctgnagccagacgtttttgccagaaaaccagttt

SEQ ID NO: 582 - DNA, 1145 bp, Homo sapiens
  SITE (1051): n equals a,t,g, or c
  SITE (1075): n equals a,t,g, or c
  SITE (1125): n equals a,t,g, or c
  SITE (1129): n equals a,t,g, or c
  SITE (1140): n equals a,t,g, or c
caagaatctcaaggcttgtcagctcatgtgcagttacgtttactgtttcytcacaaraatgatagccatcamcawaytcagaaatgacaaaktctgttaccctggaagtcctgcwtgtgaaagtktgccacataaaagaaggatgtaagttgtccaatawggcargttcccacaggtaaawagcagrtgcctttgaatcctgacctcaatcaaacaaaaccyggawatttcccgtcccttgcagtttccagtaatgaatttgaacctagtarcagccayatggtgaagtcttactcgttgctatttagagtgactcgtccaggaagaagagagtttaatggaatgattaatggagaaaccaatgaaaatattgatgtcaatgaagagcttccagccagaagaaaacgaaatcgtgaggatggggaaaagacatttgttgcacaaatgacagtatttgataaaaacaggcgcttacagcttttagatggggaatatraagtagccatgcaggaaatggaagaatgtccaataagcaagaaaagagcaacatgggagactattcttgatgggaagaggctgcctccattcgaaacattttctcagggacctacgttgcagttcactcttcgttggacaggagagaccaatgataaatctacggctcctattgccaaacctcttgccactagaaattcagagagtctccatcaggaaaacaagcctggttcagttaaacctactcaaactattgctgttaaagaatcattgactacagatctacaaacaagaaaagaaaaggatactccaaatgaaaaccgacaaaaattaagaatattttatcagtttctctataacaacaatacaaggcaacaaactgaagcaagagatgacctgcattgcccttggtgtactctgaactgccgcaaactttatagtttactcaagcatcttaaactctgccatagcagatttatcttcaactawgttttatcatcccaaaargtgctaggatagatgtttctaatccaatggagtggttatggatgggctncctatggcaaggaaattcctccangggttatttcaatcgggccaaacctggggatttggccttttaagtcggcnaacngggaccccagnttaag

SEQ ID NO: 583 - DNA, 1166 bp, Homo sapiens
  SITE (173): n equals a,t,g, or c
  SITE (1085): n equals a,t,g, or c
  SITE (1105): n equals a,t,g, or c
  SITE (1166): n equals a,t,g, or c
gctcgtgccgtttgaatgtactgaatgtgggaaatcattcagctggagctcccatcttattgcccatatgagaatgcatactggagagaaaccctttaaatgtgatgaatgtgaaaaagcttttagggactactcagcccttagtaaacatgaaagaactcattctggagcanaaccatataaatgtactgaatgtggaaaatccttcagctggagctcccatcttattgcccatcatagaactcacacgggagagaaaccatataactgtcaggaatgtggcaaagcattcagagaacgctcagccctcactaaacatgagataattcattctggaattaagccctatgaatgtaataaatgtggaaaatcctgtagccagatggctcaccttgttagacatcaaaggactcatactggagaaaaaccctatgaatgcaataaatgtggaaaatccttcagtcagagctgcaccttgatgctcatcggagaattcacactggtgagaaaccctataaatgtaatcagtgtgaaagatcctttaactgtagktctcacctcattgcacaccggagaactcatactggagagaaaccatacaggtgtaatgaatgtgggaaagcatttaatgagagttcatcccttawtgtacacctaagaaaccatactggagaaaagccctacaaatgtaatcattgtgaaaaagcattttgtaagaattcttcccttattattcatcagagaatgcatagtggagagaaacgctttatatgcagtgaatgtggaaaagcctttagtggtcactcagccctacttcaacaccagagaaatcacagtgaagagaaactgaattgaatttatgcgagtttttcgtttcttgtacatttgacaacacattgaggaaaaccctataaacataatcaagaggggacatttttcattaagagttcagtaagacttctcccacattatttactagaaaatatcatcttagaagaaaccccatgaaggaaaagaatagggaaaagctttcagcagttatttagcccttactcaaatcagataattaaccattgaaggaactnttaacttcccttatggctancagtaattatacttgaggaccatgactgtggggaatgaaggcatcttttaccagaactttn

SEQ ID NO: 584 - DNA, 260 bp, Homo sapiens
gaaatatcatcgtattcagtgtcctaaccagggctgtgagactgtctacagcagtgtatctggccttaaagctcacctgggctcttgtacattgggaaactttgtggctggaaaatacaaatgtcttctatgtcagaaagaatttgtgtcagagagtggtgtcaagtatcacatcaactccgtccatgctgaggactggttcgttgtaaacccaacaacaaccaaaagctttgaaaagctgatgaagataaagcagcggc

SEQ ID NO: 585 - DNA, 495 bp, Homo sapiens
  SITE (364): n equals a,t,g, or c
  SITE (415): n equals a,t,g, or c
  SITE (453): n equals a,t,g, or c
gagtgcgggaaatcctttagacaaagctctagcctttttcgacaccagagagttcactctggagaaaggccttatcagtgctgtgagtgtgggaaatcctttagacaaatcttcaatctcattcgacatagaagagttcacactggagaaatgccttatcagtccagtgattgtggaaatcttttagctgcaaatcggaactcattcaacaccagagaattcacagtggagaaagaccttatgaatgcagagaatgtgggaaatcctttagacaattctctaacctcattcgacaccgcagcattcacactggtgataggccttatgagtgccagtggaatgtgagaaatcctttagccgcaanttatcctgattcaacaccaaagagttcacactggaggaaagaccttatgantgcagtgaatgtgggaaaatccttttacccgcaaattntggacccacatttcatgggcatatggtaaacatcttttctgt

SEQ ID NO: 586 - DNA, 582 bp, Homo sapiens
  SITE (440): n equals a,t,g, or c
  SITE (506): n equals a,t,g, or c
  SITE (529): n equals a,t,g, or c
  SITE (571): n equals a,t,g, or c
  SITE (581): n equals a,t,g, or c
gcagaaatcacccctcattatacatcagagaatacatactggggaaaaaccctatgaatgtagagagtgtgggaaggccttttcccagaagtcacagctgattatacaccacagagctcatactggagagaagccgtatgagtgtaccgaatgtgggaaagccttctgtgagaagtcccacctcattatacataaaagaattcacactggtgagaaaccctacaaatgtgctcaatgtgaggaagccttcagcaggaagacagaactcattacacatcagttagttcatactggggaaaaaccttatgaatgtactgaatgtggaaagacattctcccgcaagtcacaagctcatcatacatcaagagaacacatactggagaaaaaccctataaatgtagtgaatgkgggcaaaagccttytkgcagaagtcacatctnactggacatcagagaattcacacaggagaaaaaccttatatatggactgaatgggggaaagccttntttttagaaagtcccaactttcngggaaccagggaaattattacaggagaagaaaccttacatantgggctgaang

SEQ ID NO: 587 - DNA, 654 bp, Homo sapiens
gcaaactggtcccctccaccaaaaagcgggcgcttcaggacctggcgcccccctgctcccctgagccagcaggaatggccgcagaggtggccctgagtgagtcagccaaggatcagaaagcagcgaacccgtacgtcacgcccaataaccgctatggctaccagaatggcgccactacacctggcagtttgaggcccgcaagcgcagatcctcaagtgcatggagtgtggcagctcccacgacacgctgcagcagctcaccgcccacatgatggtcaccgggcacttcctgaaagtgaccacctcggcttctaagaagggcaagcagttggtgctggaccctgtggtggaagagaagatccagtccatcccactaccgcccaccacccacacgcggctgccggcctccagcatcaaaaagcagcccgactctcccgcggggtccacgacttctgaagaaaagaaagagccagagaaggagaagccgcctgtggctggcgacgcggagaagatcaaggaggagagtgaggacagcttggagaaatttgagcccagcaccctgtacccgtacctgcgtgaggaggacctggacgacagccccaagggagggctggacattctcaagtccctggagaataccgtctccactcgtgcc

SEQ ID NO: 588 - DNA, 670 bp, Homo sapiens
  SITE (631): n equals a,t,g, or c
  SITE (646): n equals a,t,g, or c
  SITE (656): n equals a,t,g, or c
gccacaccgccctccctggccggccaccccctctacccctacggctttatgctccctaacgacccactcccccacatctgcaactgggtgtcggccaacgggccgtgcgacaagcgcttcgccacgtccgaagagctgctgagccacttgcggacccatacggcatttcccgggacagacaaactgctgtcgggctaccccagctcgtcgtctctggccagcgctgccgcggccgccatggcttgccacatgcacatccccacctcgggcgcaccggrcagccctgggacgctggcgctgcgcacccccaccacgcgctgggactcagcagccgctaccacccctactccaagagcccgcttcccacgcctggcgcccccgtgccggtgcccgccgccaccggaccgtactactccccctacgccctctacggacagagactgaccaccgcctcggcgctggggtatcagtgagggcggccgggagggcgagcragggagaggagggagagggggaggggaggagtccaaggagaagcgggatcaacggccaaggttgctgacacccgcgcgttgggaagactcgggccaagaaaaggaaagaattttataccgttatctattaaccgaanagcagcgaacgaganccggtggganaattccccttttcc

SEQ ID NO: 589 - DNA, 600 bp, Homo sapiens
gcaaagtttataggataattttagactattttacttcctaaaattttcttactccttagtagttaaagcacaatatcctagtgtaggtgaaagttagttagagtagcggactcattaaaatcccaagattgctttggtatttttttttaagtaagttgtggttaatctttggggaaactgtatctagaaagtagataaagaagggaacaaagtagctatttgctttaagaaatatttgtatggtactctgtttttattccagtgcttggactagttgtcacattaatgaaaaaatgaccaactgtgtggctaaagaaacaagaattaaaagtgaagtaagcctcttgaactaagccttttatatgtttcacagatgaatcagcagatggctggcatgagtatcagtagtgcaacccctactgcaggttttggccagccctccagcacaacagcaggatggyctggaagctcatcaggtcagactctcagcacacaactgtggaaatgaaaactgcaatacaagtttcatccagaattaccacctgacattccttgctgaaacgcatctagttcccctgtttattcatatgcatatttttt

SEQ ID NO: 590 - DNA, 666 bp, Homo sapiens
  SITE (517): n equals a,t,g, or c
  SITE (559): n equals a,t,g, or c
  SITE (602): n equals a,t,g, or c
tgtaccgggttgtgatgttggagawctacagcaaccttgtgtcagtggggtatcaagccggcaaacctgatgccctcaccaagttggaacaaggagaaccactatggacactagaagatgaaatccacagtccagcccacccagaaattgagaaagctgatgatcatctgcagcagcccttgcaaaaccaaaaaatactgargaggacgggacaacgctatgaacacggaagaactttgaaatcatatttaggtttaaccaaccagagcagaagatacaacagaaaggagcctgctgagtttaatggagatggagcttttctccatgataatcatgaacaaatgcctacggaaattgaattccctgaaagtagaaaacccatcagcaccaagtcacaattccttaaacatcagsaaacacacaacatagagaaagcccatgaatgcactgactgtgggaaagctttcctcaagaagtctcagctcactgagcataagagaattcatacaggaaaganaccccacgtgtgtagcttgtgtgggaaagccttctacaagangtacaggctcactgaacacgagagagctcacagaggagagatnccccacgggtgttagcttgtgtggggaaagccttctacaagaggtacaggctcactgtaacacg

SEQ ID NO: 591 - DNA, 639 bp, Homo sapiens
  SITE (623): n equals a,t,g, or c
aggaatgtggaaagacctttagacttagtttttaccttactgaacacagaagaactcatgcaggtaagaaaccttatgaatgtaaggagtgtgggaaatcatttaatgtgcgtggacagcttaatcggcataaaacaatccatactggtataaaaccttttgcatgtaaggtgtgtgagaaggcttttagttatagtggtgacctcagagtacattctagaattcatactggagagaaaccatatgaatgtaaggaatgcgggaaagcctttatgcttcgttcagtccttactgaacatcagagacttcatactggtgtgaagccctacgaatgtaaggaatgtgggaagacctttcgagttcgttctcaaattagtctacataagaaaattcatactgatgtgaagccctacaaatgtgtacgatgtgggaagacctttagatttggtttctaccttactgaacaccagagaattcacactggtgaaaagccctataaatgtaaagaatgtggaaaggcctttattcgtagagggaatcttaaagaacatctgaaaattcattctggtttaaaaccctatgactgtaaagaatgtgggaagtcctttagtcggcgtgggcanttcactgagcatccag

SEQ ID NO: 592 - DNA, 577 bp, Homo sapiens
ggcacagcggggagatgcctttctcctgtgagtgcggcaagggctttgtgaaacactcaaagctcatcgagcacatcagaacgcacacgggagagaagccttttcagtgtcccaagtgtgacaagagtttccgcctgaaggcgcagctgctcagccatcagggcctgcacacaggggagaggccttttcactgccctgagtgtgacaagaacttccgggaaaggggacacatgctgaggcaccagcgcatccacaggcccgagaggccctttgcctgtggcgattgtgggaagggcttcatttacaagtctaagcttgcggagcacatcagagtacacacaaaatcctgtcctgctccaaatgaactggacattaagaaaasgctcagccaactgtttgcaatgatagaggccgattggagttgaggcagagtgggacatccaaagcgttgagcaggattggtattgcccaggaatccacagcaacagtagccagacccgctggtagacgggttttaggagcaggtatccttctttgagcaagagtgtcatgcaagttaggaatatgaagaaccaca

SEQ ID NO: 593 - DNA, 262 bp, Homo sapiens
gctcaagtcccaccagcgcacccacacgggtgagcgccctttctcctgcgactggctcgactgcgacaagaagtttacgcgttccgacgagctggcccgccactacaggacgcacacgggcgagaagcgcttctcctgccccctctgccccaagcagttctcccggagcgaccacctgaccaagcatgctcgccgccactcaccagcgaggtggaaagctccgcctccggctccggtcccggcccggcgcccagcttcaaca

SEQ ID NO: 594 - DNA, 372 bp, Homo sapiens
gaaaccctcaccagcaacctgaggatgcctctgaccttgaccagcaacacgcaggtcattggcacagctggcaacacctacctgccagccctcttcactacccagcccgcgggcagtggccccaagcctttcctcttcagcctgccacagcccctggcaggccagcagacccagtttgtgacagtgtcccagcccggtctgtcgacctttactgcacarctgccagcgccacagcccctggcctcatccgcaggccacagcacagccagtgggcaaggcgaaaaaaarccttatgartgcactctctgcaacaagactttcaccgccaaacagaactacgtcaagcacatgttcgtacacaaaggtgagaag

SEQ ID NO: 595 - DNA, 359 bp, Homo sapiens
ggcctttagaatgaagtcatacctcattgatcatcaccgaactcacacaggagagaaaccatatgaatgtaatgaatgtggtaaatcattcagtcaaaagacaaatctcaatctacatcagagaattcatacaggggagaaaccctatgtttgtaatgaatgtgggaagtcctttcgmcagaaagcaaccctcactgtacatcagaaaatacataccggccagaaatcctatgaatgtcctcagtgtggggaaagcctttagcaggaagtcatatctcattcatcatcaaagaactcatacgggagagaaaccatataaatgtagttaatgtggaaagtgcttccccagaaggcaaatc

SEQ ID NO: 596 - DNA, 1122 bp, Homo sapiens
cgaaatccgcaaaagcagtgttatgacaactgagatcacctctaaagtggaaaaaagcccaacgacagccactggcaatagctcatgtccttctactgagaccgaggaagaaaaggcaaaacggcttctttactgttcgctatgcaaggttgctgwcaactctgcctcgcagctggagggcacaacagtggtactaagcacaaaaccatgttagaagcccggaatggaagtggcactatcaaagcctttcctagggcaggagtgaaaggsaaaggacctgktaataaaggaaacacaggcctccaaaataaaacatttcactgtgaaatctgtgatgtgcacgtcaactcggaaacgcaacttaaacagcacattagcagtagaaggcacaaagacagagctgctgggaagcccccgaaacctaaatacagtccttacaacaaactacagaagacagcacatccactgggggtaaaattagtattttcaaaagaaccttcaaagccattggctccacgaattctaccaaatcctctagcagctgcagcagccgcagcagcagtggcagtgagttcccccttcagtcttcgaactgctccagcagcaacactgttccagacttctgcgcttcctccggcactcctgcggccagctcccggacccattcggaccgcccacactcctgtgctgtttgctccttactaaattccaaataggagtaattgtactgcaataatttttcaaaaaacaaaaaacaaaacaaacaaaagagaactatgcagtgtttatttatagtttaaagtatatctgaagagccaggacttttgatagtgaattgaaaaggttataaaaaagtgggggaggtttgggggtgggasggaggggtattttctccacattaaagcattcctcttgaacgttgattgttttagaagtgatctccagcattgatttgtagtggtatctagaccttctgaagcctctgtgactgtgcttttgggcacctgtttccctctgcattgtctgtcctgctttatgaaacaactatacattgtctaagggcattaactggttccaatgtatataaaataatttactctgtagattaaaatcgtacaaaaa

SEQ ID NO: 597 - DNA, 573 bp, Homo sapiens
  SITE (521): n equals a,t,g, or c
  SITE (528): n equals a,t,g, or c
  SITE (546): n equals a,t,g, or c
  SITE (559): n equals a,t,g, or c
  SITE (569): n equals a,t,g, or c
gggactttaaaaaaagctttttttgtattttttttctgtgagcaaagggtatgcatatgtgtgtgtgtgaatatgaatgtatataaatgtatacatgaatatataactgagacatacttttgataaactcattattatgtaagactattactagaatatttcarttgtactgtttcttctctctaaatgcattcgaagccataacagtttttatactgtattgactaatacaacatcaatgcatatttcaggttgttgctgatgagttcttaagctttatttcaatttgtgggtttatttacaaattttaacaatctcatatgctatgcaaatatgactttctgaaagcattttctttttgatcaatttccagttgtccaatgaatggacaagcaaaactttccataaatgaactactcttgtagtttctccatcatttttcttttgaaacaggtgaaaaacctcatcgatgtcatctttgtccatttgcatctgcttatgagccgcatctggaaacccanatgcgtnctcatactggaataaaanccatacaaatgtnaatttatgtncttt

SEQ ID NO: 598 - DNA, 445 bp, Homo sapiens
gcggccgcggcttcgcctaccccagcgagctcaaggcccacgaagtgaagcatgagagtggccgctgccatgtctgcgtcgagtgcggcctggacttctccaccctgacccagctcaagcgccacctggcctcccaccagggccccaccctctaccagtgcctcgagtgtgacaagtccttccactaccgcagccagttgcagaaccacatgctcaagcaccagaacgtgcgacccttcgtgtgcactgaatgcggcatggagttcagccagattcaccacctcaagcagcactccctcacccacaagggcgtgaaggagttcaagtgcgaggtgtgtggccgggagttcaccctacaggcgaacatgaagcggcacatgctgatccacaccagcgtccggccctaccagtgccacatctgcttcaagacctttgtacagaacga

SEQ ID NO: 599 - DNA, 475 bp, Homo sapiens
  SITE (84): n equals a,t,g, or c
  SITE (458): n equals a,t,g, or c
tgtaaggtatgtagaaaaacctttactttctatagaaatcttactctacatcaaagtattcatactgatgagaaaccttttgantgtaaggaatgtgggaagacctttagacgtagttcacaccttactgcacatcagagcattcatgctgataaaaaaccctatgawtgtaaagaatgtggaaaggcctttaaaatgtatggctaccttacccaacatcagaaaattcatactggtggaaaaccttatgawtgtaaagaatgtgggaaggccttcagtcgtgcttcaaaccttgttcaacatgaggagawttccatactggtgagaaaccctatgtgtgtaaagcagtgtgggaaaacctttcagatatggtttcagcccttaaaggcccttcaggggaattcctagggggcttaaaagtgttaagacccgtaaagggtacgagcggggcctttccntcatcagacagcccaca

SEQ ID NO: 600 - DNA, 546 bp, Homo sapiens
  SITE (463): n equals a,t,g, or c
  SITE (511): n equals a,t,g, or c
  SITE (539): n equals a,t,g, or c
  SITE (542): n equals a,t,g, or c
tcaacgaatgtaatcagtgttttaaagtcttcagcacaaaatcttcccttacacggcacaggtttgattcatactggagaaagaccctatggctgcagtgaatgtgggaaatcctacagcagtagatcttaccttgctgttcataagagaatccacaatggggagaaaccctatgaatgcaatgactgtgggaaaaccttcagcagcagatcttaccttactgttcataagagaatccacaatggggagaaaccctacgawtgcagtkactgtgggaaaaccttcagcaattcctcatacctcagaccgcacttgagaattcacactggagaaaaaccgtacaaatgtaaccagtgttttcgtgagttccgcactcagtcaatcttcacaaggcacaagagagttcatacgggggagggtcattatgtatgtaatcagtgtggaaaggctttcggcacgaggncatctctttcttcgcactatagcattcatacaggggagtacccttacnaatgccacgattgtgggagaaccttcangangagg

SEQ ID NO: 601 - DNA, 654 bp, Homo sapiens
gccacggacggaggactctgaaacctgcagcggatgatggggacaatttcttctcattctcaaaattcaagcccttacagtgtcctgactgtgacatgacctttccttgtttctctgagcttatttcccatcagaacattcatacagaggaaaggccccataagtgcaaaacatgcgaggaaagttttgctttggactcagaacttgcatgccaccagaagagccacatgctagcggaaccttttaaatgtaccgtgtgtgggaaaactttcaagtcgaatttgcatctcattactcataagcgaactcacataaaaaacaccacgtaaagtaaatataacaaattgttattagtgattgggcttttcagtatctgtatggtgggaagcagttactgtatatgtcccaggcaatgtgctaagcactttacacacattcccatgtaatacttaattctcagcacaaccttgatttaggcagtatcatttccattttataagtagggatgcaaaatccgtgtcactaaactagtgaatgaacccaggatttgaactcagttactgtacaactgtgagccagaagaagatacacaacttttgtttaaattcaattttcattaaaatgaaggctcttgctaaagttattttaaaaaaa

SEQ ID NO: 602 - DNA, 240 bp, Homo sapiens
  SITE (99): n equals a,t,g, or c
tgccccgagtgcggcaagagcttcatccgcaagcaccacctcctggaacaccggcgcatccacacaggcgagcggccctaccactgcgccgagtgcggnaagcgcttcacgcagaagcatcacctgctggagcaccagcgcgcgcacacgggcgagcggccctacccctgcacgcactgcgccaagtgcttccgctacaagcagtcgctsaagtaccacctgcggacccacacrgsmgag

SEQ ID NO: 603 - DNA, 859 bp, Homo sapiens
  SITE (663): n equals a,t,g, or c
  SITE (724): n equals a,t,g, or c
  SITE (759): n equals a,t,g, or c
  SITE (763): n equals a,t,g, or c
  SITE (803): n equals a,t,g, or c
gcctcgcagatttgggagaaggcagggtggggggtgtggaaaaataaaaggaaaagtccttgcaccatgtagatcagcgtcccccactttggcatcccggccggccggggacctcccagtctgcggccatgaacgcgagcagcgagggcgagacttcgcgggctcggtgcaaattccaggtggcacaacggtgctggtggagctgactccygacatccatatctgcggcatctgcaagcagcagtttaacaacctggatgcctttgtagctcacaagcaaagtggctgccagctgacaggcacatccgcagcagcccccagcacggtccagtttgtatcggaggaaacagtgcctgccacccagactcagaccaccaccagaaccatcamctcggagacccagacaatcacagtttcagctccagaatttgtttttgaacatggctatcaaacttacctgcccacggaaagtaatgaaaaccagacagccactgtcatctctctccctgccaagtcacgcaccaaaaagcccacaacaccacctgctcagaaaaggcttaactgttgctatccaggttgccaattcaagactgcttatggcatgaaggacatggagcggcatttaaaaattcacacgggagacaaaccccataagtgtgaagnctgtggcaagtgctttagcccggaaagacaagctgaaaactcacatgcggtgccacacggncgtgaagccctacaagtgtaagacgtgtgactacncccncttcccgacagcaagcagcctcaacaagcacctgaggatnccacttcggacgaaccggcccttcaatggccaaatcttgccccttacgccaggccg

SEQ ID NO: 604 - DNA, 638 bp, Homo sapiens
  SITE (15): n equals a,t,g, or c
  SITE (43): n equals a,t,g, or c
agaattcacactggngaaaaactattatcctgtgcacacagtnagcaaaagtttcagtcagatctcagacctcattaaacaccagagaatccacactggggaaaaaccatataaatgcagtgagtgcaggaaggctttcagtcagtgctcagctcttaccctacaccagagaatccacactgggaagaaaccaaatccatgtgatgagtgtggcaaaagctttagtcggcgttctgatctcattaaccatcaaaaaatacacactggtgaaaagccgtataagtgtgatgcatgtgggaaagccttcagcacatgtactgatcttattgaacaccagaaaacccatgctgaggagaaaccctaccagtgtgttcagtgcagcagaagttgtagccaactctctgaacttactattcatgaggaagtccattgtggagaagacagtcaaaatgtgatgaatgtgagaaaacctttagtgtgtacaccaactctattcagtaccagagacactgtaccagaaaaaaatctaatgaatgctgttgattattgatgagtatgaaaaaggttttaatcagtgttcaactcttatgctacattaaaaccgcactggatccggaaaaaaaaaaaaaaaagggggg

SEQ ID NO: 605 - DNA, 1183 bp, Homo sapiens
  SITE (8): n equals a,t,g, or c
  SITE (1005): n equals a,t,g, or c
  SITE (1094): n equals a,t,g, or c
  SITE (1165): n equals a,t,g, or c
acagaggnccctcctcctggcccaccggcgagcccacaccccgaatcctctgcattcatgtccatgtgggaagacctttgtcaaccttaccaagttcctttatcaccggcgtactcatggggtagggggtgtccctctgcccacaacaccagtcccaccagaggaacctgtcattggtttccctgagccagccccagcagagactggagagccagaggcccctgagccccctgtgtctgaggagacctcagcagggcccgctgccccaggcacctaccgctgcctcctgtgcaccgtgaatttgggaaaggccttgcagctgacccggcaccaacgttttgtgcatcggctggagcggcgccataaatgcagcatttgtggcaagatgttcaagaagaagtctcacgtgcgtaaccacctgcgcacacacacaggggagcggcccttcccctgccctgactgctccaagcccttcaactcacctgccaacctggcccgccaccggctcacacacacaggagagcggccctaccggtgtggggactgtggcaaggytttcacgcaaagctccacactgaggcagcaccgcttggtgcatgcccagcacttcccctaccgctgccaggaatgtggggtgcgttttcaccgtccttaccgcctgctcatgcaccgctaccatcacacaggtgaatacccctacaagtgtcgcgagtgcccccgctccttcttgctgcgtcggctgctggaggtgcaccagctcgtggtccatgccgggcgccaccamccgctgcccatcctgtggggctgccttcccctcctcactgcggctccgggagcaccgctgtgcagccgctgctgccaggccccacggcgctttgagtgtggcacctgtggcaagaaagtgggctcagctgctcgactgcaggcacacgaggcggcccatgcagctgctgggctgggagaggtcctgggctaaggagccccctgcccctcgagccccacggncaacttcgtgcaccagtttgcctcttccagcagcccttggaagcattgttacagcattcccttgcgggcccttgcccgccgccggggtntagartgcagcgagttgcaagaagttktttcagcacagagaasttcattgcaggttgcaaccggcgcattncacaaaggttgagcggtt

SEQ ID NO: 606 - DNA, 554 bp, Homo sapiens
  SITE (522): n equals a,t,g, or c
  SITE (545): n equals a,t,g, or c
  SITE (549): n equals a,t,g, or c
  SITE (551): n equals a,t,g, or c
gcactatgtgtgcgagagctgcgacaagcaattttcctcggtggatgacctgcagaagcacctgctggacatgcacacctttgtgttgtaccactgcaccctgtgtcaggaggtcttcgactccaaggtgtccatccaggtgcacctggcggtgaagcacagcaatgagaagaagatgtaccgctgcacggcctgcaactgggacttccgcaaggaggctgacctgcaggtgcacgtcaaacacagccacctgggcaacccggcaaggctcacaagtgcatcttctgtggggagaccttcagcaccgaggtggagctgcagtgccacatcaccacacacagcaagaagtataactgtaagttctgcagcaaggccttccacgccatcatcctgctggagaagcacctgcgggagaagcactgtgtgtttgatgctgcgaccgacaacggcacggccaatggggtacccccaatggccaccaagaaagctgagcctgctgacctgcagggcatgctgcttaanaaccctgaggcacctaacagccntgangncaa

SEQ ID NO: 607 - DNA, 584 bp, Homo sapiens
  SITE (44): n equals a,t,g, or c
gcccaattgaggaaagaggcgatctctttggaaaagcacttaanctgaacacagactttgtttctttaagacaagtaccttataaatatgacttatatgaaaaaactttgaaatataattcagacttgcttaatagtaatagaagctatgcaggaaagcagactgatgagtgtaatgaatttggaaaagcacttctctacctgaagcaagagaaaacccacagtggagtagaatattctgaatacaataaaagtggaaaagccctcagccataaagcagccatttttaaacatcagaaaataaaaaacttggttcaacctttcatttgkacttactgtgacaaggctttctcctttaagtcactcctcattagtcataagagaatacatactggagaaaagccatatgaatgcaatgtatgtaagaaaaccttctcccataaggccaacctcatcaaacatcagagaattcacactggggagaaacctttcgagtgtccggaatgtggaaaagctttcacccaccagtcaaacctcattgtacacccagagagcacatatggagaagaaagccctatgagtgca

SEQ ID NO: 608 - DNA, 536 bp, Homo sapiens
  SITE (491): n equals a,t,g, or c
  SITE (516): n equals a,t,g, or c
  SITE (518): n equals a,t,g, or c
  SITE (520): n equals a,t,g, or c
  SITE (529): n equals a,t,g, or c
gctggtgtccgacatcgttcaagttgagccctttttttccgctgtgagtctctacacatgtctgacactctcatgtsccacggattacagaaataaacaaggctttacagagaaagtccagaggagtttattggcactctgagctacaaaaaggcttggagagtgagccaacatcaagaaggcaatgtagaaattctccaggggagagtgaggagaaaaccccatcccaggagaagatgagtcaccagagtttttgtgccagggacaaagcctgtacacatatcctctgtgggaaaaactgctctcagagtgtgcactctccccacaagccagcgctcaaactggaaaaagtatctcaatgtcctgaatgtgggaaaacctttagccgaagttcttatcttgttcggcatcaaagaatccacacaggcgagaagcctcacaagtgcagtgagtgcgggaaagggctttagtgagcgctccaacctcactgnccacctacgaactcacacagggganangncctatcagngtgggca

SEQ ID NO: 609 - DNA, 1090 bp, Homo sapiens
  SITE (956): n equals a,t,g, or c
gctctgctcattggctctcaaagaaccagcggacctgagtcttcaatgaaagtgacctcttccatcccagtatttgacctccaggatggtggacggaaaatatgtccacgatgtaatgctcaatttcgtgttactgaagctttgagaggtcacatgtgttactgttgcccagaaatggttgaataccagaagaaaggaaagtccctggattcagaacccagtgtcccatcagcagcaaagcccccatcccctgagaaaacagctcctgttgcttccacaccctcttctacacctattcctgctctgtcaccgcctaccaaagtaccagaaccaaatgagaacgtgggcgatgccgtccagaccaaactcattatgcttgtagatgacttctactatggacgggatggtggcaaagtagcccagctcacaaatttccctaaggtcgccacatctttccgatgcccacattgtaccaaaaggctaaaaaacaatattcgattcatgaaccatatgaaacaccacgtagaactcgatcagcagaacggtgaggtagatggtcacactatctgccagcactgktaccgccagttttycactcccttycarcttcagtgccacttggaaaatgktcatagtccctatgaatctactaccaagtgcaagatctgtgaatgggcgtttgaaagtgagccactatttctccagcatatgaaggatactcataagcctggagagatgccttatgtttgccaggtgtgtcaatatcgctcctcactctactctgaggtagatgtccattttcggatgatccatgaggrtacccggcatctgctctgcccttattgcctgwaggtcttcaaaaatggcaatgcattccaacagcattacatgaggcaccagaagaggaatgtttatcactgcaacaaatgccggstgcagtttctctttgccaaggnacaaaattgtaacacaagcttcaacaccataaaaccttccgtaaacccaagcagctggagggcttgtaaaccaggcaccaaggagtgtcatgggccggcagacatgcctgggagtgcagctttcgagatcccag

SEQ ID NO: 610 - DNA, 315 bp, Homo sapiens
  SITE (314): n equals a,t,g, or c
agaaaccttataaatgtaatgaatgtgggaaggcctttagtgacggctcatcctttgcccgacaccagagatgtcacactggcaagaagccctatgagtgcattgagtgtgggaaagctttcatacagaacacatcccttatccgtcactggagatactatcatactggggagaaccctttgattgcatcgrttgtgggaaagccttcagtgaccacatagggcttaatcaacacaggagaattcatactgggagagaaacctttacaaatgtgatgtatgtcacaaatcctttcaggtatggttcctcccttna

SEQ ID NO: 611 - DNA, 564 bp, Homo sapiens
  SITE (474): n equals a,t,g, or c
gaattcggcacgagagccttcagagctgtgtcaatcctttgaatgcatggtaggactcaccctgaagagaaaccctatgagtgtgagcaatgacggaaagccttcagatctgccccacacctttgaatacgtggtaggacacacaatggagagaaaccctatgcatgtaaggaatgtgggaaacccttcggatctgcccagaaccttcgaattcatgaaaggacacaaacacacataatgcactctgtagagagaccttataaatgtaagatatgtgggaggggcttttattctgccaagtcatttcaaatacatgaaaaatcttacactggagagaaaccctatgagtgtaagcaatgtgggaaagcctttgtttccttcacttcctttcgatatcatgaaaggactcacactggagagaacccctatgagtgtwagcaatttgggaaagccttcagatctgtcaaaaatctncgatttcataaaaggacacacactggagagaaaccctgtgaatgtwagaaatgtwgaaaagcattccataatttctcttcttkgcaaata

SEQ ID NO: 612 - DNA, 536 bp, Homo sapiens
  SITE (533): n equals a,t,g, or c
  SITE (534): n equals a,t,g, or c
tcgagtttttttttttttttttttttttttttagacaatttacacaaatttattagcctcctatgactcagtaaagcaatttgaaaaaatatagctttataaggcataaacaaatttatatgttttaactaaggtactttctggtaaacagtgcctgtacattttaggaaatattttagtctttagagaataagtaaggcaaaaacaggtccaggagtttacagatgccctcccctcaccacaaggccaagtcttttttttttttttttttttttttgagatggagtcttgctctgtcgtccaggttggagtgagattctttctgggggaaaaaaaaaaagaaagaaaaattaaggttgagataaaaatgtaagtacagaagctgaaaagtaaaattttcgaataaaaagatgtctggcatttwatccacatggttatactgactcacaagtccaaataataacaattaacagtataaggctgatctaatacatgacacccatggggawattatagcctcctatttaaaaagnnta

SEQ ID NO: 613 - DNA, 332 bp, Homo sapiens
  SITE (237): n equals a,t,g, or c
  SITE (241): n equals a,t,g, or c
  SITE (307): n equals a,t,g, or c
aatcaaaccttgaacatcatcatagagttcatatcggagaaaaaccttacaaatgtgaagaatgtgacaaagttttcaatttcaattcacgccttgaaatacataggagagttcatactggagagaaaccakagaaatgtaaggtttgtgacaaggcattcgggtgtgattcacacctggcacaacatactagaattcacactggagagaaaccgtgcaagtgtgatgagtgtgacnaganccttcagtggtcagtcaacacttattcaccatcaagcaatccatgttcatagggaaaactttactnatgttatgattggtcacaaatcctc

SEQ ID NO: 614 - DNA, 235 bp, Homo sapiens; identical to SEQ ID NO: 178
  SITE (1): n equals a,t,g, or c
  SITE (45): n equals a,t,g, or c

SEQ ID NO: 615 - DNA, 326 bp, Homo sapiens
  SITE (301): n equals a,t,g, or c
  SITE (324): n equals a,t,g, or c
gatgtgaagggggtccatggagggctcacgtccccgcgccccgagcggccacttagcgccgtcgccgccggctttcgacggcgagctggatctgcagcgatactccaacgggccagccgtgagcgcagggtcgctcgggatgggagcggtgagctggtctgagagtcgtgcaggcgaacggcgcttcccctgccctgtatgcgggaagcgcttccgcttcaactctatccttgctttgcacctgcgggcgcacccaggarcccaggccttccagtgccctcactgcgggcaccscgggsgnaacggggcctcttgcttgccgcntc

SEQ ID NO: 616 - DNA, 834 bp, Homo sapiens
  SITE (829): n equals a,t,g, or c
gagcctatgccaggggtctggcgctcagggcgtggggcgcgcggggagggagaggggtcggcccagcacagcgtccgggagcgctagggccggagcagcgctgcccgccgccgtgcgtccgcgggaaggaccgcgcggcccctccgcctgcgctctcggccgccgccgcctctgcgtgggccggccgggagggcctcgggggactgactggcattttttactgtctacagaaatcagaactacctggttcccagtcctgtacttagaattctagaccacactgccttttctacagaaaaatctgctgatattgtaatttgtgatgaagagtgtgactcacctgaatcagtcaaccagcaaacccaagaggagagtcctatagaagttcacactgctgaagatgttccaattgctgtagaagtgcatgcgatttctgaggattatgatatagagacagaaaacaattcctctgagagtctccaagaccaaactgatgaagaaccgccagctaaactttgtaaaattcttgacaagagccaagctttgaatgtgactgcccagcagaaatggcctttactgagagctaatagcagtggcctctataaatgtgaactttgtgagtttaacagcaaatatttttctgacttaaagcagcatatgatcctgaagcataaacgtactgattcaaatgtgtgtcgagtatgcaaggaaagtttctctaccaatatgcttctgatagaacatgccaaactgcatgaagaggatccctacatttgtaaatactgtgattataaracagtaatttttttttggaaaaaaaccctcccangcccc

SEQ ID NO: 617 - DNA, 602 bp, Homo sapiens
tcaatgtaatctctgtgggaagcgcttcatgcagcttattagcctccaatttcaccagcgaacccacactggcgagaggccctacacgtgtgacgtctgccagaagcagttcacccagaagtcctacttgaagtgtcacaagagaagccacacaggggagaagcccttcgaatgtaaagactgcaagaaagttttcacctacagggggagcctgaaggagcaccagcgcatccactccggagagaaaccctacaaatgttccaagtgtccaagagccttcagtcggctgaaattgttaagacgccaccagaaaacacatccagaagctacttctcagtgattgcataatccggtctatgccttctgcaccaagaagaagtgaatgatatttttcatcaatgttatcagatgacatttgacacatgcaagggcgtctgacacacagagggagtgccctagatatgaattgccaggatgtttgagtaaatatgtgtcctccccactgagctttgttttctgtttcattatgtccattgttttcttataggtttattttggtttgtgttgctgttcttccaataaacgatcatcttattagtttt

SEQ ID NO: 618 - DNA, 398 bp, Homo sapiens
aattcggcagagggaaaattcatacaggagaaaagccttacaaatgtaatcaatgtggcaaggtctttaatcaagcatcataccttacaagacatcaaataattcatactggagagaggccttacagatgtagtaaatgtggcaaagcatttcgagggtgttcaggccttactgcccatcttgcaatccatactgaaaagaaatctcatgagtgtaaagaatgtggcaagatcttcactcagaagtcttccctcaccaatcaccatagaattcacattggagagaaaccttacaaatgcaccctgtgcagtkaaggtcttcagtgcacaattytgaccttgcacagcttcagagggttycatcakgagrgtccctacaaactgtgtatggcaaaacct

SEQ ID NO: 619 - DNA, 424 bp, Homo sapiens
  SITE (57): n equals a,t,g, or c
  SITE (330): n equals a,t,g, or c
  SITE (348): n equals a,t,g, or c
cagtggtggtagtggaacaaaatggttcttttcaagtaaagattcccaaaaattttntttgtgaacactgctttggagcctttcggagcagttaccacctaaagaggcacatccttattcacactggtgagaagccatttgaatgcgatatatgtgatatgcgtttcatccagaagtaccacctggaacgccacaagcgtgtgcacagtggtgaaaagccttaccagtgtgaacggtgtcatcaggtaaggctcatccctgctacaataccccacacacacttttccttccccaagaatcagggccaccctccactcctgcctgacaaangggccaccagcgttactngccataatagttaacacatcgggggtgaagtgcatctgtctgggccttatgcagctgatcatggggagcagcaatt

SEQ ID NO: 620 - DNA, 1831 bp, Homo sapiens
  SITE (1647): n equals a,t,g, or c
  SITE (1669): n equals a,t,g, or c
  SITE (1753): n equals a,t,g, or c
  SITE (1759): n equals a,t,g, or c
  SITE (1807): n equals a,t,g, or c
tggccaactcctccccaagaagggwggctttctgctggcttgaggctgcaagctcctgggcccctygaagctgctccttyaagggctccakctcggccacccgctgctgggcctggcctagggtgtccttcatctgggccaccttgtctttcagtcgctgagcctgagcactctgctcctcttgccagcagaaagccacccttcttggggaggagttggccagygcagagcagccagggaccgcaccatagccgaactacaccgcagccgcctggaagtggctgaagttaacggcargctggctgagctcggtttgcacttgaaggaagaaaaatgccaatggagcaaggagcgggcagggctgctgcagagtgtggaggcagagaaggacaagatcctgaagctgagtgcagagatacttcgattggagaaggcagttcaggaggagaggacccaaaaccaagtgttcaagactgagctggcccgggagaaggattctagcctggtacagttgtcagaaagtaagcgggagctgacagagctgcggtcagccctgcgtgtgctccagaaggaaaaggagcagttacaggaggagaaacaggaattgctagagtacatgagaaagctagaggcccgcctggagaaggtggcagatgagaagtggaatgaggatgccaccacagaggatgaggaggccgctgtggggctgagctgcccggcagctctgacagactcagaggacgagtccccagaagacatgaggctcccaccctatggcctttgtgagcgtggagacccaggctcctctcctgctgggcctcgagaggcttctccccttgttgtcatcagccagccggctcccatttctcctcacctctctgggccagctgaggacagtagctctgactcggaggctgaagatgagaagtcagtcctgatggcagctgtgcagagtgggggtgaggaggccaacttactgcttcctgaactgggcagtgccttctatgacatggccagtggctttacagtgggtaccctgtcagaaaccagcactgggggccctgccacccccacatggaaggagtgtcctatctgtaaggagcgctttcctgctgagagtgacaaggatgccctggaggaccacatggatggacacttctttttcagcacccaggaccccttcacctttgagtgatcttactccctcgtacatgcacaaatacacactcatgcacacacacactcacacacatgcatacacttaggtttcatgcccattttctatcacactgggctccatgatattctgttccctaagaactgcttctgtgtgccctgttttcatcccaagatttctcacttcatcctctcctacctggctcttttgtcccagggaggggtcctgttcggaagcagtggctgaatttatcccctgaaagtggttttggaggaaccgggatggargaggccttcccctgtgggaatagaatcgtccamtcctagccctggttgcttctgatacacagccactgsacacacacactcacactcacactcccttgtctgatgccccaaagccaattcctggggcaacctaccctctcttatttggagtttccgttggtttactgagttttctctggggtntgacagaggcagcagatgacanatggctctcaaggtccttttgggtctcagttcaatggtccccttctggtccccaatgactttgtgcccaacctagcctttcaanacctangtatcagtttgaagggttttggaatttgaggatcccgaatctgaaccntcctggaatcccccaatggaagaa

SEQ ID NO: 621 - DNA, 775 bp, Homo sapiens
gtgcatgaggaggaaaaattctacaaacaagatgaatgtcgtgaaggcttcaggcaatctcctgactgcagtcagccccagggtgctcccgctgtggagaaaacatttctgtgtcagcagtgtgggaaaacttttactagaaagaaaactctcgttgaccaccagagaattcacacaggtgagaaaccttaccagtgtagcgattgtgggaaggactttgcctataggtcagcctttattgttcataagaagaagcatgccatgaaaagaaaacctgagggcgggccatcttttagtcaggacacagtgttccaggttcctcagarcagtcactccaaagaggagccctacaaatgcagccagtgtggcaaggccttccgaatcactcattcctcctcatccatcaragagttcacactggagagaagccatataagtgcagggagtgtgggaaagccttcaratggagttccaatctctaccgacatcagaggattcactctcttcaaaaacagtatgattgccatgaaagtgaaaagactccaaatgtggagccaaaaatcctcactggtgagaaacgtttttggtgtcaagaatgtgggaaaacctttacacgtaaaagaacccttttagatcataagggaatacacagtgggagagaagcgctwtaaatgtaatctatgtgggaaatcttatgatmgaaactatcgccttgttaaccatcagagggatccactctacagagagacctttcaaatgtcattggtttggaaaa

SEQ ID NO: 622 - DNA, 1984 bp, Homo sapiens
  SITE (3): n equals a,t,g, or c
  SITE (4): n equals a,t,g, or c
  SITE (8): n equals a,t,g, or c
  SITE (10): n equals a,t,g, or c
  SITE (11): n equals a,t,g, or c
tgnnggtncnnccttcttaggtcgacccacgcgtccggctgcttccaagacccagggggctgtcgcccgaatgcaggaagaccgtgatgggagctgcagcacagtcgggggtgtaggttatggggacagtaaggattgtatcctggagccgctttccctgccagaaagtccaggtggcaccaccactttagaaggttctccatctgtgccttgtattttctgtgaagaacattttcctgtggctgaacaagacaaacttctgaagcacatgattattgagcataagattgtcatagctgatgtcaagttggttgctgatttccaaaggtacattttatattggaggaaaaggttcactgaacagcccatcacagatttttgtagtgtaataagaattaattccactgctccatttgaagaacaagagaattattttttgttatgtgacgttttaccagaagatagaattcttagagaagagcttcagaaacagagactgagagaaattctggaacaacagcagcaagaacgaaatgataccaattttcatggcgtttgtatgttttgcaatgaagaattccttggaaacagatctgttattttgaaccacatggccagagaacatgctttcaacattggattgccagacaacattgtaaactgcaatgaatttttgtgtacattacagaaaaagcttgacaatttgcagtgcttgtactgtgagaagaccttcagggacaaaaatacacttaaagatcacatgaggaaaaaacagcatcgtaagattaatcctaagaacagagaatatgacagattttatgtcatcaattatttggaacttggaaaatcgtgggaagaagttcagttggaagatgatcgggagttgctggaccatcaggaagatgactggtctgattgggaagaacaccctgcctctgcagtctgcttattttgtgaaaagcaagcagaaacaattgagaagttgtatgtccacatggaggatgcacacgaatttgatcttctcaaaataaagtcagaacttggattaaatttctatcagcaagtgaaactggtcaattttattcggaggcaagttcaccaatgcagatgttatggctgccatgtgaagttcaaatccaaagcagacttaagaactcacatggaagaaactaaacacacttcgctgctccccgatagaaagacgtgggatcaactggagtattattttccaacctatgaaaatgacactctcctgtgtacactatctgacagtgaaagtgacctgacagctcaggaacaaaatgaaaatgttcccatcatcagtgaagatacatctaaactgtatgctttgaaacaaagcagtattttgaaccagttgctactataagagtacttgaaaacctagaagaaactaccacagaagcaatttttcatgtttttctcctatgagacagatatgaaagaacaatttaaatttgaacatcaacaaaagattggtccttggtgaaataaacttttcaaaaatgaatgttcttttcaaaaaataaagtagaaaaatgcacttactaagaacatgaaaaaaaatgaagtaggaaaataagatgaagactttgtattttggctgtaaagttttattgtgtgatcatcttaaattatctcacttcattaaactcataattatatatagaagtatatgtcaattacaaagaaatgaaatgttcaaattatttataaacctgatttttcaatcagtagtttcagtctcctccccaaggaccttcttcatccaacaagttgcaaaatttgaatatcccttctgtactatattgggtgagctgtaaatgtaatgactaaaagaaaagccacagaagaaagaagaamtggtcaaagacgtggataatatgcaaattggccattatattagaacaatcaagagctgactgtgttattaccactttctgcctagggtggccaaattccctag

SEQ ID NO: 623 - DNA, 556 bp, Homo sapiens
  SITE (70): n equals a,t,g, or c
  SITE (370): n equals a,t,g, or c
  SITE (471): n equals a,t,g, or c
  SITE (546): n equals a,t,g, or c
gactccatctaccagtcaaagttggttacaaaggcatatgctgacacacagtggagacaaacctttcatngtgtgttgttggtggctgcaatgccagctttgcttctcagggagggctagctcgtcatgtacccacacacttcagtcagcagaactcctcaaaagtttctagccagccaaaggccaaagaagaatctccttctaaagctggaatgaacaaaaggaggaaattaaagaacaaaagacgacgctcattaccacggccacatgatttcttcgatgcacaaacactggatgcgataagacatcgagccatatgctttaacctctcagctcatatagaaagtttagggaagggacacagtgttgnttttcatagtactgtaatagctaagagaaaagaagattctgggaagatcaaacttttgcttcattggatgcctgaagacataacaatgccgcagaagaggntgaagagaactctgataagaaaagtgttcaatttgtatttaagcaaacagtgaacgacgtttgcaatcaactaanaattcgctat

SEQ ID NO: 624 - DNA, 554 bp, Homo sapiens
gaaaagtcacacattagagaacatcatagagttcatataggggtgaaaccctttgaatatggaaaaagtttcaaccgtaattcaaccctcccagtgcatcagagaactcatgcaacagataaatactctgattatcacccatgtacagagacattcagctaccagtcaactttcagtgtacatcagaaggttcacataagggcaaaaccctatgagtataatgaatgtgggaaatcctgctctatgaattcacacttgatttggcctcagaaaagtcacacaggggagaaaccctatgaatgtcctgagtgcgggaaagccttcagtgagaagtcacgcctaagaaaacatcagagaactcacacgggagagaaaccatacaaatgtgatggatgtgataaagctttcagtgcaaagtcaggcctaagaatacaccagagaacccacacaggggagaaaccattcgaatgtcatgaatgtgggaaatcttttaactataagtcaatcctcatagtgcatcagagaactcacacaggggagaaaccttttgaatg

SEQ ID NO: 625 - DNA, 1251 bp, Homo sapiens
  SITE (1220): n equals a,t,g, or c
  SITE (1249): n equals a,t,g, or c
ctatttaggtgacactatagaaggtacgcctgcaggtaccggtccggaattcccgggtcgacccacgcgtccgagggattttacacggtgtatcgtaatgtttttgaaatgattgccaaggaagaactagaatctgtgttagaggaagaggttgatgatttcccaacttttggagactcccagagtgactatgatacggtagtccatcctttctacgcttattggcagagtttctgcactcaaaagaattttgcatggaaggaagaatatgatacacgacaggcttcaaaccgctgggaaaaacgagccatggaaaaagaaaacaaaaagattcgggacaaagcaaggaaagagaagaatgagcttgtccgtcagctggtagctttcattcgtaaaagagataaaagagtgcaggcgcatcgaaaacttgtggaagaacagaatgcagagaaggcgaggaaagccgaagagatgaggcggcagcagaagctaaagcaggccaaactggtggagcagtacagagaacagagctggatgactatggccaatttggagaaagagctccaggagatggaggcacggtacgagaaggagtttggagatggatcggatgaaaatgaaatggaagaacatgaactcaaagatgaggaggatggtaaagacagtgatgaggccgaggacgctgagctctatgatgacctttactgcccagcatgtgacaaatcgttcaagacagaaaaggccatgaagaatcacgagaagtcaaagaagcatcgggaaatggtggccttgctaaaacaacagctggaggaggaagaagaaaatttttcaagacctcaaattgatgaaaatccattagatgacaattctgaggaagaaatggaagatgcaccaaaacaaaagctttctaaaaaacagaagaaaaagaaacagaaaccagcacaggatgtacctggcaaagattcatatctgcctgcagctcactttcagatggcttggggaaaaaagtgtgtgttgggagagagaagagatggagagagcgagcacaaatgtgccaaaatgttgcttgaaaacagacaggtacgcttaggatatgtttgccaggcgtctttcttttataatgcctgtttgttgttgccattgtttgtgactgtagaagaatagttgctcattgcttatcatttggaatatggaaaagtatcatccttaattttacctgnagagattacttaataaagaattaaattgnga

SEQ ID NO: 626 - DNA, 2949 bp, Homo sapiens
gtaaccagttaacttgtggttgccgtgagagttacatctgtaaagtcaacagaaaagaagattatagcagatgtctccaaatcatgctggataaaggaaaactgtggtttcgctgcagtttatgttcggcaacagcacagaatttaaccgacatgaacactcatatccatcaagtgcacaaagaaaagagtgatgaggaggagcagcagtatgtaatcaagtgtggcacctgcaccaaagcatttcatgatcctgagagtgcacagcagcatttccatagaaaacattgcttcttacagaaacccagtgtggctcattttggatctgaaaaatcaaacctgtacaagtttactgctagtgcctcacatacagagagaaaactgaaacaggcaataaactattcmaaaagtttagacatggagaaaggagttgagaatgacctaagctatcmgaatatagaggaagaaattgttgagcttccaratttggattacctgcgaaccatgactcatatagtctttgtagattttgataactggtcaaacttttttggtcatctaccagggcatctaaaccaaggaacatttatttggggctttcaaggaggaaacaccaattggaagcctccgctcaactgtaagatttataactacctgaacaggattggatgcttcttccttcatcctcgctgtagtaaaagaaaagatgctgctgattttgccatatgtatgcatgctggccgtctagatgaacaactacccaagcaaattcctttcaccatcctctcaggagatcaaggttttctggagctagagaatcaatttaagaagactcagaggccagctcatatactaaaccctcaccacttagagggagatatgatgtgtgccttgttaaatagcatatctgataccaccaaagaatgtgacagtgatgataacatgggtgccaaaaatacttcaataggagaagaatttatatccacagaagatgtggaattagaagaagctattagaagaagtcttgaggaaatgtaattaaagatattaccacacaacatcaagtggccttgaagagactgagataacgaattcttgagtttgttttctaaaggagaccagaaatccactattacaaatgtatttgaaaacatgtttttgctttcatatgttcaaaatctgatctttgttttgtatttttgtgctaatgtgcaaacatgtacagaagaaatagaatacatgttcatgcaaatataaattatgtattctaatataggtgtaacagtttcccagttaactttgaatttatatatttagatttaaaggattaaaaaaaaggaaagctcttgacagttgtttcccaaatagcattagttctttaattttatttgtactgtacaaatgatgctagtttatttttttagcagtgaaaatgaatataaaaaaggtgacataggtcaagttttccataaattctacttctcatgtggcactattatataatacctttgagatctttgtttatgtttattagaagagggtaatggaaactgatcatggaaacatttaaaattttatcagcaatgttctttgtgggtgccatgcatatgtaaattattgctttaattagagcagcacattgctaaaataaaaaatacaccttaatttttaagaaataatttaaatgaaacaatttccattccttttacctgcttagacttttatgtgacttgtatggtctcctggttaaagggaatggtgtcagaatatttgcataaaattatttttcataacagtccttttttatatattggtgtaaacataatattcttcaagaaataatgttgaaagcctactcaggaataatcttccttaactctttaaatttttatttcatgtgaagtgttttcagtttagttattcactgaattgtcagtttccttcatttggtattacatatttaattcttaaatattgaggccccattgtgagtaataaaaaatacgacataagtagaagactaagaagggcttgtcatattatctttgtgtatatgcttcatgttatttaaccagaaatgtcttatctctaaaaatttttagtagtaattatttaccaaacttaaaaacatttctataaatataaagcttttctttatatttaagacaaaatataaaggctagaatttggttccttctctgtaacactaaatattttagtgtgaaattgaatttttttattactatagtcttttcaatctataatttgtgtttttaatttcttgatatgtcacttctgttcctccctgcttgcattttttaaaaactagacattgtggcttgagaatttatcaatcatctttccgaaatgaccacattgtgcttttagtttgtatgtttaagtggtcaagcaaggctctaggaggtagtcactgagctggaccttaaacacatctgcaggagctcacaaaatgggagcaaaagaggcattccagaaagaagagtagttaagcagatgtgggggcagggcaagaggagacagcaccttgttgccagagattctacacaaaggtgtgatggacactgatgctctattaagaagcttttgtggtgtgtgtggtagagaataattaaggcttctgataagacaggaaagggatatttcatcatgactgttaagaaaaggtaactgggttgtttaatgttttaattgataattgtcactgatcgtatttctacttgttaaataattaaaaatcatcttaaaagaagtacgctgatagggcgacttccgtgtggggattcgtgcatcggtgtcaacgggtgaacattggccagatcgtgctcgtctggggaggccgtgcccctctgtagagcctcgcccgggtggcggagtgtgcggttcttcgggctaacgggttcactagggccacttgatcccattgtacggg

SEQ ID NO: 627 - DNA, 363 bp, Homo sapiens
  SITE (357): n equals a,t,g, or c
attgctcgtttgtttctgctttcaggcacaatttggatcgccatatgcaaacccaccacggacaccataaaccattccgatgcaaactctgctccttcaagtcctcctataacagccggctgaaaacacatatactcaaagctcatgctggtgagcatgcctacaagtgttcttggtgctcattctccaccatgacaatcagccagctgaaggaacactccctcaaggtccacggaaaagccctgaccctccccaggccacggatcgtcagtctcctctcctcacaytcccaccaytcctcccaaaaagctacccggstgaagagtggaagaytccatgaytcatcatattcagagnccccag

SEQ ID NO: 628 - DNA, 2449 bp, Homo sapiens
  SITE (13): n equals a,t,g, or c
  SITE (2437): n equals a,t,g, or c
gatgcctacgccngctctaatacgactcactatagggaaagctggtacgcctgcaggtaccggtccggaattcccgggtcgacccacgcgtccggtctccagtgaagtctcaactttgcataaaagaaaaggccggcagtccaactggaatcctcagcatcttctgattctacaagcccagtttgcctcgagcctcttccagacatcagagggcaaatacctgctgtctgatctgggcccacaagagcgtatgcaaatctctaagtttacgggactctcaatgaccactatcagtcactggctggccaacgtcaagtaccagcttaggaaaacgggcgggacaaaatttctgaaaaacatggacaaaggccaccccatcttttattgcagtgactgtgcctcccagttcagaaccccttctacctacatcagtcacttagaatctcacctgggtttccaaatgaaggacatgacccgcttgtcagtggaccagcaaagcaaggtggagcaagagatctcccgggtatcgtcggctcagaggtctccagaaacaatagctgccgaagaggacacagactctaaattcaagtgtaagttgtgctgtcggacatttgtgagcaaacatgcggtaaaactccacctaagcaaaacgcacagcaagtcacccgaacaccattcacagtttgtaacagacgtggatgaagaatagctctgcaggacgaatgccttagtttccactttccagcctggatcccctcacactgaacccttcttcgttgcaccatcctgcttctgacattgaactcattgaactcctcctgacaccctggctctgagaagactgccaaaaaaaaaaaaaaaaaaaatcaccccagccrtttctcttcatcctcactaacaatttggtaawgaagtattgatttccacttctctgcttatgggcggtattagattttcattgataaattgcaatggggctgtctcgtctccacagtacccttttcactgtcacaagaaaacaaagtgccaccgaagaaaagtaatgactgagagcattgatgtacttatttkgtcagtttgtaacaggaaagtgggggggagtctaagtctycatagtctaatgtccaagtgggttgcactagatgtagacacttggaggcttacttttcatggtaatgtccatttcctatttataacccctctgggaacgtttgtctaaaggaaatgtttctgttcagtgtaacaattacagttgcacctggattgcccagtcctgcccctgcactaggggaccattaatcactgcaaagtagaagaattattaagttaaaccagagtttgagccaagaaaacccctgaacaatgttcatcttctgtgaaacttgttcaaatagttaagcttaaccatgttgctgccaaagacttttcctatgcagtggtggggcaccttgatcatcatcattatcttgattggctgaaaaaaaaatagttttaagcacacaccactgtctatgagaactgcaaattgggagaataggtgaaatgcagaatctgagagaacgcgagaagatgagatcattacagggtggaaagttctgcagcagccttttctggtaatccctttctgcagaacctgatgtttatgggctctaaaacgcagcttagctttagaagcaacagaaagcatgaaatagggtgtccattttaaatgtgttcctgcaacttttttcattaaaactttgagggcccaattttaatttgtggaatattcccgttaataatgagatctaattragacatccattaaaagcccgttaaagttaatttaacgtaaaaattccaatagaactgtattggattttctccattarattrrcgktatggatttttaacggatgtcttaattatacgttattattaacgggaatactgtattacacagattaaaatcaggtcctaagtcaacttggaagagctaagagcatgttttaatattaaaagtcttgcatacctagtgcacagtttggagacgcaaggatagatctgtttactctagttgaacattttctatacaattgaaagcaacctataatagataaatccatcattgcatttaaacaatgaatttccttattctcaaaggacaaatacgtctggattatgtggtaaattgctactcagctatggtgaaatatttatactattctaggcacaacactaggaactaggtgattctgaaacaaaaggaatattttctgttgttgctttaattaccaaggttatttttttttaatctcaacactgacaaaatgaaaccaaatatctcttcctcaccatttctcaaggaggctgcctgttggaattgttwtggaaattttgacatgatccctaaattcarcattgggattaaaaaaaaaaaaaaacttcttatttaccncctagggaaagt

SEQ ID NO: 629 - DNA, 1090 bp, Homo sapiens
  SITE (34): n equals a,t,g, or c
acccacgcgtccgccttgtgccgcgcgctcgagntgcttggcgcctgcgctggacgactcggccggtagtggagatgtccggccggtctaagcgggagtctcgcggttccactcgcgggaagcgagagtctgagtcgcggggcagctccggtcgcgtcaagcgggagcgagatcgggagcgggagcctgaggcggcgagctcccggggcagccctgtgcgcgtgaagcgggagttcgagccggcgagcgcgcgcgaggccccggcttctgttgtcccgtttgtgcgggtgaagcgggagcgcgaggtcgatgaggactcggagcctgagcgggaggtgcgagcaaagaatggccgagtggattctgaggaccggaggagccgccactgcccgtacctggacaccattaacaggagtgtgctggactttgactttgagaaactgtgttctatctccctctcacacatcaatgcttatgcctgtctggtgtgtggcaagtactttcaaggccggggtttgaagtctcacgcctacattcacagtgtccagtttagccaccatgttttcctcaacctccacaccctcaagttttactgccttccagacaactatgagatcatcgattcctcattggaggatatcacgtatgtgttgaagcccactttcacaaagcagcaaattgcaaacttggacaagcaagccaaattgtcccgggcatatgatggtaccacttacctgccgggtattgtgggactgaataacataaaggccaatgattatgccaacgctgtccttcaggctctatctaatgttcctcctctccggaactactttctggaagaagacaattataagaacatcaaacgtcctccaggggatatcatgttcttgttggtccagcgttttggagagctgatgagaaagctctggaaccctcgaaatttcaaggcacatgtgtctccccatgagatgcttcaggcagttgtactttgcagtaagaagacttttcagatcaccaaacaaggagatggcgttgactttctgtcttggtttctgaatgctctgcactcagctctggggggcacaaagaa

SEQ ID NO: 630 - DNA, 638 bp, Homo sapiens
  SITE (440): n equals a,t,g, or c
  SITE (596): n equals a,t,g, or c
  SITE (618): n equals a,t,g, or c
  SITE (628): n equals a,t,g, or c
gggggactccagccccggcttccttgcctgggggtagcaaggaagaggaggagaaagccaagcggctgctctactgtgctctgtgcaaggtggctgtgaactccctgtcccagcttgaggcacataacaaaggtactaagcacaagacaattctggaggcccgaagtgggctcgggcccatcaaarcttaccctcggctggggcctcccaccccgggggaaccagaggctcctgcccaggaccgaactttccactgtgagatctgcaatgtcaaggtcaactcggaggtccaactgaaacagcacatctccagccggcggcamcgagacggcgtggccgggaagcccaacccactactgagccgtcacaagaagtctaggggcgccggggagctggcgggcacgctgactttctccaaggagctgcccaagtccctggcnggcggctgctccccagccccctggcggtggctgcagtgatggcagcggcagcaggctcgccgcttgtcctgcgcccggctycagccgcacytctttttcaggggaccgccgatcacttaaccctttggtttcaccccggcccccggaccccatccnaactgggcacggacccatcctntttttcccgnactggacctt

SEQ ID NO: 631 - DNA, 498 bp, Homo sapiens
  SITE (135): n equals a,t,g, or c
  SITE (488): n equals a,t,g, or c
  SITE (491): n equals a,t,g, or c
  SITE (492): n equals a,t,g, or c
ggcacgagaaagctttcagcacaaggtcctctctcactgggcacaatagcattcatacaggggagaaaccttatgaatgtcacgattgtgggaaaaccttcaggaagagctcctatctgacacagcacgtaaganctcatactggagaaaaaccctatgaatgtaacgagtgtgggaaatccttcagcagtagcttttctcttactgtgcacaagagaatacataccggagagaaaccctacgagtgcagtgactgtggaaaagcctttaataatctctcagctgtgaagaaacacttaagaactcacactggagmaaaaccctatgaatgtaatcattgtgggaaatccttcacaagtaactcctatctttctgtgcacaagagaatacataatagatggatatgaattactgcaggaacttctggaggaaagcactcattggatctttccatccctaagatagtttggagagagctcacactgggngtnntaagtt

SEQ ID NO: 632 - DNA, 511 bp, Homo sapiens
  SITE (422): n equals a,t,g, or c
  SITE (479): n equals a,t,g, or c
  SITE (486): n equals a,t,g, or c
  SITE (501): n equals a,t,g, or c
gacacgcctggggccgagggtctgtgtcaagagcggcaggggctgcaggagataagagaaacgggctgccgtggggtgtgtgtaggcttcagagacatgggatcacggaagactgaagcagaaacagtggattaagacttcctgagcgatagtggcactgccttccccacaatggcagaggtggtggctgaggtggccgagatgccaacacagatgtcaccaggggcagtggagatgtcaacacctatgtcggcagagatgatggagatgtcaacagaagtgactgagatgacacctggggaggcccttgcctcatccctcttcttccagcatcaccagttcatgtgctctgagtgtggcwkcctctataacacactggaggaagtcctctcacaccaggagcagcacatgcttgctgtctnagaggaggaggcactgaccacacagaatgttggcctggagccggagctggtgccggntgctgangggcccttccagtgnggtgaatgca

SEQ ID NO: 633 - DNA, 438 bp, Homo sapiens
  SITE (367): n equals a,t,g, or c
  SITE (425): n equals a,t,g, or c
  SITE (426): n equals a,t,g, or c
  SITE (435): n equals a,t,g, or c
cacggctgcttgttttgtgctttcacaacgtcctccatggagctcatggcccttcatctccaggccaaccacctgggcaaagcgaaacgcaaagataacaccatcggggtcacagtcaactgcaaagaccaagcccgggaggcgagtaagatggccctgctgccctcgttacaatcaaacaaagacctgggcctctccaatatgatcagctctctagactctgcttctgagaagatggcccaaggtcagctcaaggagactctgggagagcagaagagcggtgcatgggaccggccacgtgggaccctgcatttttgtwaactttcccatcagactttytacaagcaktttggtgtttaaccaggcntgtttggttcaggggcttccatttctggcccaacaggagctgatggaaaggccatttnnaaaggtgtnccc

SEQ ID NO: 634 - DNA, 887 bp, Homo sapiens
  SITE (1): n equals a,t,g, or c
  SITE (2): n equals a,t,g, or c
  SITE (3): n equals a,t,g, or c
nnnttttttttttttgagaaagcacgagtctttatggagctgtgtcagcaaaaggcaaagctgtcaggtgcccatctccacctccaccacctctgcccaggcgccgaggcccatgtccttatggattagcaccaggctgggggcggcatctggctcctctggcaccacaaagcacttctcctggctttctgaaatggtgacctcaacaacatccctggcgggggagacttcctcctctctgtgtgtgtccagcagttgtggctcagcctgcaggagcaccacagtgggctcagaagcagcagaaggcacagagggtgggctgcagggtgcctcaggccggtgactgagctgatgccgcctgaggctctgcgggagggtgtagcccatgccacaggtggggcagcggtagggcttgtcctccaagtgagatttgaggtggcgccgcagcttggtggccagcgtgtaagcacggccacactggggacagggaaagggcctctctccggagtgcaggcgctcgtgagctcggagcgtgtgtgggtctcggagggccttgccacacaccgggcacaagtgggcctccccggtgtgtgagatgagatggcgccgcagttcaggcagctgggggaaggcatcggcacagtgtgggcagcggtaaggacgctccccggtgtggagccgcaaatgcccacgcaggttgccccgctgacgaaacgcccggccacagtgcgggcacaggaaaggcttttctcctgtatggagcctcatatggttccgcagggagccctggttggccaggggccgcccacacacagggcatgggcaaggggcaggggcagctggcacctggtgggtcttgcgatgcagccgcagggagggccggcggg

SEQ ID NO: 635 - DNA, 324 bp, Homo sapiens
  SITE (15): n equals a,t,g, or c
  SITE (275): n equals a,t,g, or c
  SITE (291): n equals a,t,g, or c
gggtcgacccacgcngtccggcaatcacttgtgggaaagcatttagtgatccctcatcccttagactgcatttgagaattcacactggagaaaaaccctatgaatgtaaccagtgttttcacgttttccgcaccagttgtaacctcaaaagccacaagaggattcacacgggggagaatcaccatggaatgtaatcagtgtggaaaagctttcagcacaaggtcctctctccactggggcacaattagcattccattacagggggagaaaccttnatggaatgttcacgantgtgggggaaaacctttcagggaagagctccct

SEQ ID NO: 636 - DNA, 596 bp, Homo sapiens
  SITE (13): n equals a,t,g, or c
cggacgcgtgggnaccaggtgcttcaaatgatttcaagtatggattattgccagaatcttggccaaaacaagaaacctgggaaaatggtgaatcatctctaatcatgaacaagttaaaatgccctcattgtagctatgtagccaaatacagacgaacactaaaaaggcacttgctcattcacacaggagtgagatcatttagctgtgatatttgtggaaaactgtttactcgaagagaacatgtaaaaagacattccctggtgcataaaaaggataaaaaatacaaatgtatggtgtgtaagaagatcttcatgttagcagccagtgttggaataagacakggatctcgmcgttatggtgtttgtgtagactgtgcagataaatcacagccrggagggcaagaaggtgtagatcagggacaggatacagaattccctcgggatgaagaatacgaggagaatgaagtrggagaagctgatgaagagctagttgatgatggagaagatcagaatgatccctctcgatgggatgaatcaggagaagtttgtatgtctctagatgattaactgacctactatactcctcaaggatgctgc

SEQ ID NO: 637 - DNA, 565 bp, Homo sapiens
  SITE (513): n equals a,t,g, or c
  SITE (532): n equals a,t,g, or c
cagcagagaaaggccttatgaatgcagcaaatgtggaatcttcttcacttacgccgctgacctcactcaacaccagaaagttcacaatagaggaaaaccgtatgagtgctgtgaatgtggaaaattcttcagccagcactccagccttgttaaacatcgcagggttcacaccggtgaaagccctcacgtgtgtggtgactgtgggaaattcttcagccgaagctccaacctyattcagcataagagggttcacactggtgaaaagccatatgagtgcagcgactgtgggaagttcttcagccagcgttccaacctcattcatcataagagggttcatacgggcagaagtgcccatgagtgcagtgaatgtgggaaatctttcaactgcaactccagcctaattaaacattggagagttcacactggagaaagaccttacaagtgtaacgaatgtggggaaattcttcagccacattgccagcctcattcaacatcagatagttcacactgggngagcggcctcacgggtgtngtgagtgtgggaaagccttcagccgaagctctg

SEQ ID NO: 638 - DNA, 405 bp, Homo sapiens
gattcgcagtggtcgcttcttctccttggtgtaaggtatgcccactgacctttttcaccaagtcagagatgcagatccactccaagtcgcacacagaggccaagccccacaagtgcccgcactgctccaagtcctttgccaacgcctcctacctggcccagcacctgcgcatccacctgggcgtcaagcstaccactgctcctactgtgataagtccttccggcagctctcccacctccagcagcacaccagaatccacacaggcgacagaccctacaagtgcccacatcctggctgcgagaaggctttcactcagctctccaactccagtctcaccagcgscagacaacaaggacaagccytacaagtgtcccaatgstamcgggctwttcggattcggttttg

SEQ ID NO: 639 - DNA, 739 bp, Homo sapiens
  SITE (33): n equals a,t,g, or c
  SITE (695): n equals a,t,g, or c
  SITE (729): n equals a,t,g, or c
  SITE (733): n equals a,t,g, or c
gcctccttcagcgctgtctgctagctgcttttnctgctctctctccctggaggcgaacccttgtgctcgaaatggcagccaccctgctcatggctgggtcccaggcacctgtgacgtttgaagatatggccatgtatctcacccgggaagaatggagacctctggacgctgcacagagggacctttaccgggatgttatgcaggagaattatggaaatgttgtctcactagattttgagatcaggagtgagaacgaggtaaatcccaagcaagagattastgaagatgtwcaatttgggactacatctgaaagacctgctgagaatgctgargaaaatcctgaaagtgaaragggctttgaaagcggagataggtcagaaagacaatggggagatttaacagcagaagagtgggtaagctatcctctccaaccagtcactgatctacttgtccacaaagaagtccacacaggcatccgctatcatatatgttctcattgtggaaaggccttcagtcagatctcagaccttaatcgacatcagaagacccacactggagacagaccctataaatgttatgaatgtggaaaaggcttcagtcgcagctcacaccttattcaagcatcaaagaacacatactggggagaggccttatgactgtaacgagtgtgggaaaaggtttggaaagaaggtctnacctgattaagaatcagaccaatccacacttggngagnaagcct

SEQ ID NO: 640 - DNA, 473 bp, Homo sapiens
  SITE (422): n equals a,t,g, or c
  SITE (426): n equals a,t,g, or c
  SITE (428): n equals a,t,g, or c
  SITE (444): n equals a,t,g, or c
ggacacgaggattactggtttgaaacaaagatgtcagccctaaagcaaagcacttctgaagcatctgttctaggagagcgaacgaaaagtgtcatgatggaaaaaggcctggactgggagggcagaagctccacagagaagaactataagtgcaaggaatgtgggaaagtcttcaaatacaattcgtcctttattagccaccagagaaatcacaccagtgagaaaccacataaatgtaaagaatgtgggatcgcctttatgaacagttcatcccttttaaatcaccataaggttcatgcaggcaaacagccttatagatgtattgaatgtgggaagttctgaagaagcactcaacgtttatcaaccatcagagrattcattctagggagaaaccccacaaatgcattgaatgtggaaacttnagangncttaatctttaagcanagagatcatctgccagaaccttcaattat

SEQ ID NO: 641 - DNA, 905 bp, Homo sapiens
ctagagtgaggctgtataaatggggtgagcaagggaaagccatcagcagtgcctcccttatcaaacttcagtccttccacacaaaggagcacccttttaaatgtaacgaatgcggaaagaccttcagccacagtgcacacctctcaraacatcagttaattcacgctggagagaatccctttaaatgtagtaagtgtgacagagtcttcacccagagaaactaccttgttcagcatgagcgaactcatgccagaaagaagccgttggtgtgtaacgaatgcgggaaaacgttccgtcagasctcatgcctttctaagcatcakagaattcactcaggtgagaagccctatgtatgtgattactgcgggaaggccttcggcctgagtgctgagcttgtccgccaccagagaattcacactggagaaaagccttatgtttgtcaggaatgcgggaaagccttcacccagagctcatgcctttctattcaccggagagttcacactggggagaagccctacagatgtggtgaatgtgggaaagcctttgcccagaaagcaaatctaacacagcaccagagaattcacacaggggagaagccttactcctgtaatgtgtgtggcaaagcttttgtcctcagtgcccatctcaaccagcacctgagagttcacacccaggagacactttatcagtgtcaacgttgccagaaagcctttcggtgccactcgagcctcagccgccatcagcgtgtacacaacaagcagcaatactgcctgtagccattgggtggcagcagagtcccagaatatgagaccgttactcggatgttgaaagttggaaactatcccattgcaagtttctctccaaataaatgcatctaaagattgaaaaaaaaaaaaaaaaaaaaa

SEQ ID NO: 642 - DNA, 882 bp, Homo sapiens
  SITE (732): n equals a,t,g, or c
  SITE (844): n equals a,t,g, or c
  SITE (853): n equals a,t,g, or c
  SITE (859): n equals a,t,g, or c
  SITE (871): n equals a,t,g, or c
ccggcgtggagcgagccggagcccgaggcggggctggagcccgagcgggagccggggcccgcggggagcggcgagcccggcctcagacaaagggtccggcggggccgaagtcgcgccgacctcgagtccccgcagaggaagcacaagtgccactacgcgggctgcgagaaagtttacgggaaatcttcgcacctcaaggcgcacctgagaactcacacaggtgagaggcccttcgcctgcagctggcaggactgcaacaagaagttcgcgcgctccgacgagctggcgcggcactaccgcacacacacgggcgagaagaagttcagctgccccatctgcgagaagcgcttcatgcgcagcgaccacctgaccaagcacgcgcgccgccacgccaacttccacccgggaatgctgcagcggcgcggcgggggctcgcggaccggctccctcagcgactacagccgctccgacgccagcagccccaccatcagcccggccagctcgccctgagcccgccacagccatgagcagccgctcccaccccctcgtgagtccctggcctttccttttgtaataagaaagaagagagagaacttgatgcaaagtccacgaaaaaacaatttttttcacctcaggtgtcaaagtaaatttgttaaaaaaacaaaaaaaacacaaaaatttcaaaaaacaccacccaccaaattgcacaatagatacacccacaaagttganattcagccgttgttgaaccccctttctcagggatggacacgtttcacgaggtcagtgaggacaccccttcctgacgccttactctgtacatagattttgcactcttggagtntttctgttnagttcngggaaacaacgntggggacagaa

SEQ ID NO: 643 - DNA, 529 bp, Homo sapiens
  SITE (58): n equals a,t,g, or c
  SITE (418): n equals a,t,g, or c
  SITE (494): n equals a,t,g, or c
gcgaactgatggccaaggcgagactacgaatcccagcaagcagtacgcgacgcgaggnacgcaggaggaggagcccggagctgcagccaccggggagccaggcagcaaagcacctgctctgagtggccatggggaagcgatacttctgtgactactgcgaccgctccttccaggacaacctccacaaccgcaagaagcacctgaacgggctgcagcacctcaaggccaagaaggtctggtacgacatgttccgagatgcagctgccatcttgctggatgagcagaacaagcggccctgcaggaagtttctactgacaggccagtgcgactttggctccaactgcagattttcccacatgtcagagcgagacctgcaggagctgagcatccagtggaggaggagaggcgagccagggantggctactagatgctcctgagctccccgaaggccatctggargactggctggagaagagagccaagcggctgagcnacagcccccaagttagcagggctgaacccattcag

SEQ ID NO: 644 - DNA, 258 bp, Homo sapiens
  SITE (117): n equals a,t,g, or c
tttttaaattggaagttttgtcttttctggttcatttgcaattcattatataatccataaacaaatttcattgttgttacaatagttgcaaatatcttctcccagttgattgtttanttatttaatttcacttagggtgccattttttaaaaatatagcaactgatttaacatagtacacgtatcgatcttttcttttgtggtgtgtgatttctgggtcttgtttgtttgagaaatcctccctgccttaagaggatct

SEQ ID NO: 645 - DNA, 412 bp, Homo sapiens
  SITE (394): n equals a,t,g, or c
  SITE (412): n equals a,t,g, or c
ggcacgagcagctacagcagcacctgcggagtcaccgggagggcgtctttaagtgccccctgtgcagtcgtgtcttccctagcccttccagtctggaccagcaccttggagaccatagcarcgagtcacacttcctgtgtgtagactgtggcctggccttcggcamagaggcymtyctcctggcccaacggcgagccccacaccccgaatcctctgcattcatgtccatgtgggaagaactttgtcaaccttaacaagtcctttatcaacggcgtaatcaatgggtaaggggtgtccctctggccacaaaaacagttccaacagaggaaactgtcatggttccctgagccagcccagcagagatggagagcagaggccctgagcccctgtgtcnaagagactcagaggccgn

SEQ ID NO: 646 - DNA, 1408 bp, Homo sapiens
  SITE (1398): n equals a,t,g, or c
tttttttttttttttttaaagctccaacatttattgtgtcaatgttaagcacactttttaaaagacaacatagaatgtatagaaacaaggggttggggactcatgcgcatttccacaatacaggtaattaggttggctggtttcagaagggccagggcatcactcatgacagcgatggtccacgggccctctctatgggactgattcactgttccaatgtgggtctgtttttttgtttttactttttattaaaaaatataaataaaatggcgctgcaggcctaggctggaaggactctgcaggactctgtcttcgcacaacggcttcttggaggctactgtcagaaaacatcacaaactagcaggatgacagaccacgctgacgtcgactgggcggcacgcgtccaccccacccctgggggcttcaaattttctcagaacttaagggctctcgagcttccatccgaaaactgccacacatcttgagctctctgggtactacgccgaatgggggtgtgtgaagaacccgcggggtcaggggacttccgtgttcgctttctaagtagattcttaatccatgagtgttctgtgcgtgttgcaagagaaaccatgcactggtgaatggctgtttgcaagttgtacatgtgtagctgctgggctcatctttacaaataccctgcggggcatattctgcactcatcccaggcgtggggattagagctccatgtgcagaacgaggggaggagaggcccctccagtgcagaagtttatctgctatgtgttcctgtttggggcaaattcctctagatgacgttgataaacaatcgtcatcctctggcgtgacctggatgccaacctccacgggattggatgcttttttcatctcgattggtgaaggggaaggtggcttatccacagctttttctaagcagaggctgccattgcattgtttccgtttgtgctcgataaaaataagaatgtcccccaatgggaagttcatctggcactgcccacaggtgaggaggtcatgatccccttctggagctcccaacgggccgtggtctggttcatcatctgtaagaatggcttcaagaggctcgggcgagaattcccgtttgcttaagtgctggggtttgccttgcttgcggcgagacatggtgggctgcggggcgggcggcggcggcggcggcggcggcggcgggcggacgacggctcggttcacatcgggagagccgggttagaaagaaggagactccagagaaaatatcttcatcagtgccttttgacatccaaaataaattagaaataatacaaagatggcgcagggaagatgaattgtgggagagccgtcatggcttttttttaagcaaaaaaaaaaaaaaaaaaaaaaaaaaaaawnccccccggga

SEQ ID NO: 647 - DNA, 1173 bp, Homo sapiens
  SITE (1051): n equals a,t,g, or c
  SITE (1056): n equals a,t,g, or c
  SITE (1078): n equals a,t,g, or c
  SITE (1108): n equals a,t,g, or c
  SITE (1112): n equals a,t,g, or c
  SITE (1135): n equals a,t,g, or c
aaagggctaattggaaagagagccatgaaatgcccatattgtgacttttatttcatgaagaatggctcagaccttcagcgtcatatttgggctcatgaaggtgtgaagcccttcaagtgttctttgtgtgagtatgcaactcgtagcaagagtaacctcaaggctcatatgaatcgtcacagcactgagaaaacccacctatgtgacatgtgtggcaagaaattcaratcaaaagggacactgaaaagtcacaaactccttcacactgcagatgggaagcagtttaagtgcrcggtgtgtgactacacagcggcccagaagccacagctgctgcggcacatggaacagcatgtctccttcaagcctttccgctgtgcccattgccattactcctgcaacatatctggctctctgaagcggcactacaacaggaagcaccctaatgaggagtatgccaacgtgggcaccggggagctggcagcggaggtgctcatccarcaaggtggkttgaagtgtcctgtttgcasctttstatatggcaccaaatgggagttcaataggcactygaagaacaaacatggcttgaaggtggtggaaattgatggagaccccaagtgggagacagcaacagaagctcctgaggagccctycacccagtatctccacatcacagaggccgaagaagacgttcaagggacacaggcagcggtggccgcgctccaggacctgagatacacctctgagagtggcgaccgactggaccccacggcygtgaacatcctgcagcagatcattgagctgggcgccgagacccatgacgccactgccttgctcggtggttgccatggcaccagggacggtgactgtggttaagcaggtcaccgaggaggagcccagttcaaccacacggtcatgatccaggagacggtccagcaagcgtccgtggagyttgccgagcagcaccacytgktggtgtcttcgacgacgtggaagggcattgagacgktgactktytacamgsaaggcggggaggcccttggaatttaatcgnctacnttgcaaggaaggccattgcaancctgtggaaggaaccaaggcttgtgggaancaancccgggcccaaggaaccttttanaagggacattgtggcaatcgggattgggccacaagggc

SEQ ID NO: 648 - DNA, 1150 bp, Homo sapiens
  SITE (1106): n equals a,t,g, or c
  SITE (1136): n equals a,t,g, or c
tttaggtgacactatagaaaggtacgcctgcaggtaccggtccggaattcccgggtcgacccgcgcgtccggaagtgttcgatgacgcaagtgaccaggattccactgacaaaccgtggcgcccttactacaactacaaacccaaaaagaaatccagacagytgaaaaaaatgaggaaagtcaactggaggaaggagcacggaaacaggagcccgagccataaatgtaaatacccagcagaactggattgcgccgtggggaaggctcctcaggataaaccctttgaggaagaagaaactaaagagatgcccaagctgcagtgtgaactctgtgatggagacaaagcagtgggggctggaaaccaaggaaggccccaccgacatcttacttctcggccatatgcctgcgagctctgcgccaagcagttccagagcccttccacactcaaaatgcacatgagatgtcacaccggggagaagccataccagtgcaagacctgcggacggtgcttttcggtgcaaggaaacttacagaaacatgaacgcatccacctgggcttgaaggagttcgtctgtcagtattgcaacaaggcattcaccttgaatgagaccctcaaaatccatgaaagaatccatactggagaaaagcgttaccactgtcagttctgctttcagagatttttgtatctctccaccaaaaggaatcacgagcagaggcatattcgggagcataatgggaagggctatgcctgcttccagtgccccaaaatttgcaaaacagctgctgcccttggaatgcaccaaaagaaacacttattcaaaagcccaagtcagcaggagaaaataggtgacgtgtgccacgaaaactcaaatcccttggagaatcaacatttcattggttcagaagacaatgaccaaaaggataacatacaaaccggtgtggaaaatgttgtcctttgagtggcaagaattagaaaaatcttcaaaaatatagttggtggtttttttagttatgatttaagtttagtttcattttgtccatgtgacagtcatgaaggagtgaaattaaaaaaaaaaaaactccatttgtgaaaattccagaaaaanggtcctaatatctacttttggggtttagcnttaacctttatgcc

SEQ ID NO: 649 - DNA, 795 bp, Homo sapiens
  SITE (607): n equals a,t,g, or c
  SITE (673): n equals a,t,g, or c
  SITE (743): n equals a,t,g, or c
  SITE (761): n equals a,t,g, or c
agcagagctgctgagaggaaaaggattattattaagatggagccagaagatattcctacagatgaactgaaagactttaacattattaaagttactgataaagactgtaatgaatccactgacaatgatgaattagaagatgaacctgaagagccattttatagatactatgttgaagaagatgtcagcataaaaaaaagtggtaggaaaactctaaaacctcgaatgtcagtaagtgctgatgaaagaggtggtttagagaatatgaggccccctaacaacagcagtccagtacaagaggatgctgaaaatgcatcttgtgagctgtgtggacttacaataaccgaggaggacctgtcatctcattacttagccaaacacattgaaaatatctgtgcatgtggtaaatgtggacaaatacttgtaaagggtaggcagcttcaggaacatgctcaacgatgtggcgagccccaagatctgaccatgaatgggttaggaaatactgaggagaaaatggacttgggaagagaatcctgatgagcagtccgaaataagagatatgtttgttgaaatgctggatgrttttagggacaatcattaccagatnaacagtatccaaaaaagcagttatttaamcatyckgcckgccctttycgatgtcctaattgtggcngcgttttgaactgaaatctagtggttgaccatatgtctagctgcttagatcagatatgtttagagtccancatgaagaaatgaagggntccagcgaaccattttgtaacctgtgtggaaagg

SEQ ID NO: 650 - DNA, 712 bp, Homo sapiens
  SITE (88): n equals a,t,g, or c
  SITE (637): n equals a,t,g, or c
  SITE (656): n equals a,t,g, or c
  SITE (670): n equals a,t,g, or c
  SITE (710): n equals a,t,g, or c
ctccacaggtggtcaccctccacgtggcagagcagggggcggtgcagcagccgagagccagctaggccctcctgacctaccgcagatnaccctggcacctggtccatttggtgggactggctacagtgtcatcacagcaccccctatggaggagggaacatcagctcctggcacaccttacagcgaggagcccgcaggagaggcagcccaggctgtggttgtgagtgacaccctaaaagaagctggcacccactacatcatggctactgatggtacccagttgcaccacattgagctcaccgcagatggctccatctccttcccaagtccagatgctctggcctctggtgccaaatggcccctgctgcagtgtgggggactgcccagagacggccctgagcccccatctccagccaagacccactgcgtaggggactcccagagctctgcctcctcacctcctgcaaccagcaaagccctgggcctggcagtgcccccgtcaccgccatytgcagccactgytgmatcaaagaagttttyctgcaagatytgtgccgaggccttccctggccgagctgagatggagagtcacaagcgggcccacgctgggcctggtgcttcaagtgccccgactgcnccttcagtgcccggcagtngccgagtcgggggnacatggaaagactcaagctaagggccaacaggtagcagtnag

SEQ ID NO: 651 - DNA, 655 bp, Homo sapiens
gggcctggcccgccgagcccgccgaccggcctgtgcccytccgttgccccgagtgcagtgtcaagtttgagagtgccgaagacctggagagccacatgcaggtggaccaccgtgacctcacgccggagaccagtgggccccggaaaggcacccagacatcgccagtgccccggaaaaagacataccagtgcatcaagtgccagatgaccttcgagaacgagagagagatccaaatccacgttgccaaccacatgattgaggaaggcatcaaccacgagtgtaagctgtgcaaccagatgttcgaytccccggccaagctcctctgtcacctcattgagcacagcttcgagggcatgggcggcaccttcaaatgccccgtgtgtttcacagtcttcgtccaggccaacaagttgcagcagcacatctttgccgtgcacgggcaggaggacaagatctacgactgctcacagtgccctcagaagttcttcttccagaccgagctgcagaaccacacgatgagccagcacgcacagtgagggatcgctyaacaggacacctctccgcagaaggcttgccggagacgccgtggggagggccatttgaacattacatccaatcaaagtgtcatttgcaacccagatgtaaaactctaatg

SEQ ID NO: 652 - DNA, 682 bp, Homo sapiens
  SITE (83): n equals a,t,g, or c
ccgtctggcgcagttcaccatcgagtacttgctgcactcacaagagttcctcacctcgcagctgcacaccctggaggaaagcntgcgcctgagccactgcgacggcgagcagagcaagaagctgctcaccaagcaggcgggggagatcaagacgctcaaggaagagtgcaaacgccggaagaagatgatctccacccagcagctgatgatcgaggccaaagccaactattaccagtgccatttttgtgacaaggcctttatgaaccaagcttttctacaaagtcacattcaacgccgccacactgaagaaaattctcattttgagtatcagaaaaatgcacagattgagaagctccggagtgagatcgtcgtattgaaggaagagctgcagctcaccaggtctgagctagaggctgcacaccatgccagtgcagtcagattctccaaggaatatgaaatgcagaaaacaaaagaggaagactttttgaagttatttgacaggtggaaagaagaagaaaaggagaaactagttgatgaaatggaaaaagtcaaggagatgtttatgaaggaatttaaagaattaacttcgaagaattcagcattagaatatcaactgtcagaaatccagaagtccaatatgcagatcaagtccaacataggcacattaaaagatgcacacgag

SEQ ID NO: 653 - DNA, 521 bp, Homo sapiens
  SITE (461): n equals a,t,g, or c
  SITE (498): n equals a,t,g, or c
  SITE (500): n equals a,t,g, or c
  SITE (509): n equals a,t,g, or c
  SITE (520): n equals a,t,g, or c
agagagagagagagagagagagagagagtgaatgtggaaaaacatttgtccagaagtcaaccctcaggggacatcaaagaattcacacaggagaaaaacccctatgaatgtagtgaatgtgggaaaacttttgttcagaagtccaccctcagagatcatcacagaattcacacaggggagaaatcctttcaatgcaatcaatgtggaaaaacatttggccagaagtcaaacctcagaatacatcagagaactcacactggggagaaaacttaccagtgtaatgaatgtgaaaaatccttctggcgaaaagatcatctcattcaacatcagaaaactcacacgggagagaaaccattcaaatgtaacgaatgtgggaaaacttttgcccggacatccaaccctcagagtgcatcaaagaattcacactggggagaaaccatttaaatgtaatgaatgtgggnagaaatttgtccggaaagcaatccttagtgatcatcngngaattcccncaggggagaanc

SEQ ID NO: 654 - DNA, 1866 bp, Homo sapiens
  SITE (1696): n equals a,t,g, or c
  SITE (1837): n equals a,t,g, or c
  SITE (1854): n equals a,t,g, or c
acagttcggcagacgctcatacagacacagtaccgttgatcgtattcaagaatgcattctccgtgatggaggttttcttggttcctggctcataattcttagggaagtctgcgttctgctgatcacgatcactttattgtcctaccagtatcactgtatgtactttgttaaataaaaatacaaataacctgaagaggtattatttgaaagctgtgtaactccatggtatggctagtgtgataattgtcttctgataatgcatatgtagtgaattatggccgaggttagtttccagtactggttataagtaagttaaatttctgaaatgttttgggcactgttcagtaacctttggagtagcytgcagtktctttactgctttcaagtgctgatgtggaggaatcattagtgttgggcagggaaacaggagctgtcagactgagagggccagggatgttcattgtggagattaaatgttctgagtaagtgagtttgtagacattttcttgtaagaaaatgttccatgctttactctgttttggacattttcttttgaaaaattttgagatagaaaccttaatatcatttcatatatttacagcatatagttaatttgagtagagtcaaattaatcttactttagaatttgattactaagtattagcatggataataatgcttcttttgcttaaatgtaaaaattaggccgttttactaggtgtactttgtcttaatcatattcctatttttttatacagctgtgcaaccatattgcttctgggaaaaaatgtcaatatgtkggaaactgttcctttgctcatagtcctgaggaaagagaagtttggacttacatgaaggagaatgggatacaagatatggagcaattttacgaactatggctcaagagtcaaaaaaatgaaaaaagtgaagacatagccagtcagtcaaacaaggaaaatggaaaacaaattcacatgccaacagattatgctgaagttacagtggactttcactgctggatgtgtgggaaaaactgcaacagtgagaagcagtggcagggccacatctcctccgagaagcacaaagagaaggttttccacaccgaggacgaccagtactgctggcagcaccgcttcccaacaggctatttcagtatttgtgataggtatatgaatggcacctgcccagaaggaaacagctgtaaatttgcacatggaaatgccgaacttcatgaatgggaagaaagaagagatgccctaaagatgaagctcaacaaagcacgaaaagatcacttaattggcccaaatgataatgactttggaaaatatagttttttgtttaaagatttaaactaatatgctggcttttatgtatgatacctaatcagagcattgaccagaaaaattgaaagtgttctgaggcacatagcagaggagctgcagatttcctgcttgtattggcgtatatcgttcctcctgagcagcaacccacagtaggtaggaaaatgggctgtttcacaggcctggccacgctctcacggaaccactggcatcagatggtgaagtgactgctacccggttgccatctgttgaacagacttttggatgaagtgtgttggggaagaggataaggttatatctaggacaactctttgagttggtccttcatataagaatcgtgacggtaagagaatamncacttgtctggcwgacctgtgtgactctcggtgcaagatgtatataagtgcctctgagtggtgtaagagtcgtgacatccagttaaagtctattgtcaaaggagacgtgataatcatctgctgaagtacactgtgtcccgnattcgaatcgctgttgnacgacctgcgaa

SEQ ID NO: 655 - DNA, 234 bp, Homo sapiens
  SITE (227): n equals a,t,g, or c
  SITE (229): n equals a,t,g, or c
aaccctacaaatgtaaagaatgtggaaaagcttttcaccgatactcaatccttagtacacataagaaaattcatactggggagaaaccccacaaatgtggagaatgcggaaaagcctttaactggtcctcaactcttattacacataagataattcacagtggaggaaaaaccctacaaatatgaaggatgtggcaaagcttttgaaccagtcctcacaccttatgngnacata

SEQ ID NO: 656 - DNA, 708 bp, Homo sapiens
gctctactaaatttagtggagatgggaaatcatttcttcatggtaactatgaagaactttattctgcagctaaattctctgtaagtacaaaagccaatagcactaaatcccaagtcagtaagcatcagagaactcatgaaatagaaaaaaaccacgtatgcagtgaatgtgggaaagcgtttgtcaagaagtctcagctcactgatcatgagagagttcatacaggagaaaaaccttatggatgtactttgtgtgcaaaagtgttctccagaaagtccaggctaaatgaacatcaaagaattcataaaagagagaaatcttttatatgcagtgaatgtggaaaagtcttcactatgaagagccgtctgattgaacatcagcgaactcatactggagagaaaccctacatatgcaatgaatgtggaaaaggcttcccaggcaagcgtaatctcattgtacatcagcgaaatcatactggagagaaatcctatatatgtagtgaatgtggaaaaggcttcactgggaagagcatgcttattatacatcagcgaactcatacaggagagaagccctacatctgtagtgaatgtgggaaargcttcaccacaaaacactatgtcatcatacatcaacgaaatcatmcaggagakaaaccatatatatgcaatgaatgtgggaaaggcttcaccatgaagagccgtatgatcg

SEQ ID NO: 657 - DNA, 617 bp, Homo sapiens
  SITE (450): n equals a,t,g, or c
  SITE (473): n equals a,t,g, or c
  SITE (568): n equals a,t,g, or c
  SITE (591): n equals a,t,g, or c
  SITE (595): n equals a,t,g, or c
  SITE (601): n equals a,t,g, or c
ggcaagatctagtgatttggagtatgagggagaaaaaatatgggataagctcaagatgataacctcaaggcctaaagaatagattgtgttccccagcagatagtcattgatgccacccaagtgctgccattagcatttccacctgcagctcagtaggggccatgacatgttttattgttattgggagtcatgacctatataaaggctgattctctccccatccccctcctcttctggccttattatctcagatataatatctaacatctgtctacttaggtgagaggccctatctgtgtgactatccagactgtggaaaagcctttgttcaaagtggacagctcaaaacacatcagcgtcttcacaccggagagaaaccttttgtttgttcagaaaatggtacggtgttagaagttaagtttatggaataactagttgtgacttaacagntaaaatatcctttccttgaattnttttgaggggaaagattttttaatataaattttataaaactttataagctttcttctttgataattgggatcatgctgaatttctcagaaatgantgattttaaaaatttggtggctntganttttgngggtacccagtcgtat

SEQ ID NO: 658 - DNA, 924 bp, Homo sapiens
  SITE (902): n equals a,t,g, or c
  SITE (903): n equals a,t,g, or c
gggttaatggagatgggaaatccttccttcatgccaagcatgaacaatttcataatgaaatgaacttccccgaaggtggaaattctgtgaatacaaattcacaattcattaagcatcagcgaactcaaaacatagataaaccccatgtatgcactgagtgtgggaaggctttcctcaagaagtctcgcctcatctatcatcagagagttcacactgggggagaaacctcatggatgcagtatatgtgggaaagccttctccagaaagtccgggctcactgaacaccagagaaaccacacaggagagaaaccctatgtatgcaatgaatgtgggaaaggcttcagccagaagacatgtttaatatcccatcagagatttcacacaggaaagacaccctttgtatgtactgagtgtggaaaatcctgctcacacaagtcaggtctcattaaccaccagagaattcacacaggagagaaaccctatacatgcagtgactgtgggaaagctttcagagataaatcatgtctcaacagacatcggagaactcatacaggggagagaccgtatggatgctctgattgtgggaaagctttctcccacttgtcatgccttgtttatcataagggaatgctgcatgcaagagagaaatgtgtaggttcagtcaaattggaaaatccttgctcagagagtcatagcttatcacatacacgtgatctcatacaggataaagactctgttaacatggtgactctgcagatgccttctgtggcagctcagacctcattaactaacagtgcgttccaagcagagagcaaagtagccattgtgagccagcctgttgccagaagttcagtctcagcagatagtagaatttgcacagaataaaaaccatatgaatgcannraaaaaaaaaaaaaaaaaaaa

SEQ ID NO: 659 - DNA, 352 bp, Homo sapiens
  SITE (351): n equals a,t,g, or c
  SITE (352): n equals a,t,g, or c
cttcacagagcaggattaagctatgaagcccgtcatgttgtatcaccagaacaaatagccacaagtgacaaaatgcagcatttcaaaagaactggcacaggaacacctgttaaacgagttagaaaagctatagagaagtctgaaaccacttctgaacacacttgtcagctctgtggtggttggtttgatactaaaattggattatcaaatcatgttagaggccacttgaaaagacttggaaagacgaaatgggatgctcacaaatctccaatctgtgttctgaatgagatgatgcaaaatgaagaaaaatatgaaaaaatcttaaaggcattgaacagtcgtcgtattatnn

SEQ ID NO: 660 - DNA, 1553 bp, Homo sapiens
ggcacgaggacaaatctctccacttggaaggagatcccaatccttctgcagccccaacatccacctgcgcacctaggaaaatgcccaaaaggatttcaatatccaaacaactggcttcagtgaaagctctgaggaagtgctcagatctggaaaaagctattgccaccactgctctgattttcagaaattcttctgactctgatggtaaacttgaaaaagctattgccaaagatctgctgcaaacccaatttaggaatttcgcagagggacaagaaaccaagccaaaatacagagagatcctttctgaacttgatgagcacacagaaaataagctagattttgaagacttcatgatcttgctcttaagcatcactgtcatgtcagatctgctacaaaatatacggaatgtaaaaattatgaaatgaacagttttaaatatgctgtataaaataatggcaaaagacagtgttattaaaatgtttccatcttatttttgattaattgaatatatctatcatgcatctgaaattgcctaggatggttctgattgctggtattcagatccaatgtaactccaaatatttacccatacacttcaagaatgtttgaatgataaggtctctgtgtgctttacaataggatagatttgataccactgaataataaatggcttttgctgagtcagtagcgacctagagcactctacttatagtcattgagtcactcatttattcactaaacatttgttgagcatctacttgatggaactgctgaggatacagtaatgaattggccaggcaattccttccttcagacatgtttgcagaagtctagcagaagagatagacattgaacaatttttaaataattgcatacacagtataattagaattgaaataagggctataggatgctaaaagagattatcacctgatcggagttcaaaggtcagaaaagctttactgacattctataaaaagcaaaaaaaaaaaaattggtccatggatgccagggatatgggtgggaaatggggctgtccacaaatggcacaaggggagttttttattttattttattttattttattttattttattttgagacagagttttgctcttgttgcccaggctggagtgcaatggcacgatctcagcttactgcaacctcgatctcccaggttcaagtgattctcctgcctcagcctcctgagtagctgggattacaggcgtgtgccacgatgccaggctaattttttttgtatttttagtggagacggggtttcgccatgtcggccaggctggtctcgaactcctgacctcaggtggtccgcccacagcctcccaaagtgctgggattacaggcttgagccaccaagtctggccaaggggacttttaagggggctggaaatggtctccattttgattgtgaggtggtggctacaagattgcatgcatttgtcaaactcatagaactgcacactgaaaagagtgaattgtactgtatgtcaattatacctaaataaatctgacttaacaaaaaaaaaaaaaaaaaa

SEQ ID NO: 661 - DNA, 1856 bp, Homo sapiens
attcggcacgagggggaatgagcctctctggtccttctggtcccaggttactatggtgacaactgtactaatgtgtgtgacctgaacccgtgtgagcaccagtctgtgtgtacccgcaagcccagtgccccccatggctatacctgcgagtgtcccccaaattaccttgggccatactgtgagaccaggtaagcagaccagggcatgtggcagcaggtcccagtggctgctgcttctctctggtgtgtccctcagagccccgaaagcctggctgatccacagccagggtcagaagggccacatagggctcacctaggttaggtgggagtggcagggggagctcatgcctacctgggtccctctctgcaggattgaccagccttgtccccgtggctggtggggacatcccacatgtggcccatgcaactgtgatgtcagcaaaggctttgacccagactgcaacaagacaagcggcgagtgccactgcaaggtgacagccccaagcaagcctccactgtggccacttgggcctctgtccacatctcctgggccctagagggcaggctgtagggatgggtcttcctgtagagctgagggccttgtgcctttgctctcacaggcagggcagttggctgcttaccttcgtgtgtctgaggcgcagggggaccctgggccaatgtgtaacccatgagctctggcctggtgtggtggtggtttgcagcctgttctgattctgtgacatctcgctgatgggctcaactccaaagcattgctagtgttaattattttgaatactgctcctgaggggacctgaggtcgggaccctctccacaggggccacagctgagaaggacccatgagcatcctgggaagagagcctggccaatgacaccgttcttccctcctttctcaggagaaccactaccggcccccaggcagccccacctgcctcttgtgtgactgctaccccacaggctccttgtccagagtctgtgaccctgaggatggccagtgtccatgcaagccaggtgtcatcgggcgtcagtgtgaccgctgtgacaacccttttgctgaggtcaccaccaatggctgtgaaggtggggctcctgggatgggtgggcagccctccttacagtgtgctaggcacctgcaccccaggaaagccaggaaggggctggttgcaggcctggggaggcctggggaggcctagggagggctggggagcctgggcaggacagcagagggagagctgctcctgggtgaccatgtgctcttccccgcagtgaattatgacagctgcccacgagcgattgaggctgggatctggtggccccgtacccgcttcgggctgcctgctgctgctccctgtcccaaaggctcctttggtaggtgttggaggccccgatgtgatgtcgaggacatggcctctgctgttagtgggatgagggcaggaagctcctggctgaagatccggggaccccactttctggcctccaggtcctgggatttcatttcccatcttccttggttcacattcccccttccccatgttgcccaggtgtgcctacatcttggactgttttgttttgttttggtttggttttttttctgggacagagtctgtcactgtcacccaggctggtgtgcagtggcgtgatctccgctcactgcaacctctgcctcccaggttcaagcaattttcctgcctaagcctctggccgccaccacacctggctaattttttttttttttttttttttttttgtatttttagtagagacagggtttcctcgtgccgaattcgatatcaagcttatcgataccgtcgacctcgagggggggcccggtacccaatt

SEQ ID NO: 662 - DNA, 742 bp, Homo sapiens
  SITE (101): n equals a,t,g, or c
gcagcgagtcaagaagctgttcagcacagagacgtcactgcaggtgcaccggcgcatccacacaggtgagcggccatacccatgtccagactgtggcaaansgttccgtcagagtacccacctgaaagaccaccggcgcctgcacacaggtgagcggccctttgcctgtgaagtgtgtggcaaggcctttgccatctccatgcgcctggcagaacatcgccgcatccacacaggcgaacgaccctactcctgccctgactgtggcaagagctaccgctccttctccaacctctggaagcaccgcaagacccatcagcagcagcatcaggcagctgtgcggcagcagctggcagaggcggaggctgccgttggcctggccgtcatggagactgctgtggaggcgctacccctggtggaagccattgagatctaccctctggccgaggctgagggggtccagatcagtggctgactctgcccgacttcctctttggcacctccattccctgttgctgaaggccctccagcatccccttaagcatctgtacatactgtgtcccttcctcttcccatccccaccaccttgtaagttctaaattggatttattctctcgtgaggggggtgctctggggtccttgacacacataaaggtgcccccccaccttccacctcttagcactggtgaccccaaaaatgaaaccatcaataaagactgagttgccaaaaaaaaaaaaaaaacaa

SEQ ID NO: 663 - DNA, 359 bp, Homo sapiens
  SITE (277): n equals a,t,g, or c
  SITE (322): n equals a,t,g, or c
  SITE (324): n equals a,t,g, or c
caggtctgctgctaccagctagtccaagccaccaccagctctgccatggagccttttaattggactccctgcttccattcttgtcctttctagagaaatctttaacaaaaagcaagtgaaaattacctctgaaaaaatgaccacttacaaaaggcacaattttcttactgagtatcagatcgttcataatggagaaaaggtgtatgagtgtaaggagtgtaggaagacctttattcgcgctcaacacttagtcaacaccttgagaattcatactggngagaaaccttataagtgtaaggaatgtggcaggcctttagacagngngcacatcttattcgacatcacaaactttacaccgg

SEQ ID NO: 664 - DNA, 1881 bp, Homo sapiens
  SITE (602): n equals a,t,g, or c
ccctgatcgagcggcgggagcgagggcctggacgtatgtcttcaacagttgtaacagcagctgccatttgctgaatgacagcatgtgtcacacactctgctgagtattacaggcatttttttctaatacaaagtcttgtagtgtggaaatacttgcagacttgaaggaattatcagtctttcattttctatcatcagtgtcctatgatagtttgtgcttccctccctcatccctttgttcatgtcactctgttcaccaacccactctgctgaaatgtcgttatttcttcaaggcccggaggaaatgctaccactctcatcagaggggttcagagatgggcagtgagaaggagcagagtccagaaccacacctgcctgaggaaggggaagggggtaagccttggagagtggatgactcagagggttcttggatcccacctggggagaaggagcatgggcaagagagcctgtcggatgaactgcaagaaactcatccaaaaaagccatggcagaaagtcactgtccgggctcgagagctaggggaccccattgctcatccaaggcatgaggcagatgagaagccctttatatgtgcccagtgtnggcaaaaccttcaataatacctccaacctgagaacacaccagcggatccacactggtgagaagccttacaagtgttctgaatgtggcaagagcttctcgagaagctccaaccgcatccggcacgagcggatccacctggaagagaaacactacaaatgccccaagtgccaggagagctttcggcggcgctcagacctcaccacgcaccagcaagatcacctaggcaagcggccataccgctgtgacatctgtggcaagagcttcagccagagtgccacgctagctgtgcatcaccggacccacctggagccagcaccctacatctgctgtgagtgtgggaagagcttcagcaacagctccagctttggcgtgcatcaccgcacccacacaggtgagagaccttatgagtgcactgagtgtgggcggaccttcagcgatatctccaactttggagcacaccagcggacccacagaggggagaagccctaccggtgcactgtgtgtgggaaacacttctcccggagctcgaatctcatccgccaccagaaaactcacttgggcgaacaggctgggaaagattccagctgaaggagagccccatttagagtgagggagagagagtgagagaccctaacctattggaggaagatcttcagcatcttttgctgctaccttgacctcaagcccttcatcccactttggagaatggttttgtatagcctctgaagtcaggatctcaggaagtcctgaggagggactctggaataaaaacccttgcctctttccaggccaatttctcgtgttggaaagtcagaagacccagtcttggctttactttcttggggtgaaagagaaatagggtaggctcagaacatgctcatgttattaaggcagcagtccccctggcctttgaggaagtacttatgagatgggtgtcactgtctgaaggttctccaaattgtctgtgaactgcttaggtaggagtgcactgcagtttcctgctagttcccacctgttgtgccccaactttgcttctagatctctggggtgggaggagtgaccttctcaatggaaggggcctccttggtctggagaagagatctgaggtcccaccttagaaatgaaagggaaaccctcagggagccatgacccagggaccttcacactcccccatgtttgttacttgttatccctcccccaacctgcctctgttttccccagagtgattagcagtaaaacccttcaatgaaaaaaaaaaaaaaaaaaaaaaaaaaaaaaa

SEQ ID NO: 665 - DNA, 169 bp, Homo sapiens
  SITE (159): n equals a,t,g, or c
cactagagaaaaaccctataaatgtgaagcatctgataaatcctgtgacgcatctgataagtcctgtagtcagagctctgacataactccgcataagaggattcacactagagccaagtcttataaatgtagtaattgtgaaagagtttccagtcgtantgtacatctt

SEQ ID NO: 666 - DNA, 478 bp, Homo sapiens; identical to SEQ ID NO: 237

SEQ ID NO: 667 - DNA, 447 bp, Homo sapiens
  SITE (390): n equals a,t,g, or c
  SITE (431): n equals a,t,g, or c
tacagtgattgtgggttgacctttgttaaacatcaaggaattcatctcagagaaaagccctatacgtgtaatgaatgtggcaaagacttcagactgaattcccatcttattcagcatcaaagaattcacacaggagagaaaccacatgaatgtaacgaatgtggaaaagcttttggtcmaacttcatgccttattcagcatcacaaaatccacgggcgagagaaatcctatgagtgtaacgaatatgacgaaagtttcaatcacggctcagatcttgttcttcagcaggaagtcctcaccagagaaaaagcctttgattgtgatgtatgggaaaagaacctcggtcagagagcacacctcgttcaacatcaaagaattcataccaaaganaaaccttatgaatgtgatgaacgtggagagacctttagtcnaattcaggcctccttc

SEQ ID NO: 668 - DNA, 1216 bp, Homo sapiens
gcccacgcgtccgcccattcgtttggtgaatttgtccgtctccgacttctggagagtgatgatgcgggtgtgctggttggtgagacaggacagccggcaccagcgaatcagacttccacatttggaagcagttgtgattgggcgtggcccagagaccaagatcactgataagaaatgttctcgacagcaaggtaggagtcaatcccaccagcattgactcagtcgtaattgggaaggaccaagaggtgaagctgcagcctggccaggttctccacatggtgaatgaactttatccatatattgtagagtttgaggaagaggcaaagaaccctggcctgggaaacacacaggaagagaaagagatcaggcaacagtgattctatagaaagggatgctgctcaggaagctgaggctgggacagggctggaacctgggagcaactctggccaatgctctgtgcccctaaagaagggaaaagatgcacctatcaaaaaggaatccctgggccactggagtcaaggcttgaagatttctatgcaggaccccaaaatgcaggtttacaaagatgagcaggtggtggtgataaaggataaatacccaaaggcccgttaccattggctggtcttaccgtggacctccatttccagtctgaaggctgtggccagggaacaccttgaactccttaagcatatgcacactgtgggggaaaaggtgattgtagattttgctgggtccagcaaactccgcttccgattgggctaccacgccattccgagtatgagccatgtacatcttcatgtgatcagccaggattttgattctccttgccttaaaaacaaaaaacattggaattctttcaatacagaatacttcctagaatcacaagctgtgatcgagatggtacaagaggctggtagagtaactgtccgagatgggatgcctgagctcttgaagctgccccttcgttgtcatgagtgccagcagctgctgccttccattcctcagctgaaagaacatctcaggaagcactggacacagtgattctgcagagcctgagctgctgctgtggtgtggcccactggagcaaactgctggcacctattctgggttgcttgtgaacttctactcatttcctaaattaaaacatgcagctttttcacaaaaaaaaaaaaaaaaaaaaaaaaaaaaaaaaaaaaaaaaaaaaaaaaaaaaaaaa

SEQ ID NO: 669 - DNA, 583 bp, Homo sapiens
gcagaagggtctgcctgacgcccaccttgggctgcccccaggcctggctaagaagtccagctcactgaaggaggtggtcgccggggccccccggcccggcttgctcagcctggccaagcccttggatgcccctgctgtcaacaaagccatcaagtcgcctcccggcttctcggccaagggcctgggccacccgcccagctctccactcctcaaaaagacaccactggccctggcgggctcccctacccctaagaatcctgaggacaagagcccccagctgtccctgagcccccggccggcctccccaaaggcacagtggcctcagtctgaggatgaggggcccttgaacctcactttagatagtgacgggggcagagagctggactgccagctgtgcggtgcctggtttgagacccgcaagggcctgtctagccacgcccgtgcccacctgcgccacctgggcgtcagcgatccggacgccaagggatcccccatagacgtgctccacgggctcatcaggagggacggcgtccagatccgcctcccacccaggcgcggcgccctggcccacccggggcggccg

SEQ ID NO: 670 - DNA, 3391 bp, Homo sapiens
  SITE (106): n equals a,t,g, or c
cccccccccacggaggccctccacccgctttacctgcccccactgcgccaaggtgtgcaagaccgcagctgccctgagcgaccacgggcagaggcatgctgctgancggcccgggggcaccccaacccctgtcattgcctattccaagggcagcgctggcaccaggcccggggatgtcaaggaggaagccccccaagagatgcaagtctcctcatccagcggtgaggcaggkggcgggagcactgctgctgaggaagcttccgagaccgcctcactccaggaccctatcatttcagggggtgaggagcccccagtagtggcaagcgggggcagctatgtatacccacctgtgcargaatttccactggccttgattgsgggcggccgggaacctggcggtggcaggggaaaatctgggagtgaagggccagtgggggctggtgaggggsacgaggaggggataggggctgccaaagtmactttctaccctgagccctacccgctcgtctatggcccccagctccttgccgcctacccttacaacttcagtaacttggccgctctcccggttgctctcaacatggtcctacctgatgagaagggtgcgggggcccttcccttcctaccaggggtctttggctacgcagtgaatcctcaagcagcaccccctgccccaccaacaccacctcccccaactcttcctccaccaattccccctaagggagaaggggaaagggcaggggttgagagaacccagaagggcgatgtggggtgaaccctggggytcaatccccctttcaccagatgccaccctccctgaaccccccaccactaccagctccctggcctccctgccccttgggagccccttcacactcttgtgcagggacttgggggcccctggagctcaggggtcaggctgctttgtgtgagatgtagttttcccatctcctgggaagggatctttcgaggttcccctctcagtcttcctccagggaatggcctccatgaggggcagggccagcttccatcccttctccagcccttggggmaactgagcaatatacttaacctgaatctctactcacagcccccaccagctctgaatgtctaacctgctcccctgattcgtaaacctaggggaaaccatctctctcacctaatgacccgccttgttctgaagctttctctaagcccttcccagttgcttcctagcacattccattctttgtggcccagggctggaccagaccattgtgatacctgaccccgcccacctgggagtgtggctttgggtttcatccttccccagcgtgggtctctacgtccctgtttcccttgtatcaagacaccttcctcagcttccatgcctttggatcttccatgttcctccccatattcctggacttcggagatggcctctcccaagccaggtcaaggaggtttgggggagggttgcccctctgcccctctgttctgtggctgagcactttcccagtccagggcagggaaatattggccctatcttgacccccaaatccagtgagctccagattcttccaaggcaaaagaggtaagcagatcacacctctttctgcctctacatatggcctattctgggctagaccagatttgggggccaggagggaagaactccatatgggatggagaagggaatctactttctccctgtttttttttcctgatggtttctcccagactagaccaaatagccagaaaaatgataggggtcggatgggtgggtaagcccaggatttgcacatgaccttccatccttacctgtattcccatctccccagtgtcactcccctcaccaatcactccagatggttttgggggaaccattctactcttctggtgggctttggggtatccccaccaactttcccttcaaaatagcaccttacaccccatctttgactcagttccccacacccaaagatcccagcctagggatggggtacagggactttaaatagtccctaatccctaatttgcactagttaaccctggtcagggtccctgtatttccttccagtgggggagataaatgtttgctcctaattctctttgaaaactgggcctccctgctctgtgattggataaatatttcccatcccacccacctccccccaaaaaatagctcacaaggggagagccagtatgggggagcaaatttgacaaatgggaattagaggagtgcagttttaaaaggaaaagttgctgtcatcaaaatggcagccttttccccagctactgtttttggggccaagatggctgccctagcagcaatcactgccaagggcaagatcatggcttttggagggaggtgagtttagggagggccaggaccatcctcctacccctcataccctcccagcatatacaaaaggggaggttttagacaggctccctgaatgttaaccacagaggagtcactccttcattcctcctctgtctctttgcacttttcttggtcttggccacagcctgagtgacgaatttcctactgaatgtaccaagttccaatttttaagggggggaaaggtttcaaatggggaaaaacacacaaaaaaaaaatcactaaaaattcccacaaatcttgtttctggcactttagaaaaactgcaaaaaaatacgtaataaagaatacatatatatatatctacacacaaattatatatctatctatctatacagcggaaccacaagagagactgaggaaggcctggaggcaggggcagaggtgacgacagtgcccctatatccttaacccatactcctctgaggcaaacaggcatgggaaaatggaagggttgaggatggaccggagaattggaacttcagaataggtcaaaattccaaaaccatggacatttttttttgggagaattgagattgtagacattttttttttcttaaatatgatcaaggaaaatagcttccagaatgtggtggttctgggcaacaaatgagattgtggcgacgtggagattaaaatatatgtatttgagctggggaatttgaatattgtgagtttcagatgttggaaatttgggattttgcagttttgtcttttgaaaatgatcaagtcttgtcagttcgtgccctctttccccatgttccctgggaagacgggtggtggcagagtgagaaggccactggttctgtgccgcagcacgcaaaatttagaattctacagactagctctatacgtagtgaggacccagatttagagaaactgaccaatatttatctccgcatttgtgtgtgtgtccaactctgtaggccaataaaccaacaagacaaatgaactgtgctccamaaaaaaaaaaaaaaaaaaaaaaaaaaaaaaaaaaaaaaaaaaaaa

SEQ ID NO: 671 - DNA, 832 bp, Homo sapiens; identical to SEQ ID NO: 243
  SITE (765): n equals a,t,g, or c
  SITE (809): n equals a,t,g, or c
  SITE (828): n equals a,t,g, or c

SEQ ID NO: 672 - DNA, 631 bp, Homo sapiens
  SITE (177): n equals a,t,g, or c
  SITE (617): n equals a,t,g, or c
ggaaaaaaggctatccctaagaagagggaacgccgagagaaggtttccattccctctcctccggaagaatccacacggggatattgcaagactgaaaagaagcagctccaccttcatcaaatggcgtgraaatgctcatggaaaatgaaggaccccagtcaggamccacmcaagccnaagggaaacctgccagggccctgagtgtcctggcctccacacgtttctcttgtggtcccattcaggctttaactgcctgctttgtgcagagatgctgggacggaaagaggacctcctccaccactggaagcaccagcataactgtgaggacccttccaaactgtgggctattttaaatacggtctccaaccagggagtgatcgaactttccagtgaagctgagaaatgagaccccaaggcagcctggggttaaggagagagctctgccgccaccttccttcagagcttcgtgctttatggtggtgcttagtcacaaagatcaaacaacaggattggtgtgagtgaacrgaaatgatttttgtacatggttttattttcttaacgaaataaaatataagctctcgaagcataaaaaaaaaaaaaaaaaaccccgggggggncccggtcccaattc

SEQ ID NO: 673 - DNA, 723 bp, Homo sapiens
  SITE (214): n equals a,t,g, or c
ctacactggagagaagcggtatgagtgcagtgaatgtgaaaggccttcattcgcagctcgtccctcactcagcatcaaaggatgcatactggaggaaatcctatcagtgtaacagatgtgggaagactttttacaagtgggcagacctcagtcaacatccaagactttttattgaggaaagactttttgaatgtcaccactgaggaaaatcttntgcaagaggaagcatcttacatggcatctgatcgtacataccaaagagaaaccccacaagtgtcttcactgtgagaaaaccttctgttgccaaatgtcatttgtcacctaaggagtcatattagaaaatcacgcagcttagagccttattctccatccgaattcatcctggaaaaacacccagtggttattacgcacttgggaaaacctttagctccatctttctcattagtttacagtgcaatgttatctcaggaatttttataaacagaaagaggtgacatagaaaagaaaatgaaatgcagacactgcttttatactgttgtcttgtatgtacatttctgtcctgtgtcaggaaagttagtaagggaaggtctggaaacttactcaatgtctttgttctacaacattgtctcttcttaagaagcattgtttttatgagaaataatgaagccttgagttatgaaatacttttatatttaaggattaaaagaaacatgaatgcgcaaa

SEQ ID NO: 674 - DNA, 1007 bp, Homo sapiens
  SITE (621): n equals a,t,g, or c
gcagaaatccggcaatcgacctgaggacttgcgagccgctcagctcccgggacgtttggagctgctgctaaataatttctgctcagccatgtcgccggctccagatgcagccccggctcctgcgtcgatctccctgtttgacctcagcgcggatgctccggtctttcagggcctgagcctggctcaggggagagagaaagcccagaaagaaagctactccagggtcctatggatatttcagagaagttattttgttcaacttgtgaccagaccttccagaaccaccaagaacagagggaacattataagcttgactggcatcggtttaacctaaagcaacgtctcaaggacaagcctctcctgtctgccctggactttgaaaagcagagctccacaggagatctttccagcatctcgggatcagaagactcagactcagccagtgaggaggacttgcagacactggatcgggagagggctacatttgagaagttgagccgacccccaggcttttaccctcatcgagttcttttccagaatgcccagggccagtttctttatgcctaccgctgtgtcctaggccctcatcaggatcccccagaagaggcagaactgctgctnacagaacctgcaaagtagaggtcccagagactgcgtggtgctcatggctgcagctgggcactttgctggtgctatatttcaaggaagagaagtggtgacacacaaaacttttcaccgctatacggttcgggccaagcggggcacagccaggggcttcgggatgcccgaggtgggccatcacactctgctggagccaacctgaggcgctacaatgaagccacactatataaggatgttcgtgacctgctggcagggccaagctgggctaaggcgctggaggaggctggtacaatactgttgcgtgctccccgctctggccggyctttgttctttggaggcaagggagcacccctgcaaaggggggatcccgatctttgggatatccc

SEQ ID NO: 675 - DNA, 422 bp, Homo sapiens
  SITE (53): n equals a,t,g, or c
  SITE (370): n equals a,t,g, or c
  SITE (385): n equals a,t,g, or c
  SITE (411): n equals a,t,g, or c
gggtcgacccacgcgtccgatcacaatttgggtttagaatcaggagaactgtnttcaaaacacaactcccaatacatctcacatttttggtgctgactctactaatgagtgttttataataatatattaaagaaaagaggttttgcactatcctgaagatgttttagacaaaaaaacaaaaaaaaaaacaaaaaaacaaaaaccwtttgcatcaagtcttagaagtacrggaattcctagtctatcaattaaactttaataaaaccaaactcaaagaacatttcattgtgccatttatataaaattttgtcaagtgttactggatttagatcaccccccagtttagaagatcatcagttaatacacagantgtgtttcccacggngtttaattagcctgccaggtttaaangcgtttacacc

SEQ ID NO: 676 - DNA, 818 bp, Homo sapiens
ctttaccaaatcctacaatttgctcatccatgagaggacccacacggacgagaggcctatcacgtgtgacatctsccacaagccytccsgagcaagatcacctgcgggatcacagatacatccattccaaagaaaaacccttcaaatgtcaggagtgtgggaaaggattttgtcagtctagaactctagcagttcacaaaactttacacatgcaggaatctccacacaaatgtcccacatgtggaagaacctttaatcagagaagtaatctgaaaactcaccttctcacmcatacagacatcaagccctacagctgcgagcagtgcggcaaagtgttcaggcgaaactgtgatctgcggcggcacagcctgactcacaccccgcggcaggacttctagagaagcccaggatctgtcccgtgccgccgctgctcccctccccagacacctctccacgtctcctacccagggggtcgcatccctagcccttcactgaccccagctcttcccttgctgcagccgcacctgcagctccagggagttaactcttcttctgggggactgagaactgtagaaagccacacactactacatcccttcacaaagagtatatgctagtttcttgtagatattcacagctcattttagagctctgtacataatgttgtgggtctttgttttgttgttttgtttgctttgggatcttgttggatgcacttagatatggaaaatggaagccaaattttatctttaaagactgtattttcaaaataaaactttttcttgtttgtttcaaaaaaaaaaaaaaaaaaaaaaaaa

SEQ ID NO: 677 - DNA, 367 bp, Homo sapiens
  SITE (336): n equals a,t,g, or c
  SITE (343): n equals a,t,g, or c
tgcaagtaccgcccccggaaattcccgggtcgacccacgcgtccgccttcccctgtccacawtgcgacaaggcytatggcasmcagcgagacctcaaagagcamcaggtggkrcattcaggtgcccggccctttgcttgtgaccagtgtgggcaaggyctttgcccgccggccctccctgcggctgcatcgcaagacccaccaggtgccagctgccctgccccttgcccatgccctgtgtgtgggcggcccctggccaaccagggctccctgcggaaccatatgaggtcatacaggagaaaagcttctggccgactgggcscgttgcagggcactnggcattnggtcaacggaggctacgtgcaatg

SEQ ID NO: 678 - DNA, 675 bp, Homo sapiens
tccccgggcgttggggtctcttggcctttgtgaaaaccaggaagccagagagagccccggaggttcccctcgaggcccggtcacttctgagaaaactggaggacagagtggcctcgagtcagacgtccctccgaacgcaggccccggsgcagagggcgggggcagctggaaggggcggcctttcccgtgcggcgcctgtggccgcagcttcaagtgctcctcggacgcggcaaagcaccggagcatccactcgggggagaaaccgtacgagtgcagcgactgcggraaggccttcatccacagctcgcacgtggtccggcaccagcgggcgcacagcggggagaggccctacgcgtgcgccgagtgcggcaasgttcggccagagcttcaacctcctccrgcaccagcgcgtgcacacgggcgagaagccctacgcgtgcgccgactgcggcaaggccttcggccagaggtcggacgccgccaagcaccgccgcacccacaccggggagaggctgtacgcgtgcggcgagtgcgggaagcgcttcctgcacagctcgaacgtggtccggcaccggcggacccaccacggggagaacccgtacgagtgccgggagtgcggccaggccttcagccagagctccaacctcctccagcaccagcgcgtgcacacggggg

SEQ ID NO: 679 - DNA, 2897 bp, Homo sapiens
gccggcctggtccagcggacagcggctgcagcgggggcgccggctgggaggtgaaagaccttttatgtgtgaaacatgtggcaagagttttgcttctaaggagtacttaaaacaccacaatagaatccatactggatccaaaccctttaaatgtgaagtatgtttcaggacttttgcccagcggaattcactgtaccagcatattaaagtccacacaggggagcgtccctactgctgtgaccagtgcggcaagcagttcacccagctcaacgccctccagcgccaccgccgcatccacacaggggagaggccattcatgtgcaatgcgtgcggacggacattcaccgacaagtccactcttcggcggcacacctcaatacacgataagaatactccatggaagtctttccttgtcattgtagatggctcgcccaagaacgatgacggacacaagactgaacagcctgacgaagagtatgtgtcatccaagctttcggataaattgctgtcttttgcagaaaatggccatttccacaacctggctgcagtccaagacactgtacctaccatgcaggagaacagttctgctgacacagcctgcaaggcagatgactccgtggtgtcccaggacaccctcctggccaccaccatcagtgagcttagcgagctgaccccacagacagactcgatgcccacacagcttcactctttgagcaacatggaataagagcttcaagcagttcccatcctgttagtctgcgtgtgtggtagctgaactcaagatgatgtggggctaagaaaaataattgtccatgtgcaaagatgtgggcaagaatggcctctgcagattttcctgaacttctgctaacttgcacggctttatcacagcatttttaaagctttccctcaaaaatcctgatctgcatgatctcagctactttattgacaaaaaggcagtgaacataacctcacttaattctggtgtagggtgtatgtgctaatcgttctaattcttgattacctagtttatagataactgctggtcttaattgcagagtacagagaactgaaccagctcctgatattgtagttagcagtcttcctggcttctcactctgccttatatttccatgtgggtttacttctctcataactactttcaaggtatttttcttccaagctgaaataaaactggggccacatattttcagtcatttcttccctgttgaattgaagcaaatcagattttctgtggggaccctcaaatgcaactgaagaaatagattgttgcattcattcctccccaccccccatttgtaggcagtaaacaaagtatgactgacagattgaacacctgcaaaactgctagcgtaatctcagcacatacgcagctaggaagtttgtcataaaatcaacttagaaatgagatgaggctgttcagtttgtcttaaaaaaatcagattaggtaaaagctgtcctaccaaagagtctagcaaaacaatatagtatttttttgcagaggcatgaaaaattaagacgctttagagtacttgaaagttgtgtagtcattttatttgcaaaatgaggtgactgtggcaaattatagaacacagagtattattacttttgccaggttttyctgacttgatttctgtaatttccagaaacccagacttctcatttccacacctagagatggaaacaggcaagtaactgacatgtctatttccttgggagcatgtgagaacatagcagtagggaccaaaagtctcagcacacttacctccgattatgccttaaagagttgattgtgaagaaccagtaactttgtcccaaatgcttctttggctgtttcatgcaggacttaattattgcttttaaaaattcacaatgaaaagacgattctgctgtatttgttaaacgttgacatttggttctagggccttgagtatgtgccacgtgcttgtgaaatgctatgattcacatgtaacatttaaacattaatttaaaaagggaaccttggagaattcttttgttcactagttccttttttctctacatttttaatttattaaacttgctgtgaaaacactttgattttctaagaggaaggtactttaagttccaggatgaacatgtagctgcactatgccagaaattaatgagggaagactttcttcctaagtgcttatgttttaacttatgttagtgaaaccactacaaggtgtttcaggcgctgataacatgcttcacacctgcccttggaggtcacagtactaatttacttcaaatttagttatgacagtgtcactgtatcctagttatgtttacagmacaaataaataatgactgtcatacatccagaggagaccgaacctgcccagctgatgtactgttttatggaataaagtcacttgatcagaaggaattgaaacaatagatcattttgttacctactggagggatttttgtcttgaatttgtttccttagaaattctacaaaaaaatgttgttaataaatgtctgctttgtaaaagcagttttgcaattttttaaagatctatttctgttataatttaggttctgcagaaatatgattcttaattgaaacatataatttgcttaattacgtgaataatgaaatgtaaaatccgggtccataagcctttatttcatacagtcctaggattaagctgtttaactgcttggatcccagttggtctctggcagtgggatcctggagaggagaaatcctggcctctgctcatgcgcaggccacaaccgggctggaagtgcggttgagctctctgccactttcttcaatgtaaaaagtaggcatcaaagatacgacttctactatatacatttctctgtccctgagaacagagaaacgtaac

SEQ ID NO: 680 - DNA, 2127 bp, Homo sapiens
  SITE (2078): n equals a,t,g, or c
  SITE (2118): n equals a,t,g, or c
ggcacgagccggcaagcgagtgtccacctgccccttttgctttggcccctttgtgacaactgaggcctatgagctgcatttgaaggagaggcaccacatcatgcccacagtccacacggtcctgaagtctcccgccttcaagtgcatccactgctgtggggtctacacgggaaatatgaccctggctgccatcgccgtccatttggtgcgctgcagaagtgctcccaaggacagcagctcagacctgcaggcccagccgggttttattcacaacagtgaactgcttttagtcagtggtgaagtgatgcatgattccagtttttctgttaagagaaagctgcctgacggccacttaggggccgaagaccagcggcatggggaggagcagcctcccatcctaaatgccgatgcagccccgggtccagaaaaggtgacgagtgttgtgccttttaaaagacaaaggaatgaaagcagaacagagggacctattgtcaaggacgaggctcttcagattttagcattagatcctaaaaaatatgaaggccgttcttatgaagaaaagaagcaatttcttaaagattatttccataagaaaccatatcctagtaaaaaggaaatagaactgttgtcctcactcttttgggtgtggaaaattgatgtggcttcattttttggaaaaagaaggtatatttgcatgaaagcaataaaaaatcacaagccttctgtacttttaggctttgatatgtctgaacttaaaaatgtgaaacatagattgaactttgaatatgaaccataaaacttgcaaaaaaaaaaaaaaagtaactctaaagtagtaggtagatttttttcagttgaaatttcacagtgttgtcctcactgtgttggtgaatcaacctcagtggtcactgtgctgctctgcagagttacttcaggtgctggagagacccctgttaccaggaagccagtagttatttcacatctattgtttcctgcagtttgatttgtaacagaacagttgttttcaggtttttttctctgtcatgtaaatgaaatcttttgatatttcatgcacgccttgttttcccactagtgtcagtatcgtatgataagaaactgaaatctataaataatttgctttttcattaaggacatttcagcctttttcagaatacttgatttaactgcgagtggaagcatcgatctccttcagctttccctgtagcagcagatggtacagtgagtgttcagagacgtgggtacaaaccctgtgatgtatgtataaggctccctgaggatgcactgcattaacttacgctgacttctttgtaagatctttgcttatagattataatttagatctgtatttttttaggtttatcctaatagctgttttttttttttaaccataactcatagaaaatcaaatgtttttatttgttaaaagtagactgaatttgacatctggtatgctggtatgtagctcatacatcaagagttattttacaaataaatttattctgtagatgcagaaatatttttcagtgtagattttcccttttgatatgctaagtcatttctccgttcagaggtaaaacaataaatttttagtgcctttagaataaacattgaaagaatacaccccaaaactcttctcctaacttaactactcataaactagtgaaagggaaggtctatgatactcaggaataagattattgcccctgagtgtgaaaactaacttaaatttcagcatagggtttcaggggacatggcgaagtttacagactgagatctcagtctccatggttggtacagtaagtctttgaccacattttctgaaggtcatgtttagtggagaaacgggcttttctctagctggtttaggctggaagctgtgtccgggtcgatgggatggcatattgttaaagaatctccattgtcgtcactgtcctgktgggatgkttaaaaccctccgttttttttycccccmacaccgataatttaaaaaactttaaaagccacccaggaaaccaagtcctgggarracaaccaagtttaaaatggtaaaagtccataantttcccgggtgggtaccacaagccagagggaaaccccttnaaatcctaa

SEQ ID NO: 681 - DNA, 608 bp, Homo sapiens
aacctcagccagtgtccaagcaaaatggggctggggaagataaccaacaggagaacaaacccagccacgaggatgaatcccctgatggcgccgtgtcagacagaaagtgcaaagtgtgcgcaaaaacttttgaaactgaagctgccttaaatactcacatgcggacacacggcatggccttcatcaaatccaaaaggatgagctcagccgagaaatagccacagatgctccatgaggaaaatccctgtccacattggaataaaaaagacatttttgttacaaagtttgcagtataatagagttaacagtactgtctaggctgttgcaatatattctctttcaatgtaccttccttcacctcgtcgtatatatcctcgataagtattaaaacagtatttgagtttaaaagagtttgtatatatttaaatgaataactttttatactctttgttacatgtttgtatcagtatttagtggaaaaccatttgagttgttttgggttagaatttttctttttgtactgtttctttaaaacagagttcttagtaacaggggcagttcctgaattcaaataaaccattttgtatgtttggaaaaaaaaaaaaaaa

SEQ ID NO: 682 - DNA, 517 bp, Homo sapiens
  SITE (4): n equals a,t,g, or c
  SITE (16): n equals a,t,g, or c
cggnacggtgggcggnacgcgtggggttttttttagattggaaaatgttcagtatccctaccaactctacattgctccttccaccagcagtacagagcgaccaagtccaaatcgtcccgacmgaccttttcagtgtccaacctgcggggtgcgattcacccgtattcagaacctaaagcagcacatgctcatccactcaggaattaaaccatttcagtgtgaccgctgtgggaaaaagttcaccagggcttactcgctaaagatgcatcgcctaaagcatgaagtgatttcctagtaccggactacttaaaccaggaacaagaagagacccttgttcaatatgatcttggagaacacggttttgaaagcaactcctctgttcaaatgcctgtcatttcacagtaccactccaaaggcaaggaaccatgattgacaacagtcaagctgtggatgaaatgaccaggaacggagaatgaattccaagaggtggtttttgaaagagcaagaggaaagaaaa

SEQ ID NO: 683 - DNA, 1327 bp, Homo sapiens
  SITE (1310): n equals a,t,g, or c
gtcctatagaagttcacactgctgaagatgttccaattgctgtagaagtgcatgcgatttctgaggattatgatatagagacagaaaacaattcctctgagagtctccaagaccaaactgatgaagaaccgccagctaaactttgtaaaattcttgacaagagccaagctttgaatgtgactgcccagcagaaatggcctttactgagagctaatagcagtggcctctataaatgtgaactttgtgagtttaacagcaaatatttttctgacttaaagcagcatatgatcctgaagcataaacgtactgattcaaatgtgtgtcgagtatgcaaggaaagtttctctaccaatatgcttctgatagaacatgccaaactgcatgaagaggatccctacatttgtaaatactgtgattataagacagtaatttttgagaacctcagccagcacattgcagacacccattttagtgatcacctctattggtgtgaacagtgtgatgtacagttctcctcaagcagtgaactctacctacatttccaggagcacagctgtgatgaacagtacttgtgtcagttctgtgaacatgaaactaatgatccagaagacttgcatagccatgtggtaaatgagcatgcatgtaaattaatagagttaagtgataagtataacaatggtgaacatggacagtatagcctcttaagcaaaattacctttgacaaatgtaaaaacttctttgtatgtcaagtatgtggttttcggagtagacttcacacaaatgttaacaggcatgttgctattgaacatacaaaaatttttcctcatgtttgtgatgactgtgggaaaggcttttcaagtatgctagaatattgcaagcatttaaattcacatttatctgaagggatttatttatgtcaatattgtgaatattcaacaggacaaattgaagatcttaaaattcatctagatttcaagcattcagctgacttgcctcataaatgtagtgactgcttgatgaggtttggaaatgaaagggaattaataagtcaccttccagtccatgagacaacttgattattctctttaacttacagaatgttagtttaaaataataaattcatcctttttttggagatgattaaatggatgattgtaaacacaacttatgaaatctgcctttaacaagtaacttttttaaattataaaattttattggcattgctccattttctgtatataaatatatctttaatgtggtaaaaaaaaaaaaaaaaaaaaaaatccacgcggccgcgaattcccgggtcnaacaagctcactaatcc

SEQ ID NO: 684 - DNA, 388 bp, Homo sapiens
  SITE (330): n equals a,t,g, or c
  SITE (377): n equals a,t,g, or c
  SITE (383): n equals a,t,g, or c
aattcggcacgagcggcgacggcggcggctccaagatggcgcaggcgatctttgaggccctggagggaatggacaatcagaccgttctggctgtccagtcattattggatggccaaggagcagtccctgatccgacaggccagagtgtcaatgcgccccctgctatccagccattggatgacgaggatgtatttctctgcgggaagtgtaagaagcaattcaactcgctgccagcgtttatgacccacaagcgggaaacagtgccaggggaatgcccccgccctggccaaagtctcamtggccaccaacagcatctacccaccttcgggnagcaacccaagcgggtcccagcagggccccaaatcctgccaaatcgncaaatnttcca

SEQ ID NO: 685 - DNA, 500 bp, Homo sapiens
  SITE (407): n equals a,t,g, or c
  SITE (419): n equals a,t,g, or c
  SITE (437): n equals a,t,g, or c
  SITE (440): n equals a,t,g, or c
  SITE (467): n equals a,t,g, or c
ggaattctgtgggggttaatggagatgggaaatccttccttcatgccaagcatgaacaatttcataatgaaatgaacttccccgaaggtggaaattctgtgaatacaaattcacaattcattaagcatcagcgaactcaaaacatagataaaccccatgtatgcactgagtgtgggaaggctttcctcaagaagtctcgcctcatctatcatcagagagttcacactggggagaaacctcatggatgcagtatatgtgggaaagccttctccagaaagtccgggctcactgaacaccagagaaaccacacaggagagaaaccctatgaatgcactgaatgtgacaaagcattccgctggaaatcacagctcaatgcacaccagaaaattcatacaggagagaagtcntatatatgcagngattgtggaaaaggcttnatnaagaagtctcggctcattaatcatcanagagttcatacaggagagaaaccacatggatgc

SEQ ID NO: 686 - DNA, 1134 bp, Homo sapiens
gaggaaacaccagaaggttcacacaggcataaaaccttttaagtgtagtgactgtggtaaaaccttcaaccgcaaagacgcacttgttctacaccagaggattcacactggagaaaggccttacgagtgcagcaaatgtggtaaaaccttcagtgttctgtctaccctcattcggcaccggaaagtgcacattggagaaaggccctatgagtgtrcagaatgtgggaagttctttaaatacaataatagcttcattcttcaccagagagttcacactggagaaaggccttttgaatgcaagcaatgtgggaaaggctacgtgacccgttcaggcctctatcagcactggaaagtccacactggggaacggccctatgaatgtagcctgtgtgggaaaaccttcactaccagatcctaccgcaatcggcaccagcagttccacactgaagagaggtcttatgaatgtacagagtgtgggaargccttcaaacatagttccaccctccttcagcacaagaaagtccatactccagaaaggcgtcaggaggacagggcacatgggaargtcgttagctgctagcaccgtgttcatcaggaaaggtcttattccagaaaggaggttaaggagagtggccgtgagagtgccatccgaaagaagctaaaccttgcacatcccaacacccaccccagggagagttcccgtgtgtgcctggtgtktgggacgctttcgggasccacattgcactctgacttgcctggggctgttggcagtgtcacatcactgagtttatccaccgccatccacctctatccaccccataaggtccctacagcaagtgggacagcagaccttgtgctccttgctctaaacagtagagaatcgttaatagtggagcccaaaacaggcctcattccctacccttgactggtttagctgtggacatgacccacctctggccggaggagctgagctggtatctgctgggggcttcctgggaaggtttaccattttcatggaaatggttgacattacacatggtatttgtcatgccctagcatggactgtctcatactgctctggactatgtggtaataaaggctttattgtttaaaaaaaaaaaaaaaaaaaaaaaa

SEQ ID NO: 687 - DNA, 1046 bp, Homo sapiens
ggcacgagcaacagttcccagttcagtgctcaccggcgcatccacactggggagagcccatacaagtgtgcagtgtgtgggaaaatcttcaacaatagctcccacttcagtgcccayygaaaaacccacactggtgaaaagccttacaggtgttctcactgtgagagaggcttyactaagaactctgccctcacccgtcatcagacagtacacatgaaagcagtactctcatcacaggaaggaagagatgcgttatgagtgtgtcggtaaactgtcagattaagttcctcaggtcagcatgtatgagctttcttctgctgtggagagatctagccagtccctgactttgcaacagacctactgactactggatcttaagacccatgtytaggaccaggagtcagcataaggacgctgacctctcctggctgtgcctgtgactccagagtcctatcttactgtgacttaaagtttgatggagagaaagctgtaggatccataaattctaccaggaawccagggtcttcctgttcctagcactgagaatgggcacccagtggtccaagaacactttctgggctaacatagtcctcacacagggctgagaaagaaagtgtctcctttcctggaaagcacatgtaaaagttaagggcctgaatctcttctaaaccaataattgacctctaggcacccaccataatactgctaccttcagggcagaagacactgctctttgtaacccagccaccaccaaaaagcaaacagaaagaaggaaggatggttaagccattggataatactgaatctgtttccctaagtgacttaaccttagagcaagcacaacatccaggttaattttttgtaagatttctccttttattattgccctcatcatagttcctgattgtctcttaaagtaagtggtttatagacattactatttctgataataatttacaaactactataaacaaatttataaacattactaatttctgatgaaaataaagttgtttctccctccaaaaaaaaaaaaaaaaaattct

SEQ ID NO: 688 - DNA, 584 bp, Homo sapiens
  SITE (488): n equals a,t,g, or c
ggtccccctggaggcccagcccagcccagccctcgcyacytcmagtgtgagaactgcctcctgcgcttccgcacgcaccgctcgctcttcaagcacctgcatgtttgcgcggagcatgcgcagagcccagccccgccgccacccccggccctggaccgagagccgcccgcgccggagcgccccccggaggttgaccccgcatcagcgccgggcctgccgttcccgctgctggaacccttcacgacccccgcccctgcccccaccggaccgttcctgccctacttgaaccctgcgccctttggcctaagccccccgcgcctgcgccccttcctggccgctgcacccgggccgccggcttccagcgccgccgtctggaaaaagagccaaggtgctgcagcagcccccgaagaccccagggcggctccgacgcgccctcaggtgcgtgcaggtgaccaccagggaggggtggaggggctttctttcctgcngctgcggggtccggtggataccaggaggcagcagtgctcatccccttcccagggggcacaaatgccaccgtcccgaaatacaggatttttgcctta

SEQ ID NO: 689 - DNA, 478 bp, Homo sapiens
  SITE (431): n equals a,t,g, or c
  SITE (451): n equals a,t,g, or c
tcttggctcacttgccttctgcgacatgaaagaattcacactggaaagaaatcttatgaatgtcaacaatgtggtaaagccttcactcgttctcgtttccttcgaggacatgaaaaaactcacactggagagaagatgcatgaatgtaaggaatgtgggaaggcactgagttctctcagttccttgcatagacataaaaggactcactggagagatactctataaatgtggaaaagcattcattaattttatttcatttcagaaacgtgaaagaaatcacataggagataagcctcatgaatgcaaacacatggtaaagccttaagatgttcttttgatatggtatccctaacatatgcagggatggttccagacccctaagcatacctaaatcacagrtgctgkgtcctttataaaaggacatttgatgnaacctatcacatcctcctgnatcccataaatatgcctagattactta

SEQ ID NO: 690 - DNA, 837 bp, Homo sapiens
  SITE (172): n equals a,t,g, or c
  SITE (796): n equals a,t,g, or c
ccggagctgccggagtggyygcgggacctgcctcgcgaggtgtgcctctgcaccagtactgtgcccggcctggcctacgcatctgcgcggcgcagaggatccagcaaggcacctggattggacctttccaaggcgtgcttctgcccccagagaaggtgcaggcaggcgcgtngagaacacgcagcatctctgggagtaaatgtcccttcaacggtaatggaagccatgtgcagacaagacgccctgcagcccttcaacaaaagcagcaaactcgcccctaccacccagcagcgctccgttgttttcccccagactccgtgcagcaggaacttctctcttctggataagtctgggcccattgaatcaggatttaatcaaatcaacgtgaaaaaccagcgagtcctggcaagcccaacttccacaagccagctccactcggagttcagtgactggcatctttggaaatgtgggcagtgctttaagactttcacccagcggatcctcttacagatgcacgtgtgcacgcagaacmccgacagaccctaccaatgcggccactgctcccagtccttttcmcagccwtcagaactgaggaaccacgtggtcactcactctagtgaccggsctttmaagtgcggctactgtggtcgtgcctttgccggggccaccaccctcaacaaccacatccgaacccacactggagaaaagcccttcaagtgcgagaggtgtgagaggagcttcacgcaggccamccagctgagccgacamcagcggatgcccaatgagtgcaagccantaactgagaagcccagaatcaatcgaagtgggattaacggg

SEQ ID NO: 691 - DNA, 532 bp, Homo sapiens
  SITE (480): n equals a,t,g, or c
  SITE (490): n equals a,t,g, or c
  SITE (512): n equals a,t,g, or c
ggtgcactcgggggagaagcctttcaagtgcgagttctgcaatgtccgctgcaccatgaaggggaacctcaagtcgcacatccgtatcaagcacagcgggaataacttcaagtgtcctcattgcgacttcctgggtgacagcaaagccaccctccggaagcacagccgcgtgcaccagtcggagcatcctgagaagtgctcggaatgcagctactcctgctccagcaaggccgmcctgcgcatccacgagcgtatccactgcaccgaccgcctttcaagtgcaactactgcagcttcgacaccaaacagcccagcaacctgagcaagcacatgaagaagttccayggggacatggktaagactgaggctctagagaggaaggacaccggcaggcaragcarccggcaggtggscaarctggatgccaagaagagkttcactgggatatatgcgaagccttctttatgccgggaagacttngcttcggagncccaagagacaggacaatgagnaccatgagagtaaaaactgg

SEQ ID NO: 692 - DNA, 384 bp, Homo sapiens
  SITE (60): n equals a,t,g, or c
agaggtttgtgctcagctgcagcctcctgagtcactagcgtagtcacttggggcccaagncctttggctgtgatgtgtgtggaaaggagtttsycggggatccgacctggtgaagcacctgcgggtcacacgggtgagaagccctacctctgcccagagtgcggcaaaggtttcgcggacagctccgcccgagtcaaacacctccgcacccacagtggcgagaggccccatgcctgcccggaatgcgaccgtaccttcagcctcagctccacccttcttcgccaccgcctcactcacatggagccccaggacttcagcttcccaggstatcccctacccgctctgatccccagcccacccccacctcctctggggcaccagccc

SEQ ID NO: 693 - DNA, 1723 bp, Homo sapiens
  SITE (1453): n equals a,t,g, or c
  SITE (1670): n equals a,t,g, or c
gtactactgccggatggcaaatccgggatctcggctccgagaggctcatctggcaaaagggcgcggaaaccacgggggccctgagactgagtggtccctatcccacttctctctggggcggcgctgtakccagcgctgacaggcgcagcgaaaggcagccctctgctaaagggtcccagcaccatggaggacccgaaccctgaagagaacatgaagcagcaggattcacccaaggagagaagtccccagagcccaggaggcaacatctgccacctgggggccccgaagtgcacccgctgcctcatcaccttcgcagattccaagttccaggagcgtcacatgaagcgggagcacccagcggacttcgtggcccagaagctgcagggggtcctcttcatctgcttcacctgcgcccgctccttcccctcctccaaagccctaatcacccaccagcgcagccacggtccagccgccaagcccaccctgccggttgcaaccactactgcccagcccaccttcccttgtcctgactgtggcaagacctttgggcaggctgtttctctgaggcgcaccgccagatgcatgaggtccgtgcccctcctggcaccttcgcctgcacagagtgcggtcaggactttgctcaggaagcagggctgcatcaacactacattcggcatgcccggggggagctctgagtgcagcttaagcctctccacggtgacgggtggctctgtggctggtaggactcacccatgatatggggtgcaggaactctgggggccctgaaggatttgcttccctcccctgggaaggcagagggctcttaataaagaggacccagaagattcttatttagagcttcagtctttggagcacacagggccttcgtgagacagtgaaatcagataataatgagatcttttgttaaaaaaaaaaaatgggaagggagtgcgggagagaaatggtttgtgtctcccttattcccagttaaatacctagctgcagattgtgccatcacccttcattcttcccagatggatgccatgggtatgggagcaaattgccctggacctttgcctgaatgggggcaggaaaggtgaggtgttgctggcctgtaatgccaccaggtgagttccagatgtggagcaacttgggcttttggggatggggcagcaaagttgggagctggaccccaattgagtgggggtagcaattggagtccttgtgtctcttttccaccccctgccatcctcacttagaggggccatggcactagatggcactagtcccccgataatttatgtctcgttgaaataattttgtatatcattctagtcctgaaatatttttttcatatgtgtaggtgaaatggtatgaataagctaacaggaatagtatctaaaaacagaaaacatccatattaaaatgtctaaacagggagctctggcttttnagtgggaatttccagagaacataagggtgtgggcaggtgggggaactcaggccagagttggcctcgctttgtggggaaactggtttggaatcaaacagagataccttctgtttcgggttttatttggccaacactgggagatttcccattaagatcctattttcagctctcttgaaaggcccaacctaggctgacattgtcacaggggcaggacagnagttacaacaggcttggagggagcagtgggtgtcacctcaactggggatgagt

SEQ ID NO: 694 - DNA, 493 bp, Homo sapiens
ggtttttattgattctcatactttactaaaaataagataatttatactgtggagaagccttacaaatgtgaaaaatgtagcaaaccttttaactaatcctcaacccttactacacataagataattaatgctggagggaaatcccacccatgtggcaaagcttttaatcaatcctcaaaccttactaaacataagataactcatactggagaaaaatcttagaaatgtgaaggatgtggtaaagccgttatccagtcctcaactcccactaaacataacataattcatactggagagaaactcacaactgtgaagaatgtkgcaaagcttttaaccagtcctacaaacctttttgaacaaaataatycmtacrggaragaaacactacaaatgtgaggaatgtgacaaascctttaaccmgtcctcaattcttaccaaacataagaaaattcatattggagattaaccttataagtgtgaaaaacatggcaaa

SEQ ID NO: 695 - DNA, 1431 bp, Homo sapiens
ggcggggtggccgggccaggggtgggcagggccctcggctaaacatctgcggcatctgcgggaagagcttcgggcgkggctccaccctgatccagcaccagcgcatccacaccggtgagaagccctacaaatgtgaggtctgcagcaaggccttctcccagagctctgacctcatcaaacaccagcgcacccacactggcgagcggccctacaaatgtccccgttgcggcaaggccttcgccgacagctcttacctgcttcgccaccagcgcactcactctggccagaagccctacaagtgcccacattgtggcaaggccttcggcgacagytcctacctcctgcgacaccagcgcacccacagccacgagcggccctacagctgcaccgagtgcggcaagtgctatagccagaactcgtccctgcgcagcatcagagggtgcacaccggtcagaggcccttcagctgtggcatctgcggcaagagcttctcccagcggtcggcccttatcccccatgcccgcagccacgcccgggagaagcccttcaagtgccctgagtgcggcaagcgctttggccagagctcggtgctggccatccacgcccgcacccacctgccaggccgcacctacagctgccccgactgcggcaagaccttcaatcgctcctccactctcatccagcaccagcgctcccacacgggcgagcggccctacaggtgcgccgtgtgcggcaagggcttctgccgctcctccacgcttctgcagcatcaccgggtccacagtggcgagcggccttacaagtgcgatgactgcggaaaggccttctcccagagctccgacctcatccgccaccagcggacccacgcggcgggccggcgctgacctggggccccagcaggggtgggaggtgtggcagaagataaggggccagggagctagaggaacctttagggaggatagtggagaagccgcaggagaatggaggagctgaggatgctggaagaagagaaccagggtggaggaagtgacatgccctggagacttgtgggaagtgggttggagggaggccaggccggcagcgggaggccctgggagaaatggagagaggtcagcggagggctggcctcagccgcggctccttggtgggtgcctggcttggcaactgctagagcagggaggggggagggcaggggattacctaattagagtgggttagcttagattggtagctgctgaaactctcgttgagtcaggagcgggtaaaaggtaggtggggtggggagtggggccccggggtggggcctgggcctctgcgtgcaaaccccagcctccctcttcttcctcaggctttggagcccctgagtttgagttcaataaaaactttatgtggtaaaaaaaaaaaaaaaaaaaaaaaaaaaaaaaaaaaaaaa

SEQ ID NO: 696 - DNA, 329 bp, Homo sapiens
ggcacagaaacaacttcgttcactggcagggatgaagtatcatgtcatggcaaatcataatagtttgcccattttgaaagccggagatgaaatagatgagccaagtgagagggaaaggctccgaacagttctaaagagactgggaaagctcaggtgcatgcgtgagagttgctccagtagcttcaccagcatcatgggatatctctaccatgtcagaaaatgtggcaaaggggctgcagagctggaaaagatgaccctgaaatgtcaccactgtggaaaaccatataggtcgaaggctkggacttgcatatcacctgaggtcagagcat

SEQ ID NO: 697 - DNA, 664 bp, Homo sapiens
  SITE (576): n equals a,t,g, or c
ggcatgtcaggaaatccctacagaagagaggccacatccatatgacatgggtggccagagtttccagcacagtgtggacctaactggtcatgagggggttcccacagctgaaagtccactcatatgtaatgagtgtgggaaaaccttccaaggaaatcctgaccttattcagcgtcaaatagtccacactggggaggcttcctttatgtgtgatgattgtgggaaaaccttcagccagaactcagttcttaaaaaccgtcatcgatctcatatgagtgagaaagcttaccagtgcagcgaatgtgggaaagccttccgagggcactcagacttttctaggcatcagagtcaccacagcaktgagaggccttatatgtgtaatgaatgtggraaagccttcagccagaactcgagccttaaaaagcaccaaaagtctcacatgagtgagaagccctatgaatgcaatgaatgtgggaaggcttttaggcggagctcaaacctcatccaacatcaaagaatccattctggggagaaaccgtatgtgtgcagtgagtgtgggaaggccttcaggcgaantcaaacctcatcaaacaccacaggactcacacaggagagaagccttttgagtgtggcgagtgtgggaaagccttcagccagagtgcac

SEQ ID NO: 698 - DNA, 444 bp, Homo sapiens
gagaggacgttcaactgttgctacccaggttgccacttcaaaactgtccatggcatgaaagacttggaccgccatctcagaatccacacgggagacaaaccgcacaagtgtgagttctgtgacaagtgcttcagccggaaggacaacctgaccatgcacatgcggtgccacaccagtgtgaagccacacaagtgtcacctgtgtgactacgctgccgtggacagcagtagcctcaagaagcacctgcggatccactctgatgagcggccgtacaaatgccagctctgcccctatgccagccgcaactccagccagctcaccgtccacctgcgatctcacacggggccgggaccgggctgacctcctggagcacagccggctgcaccaggccgaccacccggagaagtgtccagagtgcagctactcctgctccagcgcggccgc

SEQ ID NO: 699 - DNA, 1304 bp, Homo sapiens
  SITE (1295): n equals a,t,g, or c
  SITE (1298): n equals a,t,g, or c
gcggacgcgtgggtgaaagtctttagtagcctctcatttcttgttcagcatcagagtattcatactgaagaaaaaccctttgaatgtcagaaatgcaggaaatccttcaaccagcttgaatcactgaatatgcatttgagaaatcacattagattgaaaccctacgaatgcartatatgtgggaaagcctttagtcataggtcatccctgcttcaacatcacagaattcatactggagagaaaccttatgaatgtattaaatgtgggaagaccttcagctgtagttcaaaccttaccgtacatcaragaattcacactggagaaaagccatataaatgtaatgagtgtgggaaagcttttagcaaaggctcaaatcttactgcccatcaaagagtacataatggagagaaacccaatagtgtggtaagtgtggaaaagcctttagactatatgaatcactatacatgtgagaaatcttacagaagagaaactgtatgaagcagtggttatcatggtaaatttcctagattctcccttatttaacattagaaaaatttatactggggaaagtcttatgaatgtggtgaatataggaagaccttttagcaaagatgcaggccagtttgkttattagactttatactgtagagaaatcatatgaagaccataaatgtgggaaagcctttgtcagtactaatcccttaattgacataagtatactcacactaggataaaaccctgtacatgtagcaaatgtgggaaagactatagacaataggaatcttttacaaactcctacaggagagaagctgtatgaatgtagaaaatttagaaattgagggaagtcttcagttccaagtatatcccttattctacagcagagaactcaaaatggagagaaatctcatttaagagatgtagcaaagtgttcactaagagtgtttatcttggtacacatcagaagattaatggtagaacaacctgaaggatttaggagttatgtgtaaatctttgcagtcatgctatttgtaaactggattctacaggagagcaaataaacattataataaaatatgcatttcttagagcagtagcttgcagtttcagttgagttctacttagaaattctttttagctagtgggcatgtgaagatatttagtcacccagaggagccagtaagtgttataatattgaaaattaaagctgcaaaagaaataaagtgatgttaataaaagttttggcatctaataaaatcattttgtatatcamaaactctttcactgtgactaatggnccngtgaaa

SEQ ID NO: 700 - DNA, 758 bp, Homo sapiens
  SITE (3): n equals a,t,g, or c
  SITE (13): n equals a,t,g, or c
  SITE (20): n equals a,t,g, or c
  SITE (45): n equals a,t,g, or c
  SITE (98): n equals a,t,g, or c
ggngacttctaanggaaacnctcactaaaggttacaaaagctggncctccaccgcggtggcggccgctctagaactagtggatcccccgggctgcagntgaacatgtaagaactcacactggaataaaaccctatgaatgtaaggaatgtggccaagcctttgctcagtactcgggcctttctatacacatacgaagtcacagtggaaagaaaccctatcagtgtaaggaatgtgggaaagccttcactacatccacaagtcttattcagcatacaagaattcacacaggagagaagccttatgaatgtgttgaatgtgggaagaccttcattacttcttcccgtcgtagtaaacatttgaaaactcatagtggagaaaagccctttgtatgcaagatatgtgggaaagcatttctatattcctcacgccttaatgttcacctgcgaactcataccggagagaaacccttcgtatgtaaagaatgtgggaaagcatttgctgtttcctcacgcctaagtagacatgaaagaattcacactggggagaaaccctatgaatgcaaggatatgagtgttaccatttagcccatcggttgccatctttaattattggcaatgacaccaaagattatcagatttgtcctaaatgccttttggaggttgtaatgactcatggattggccttagataccatcctgagggtctgaaattaaacctacaggttctgaatacaaaaaaaaaaaaaaaaaaaaacaaaa

SEQ ID NO: 701 - DNA, 383 bp, Homo sapiens
  SITE (374): n equals a,t,g, or c
attcacactggagagaagccttatgagtgtaatgagtgttggcgaagttttggtgaaaggtcagatctaattaaacatcagagaacccacacaggggagaagccctacgagtgtgtgcagtgtgggaaaggtttcacccagagctccaacctcatcacacatcaaagagttcacacgggagagaaaccttatgaatgtaccgaatgtgagaagagtttcagcaggagctcagctcttattaaacataagagagttcatacggactaagctgtaattatgatggctgagaaatgattcatttgaagatacaattttatttgatatcaatgaacgccctcaagactgagctgcttttatcatactctcctaagttntggggcacg

SEQ ID NO: 702 - DNA, 511 bp, Homo sapiens
  SITE (65): n equals a,t,g, or c
  SITE (139): n equals a,t,g, or c
  SITE (472): n equals a,t,g, or c
  SITE (488): n equals a,t,g, or c
  SITE (504): n equals a,t,g, or c
ggcagaggccggccgcggccgcrgrgcgwacgcagcagcccgctgtccccgcgccgccggggggnagctgatccagccgtcggtgagcgagctgtcccgggccgtgcggaccaacatcctgtgcaccgtgcgcggctgnggcaagatcctgcccaacagccccgygcttcaacatgcacctagtcaagagccaccgyctgcaggatggcatagtcaatccaacaataagaaaagatttgaaaactggaccgaaattctactgctgtccaattgaaggctgccccagaggccctgagagaccgttttctcagttttctctcgtaaaacagcactttatgaaaatgcatgctgagaagaagcacaaatgtagtaagtgcagcaattcgtacggtacagaatgggaccygaaaagacatgcagaggactgtggcaagaccttcccggtgcacatgcgggctggtccctacgccantagaaccagcacttgnagtcttcacatctacngaacttg

SEQ ID NO: 703 - DNA, 607 bp, Homo sapiens
  SITE (72): n equals a,t,g, or c
acgtagctgacccgctggccagtaaacatctctttcatccagttcagtcacatccatttatttccaacttgncatacaagacatactgagaaactaaaaaaatcgttaaaagtaaagacacgttctggacgggtatctcgacctcccaaatataaagctaaagattataagttcataaaaacagaggatctggcggatggtcatctgtcagattctgatgattactcagaactctgtgtggaagaagatgaagatcagagggagaggcacgcactctttgacttatcgagctgctccctgaggcccaaaagctttaagtgtcagacttgtgaaaagtcatatatagggaaggggggactggcccgacattttaaacttaacccaggccacggccagttggaccccgagatggtgctgtctgagaaagccagtggaagcaccctccgggggtgcacggaggaaaggacgctcagcctgacctccctggggctgtccatgccagcggatccatgtgagggaggggcccgytcctgcttggtgacagagtcagcacgcggtggcctgcagtaatggtcagtctgtagacgttgaagagacattgccatct

SEQ ID NO: 704 - DNA, 1126 bp, Homo sapiens
gcggcaccagagaattcacagtgaggagaaaccctttgactgtgtagattgtggaaaagccttcagtgctcaggaacaattaaaaaggcatctgagaattcatactcaggagtcttcctatgtatgtgatgagtgtggaaaagccttgactagcaaaagaaatcttcatcagcatcaaagaatccatactggagagaaaccctatgagtgtagcaagtatgagaaggcctttgggacttcttcccagctaggtcaccttgagcatgtctactctggagagaagcctgtgctggacatttgtcgttttggcctcccagaattttttacccccttttactggtaatagtacactccagtgaaatgtactgagtggattccgtcttctactcaggaatggaatgtgtgacacaggcctgactcagcctctgatccatccctcaagccacagttaatgattcagatgtcagtagatgaccaaagatggttcaattagagtcccaggattgcaagagctaataggaacaaatactctccccccgcccacccccattggttttaatgctgagaagaagaactagactcttacagaggtgagaatgaagtccacacagcaaaaatgcatctgagaattggagagcagtaaaagactgaagataatgtttgaacagccacatacaccatgcctgaagctaaaaatatatacgggtttttgaattgcagcagccaataaattccatttttgtttggttggttttggctttggcacacctgaattaggttttcttgccttggaacagaattttgacttaaacagtgttgtcattgtagcagttgtttgaagttttcagggataacatacctgatggagaaatgttttgtgtgtatgatataagggaaagtctttagttatagtcatggcagctcctcaaccccatgattgtgatgagattgggaagcccactgtaacactggagagcccaggttatatcagacaccactagtagatagaagttctaacaacttgagctctgtaacaaaaatctcattgtactacaaaattatgtctgcaccagtgaatccattctcaagmaaagtcttaactaggaaactaaaagcwttcactctt

SEQ ID NO: 705 - DNA, 1933 bp, Homo sapiens
  SITE (824): n equals a,t,g, or c
accggcgagcggccttatgagtgcagcgatgtgggaaaaccttcaggcagaggtccaatctgaggcagcacctgaaagttcacaaaccagacaggccttacgaatgcagcgaatgtgggaaagccttcaaccaaaggcctaccctcattcggcatcagaagattcacatcagagaaaggagcatggagaatgtgctccttccctgttcacagcacacaccagagataagctctgagaacagaccttatcagggcgctgtcaactacaagttgaaacttgttcatccaagttacccaccctggggaggttccctargaatgctarctgtkttggaarctttytggagacaagttacattctcttactgtagattttatcagcgttttttcactgctggggttgtgatagaagccatgtcagcaccacacactgcagctctccaaagagtgtgtccaccactccactgtgctcagggaaggcagacctctcctctctctttccaatccctaaagggaattaggagtagtctgaagccttgggaagatgtcattcccgccctgtatggctggtttagccatggacatgaccagcttttggctgtgaagacctgagcagggttttgccaacagcttgttctagagaaggtttccctttttctgggacattgttggtctcatgttatgcctgtgaaggatttgtccagccttcatgttactctacacaacaacttatctcctgtgtattgccctggttcatgtgatgataatggccttatgataaagccgcctttagtcttccatgttctgatcactgtgtggggtgkntcaagagcagagttaagatctaccaaactgaaggggtctccagattatcttggaggggacagsaggatggcagagaaacaactgtcaatccagatttgacctcatttgcattgccaccaaggcctcctaggaaaaattgtaggaatttatgggtataatattgtggtctgaatggcgtgaatttttatcccgaggagggggcagttgtgacaacctccagtgcatgtgggaacagcatgaattgggtcccttattcccagggggtgccscatattccccaatactgtaaagcagatgctgtttagcacctgccaaggagccatatgccctgaagttcagcattaggcaggtatctcttaactgtaagacataccasgcccagctgggaccataatttgtacagaaacactggatgtgattaatagggagtaggcgagattatagcaaaccagcagaaatggractctgctmaatgtgcatccstgaatgctcccttgaatgtggctgtgcaggattcagggtttgcagaaattctcaggacctcagacctctgtcctatgactaatgttactggcagagcaaataatctaaaggttttggttttgtggattaccatctccgtgctgtgcatctgaaggccagtgctgtgctggcaggaaaatagggactgagaaaaagcagatcctatactatagggactgtagtatctatgacgtagccagccattctttgctcccaaggcaagaagaaagagatgacagagtcaatatagggttgccaaatcggattttctaaaatgagtaggaagttggatttttatgtgcaacagtttcttttaatgctttgttgatatgtgattgtcatgcaataattattcatatttggtaagttttgtacatatattatgtacactcagggaaccaataccataatcatgataatgaacgtatccatcacctgcaaagctacctcatgcccctttacattccctccttgccttccctaggaaaccgttgatttacattttttactttagatttgtttgccttttctagaattaacacaattggaatcataaagtatttatactctcaaaaaaaaaaaaaaaa

SEQ ID NO: 706 - DNA, 707 bp, Homo sapiens
  SITE (12): n equals a,t,g, or c
  SITE (13): n equals a,t,g, or c
  SITE (25): n equals a,t,g, or c
  SITE (579): n equals a,t,g, or c
  SITE (598): n equals a,t,g, or c
  SITE (627): n equals a,t,g, or c
  SITE (648): n equals a,t,g, or c
  SITE (650): n equals a,t,g, or c
  SITE (674): n equals a,t,g, or c
ttccctactctnntaaagggaacanaagctggagctccaccgcggtggcggccagctctagaactagtggatcccccgggctgcaggaattcggcacgagtccggtactcaatcaagtgtcttgaatgtcacaagcagatgcgggactacatggtcctggctgcacatttccagaggacaacagaggagacagaggggctgacctgccaggtatgccagatgctgctgcccaaccagtgcagtttctgtgcccaccagcggattcatgcacacaagtccccctactgctgcccggagtgtggggtcctctgccgctctgcctacttccagacccatgtaaaggagaattgcctgcactatgcccgcaaggtgggctacaggtgcatccactgtggtgtcgtccacctgaccttggccttgctgaaaagccacatccaggagcgacactgccaggttttccacaaatgtgcattctgccccatggccttcaagactgccagcagcactgcagaccacagtgccacccagcaccccacccagccccacagacccttccagctcatttataagtgctcctgngaaatggcttcacaagaanaagccattcagcacattttaccagaatgncatcaagaccaagtgggcgtntnaatgcctgagtgccattttgtcgngcaaaaccgagtgtcacacgtaagacaccacgg

SEQ ID NO: 707 - DNA, 237 bp, Homo sapiens
  SITE (34): n equals a,t,g, or c
ggcacgagcggcggctgcacgctgtggcccggcnccagcgctgtaggcctgtggcaagaccttccgctaccgctccaacctgctggagcaccaggaactgcacctgggcgagcgcgcctaccgctgtgagcactgcggcaagggcttcttctacctgagctccgtgctgcgccaccagcgcgcccatgagccgccgcggcccgagctccgctgccccgcctgcctcaaggccttcaa

SEQ ID NO: 708 - DNA, 630 bp, Homo sapiens
caccgccagccttgccttacccgctgaaaaagaagaatggcaaaatcctgtacgagtgcaacatatgtggcaagagctttgggcagctctccawtctcaaggtccacctgsgtgtgcacagtggagagcgtccattccagtgtgccttgtgccagaagagcttcactcaacttgcccacctgcagaagcaccacctggtgcacactggggagcggccccacaagtgctcggtgtgccacaagcgcttcagcagctccagtaacctcaagacccacctgcgcctgcactccggggcccggcccttccagtgcagtgtctgccggagtcgcttcacccagcacatccacctgaagctgcaccatcggctgcatgccccacagccctgtggcctggtgcacacccagctgcccctggcctctctggcctgccttgcccaatggcaccagggggcactagatcttatggcggtggcatctgagaaacacatgggctatgacatagatgaggtcaaagtgtcctcgacatcccaggggaaagcaagagcagtgagcctgagcagtgccgggactcccctggtgatggggcaggaccagaacaattaaaaatgtttcttctgtcaaaaaaaaaaaa

SEQ ID NO: 709 - DNA, 2136 bp, Homo sapiens
ggaatacaagagcctacctgcatggtgagaagattttttatttgaaatatagtctgagcaacatgagtgtagccaagaggagtaggggctggcctgcctggggcagcagcctctcaaatggcacgagagcagtacaaatattccaatgtctgtgtgccccaaccccacctgtcaggaaaggcagaacagcagaacaaagacccacccacagcgccttctcaaggggtctggttcttggtgcctgcctgcctttgccttacctcctgctctgcccaggttccaaacagaggtgtgcagcagaggtttctcccaccccacccacagagacatgatgagccagtgtgacaattagttctcaggactattttgagggaaaagaatcagagaagacagggaggaggggcaaggtgatcaagggccctcgccaaaccagactaggcagagctctcccagagggactgtgtcagcacccctcatttccctccttctcaggatctaaaggcaggaaggagagctggtgtctgcaggaaaatagagctctgaggagcgccctggctgaaggcagcaagcgggaacctcccagaagagcacagccgctgtggggttcaagcctagttgacagcagtggggttgggccacataagcagcttggggttggaaggacacagacaagagatggggcaccaagaagcarcgaaaagccataaataacagaagcaaattcagagctgtgagggtcctggccgaccccacatttcctggggctgggggatacccagcactggcagctcagggcagacactactccagggtacaaccggtcacactcacactgggggcagagccttttattttccacggtccgcagggcaggtggaagacacttcggcaccacccctgaccatgcacactgcaaagtctccggtcacacctgaggggacagtgtgtggctgtcctggtcctgaraggcctgtggttgactgtgatcattgtggccaccatcgtcctcaggggccgggcccagcaatctcctcgcctctgggtcagctgacaaaggctcaccggcacattcttccagtccattctctctagtctccatgggcacctcctccccggagccctcctctggctctgccacctccactgccatctccgctgccgccgcctcctcttcctcctcctcctcctggtctctcaccttgtggacaatgaagaggtggcggctgagggagctggcagaggtgtagcacaaaccacagaggagacattgggctgtggagctgtccacctggtgctgaggtatgtggctctgaaactcgagccccgagtctgtggcaaaactacatttcgcgcactgaaaaagggacttgtgccttttggtggaagagacagttgcgccattgctggtgcctggagcgtcccccactccactgactggtcttttcagatggttcacctgaggggaatgtccacccggaggtttcactttggacgtctggctcaaatcagggtttctgatgccatgcataaggctgatgtggctctccagaagggagggccgaggaaagctggggctgtcctctgtgcagtacccgcaggtgtagaacttctttactgtgtcatggttgttgcggatgtgtttgcgcaggctgttgggggtgtggaaggactgttcacactgccggcatgggtaccgcttcaatgtccgaccgtggctctttttcatgtgggacacgtagctctcccgatctggaacccactcctggcactcctggcaggtccagccagtgttcctcagccgcggcctggcttccaccctgcggtgggcttcaggcctaccccagcggccagaaggcagggagctgctccgagcagccacactagtggctggtggctcagtgggaactcgagagccagggcggcttgaggatgtgtccgctgaagactggaggtttgacagctcgtccacatttcggggaacaccgtgggtgctcttgacgtgttgcatcaactccggcttctgcacgaacaagagtgggcactcagggcacttgaagacgccccacctgcgtcttgctgacattctggtaaaaatgctgctgaatgtgcctcttcttgttgaagaccatttcacct

SEQ ID NO: 710 - DNA, 1005 bp, Homo sapiens
  SITE (65): n equals a,t,g, or c
  SITE (987): n equals a,t,g, or c
cagggaaggcaggtgggtggccggtagtgggggactggggaatcatagtggaggctgggttcctnagttcctaactaggtcagaggagccagaggacagtgtccacaggagtccttgccacgctggtgactgccagctcaatggacctactctgagtcacatggatagctgggacaacagagacaacagctctcagctgcagccagggagccactcctcttgcagccagtgtggcaagacttactgccagtcaggcagcctcttgaaccacaacaccaacaagacagaccgacactattgcctgctctgctccaaggagttcttaaatcctgtggccacaaagagccacagccacaaccacatagacgcccagacctttgcctgtcctgactgtggcaaagcctttgagtcccaccaggaactggccagccacctgcaggctcatgcccggggccacagccaggtgccagcccagatggaggaggccagagatcccaaagccgggactggggaggaccaggtggttctccctggtcaagggaaagcccaggaggccccatcagaaacccccagaggsccaggagagagtgtggagagagccaggggaggacaagcggtgacgtccatggcggctgaggacaaggagcggcccttccgctgcacccagtgcgggcgctcctaccgccatgctggcagcctgctgaaccaccagaaggcccacaccacagggttgtacccgtgctccctctgtcccaaacttctccctaacctgctgtctcttaagaaccacagcaggacccacacggaccccaagcgccactgctgcagcatctgtggcaaggcctttcggacagctgccgctggaggccacgggcgggtccatgcaccccgggaggggcctttcactgccccawtgtcccgcactttcggcgscgaatcagttckgcasamcacagagcaccagragagtgacgtggccggttcgancccagtggacagtgacgg

SEQ ID NO: 711 - DNA, 448 bp, Homo sapiens
  SITE (385): n equals a,t,g, or c
  SITE (412): n equals a,t,g, or c
  SITE (444): n equals a,t,g, or c
aaaccttacaaatgtgatgtatgtcacaaatccttcaggtatggttcctcccttactgtacatcaaaggattcataccggagaaaaaccatatgaatgtgatgtttgcagaaaagccttcagccatcatgcatcactcactcaacatcaaagagtacattctggagaaaagccttttaagtaaagagtgcggaaaagcttttaggcagaatatacaccttgccagtcatttaaggattcatactggggagaagccttttgaatgtgyggagtgtggaaaatccttcagcatcagttctcagcttgccactcatcagagaatccatactgkagagaagccctatgaatgtaaggtttgtagtaaagcgttcacccagaaggttcanctgcacagctcagaaaaccctacaggngaggaaaccttatgagtgcaaggattgcggtnaagc

SEQ ID NO: 712 - DNA, 367 bp, Homo sapiens
gataatccttacaaatgcagtgaatgtggcaaggtctttagttgcagttcaaagcttgtgaatacatcgaggaatggcatactggagagaagccttacaaatgtcatgaatgtggcaagctcttcagtaggcaattcaaacctttcacaacatcaaagaattcatactggagagaagccttacaaatgtcatgaatgtgacaaggtctttcgaggcagttcaaagcttgccacaacatcaaggaatttcatactggagagaagccttacaaatgtcatgaatgtgacaaggtcttcaatcaaattgcacaccttgtacgacatcaaaaaattcatactggagagaaaccttacagttgtaataagtg

SEQ ID NO: 713 - DNA, 231 bp, Homo sapiens
  SITE (127): n equals a,t,g, or c
  SITE (225): n equals a,t,g, or c
aagaacctcatcaagcacatccgagacgcgcatgacccacaggacaagaaggtcaaagaggccttggacgagctctgcctgatgacgagggagggcaagcggcactgctctatgactgccacatctntaagcgcaattcaagaacgagctggaccgcgaccgccatatgctggtccacggagacaagtggccttttgcctgtgaagctctgtggccatggggccnctaagt

SEQ ID NO: 714 - DNA, 504 bp, Homo sapiens
tagtagcaataaaaaaagtaaagtcaatacagcattgaggaatttaaggtatcgtcggggcattcacaaatgcattgagtgttgttccgaaataaaagattttgcaaaccactttcctacgtacgtccactgtagtttttgcagatacaacactagctgtagcaaagcctatgtaaatcatatgatgagctttcatagtaaccgtccaagcaaaaggttttgtatttttaagaagcattcagaaaatctccggggcattactctagtgtgccttaattgtgatttcctaagtgatgtttctggcttagataatatggctacacacttaagtcaacataaaactcatacttgccaagttgtaatgcagaaagtttctgtttgtatcccaacttctgagcaccttctgaattaaaaaaagaagctcccgcaaagggaccargaacctgtgtctaarggaaattgcaagrcctaacatggctgaagaggaaacaggaaacatcaatt

SEQ ID NO: 715 - DNA, 334 bp, Homo sapiens
  SITE (298): n equals a,t,g, or c
  SITE (313): n equals a,t,g, or c
atccacacaggtgagaagccctacaaatgccttgaatgtggaaaaaactttagtgaccgctctaacctcaatacccatcagagaatccacactggagagaagccctataaatgccttgaatgtgggaaaagctttagtgaccattctkaatctcatcactcaccagagaattcacacgggggaaaagccctrttaaatgtggagaatgttggaaaagcttcaaccagagsttcaaaccttctkgaaacatcagaggawtccayttgggagggaaatcctgaccatgttagtgagcctngggggaaacttttgncccaaaggcccatttttttag

SEQ ID NO: 716 - DNA, 708 bp, Homo sapiens
  SITE (471): n equals a,t,g, or c
  SITE (702): n equals a,t,g, or c
  SITE (708): n equals a,t,g, or c
tgtggatggtgcagacagggatgaaaaggacttcaggaatcctggccaggaagtcaggaaactagacctgccagtgctgttcccaaacagacttggttttgagttcaagaacgagattaaaaaagaaaatctaaaatgggatgattcagaggaagtagaaataaacaaggctttacagagaaagtccagaggagtttattggcactctgagctacaaaaaggcttggagagtgagccaacatcaagaaggcaatgtagaaattctccaggggagagtgaggagaaaaccccatcccaggagaagatgagtcaccagagtttttgtgccagggacaaagcctgtacacatatcctctgtgggaaaaactgctctcagagtgtgcactctccccacaagccagcgctcaaactggaaaaagtatctcawtgtcctgaatgtgggaaaacctttagccgaagttcttatcttgntcggcatcaaagaatccacacaggcgagaagcctmcaagtgcagtgagtgccgggaagggctttagtgagccgcttcaactcaytgccacctacgaactcacacaggggagaggccctatcatgtgggscaatgtgggaaaagctttaaccagagttccrgctyattgkcmccagaggacccttcccgggaaaagcttaccaggcattgcttgggaaagagattaacaccngttccn

SEQ ID NO: 717 - DNA, 543 bp, Homo sapiens
  SITE (27): n equals a,t,g, or c
  SITE (482): n equals a,t,g, or c
  SITE (513): n equals a,t,g, or c
tgtaaaggaatgtggaaaggccctttnaaaatgtatggcctaccttaccccaacatccagaaaattcatactggtggaaaaaccttatgaatgtaaagaatgtgggaaggcccttcagtcgtgcttcaaaccttgttcaacatgagagaattcatactggtgagaaaccctatgtgtgtaagcagtgtgggaaaaccttcagatatggttcagcccttaaagcccatcagagaattcataggagcataaaagtgtaagaccgtaaagagtatgagcgcgccattcatcatcagacagcccacactggtgagaaatgatggaatgttagtcttataggtatggctttagcaattgagagagttcaaaatgcagatcttgccacattagaaagcattcaatgtcagtcctgttttaatggaatatctgactattcaatggtaaattaagaaaaaaaaaaaaaaaaacaggaatcccagtttctncatgcctacaacatccatggctgggattttnattaaaaaaaacttaataattatggctggg

SEQ ID NO: 718 - DNA, 974 bp, Homo sapiens
gaaagcctttagcacaaagcaaaagctcattgtccatcaaaggactcatacaggagagagaccctatggctgtaacgagtgtgggaaagcgtttgcgtatatgtcgtgtctggttaagcataagagaatacacacaagggagaaacaagaggcagccaaggtggaaaatcctcctgcagagaggcacagctcattacacaccagtgatgtcatgcaggagaaaaactctgctaacggggcgactacacaagtgccttctgtggcccctcagacatcattaaacatcagcggcctcctcgcaaacaggaacgtagtccttgtgggacagccagtggtcagatgtgcagcctcaggagataacagwggatttgcacaggacagaaaccttgtgaatgcagtgaatgtggttgtgccttccgtgatcaattatgtcttattttatgttacagaaaacccataggaagaaaactcagatctatgtggaaaagggttgagcaaaaatttgtagttcattatgtggccgaaaagcatacactgagagaacatgtataaggctgagatagcctgataaactcatcctattaaaatgtatgctgtgatacacaggcaaatttgatgttaacctaagcacatacacagcaattgctcgactgtgtcaattaaatgagtaaaggaagcccaagtacttttaagtggaggaaatgaagtactgtgaatttttaaaacagatgagataattggtgttgggagtgttgcagtgactgaaaagcttcataaggggcagttggtgggaaagggctaatactgtaatggtggaatgtgggacacatatgtgtcaattcagtttccttagaccagtgccagtgtggaggattaattgaaaaccaggaccataaactttcagaactttgtattatgcagagggatctgtgaaactagtcaatttgtttcattaaacaaatattttaaaatta

SEQ ID NO: 719 - DNA, 1008 bp, Homo sapiens
attcggaacgaggaaaatggcgctgacgtgagcgcgaactcgcactgcccagagggtggccgccgcctaagctgcagccgccggagccgcagaaacaagaggccgagccgtgtcgaagatggaggagaaaccctcagggcccatcccagacatgctggccactgcagagcccagctccagtgagaccgacaaggaggtgttgtccccggctgtgccagctgcagccccttcctcctccatgtcggaggagccaggccctgagcaggcagccacaccgccagtgtgggaacgtggaggggctggagggatgcagcagggctcctccccagccccagacagctgccagcctggccccggacccagccctggcctgaccagcatagtctccgggaccagcgaggacctgcggcctcccagacgacgcccacctccagggaagcaaatcccttgctccagccctggctgctgcctcagttttcccagcgtccgtgacctggcacagcatctgcgaacccactgcccgcccacacagtccctggaaggcaagctcttccgctgctcagccctgagctgcaccgagaccttccccagcatgcaggagctggtggctcacagcaaactgcactacaaacccaatcgctacttcaagtgtgagaactgcctcctcgcttccgccagcaccgctcgctcttcaagcacctgcatgtttgcgcggagcatgcgcagagcccagccccgccgccacccccggccctggaccgagagccgccccgccggagcgccccccggaggttgaccccgcatcagcgccgggcctgccattcccgctgctggaacccttcacgacccccttcctggccgctgcacccgggcgccggcttccagcgccgccgtctggaaaaagagccaaggtgctgcagcagcccccgaagaccccagggcggctccgacgcgccctcagggcrmrcggccccgagccgcatcgtgtgggagcacacacgcggccgc

SEQ ID NO: 720 - DNA, 405 bp, Homo sapiens
  SITE (140): n equals a,t,g, or c
  SITE (244): n equals a,t,g, or c
  SITE (359): n equals a,t,g, or c
  SITE (404): n equals a,t,g, or c
gtgaagmatgtgacaaagtttacagtcgcaaatcaarcctcgaaagacaggagaattcatactggagagaaagcttacatatgtgaagaatgtcaccaagttttcagtcacactcaaaccttgaaagacacaggagaatncctactggagagatagcataaaaatgtaagagtttgtgacaaggctttcaggcataattcgcacctggcacaacatcctagaattcacattggagagaaagctnacaagtataatgaatgtgacaggtctttagtgggcagtcaacacttgtttaccatcaggcaatccatggtgttagggaaactttacttatgttatgattgtccaaagtcttcatnacactaccaccattgcgaatcattggaaaatccatagtgaagaana

SEQ ID NO: 721 - DNA, 1076 bp, Homo sapiens
  SITE (961): n equals a,t,g, or c
  SITE (962): n equals a,t,g, or c
aagcccggagctgcagccaccggggagccaggtaccttccgcgagacgtcgaggggcgagtcctagtctcttttctccgcactggaagacttgaacacttccttctctgcagcaaagcacctgctctgagtggccatggggaagcgatacttctgtgactactgcgaccgctccttccaggacaacctccacaaccgcaagaagcacctgaacgggctgcagcacctcaaggccaagaaggtctggtacgacatgttccgagatgcagctgccatcttgctggatgagcagaacaagcggccctgcaggaagtttctactgacaggccagtgcgactttggctccaactgcagattttcccacatgtcagagcgagacctgcaggagctgagcatccaggtggaggaggagaggcgagccagggagtggctactagatgctcctgagctccccgagggccatctggaggactggctggagaagagagccaagcggctgagctcagccccaagtagcagggctgaacccatcagaaccactgtcttccagtaccccgtgggctggccaccagttcaggagctgcctccatccctgcgggcacccccacctggggggtggcctctgcagcccagagtccagtggggctgagccccttgcccccgactgacccccacgtggtcacttttctcatcagtcacaataggaagccaagcccggttcctgctacgccccatggaggctccgagaccatctgcccagcctcactgaggctcaggacacggccacaccaagtgcagccctcgtcctgggtctgcaccgggcagctctcccctcactctcctccacctgcccccctgcttcttaagaagatgggggagaaaacttccaaatgtttataaagaaagtctgtcaccacagtggtctggctgtgtttccctacactgggtgctctgagctctgnnctccagcccctagcagaggtcgggcaaggagggaattagatgagattttccccaggtgacccacgcttactcccttctcccttgggaccagcagaggttcagctgtgccgaatt

SEQ ID NO: 722 - DNA, 1201 bp, Homo sapiens
cccacgcggtccgccgccatcagcgtggtactagatcaccatgtgaaagggcatgggggcactcgtctctacaagtgcaccgattgtgcttacagcaccaagaaccgacagaagatcacctggcacagccgcatccacactggggaaaagccttaccactgtcacctctgcccctatgcctgtgctgatccctctcgtctcaagtaccacatgcggatccacaaggaggaacggaagtacctgtgccctgagtgtggctacaagtgcaagtgggtcaaccagctgaaataccacatgaccaagcatacaggactgaagccataccagtgtcccgagtgtgagtactgcaccaaccgggctgatgcactgcgtgtgcaccaggagacccggcatcgagaagcacgggctttcatgtgtgagcagtgtggcaaggccttcaagacgcgcttcctgctgcgcacccaccttcgcaagcacagtgaggccaaaccctatgtgtgcaatgtgtgccaccgtgctttccgctgggctgctggcctgcgccatcatgccctcacccacaccgaccgccaccccttcttttgccgcctctgcaactacaaggccaagcaaaagttccaggtggtcaagcacgtacgcaggcaccaccctgaccaagccgacccaaaccagggtgtgggcaaagaccccaccacccccacagtgcacctgcatgatgtgcagctggaggatcccagccctcctgctcctgccgctccccacactggacctgagggctgaaagcctgccccacctcctgtataggaagagggtatggtctgagatgtgcagactgggaccagcgctagcctgaggagctcagagcctaaggaaagactggcttttggggtacaagggtgactagaaccttcctgggactctggctatagtactttgaaattatcacccatataaaagagggacatggactataacgttgatttcttattgctgtacattgcgtttttaacctgcaagttctcagtttcttcaccatcactccatcaaagtccctggctataagatctggattttacccactccatcttctctttccttcttactgtgtcaattcctattttctttcagaatcttctaaaaacagttgtatctaaccgcatgtgctgttgtgcctaatgctctataaagcatgttaaacaga

SEQ ID NO: 723 - DNA, 532 bp, Homo sapiens
  SITE (522): n equals a,t,g, or c
gcgccgccctgcgcgtgcacagcagagtccactgtaaggaccgtcccttcaagtgtgacttctgcagcttcgacacgaagcggcccagcagcctggccaagcacgtcgacaaggtgcacagggacgaggccaagacggagaaccgggcccctctgggcaaggaagggctcagagagggcagctcccagcacgtggccaagatcgtgacgcagagggccttccgctgtgagacctgcggcgcctccttcgtcagggatgactctctgagatgccacaagaagcagcacagtgatcagagtgagaacaagaactcagacttggtcaccttcccaccggaaagcggtgcctcgggacagctcagcaccctggtctccgtggggcagctcgaggctcccctagagcccagccaagacctctagctcagccgaagagggtggtcagctgtcggaacttctgaccagtgctgttgcccagccctccagaggtgaggccactgagagacaggctttgggcacacttctngggctggccg

SEQ ID NO: 724 - DNA, 390 bp, Homo sapiens; identical to SEQ ID NO: 303
  SITE (81): n equals a,t,g, or c

SEQ ID NO: 725 - DNA, 847 bp, Homo sapiens
  SITE (24): n equals a,t,g, or c
  SITE (191): n equals a,t,g, or c
aattcggcagagccctcgtgaganccgagccacagtcatgtttcctacatcagcctcctgctcaggggtttgtacagagaccactgccagccctctaggtggtccctgcaaagaaagtcccagctcccaaggctccaaatggacagggcaccatgttgaccccttcgttggcctccagttcgccgactgtnaacatgtttcatccagttcaggacgtttatttatttccaacttgcatacaaaacatactgagaaactaaaaccatcgttaaaagtgaagacacgttgagacaggtatctcgacctgccaagtatamagytaaagctgagttcataaaaagggatgatttggccgacggtcatctgccagattctgatgatgattcagaastcagtgtggaagaasatcagagggagaggcaggcgctctttgacttatcaagctgctccctgaggcccaaaagcttcaagtgtcagacttgtaaaaagtcatatatagggaagtggggactggcccagcattttaaacttaatccaggccatggcagctggaccctgagatggtgctatctgagaaagccaatgggagcaccctccgkgggtgcacagaggaaaggacgctcagcctgacctwcccggggctgtccgtgccagcgktccgcgtgagggaggggcccgctcctgcttggtgagagagtcagcacgcggtggcctgggtaatgtttgcatctgggtgtcgttttcggccattctcacacttgttataaagaaatacttgagaccaggtgaactgtcacccctacaactcagcttgcaaccagccctggccaccaccagtttccccaag

SEQ ID NO: 726 - DNA, 1646 bp, Homo sapiens
  SITE (33): n equals a,t,g, or c
  SITE (1643): n equals a,t,g, or c
gacccccctcccccggccaccgcctccgctgantctgccccctccccatccgcagggctcttccgtgggcggcggcttcgcgggcttggagttcgcgcgrccgcakgagtcggagccgcgggcstcggacctgggggccccccggacgtggacgggggcggcggcggggccccggactccgtcggcgcacatccccgtcccagcgcagagagccaccccaggaaaagcccggctggacgaggtcatggctgccgctgcccttacaagcctgtccaccagccctctccttctgggggccccagttgcagccttcagcccagagcctggcctggagccctggaaggaggccctggtgcggcccccaggcagctacagcagcagcagcaacagtggagactggggatgggacctggccagtgaccagtcctctccgtccaccccgtcacccccactgccccccgaggcagcccactttctgtttggggagcccaccctgagaaaaaggaagagcccggcccaggtcatgttccagtgtctgtggaagagctgcgggaaggtgctgagcacggcgtcggcgatgcagagacacatccgcctggtgcacctggggaggcaggcagagcctgatcagagtgatggtgaggaggacttctactacacagagctggatgttggtgtggacacgctgaccgacgggctgtccagcctgactccagtgtcccccacggcctccatgccgcctgccttcccccgcctggagctgccagagctgctggagcccccagccctgcctagtcccctgcggccgcctgccccgcccctgcccccgccccctgtcctgagcaccgttgctaacccccagtcctgtcacagtgaccgtgtctaccagggctgcctgacgcccgcccgcctggagccgcagcccacggaggtcggagcctgcccacccgccttgtcctccaggatcggagtcaccctgaggaagccccgcggcgacgcgaagaagtgccggaaggtgtatggcatggagcgccgggacctctggtgcacagcctgccgctggaagaaagcctgccagcggttcctggactaagtccggctcgttcaagaacataagctaccaccttctccctccccaccccctccaggcccggggctgaaacagcccgaggacagccccaggggctggccttcaccagctgcagggtctgcttttacttggggtgggggggcggggctgaccctgaaccctcccccccgccaggtcggggaggggtcccaccactcaaagtgcctctaaagaaaccagctttttgcactaaagccaaaccacaccgctgtccccttagccccaagggccctgggggcagccaccctcccgctgtcggcccgtagatttatcaagggtgttatgggcccagctttggggggccagtcccgatgcactttgaggggtgttggagaggggactcccccactcgcacttaactcaacggctctcgggccctggggctgtttttaccatgtttgtttttgaagctcaggtgtctcacgtctgggctgcaccaggcgaagagagaaattaaagatttgaggtttttccaraaaaaaaaaaaaaaaaaaaaaaaaaaaaaaaaaaaaanccc

SEQ ID NO: 727 - DNA, 613 bp, Homo sapiens
  SITE (3): n equals a,t,g, or c
  SITE (10): n equals a,t,g, or c
  SITE (20): n equals a,t,g, or c
  SITE (35): n equals a,t,g, or c
  SITE (81): n equals a,t,g, or c
cgnatagacnctcctatttnggattagctggtacncctgcaggtaccggtccggaattcccgggtcgacccacgcgtccgncgctcgttgagccccggcgccgccagcagcagcagcggggatggggacggcaaggagggcctggaggagcccaagggaccgcggggcagccagggcggcggcgggggcggcagcagtagcagcagcgtagtctccagcggcggcgacgagggctacgggactgggggaggcggaagcagcgcgacctccgggggccggcggggcagcttggagatgtcgtcggatggggaacccctgagccgcatggactcggaggacagcataagcagtactataatggatgtagacagcacaatttccagtgggcgttcaactccagcaatgatgaatggacaaggaagcactacttcttcaagcaaaaatattgcctataattgttgttgggaccagtgccaggcttgcttcaactctagcccagatctggcagatcacatccgttccatacatgtagatggtcagcgaggaggggtatttgtttgcttatggaaaggktgtaaagtatataacactycatctaccagtcaaagttggt

SEQ ID NO: 728 - DNA, 1298 bp, Homo sapiens
ggaagcccatatgcgttctcatactggagaaaaaccatacaaatgtgaattatgttccttccgctgcagtgatcgaagtaacttgtcccatcatcgaaggcgcaagcataaaatggtaccaattaaaggtactaggtcttccttaagcagcaagaaaatgtggggggttttacagaagaaaacaagcaatctgggctatagcagaagagcactaatcaacttaagtccaccttccatggtggttcagaaacyagactaccttaacgattttacccacgaaatcccaaatatccagactgactcctatgaaagtatggcaaaaaccacaccaactggtggccttccaagggacccccaagaactcatggttgataaccctttgaatcagctctcgactctagcagggcagttgtccagtctgccacccgaaaaccaaaaccctgcatcccctgatgtagttccctgccctgatgaaaagcctttcatgattcagcagccctctacccaagcagtagtttctgccgtatcagcaagtattcctcagagctcctctcccacaagcccagaacctcggccatcccatagtcaaaggaactatagtccagtggcaggtccaagcagtgagccaagtgcccacacgagcactcccagcataggaaacagccagccaagcaccccagccccagccctgccggtccaggaccctcagcttctgcaccactgccagcactgtgatatgtactttgcagacaacatcctttacactattcatatgggatgtcatgggtatgaaaatccttttcagtgtaatatatgtggatgcaaatgtaaaaacaagtatgattttgcctgtcattttgcaagagggcaacataaccaacattgattgaaaatagtcatattttacttagttttgctgtttttgtggtttggttttttttkttttttgttttggtcatccctaataaagtgtctgctaattcaaggcttatacattatatttatagaatataaatttgtcagtggaataaaatttcccctttttttcataaaaatctggtcagggtcatttatatattagaacagttagacacattggtgtctsttttttcctttcctttygacattggagaattggagtgcagtcataatcttacaagatgttcatttgaatttctcacatttatggtccataaaaacttcaaggcttatccatacttttgatgtttcaatatgcattgaactggatgttatttctgccatatttcaaaatggtagaataaattacagaatttatt

SEQ ID NO: 729 - DNA, 1087 bp, Homo sapiens
  SITE (350): n equals a,t,g, or c
gagaggacggcgttatttttattaactggaggcgacggcggctgcggcggcggcgggacccgcctcctccggggtatgaaaatcggcagtgggttcctgagtggcggcggaggtaccggcaggagctgaagagaggtctccaggcctaggaggcggtgaaggggggagtcacggcgtcatccaggacctcagtattctccaccagcatgtccagcagcaaccagcccagcaccaccgtgacgtattactcagcagcagtagcaggactgatgaccaccatggcactgaggagccaaagcaggacactaatgtcaaaaaggcaaaaaggccaaagccagaatctyaggggnatcaaagccaagaggaagccaagkgcatcttccaaaccttctttggttggagatggagaaggtgccatcctctccccaagtcagaaacctcatatctgtgatcactgtagtgctgctttccgaagctcctatcacctgcggagacatgtcctcattcatacaggagaaagacctttccagtgcagscagtgtagtatgggtttcattcagaaatacctactacagagacatgagaaaattcatagtagagagaagccatttggatgtgatcagtgcagcatgaagtttattcagaagtaccatatggagagacacaagaggacacatagtggagaaaagccatataagtgtgacacttgccaacagtatttttcaaggactgatagattgttgaagcacaggcgcacatgtggtgaagtcatagttaaaggagccactagtgcagaacctgggtcatcaaaccataccaatatgggtaatctggctgtgttgtctcagggaaatacaagttcttcaaggaggaaaaacaaagtcaaaaagcatagctattgaaaataaggaacagaagaccggtaaaacaaatgaatcgcaaatttcaaataatataaacatgcagagttactcagtagaaatgcctaccgtgtcttccagtggaggcataattggcactggaatagatgaactgcagaagagggtgccaaaattgatctttaagaaaggaagcagaaagaatacag

SEQ ID NO: 730 - DNA, 550 bp, Homo sapiens
ggactgcaaggacgcagcttgtcagttctcgctcaaggtcacccactaccactgcacgcgcgagaactgcggctacaagttctgcgggcgcacgcacatgtacaagcacgcgcacaccacgaccgcgtggacaacctggtgctggacgacttcaagcgcttcaaggcctcactcagctgccacttcgccgactgccccttctcgggcaccagcacgcacttccactgcctgcgctgccgcttccgctgcaccgacagcaccaaggtcacggcgcatcgcaagcaccacggcaaacaggacgtgatcagygcgcggcttctgccagttcagctccagcgccgactgcgccgtgcccgactgcaagtaacaagctcaagtgctcgcasttccactgcamcttcccggtgccgcacacggtggtgggcatgtcgcagatggactcgcacaagcgcaagcacgagaagcaggawgccgcgagccgcggcagaggcccgcgcccgggcctcccatcagtctggacggctccctgtcgctgggcgccgagccgggc

SEQ ID NO: 731 - DNA, 530 bp, Homo sapiens
  SITE (466): n equals a,t,g, or c
  SITE (504): n equals a,t,g, or c
  SITE (520): n equals a,t,g, or c
  SITE (525): n equals a,t,g, or c
atacaggggagaaaccctatgaatgtaaagaatgtgggaaggcttttagtcgtggctatcaccttactcaacatcagaaaattcataccggtgagaaacctttcaaatgtaaggaatgtgggaaggccttcagttggggttcaagcctagttaagcatgagagagtccatactaatgagaagtcttatgaatgtaaagactgtgggaaggcctttggtagtggctatcaacttagtgttcatcagagatttcatactggtgagaagctttatcaacrtaaggaattcgggaagacctttacttgtggctcaaaacttgttcatgagagaactcatagtaatgataaaccctacaaatataacgaatgtggggaascctttctgtggacaacttactcaaatgagaaaattgatactgatgaaaccttatgattgaaagttgtaaaagaatattttgtgcgtgtgtntagaccaacttatcataattagaactcttactcttganaaaacctttgcgaatngtaanggttg

SEQ ID NO: 732 - DNA, 646 bp, Homo sapiens; identical to SEQ ID NO: 312
  SITE (551): n equals a,t,g, or c
  SITE (642): n equals a,t,g, or c

SEQ ID NO: 733 - DNA, 649 bp, Homo sapiens
  SITE (581): n equals a,t,g, or c
ggagtcgagtgggagtcggccggccggcacgggcagcgccgggaccccgcgggggacactgcagccggagcccgggaggggccgcgccgccaccgtctgaactaggatgtcccgacatgaaggtgtcagctgtgatgcatgtttaaaaggaaattttcgaggtcgcagatataagtgtttaatttgctacgattacgatctttgtgcatcttgttatgaaagtggtgcaacaacaacaaggcatacaactgaccacccaatgcagtgcatattaacaagggtagattttgatttatactatggtggggaagctttctctgtagagcagccacagtcttttacttgtccctattgtggaaaaatgggctatacggagacatctcttcaagaacatgttacttctgaacatgcagaaacatcaacagaagtgatttgtccaatatgtgcagcgttacctggaggcgatcctaatcatgtcacggatgactttgcagctcatcttacacttgaacacagagcccctagagatttagatgaatcgagtggtgttcgacatgtacgtaggaatgtttcaccctggncggggattagggaggtcctcgtgctcgtaggtcaaacatgcacttttactagcagttctactggtggg

SEQ ID NO: 734 - DNA, 1615 bp, Homo sapiens
  SITE (2): n equals a,t,g, or c
  SITE (14): n equals a,t,g, or c
  SITE (1580): n equals a,t,g, or c
  SITE (1581): n equals a,t,g, or c
  SITE (1582): n equals a,t,g, or c
  SITE (1583): n equals a,t,g, or c
  SITE (1584): n equals a,t,g, or c
gngcgacgcgttgncttcccaacgtcgccccggtttgacgcacacggcaccaaactgtttgatttaattttggatgagatcgttcttgcagcaagatgttaataagacaaaatctagccttagattgtaagcaaaagaaatcaaggtcaagatctggaagcaagaagaaaatgctaacattacctcatggtgctgacgaggtttacattctccgatgcaggttttgtggcctagtctttcgaggacccttgtctgttcaggaagactggattaagcacttacaacgacatattgtaaacgctaatcttccacggactggagctggcatggtggaagtcacgtcactacttaaaaagcctgcctccattacagaaacttcattttctctactaatggccgaagcagcttcatagaaccaggaaaccttttaaatagccagtttgaattggatgtaaatttgaaattctttttttttaagccacattaaattatctgtttataaatactaaagcaggaaaatggggggaaagtgaattacagtgacatcagagcaaattgaatacttaaaacagtaagtagtctatatattttatatagggtggaaratgtgtttttaaggyttatgaagttttgttggttaactgtgttcactcagtaaaagagcagtacatgtaagcagccattaataaactgttgcacatggatacttatagacagacttattggacaattatgttttttgcagtgttaccagaatcaaggctctgtttattccccacaagacttgcatagaaaaataagatattatattttgtttgtatgtatttagtgttttgtataataccaagaaccgctgactaaatttactcaaattagggcattaaatatcatgtacttcatagtttgagactgttcactcaaatagggcagagtactattctatctagatgtgtaagtgttttttttaaaatcacatggaacggttttttttatactaaaaagtggagggagatttgtttaaacaagtatttctaaaagaaatatgtacatagttctggaaattatttgtggtaaggaaatattctttactccagttgcatttctcagacaataaagtggtgcatccatgctacctcctactttgtcaacaaagatgctatttaccctttacatttttgtatcataatagattttaaaaatctaatgttctttattgcaagacattcttttgttaacaggtttgtttctttttaatgttttacctaaaatttgacatgcttacaggacaggtttgcctcttactttatttaacattgtagaaatgtaattaataaacaatgctcactacacagtttagaatagacgttctcatttatattatcttccaaatttgatcagttagcaaaacttaatacaccaattaaaatatttctacatatgagaatgkttacaatttaaattttagaacttggtttggatgtgattatatgtacsaaaatcgtgtaacactatgctcatgctaagaaccgacataacagaattactgaaataaatgtgctgtgaggaatggaaaaaaaaannnnnaaaaaaaaaaaggggggcccttttaaaggaa

SEQ ID NO: 735 - DNA, 1841 bp, Homo sapiens
  SITE (1841): n equals a,t,g, or c
ggttttcctcccttttaactcttactgaacacaaagtcacgcatagtaagagtcttgatactggaaactgccggatttgcaagatgcctctccagagtgaagaggagtttttagagcattgccaaatgcaccctgacttgaggaattccctgacaggctttcgctgcgtggtgtgcatgcagacagtgacctccaccttggaactcaaaatccatgggacgttccacatgcaaaagacagggaatgggtctgcagttcagaccacagggcggggcagcacgtccaaaaactgtataagtgcgcatcttgcctcaaagaattccgttccaagcaagatctggtgaaacttgatatcaatggcctgccatatggtctgtgtgccggctgcgtgaatctcagtaagagcgccagcccaggcattaacgtccctcccggcacgaatagaccaggcttgggccagaatgagaatctgagtgccattgaggggaaaggcaaggtggggggactgaagacacgctgctctagctgcaacgttaagtttgagtctgaaagtgaactccagaaccacatccaaaccatccaccgagagctcgtgccagacagcaacagcacacagttgaaaacgccccaagtatcaccaatgcccagaatcagtccctcccagtcggatgagaagaagacctatcaatgcatcaagtgtcagatggttttctacaatgaatgggatattcaggttcatgttgcaaatcacatgattgatgaaggactgaaccatgaatgcaaactctgcagccagacctttgactctcctgccaaactccagtgccacctgatagagcacagcttcgaagggatgggaggcaccttcaagtgtccagtctgctttacagtatttgttcaagcaaacaagttgcagcagcatattttctctgcccatggacaagaagacaagatctatgactgtacacaatgtccacagaagtttttcttccaaacagagctgcagaatcatacaatgacccaacacagcagttagtgcaagtacagtctctcaaggagaattgattttgtggcacaaaaagggaacatgttttactctttgcacgaaactttcattgttaatgtatattattcagaaacattgtattgtaccataaaacttgtattatcaaactgttggatgttcatgtgtttgaacttttgcgcaccggatagaccccttgtatataaagtgttgcacatgtattatgtcgtctgatactaaaatggtcttataaagacaagtggacttgggccctattcaggcaagattaaaaaaaaaaaaaagactatgaccaaaatggcttaagataaagtatttttaaggaagaaagattaaaaacaactgttatacatgagactatggttggacttccttttctttacacttaagcctagaatttctctttaggtatatcagcgcttaaatccaagactattttttattgctgaagattcttgcaaaccatgaagagatgttctcacagaacagaaccccacagctggataaggcccgtatatatatatttgtaagccttgcaatgtgacaggtagcatcactatatatgcaatagttgttatgtagactgtcaaagaatttttttttccctggatacatttgaagctttgagtgttcaaggttttccttaatgatttcacgcagccaaattcttgaatcagttgaactaacctgtatgttactgttattaatgtttactctgcagtctgaacctggagattactggaattgttttccaagaggaaataaattcagtttaccattaaaaaaaaaaaaaaaaaan

SEQ ID NO: 736 - DNA, 729 bp, Homo sapiens
  SITE (152): n equals a,t,g, or c
  SITE (551): n equals a,t,g, or c
  SITE (611): n equals a,t,g, or c
  SITE (661): n equals a,t,g, or c
gccagagaacacgctggaggagtccacggaaggctccagcgagttcagcgaactgaagcagatgctggtgcagcagaggaactgcacggaggggatcgtgatcaagacagaggaacaagacgaggaggaagaagaggaggaggaggatgagntgccgcagcacttgcaatcccttgggcagctgtccgggagatatgaggccagtatgtaccagaccccgctgcccggggagatgtcccccgagggcgaggagagccccccgcccctgcagctaggaaaccccgcagtgaaaaggctggccgccctccgtgcacggtgagcggcacctgagcgagaaccgcggggcctcgagccagcagcagcggaaccggcgcggcgagcgcccttcacatgcatggagtgcggcaagagcttccgcctgaagatcaacctcatcatccaccagcgcaaccacatcaaggaggggccctacgagtgcgccgaatgcgagatcagcttccggcacaagcaacagctcacgctgcaccagcgcatccaccgcgtgcgcgagngctggcgtcttcacccgaacgcgggcccacgttcaaccccaagcacgcgcttcaagccgngttcccaagttcacccagctttggttagcgggcggcgttgggccttaagnccttacaagttgccccgagttgcggacaaggcttttcagccacaagttccagcttgaccaaacaccag

SEQ ID NO: 737 - DNA, 1256 bp, Homo sapiens
tttttttttttttttttttttttttttttttttttgcctgcataaaatactgtttattttgtcctttaggaagactaaagtagtccagctcccctacagcccagtcttgcccccaccctgcactctgtcgccttagttcctggggaccaagcatctggcatttctcaagcagaccctctccttgttgctccttttcagtccctggagtctggcttcccaaagccaaagctggaggagagctcattgctgaggaagcagggttggagcctgaggagatgcagagggcctggacccctcgctggatcccagaggcccaggggcagagatgctgggacagggctctaggggaccactgggtgactcttgaggggctagaagcagggctgggtgacttttgctacggtgggctgcaacactgtctggcttctcaaagcgcttgccgcagaattcacaggggaagcgcaaggcagccaccgtctctgcatgcttgcgctggtgccagttcagggaagccttctggcggcaggtaaacccgcatatctcacactgcaggggtttttctccagtgtggatacgtctgtggatgacaaggttgctgctagtgcggaaagaccgggcgcagaactcacagatgtagtcccgggtgtcactgtgcagcttcatgtgctccttcaggtgtttcttaaagttgaaagacttcccacaggctggctctgggcaggagaaagacttctggtggatgtgctggtactttttgtggtgattcaaatactgccggttggagaagatccttccacagccagggaagtcacaaggcatcagctctcttttggcagctttcctaattctcttggggccaatttgtgcagtgtcctcatcccaggccggggttggagcagactgggcctgactcccagtgctacgggcagcaaagagggagcagagggcctcgagggagggccacatcccaggacgcccctgccctttctgtctcagccatcaggttacctggccagggcctcagtctgctgggccgcttgaggggtcctgctgagctgtggctgcaccctgacttctgcaggtggaggagctctggaactcaatgaggatgctgacaaggccggcacagcaagaggactggagagtgctgcaggggctggtggtgtctccccctctttaggtgtgcaggtgacaggggaaggcagtagtctgggggcatcaggctcactactgaaaggagaacaaagaggaagatg

SEQ ID NO: 738 - DNA, 3631 bp, Homo sapiens
  SITE (3614): n equals a,t,g, or c
  SITE (3625): n equals a,t,g, or c
tgcggccgctgcccgccttaatcgactgaagaagaaggagtacgtgatggggctggagagtcgagtccggggtctggcagccgagaaccaggagctgcgggccgagaatcgggagctgggcaaacgcgtacaggcactgcaggaggagagtcgctacctacgggcagtcttagccaacgagactggactggctcgcttgctgagccggctgagcggcgtgggactgcggctgaccacctcgctcttcagagactcgcccgccggtgaccacgactacgctctgccggtgggaaagcagaagcaggacctgctggaagaggacgactcggcgggaggagtctgtctccatgtggacaaggataaggtgtcggtggagttctgctcggcgtgcgcccggaaggcgtcgtcttctcttaaaatgtagggtcaagtaatctgctctttatccgcgtttacccctttcaactcccttacaccatgtcaaacttaccttagtgggacatcttcaccggacacatttcagaggagagaaaaaaagtaatattgaatcttaaagtgtttagctaaaagcatgaatgtgacacagtaaccaactcctaatgataacatgtgactattaaatctctctgacagtttcttttttaggtgatttccttcctgccaggctccgttgtaggggttacagaacagtcgttcccgcctcacaacctgtggatacagctgttggggcagaagagacgggaccagctgctggccacatttcctgctttattttaaaaggtagtataagaaatgaggaaaaagaggtaatatcagggcttctgctgttttttatttttaacatgttcataattaaaaagtattttccagcagtccaaagatgtaagttatcttacacataaaatgttttattttgttatttggttatgaaaatggaatccttgttcttgcacaactgtaaatgttttgttgctagataatacgatttgagacctgaattggtctttggtttccagtgcatcacagcatattttgtaaaatcatctactactgcacttgagcatgaatgggtagtagccaaactcacaaattggagtgatgaacctgcttatacctaagggcaggagcaagcccctcacaatgcagctgcatgggtttttagtgcctactgaattatatatatatatacatatatatatatatatataaaccaaaagtagttggaaagattatttgaaatgactaatttgtgctatctttatgaaatatgttaaatgtagcttttttgaaacagaagccttgaattgaaatttaactaatacttgaacattttgtatatatttctttgtatataattttgtgcagtaccaatgacaaaaatatggtgtcataataaaaccaggtttgttgatcttttagttatgggctcaaagaatttattcatctctaacatgatattggaaaataatggatgaaaataggaaaaatgattgttaatgctgactgtgggtcttaaaaggttctggaaagcagtaagttcatttttctaaaaactataacattctgttggagtattttcttccttacgtcaatacttttcctgcattatttgaaattgtgggctggggagaaacagtagtcaaagctttctgaattgagatactttgaaattccaagtgtagatttttagaatgtcattttataaatggcagtttttggaattacttgataagaacttttgaaaatggaaggattagtatggcctatttttaaagctgctttgttaggttccttatgttttattaactgtcttttctcagtttccatttcatttttttttttctagttttggtgacttagtgattttgtcattttttacatcaacttcatggtcttgtttttacatggtaattgcatgtacttaggatctatctaataggggctttaaataaatttggtcatatttatgtgtaagcacattttactgtaaatgtttgggtttctgaatttaaacagatctgtttatttcagtatgtagtaaacaatatcttaaagtgtccgattcactacttgttaattaaaaaagttatgattaatgtgaaactgttgtcttactatttttagaaaattgtgttctggatgattagcacrwggataaaggagatttctggaatataaaatggattgtttttgaaatttctaggtttggctctatttactgtaatggttgaaaacaatttagtatttgggtgacccttttgtttttcttctaaatgtgcctctggtaaaatacagaactagactaaagatgtagctttttaatatttgtcttttgatggtggcaggagttcatacattaattgaactaacacatcatattttgacctactatttctatcatattgacttactgtttctgcacttctttgaccagacttatcttaaaaagtccacttttgttaaaatgtagtcacacctctgatataatccaacaagaagtgttcaaaatattttaaatatttgtgcattttataatcactaaattaatctctctctcttctctttgaacagcttagcagtgtctgcaaaaacgaatcttttcctacaacctgttaactgactggactgttggtaacaaagtaattgtgagaaccatgtcggtcaaaaatttggcatctgctgaaaaaaatgaatgccattttcaagttcccaaattacttctatactgatttcactttccagaaatggagatatgaaaagattctctggaatccttgaaagacttaatagagatacatgagactaagttaatcttggaacaaaattatactttttttgtctttcatgggagtgatactcagttattgcatatctttacaaaattgtaacctttggagaattacagtatttcatcaagaaattagagtttttacataatcaagagcatattctatggaattaacatttagtggactagaattacataagcaggccatcagtgatcacaaggcatatgagtttgtatttatttcctggaacatgagagctaatttggagtacagacagacaccctgctgagtagaatataaaagttaatgtaaagttctgaactataaagagtagtccttttaaatagatgcattgatttgtatatctttgaaaaagttgattatgattaaatgtgtgggtagttaattacaatttagggtaacaaccaggatgtatggattcttgaggttttggcttcttgagctttctcttgagtacttgatactgttttctgaatattttgaggtttctaattaatggtatgctagtttctactgttttatataaaaatttatctagtgttgtataaggactttagtattgtggatgatgggagtggctttttgtggcatatggttgttttaattgaaatattttttcagtttattacaagtgtgaaaaaacactcaaaactctggattgttttatttcatttttgttggattatgttaatacattccttcacgtggtttagattgagtcattttatctcacttacttggaaatgtgcagctggatagaagagggattgggtaggagattggcttttacttccataataaatntacattggttnatggta

SEQ ID NO: 739 - DNA, 1030 bp, Homo sapiens
cgtccgtgctcatgcccacatcctgcccagagcaggcaccgtagccccagtgccctgtacaaccctgctgccctgtcaaaccctgttcctgaccgatgaggagaagcgtctgctggggcaggaaggggtttccctgccctctcacctgcccctcaccaaggcagaggagagggtcctcaagaaggtcaggaggaaaatccgtaacaagcagtcagctcaggacagtcggcggcggaagaaggagtacattgatgggctggagagcagggtggcagcctgttctgcacagaaccaagaattacagaaaaaagtccaggagctggagaggcacaacatctccttggtagctcagctccgccagctgcagacgctaattgctcaaacttccaacaaagctgcccagaccagcacttgtgttttgattcttcttttttccctggctctcatcatcctgcccagcttcagtccattccagagtcgaccagaagctgggtctgaggattaccagcctcaccgagtgacttccagaaatatcctgacccacaaggacgtaacagaaaatctggagacccaagtggtagagtccagactgagggagccacctggagccaaggatgcaaatggctcaacaaggacactgcttgagaagatgggagggaagccaagacccagtgggcgcatccggtccgtgctgcatgcagatgagatgtgagctggaacagaccttcctggcccacttcctgatcacaaggaatcctgggcttccttatggctttgcttcccactgggattcctacttaggtgtctgccctcaggggtccaaatcacttcaggacaccccaagagatgtcctttagtctctgcctgaggcctagtctgcatttgtttgcatatatgagagggtacctcaaatacttctgttatgtatctgtgattttatttcttctttgggtatagggttgaggggaaataagttttgagtgagaaataaacgttttagctgaaaaaaaaaaaaaaaaaaaaaaaaaaa

SEQ ID NO: 740 - DNA, 1859 bp, Homo sapiens
  SITE (22): n equals a,t,g, or c
  SITE (24): n equals a,t,g, or c
  SITE (261): n equals a,t,g, or c
  SITE (1805): n equals a,t,g, or c
  SITE (1807): n equals a,t,g, or c
  SITE (1842): n equals a,t,g, or c
tccatccaatggggcgtggaanancgggtttgactcmcgggggatttcccaaagtttccaccccattgamgtcaatgggagtttgttttggccccaaaatcaacggggacttttccaaaatgtcgtaacaacttccgsccccattgacgcaaatggccggtaggcgtgtacggtggaaggtctatataagcagagctcgtttagtaaccgtcagatcgcctggaaacgccatccacgctgttttgacctccatagaagacnccgggaccgatccagcctccggactctagcctaggccgcgggacggataacaatttcacacaggaaacagctatgaccactaggcttttgcaaaaagctatttaggtgacactatagaaggtacgcctgcaggtaccggtccggaattcccgggtcgacccacgcgtccgtgctcatgcccacatcctgcccagagcaggcaccgtagccccagtgccctgtacaaccctgctgccctgtcaaaccctgttcctgaccgatgaggagaagcgtctgctggggcaggaaggggtttccctgccctctcacctgcccctcaccaaggcagaggagagggtcctcaagaaggtcaggaggaaaatccgtaacaagcagtcagctcaggacagtcggcggcggaagaaggagtacattgatgggctggagagcagggtggcagcctgttctgcacagaaccaagaattacagaaaaaagtccaggagctggagaggcacaacatctccttggtagctcagctccgccagctgcagacgctaattgctcaaacttccaacaaagctgcccagaccagcacttgtgttttgattcttcttttttccctggctctcatcatcctgcccagcttcagtccattccagagtcgaccagaagctgggtctgaggattaccagcctcacsgagtgacttccagaaatatcctgacccacaaggacgtaacagaaaatctggagacccaagtggtagagtccagactgagggagccacctggagccaaggatgcaaatggctcaacaaggacactgcttgagaagatgggagggaagccaagacccagtgggcgcatccggtccgtgctgcatgcagatgagatgtgagctggaacagaccttcctggcccacttcctgatcacaaggaatcctgggcttccttatggctttgcttcccactgggattcctacttaggtgtctgccctcaggggtccaaatcacttcaggacaccccaagagatgtcctttagtctctgcctgaggcctagtctgcatttgtttgcatatatgagagggtacctcaaatacttctgttatgtatctgtgattttatttcttctttgggtatagggttgaggggaaataagttttgagtgagaaataaacgttttagctgaaaaaaaaaaaaaaaaaaaaaaaaaaagggcggccgctctagaggatccctcgaggggcccaagcttacgcgtgcatgcgacgtcatagctctctccctatagtgagtcgtattataagctaggcactggccgtcgttttacaacgtcgtgactgggagatctgctagcttgggatctttgtgaaggaaccttacttctgtggtgtgacataattggacaaactacctacagagatttaaagctctaaggtaaatataaaatttttaagtgtataatgggttaaactagctgcatatgcttgctgcttgagagttttgcttactgagtatgatttatgaaaatttatwcacaggagctagtgattctaattggttgngnattttagattcacaagtcccaagggttcatttcangcccccttaagtcctta

SEQ ID NO: 741 - DNA, 630 bp, Homo sapiens
  SITE (164): n equals a,t,g, or c
ctgggagtgggcagggtcagggacgggatcgagacactcagaacctgcaggctcaggaagaagagcgggagttttataatgccaggcgacgggagcatcgccagaggaatgaccgttggtggtggcggcagtgagtctcaggagttggttcctcggcctggtgnaacaacaaagaaaaagaggtgcccgctaaagaaaaaccaagctttgaactttctggggcacttcttgaggacaccaacactttccggggtgtagtcattaaatatagtgagcccccagaagcacgtatccccaaaaaacggtggcgtctctacccatttaaaaatgatgaggtgcttccagtcatgtacatacatcgacagagtgcgtacctactgggtcgacaccgccgcattgcagacattccaattgatcacccgtyttgttcaaagcagcatgcggtctttcaatatcggcttgtggaatatacccgtgctgatggcacagttggccgaagagtgaagccctacatcattgaccttggctcaggcaatggaaccttcttaaacaacaaacgtattgagccacagagatactatgaactaaaagaaaaggatgtactcaaatttgggttcagtagcagagggt

SEQ ID NO: 742 - DNA, 354 bp, Homo sapiens; identical to SEQ ID NO: 323
  SITE (289): n equals a,t,g, or c
  SITE (313): n equals a,t,g, or c

SEQ ID NO: 743 - DNA, 834 bp, Homo sapiens; identical to SEQ ID NO: 325
  SITE (770): n equals a,t,g, or c
  SITE (790): n equals a,t,g, or c
  SITE (794): n equals a,t,g, or c
  SITE (824): n equals a,t,g, or c

SEQ ID NO: 744 - DNA, 2016 bp, Homo sapiens
  SITE (348): n equals a,t,g, or c
  SITE (2004): n equals a,t,g, or c
  SITE (2006): n equals a,t,g, or c
  SITE (2014): n equals a,t,g, or c
ggtcactcgcagttgtgagcggccgcctctcccggggacaatgtgggactgagcggcccagccgccgtgccgccgccgccgccgccgcaggacagccccagcgagagccggccaggttgcagcgcggacacactcgcaggtcgctgtggccccagcctcgcctgacagaatgagcggctcggacgggggactggaggaggagccagagctcagcatcaccctcacgctgcggatgctgatgcacgggaaggaagtgggcagcatcatcgggaagaagggcgagactgtaaagcgaatccgggagcagagcagtgcccggatcaccatctccragggctcctgccctgnacgcatcaccaccatcaccgggtctacagcagctgtcttccatgcagtctccatgattgctttcaaactggatgaggacctttgtrctgctcctgcaaatggtggaaatgtctccaggcctccagtgaccctgcgccttgtcatccctgccagtcagtgtggctcactgattgggmaggctggcaccaagatcaaggagatccgagagactacgggtgcccaggtacaggtggcaggggacctctccccaactccacagagcgagctgttacggtatctggggtgcctgatgccatcatcctgtgtgtgcgccagatctgcgctgttatcctggagtccccacccaaaggagccactatcccctaccatccsarcctctccctasgtactgttcttctctctgccaaccagggcttctctgtccagggtcagtatggggctgtgaccccagctgaggtcaccaagctccagcagctctcaagccatgcggtcccctttgccacacccagcgtggtgccaggactggatcccggcacacagaccagctcacaggagttcttggttcccaacgatttgattggctgtgtgatcgggcgccagggcagcaagatcagcgagatccggcagatgtcaggggcacatatcaagatcgggaaccaagcagagggcgctggggagcggcatgtcaccatcactggctctccggtctccatcgccctggcccagtacctcatcactgcctgtytagagacggccaagtctacctctggggggacgcccagctcggcccccgcagacctgcctgcccccttctcgccacccctgacggccctgcccacagctccccctggcctgctgggcacaccctatgccatctccctctccaacttcatcggcctcaagcccatgcccttcttggctttaccacctgcttccccagggccgccgccgggcttggcgcctacactgccaagatggcagcagctaatgggagcaagaaggctgagcggcagaaattctccccctactgaggccagctgaggtacaggcaggggcaggcaggaccaccagcagggggctgcctctgcaccctacccgcccaaggagactccaccctggggtcccaaacgccgctaacgcccagacgcatggatgcaccccctaccctgcctccatctatgggagttctttctctcagagtgggggcagtttctggcccaggggtctgagctgcggcagccccagggcagggggccctacctcctcagctctgtgcttggatacagggagcagccaggagactccctagtgcccccaccatggcgggtgtcactcacgcactccccatcccttagggcttcctggcctactgcatccttgtgggagtcagggaggagggcccgttgggtagctggggccaggcttctctccccaccacctgcagatttcttgctgcttccactgatacccttttgactggaatgaactggctgggcttgtcagggggcaccccaaagagggggcactgccaggtagctgggggagtggcatggggcaggggcccagttctcagcagcagacactctgtacagttttttcaatccctgtttttgaataaatattctcagcgaccaaaaaaaaaaaaaaaaaaaaccncngggggggncc

SEQ ID NO: 745 - DNA, 1129 bp, Homo sapiens
actgtgaagggggccatcgagaattgttgcagggccgagcaggaaataatgaagaaagttcgggaggcctatgagaatgatgtggctgccatgagcctgcagtctcacctgatccctggcctgaacctggctgctgtaggtcttttcccagcttcatccagcgcagtcccgccgcctcccagcagcgttactggggctgctccctatagctcctttatgcaggctcccgagcaggagatggtgcaggtgtttatccccgcccaggcagtgggcgccatcatcggcaagaaggggcagcacatcaaacagctctcccggtttgccagcgcctccatcaagattgcaccacccgaaacacctgactccaaagttcgtatggktatcatyactggaccgccaraggcccaattcaaggctcagggaagaatctatggcaaactcaaggaggagaacttctttggtcccaaggaggaagtgaagctggagacccacatacgtgtgccagcatcagcagctggccgggtcattggcaaaggtggaaaaacggtgaacgagttgcagaatttgacggcagctgaggtggtagtaccaagagaccagacccctgatgagaacgaccaggtcatcgtgaaaatcatcggacatttctatgccagtcagatggctcaacggaagatccgagacatcctggcccaggttaagcagcagcatcagaagggacagagtaaccaggcccaggcacggaggaagtgaccagcccctccctgtcccttcgagtccaggacaacaacgggcagaaatcgagagtgtgctctccccggcaggcctgagaatgagtgggaatccgggacacctgggccgggctgtagatcaggtttgcccacttgattgagaaagatgttccagtgaggaaccctgatctctcagccccaaacacccacccaattggcccaacactgtctgcccctcggggtgtcagaaattctagcgcaaggcacttttaaacgtggattgtttaaagaagctctccaggccccaccaagagggtggatcacacctcagtgggaagaaaaataaaatttccttcaggttttaaaaaaaaaaaaaaaaaaaaaaaaaaaaaaaaaaa

SEQ ID NO: 746 - DNA, 466 bp, Homo sapiens
  SITE (1): n equals a,t,g, or c
  SITE (241): n equals a,t,g, or c
  SITE (400): n equals a,t,g, or c
  SITE (429): n equals a,t,g, or c
  SITE (451): n equals a,t,g, or c
nattaatatatgaatgaatattactgcttttaaattgtttttacccagtgcacaaaacgaaaatattttaaatacttttgtagttaaaatgctttaaattttagggaatattctttaacagttttcagtaattttaatcatctacttttctgttttatagtaaaatatttttacatgtgtctaggtcaaaaaaaaaaaaaatctcaagtgamcatggcatgttttargttcatgtatgtanttgaattgtttatatatttgtctgtattacgttccagaaactgttcaggttccattatcaaaacgagcaaaatttgttggacctggtggctataacttaaaaaaacttcaggctgaaacaggtgtaactattagtcaggtggatgaagaaacggtttcnggatttgcaccaacacccagtgctattcntgaggcaagagacttcattacnggaatctgcaaggat

SEQ ID NO: 747 - DNA, 145 bp, Homo sapiens
  SITE (72): n equals a,t,g, or c
agattgatttcccgctgcggatcctggtccccacccagtttgttggtgccatcatcggaaagaagggcttgnccataaagaacatcactaagcagacccagtcccgggtagatatccatagaaaaggaactctggagctgcagag

SEQ ID NO: 748 - DNA, 978 bp, Homo sapiens
  SITE (910): n equals a,t,g, or c
  SITE (927): n equals a,t,g, or c
  SITE (966): n equals a,t,g, or c
  SITE (978): n equals a,t,g, or c
gaaatttcctatcgcacgtctgctgcagcagtctcctgtttctcctcctaccttctccatttttctagtccctgcaggcataattggaatatcatttggagaaagtgtcatggaagttctgcgtccacagcttataagaattgatggccggaattacaggaagaatccagtccaagaacagacctatcaacatgaagaagatgaagaggacttctatcaaggctccatggagtgtgctgatgagccctgtgatgcctacgaggtggagcagaccccacaaggattccggtctactttgagggcccccagcttgctctataagcatatagttggaaagagaggggacactaggaagaaaatagaaatggagaccaaaacttctattagcattcctaaacctggacaagacggggaaattgtaatcactggccagcatcgaaatggtgtaatttcagcccgaacacggattgatgttcttttggacacttttcgaagaaagcagcccttcactcacttccttgcctttttcctcaatgaagttgaggttcaggaaggattcctgagattccaggaggaagtactggcgaagtgctccatggatcatggggttgacagcagcattttccagaatcctaaaaagcttcatctaactattgggatgttggtgcttttgagtgaggaagagatccagcagacatgtgagatgctacagcagtgtaaagaggaattcattaatgatatttctgggggtaaacccctagaagtkgagatggcagggatagaatacatgaatgatgatcctggcatggtggatgttctttacgccaaagtccatatgaaagatggctccaacaggtatatttctggaatgcttctttgtttcaatcaagaggtacctaaaaagcatccncaaaagtttggattccntttggatttcctttctttgagttcttattgtaaagaacntgttaattactn

SEQ ID NO: 749 - DNA, 1186 bp, Homo sapiens
  SITE (511): n equals a,t,g, or c
  SITE (774): n equals a,t,g, or c
  SITE (777): n equals a,t,g, or c
cccacgcgtccgcccacgcgtccgcccacgcgtccggcgccatcatcgggaagaagggggcacacatcaaacagctggcgagattcgcgggagcctctatcaagattgcccctgcggaaggcccagacgtcagcgaaaggatggtcatcatcaccgggccacgsaagcccagttcaaggcccagggacggatctttgggaaactgaaagaggaaaacttctttaaccccaaagaagaagtgaagctggaacccattatcagagtgccctcttccacagctggccgggtgattggcaaaggtggcaagaccgtgaacgaactgcagaacttaaccagtgcagaagtcatcgtgcctcgtgaccaaacgccagatgaaaatgaggaagtgatcgtcagaattatcgggcacttctttgctagccagactgcacagcgcaagatcagggaaattgttacaacaggtgaagcagcaggagcagaaataccctcagggagtcgcctcacagcgcanaagtgaggctcccacaggcaccagcaaaacaacggatgaatgtagcccttccaacacctgacagaatgagaccaaacgcagccagccagatcgggagcaaaccaaagaccatctgaggaatgagaagtctgcggaggcggccagggactctgccgaggccctgagaaccccaggggccgaggaggggcggggaaggtcagccaggtttgccagaaccaccgagccccgcctcccgccccccagggcttctgcaggcttcagcnatnccacttcaccatccactcggatctctcctgaactcccacgacgctatcccttttagttgaactaacataggtgaacgtgttcaaagccaagcaaaatgcacaccctttttctgtggcaaatcgtctctgtacatgtgtgtacatattagaaagggaagatgttaagatatgtggcctgtgggttacacagggtgcctgcagcggtaatatattttagaaataatatatcaaataactcaactaactccaatttttaatcaattattaatttttttttctttttaaagagraagcmggcttttctagactttaaagaataaagtctttgggaggtctcacggtgtagagaggagctttgaggccacccgcacaaaattcacccagagggaaatctcgtcggaaggacact

SEQ ID NO: 750 - DNA, 462 bp, Homo sapiens
  SITE (424): n equals a,t,g, or c
  SITE (435): n equals a,t,g, or c
gaataccgccgtggttacaagttctccacttacgcaacctggtggatccgtcaggcgatcacccgctctatcgcggatcaggcgcgcaccatccgtattccggtgcatatgattgagaccatcaacaagctcaaccgtatttctcgccagatgctgcaagagatgggccgtgaaccgacgccggaagaactggctgaacgtatgctgatgccggaagacaagatccgcaaagtgctgaagatcgccaaagagccaatctccatggaaacgccgatcggtgatgatgaagattcgcatctgggggatttcatcgaggataccaccctcgagctgccgctggattctgcgaccaccgaaagcctgcgtgcggcaacgcacgacgtgctggctggccttgaccgcgcgttgaagcaaaattcctgcntatgcttttcnaagggggggggcccgggtacccaattc

SEQ ID NO: 751 - DNA, 595 bp, Homo sapiens
  SITE (559): n equals a,t,g, or c
  SITE (569): n equals a,t,g, or c
  SITE (578): n equals a,t,g, or c
ggcagagcacagacttaatgattcctattcttgcctgggctggttcagtcctggccaggtgtttgtactagacgagtattgcgcccgaaatggagtccgggggtgtcaccgacatctctgctacctcagagacttgcttgaacgggcagaaaatggcgccatgatcgaccccacccttcttcactacagctttgccttctgtgcatcccatgtccatggraacaggcctgatggaattggaactgtgactgttgaagaaaaggaacgttttgaagaaatcaaagagaggctccgagttctgctagaaaatcagattacacattttaggtattgctttccatttggtcgacctgaaggtgctttgaaagctactctctcactcttggaaagggttttgatgaaagatattgttaccccagtgccacaagaggaggtaaaaacagttatccgtaaatgtctggaacagctggcgttagtcaactattctcggctctcagagtatgccaaaatcgaggaaaattgtaggccggtttaatcactcctggccaaaaagctttgnaggtacaatncgtcttggntggaactagttcattgg

SEQ ID NO: 752 - DNA, 1793 bp, Homo sapiens
  SITE (1738): n equals a,t,g, or c
  SITE (1783): n equals a,t,g, or c
  SITE (1786): n equals a,t,g, or c
  SITE (1788): n equals a,t,g, or c
ggggttggaaaacgaccaaaacgaaagtgtcttcagtggcatccattgctagcaaagaaacttcttgatttttcagaagaggaagaagaggaagacgaagaggaggatattgataaggttcaacttcttggggccgatggcctagagcaagatgttggtgaaactgaagatgatgaatcaccagagcagcgagcccggagaccaatgaatgcatttcttttattttgcaaacgccatcgctctcttgtacgtcaggaacaccccaggcttgataaccgaggtgctaccaagatactagctgattggtgggctgttcttgatccaaaggaaaagcagaaatacacagacatggccaaggagtataaggatgcatttatgaaagcaaatcctggctacaaatggtgtcctaccacaaacaagcctgtgaaatccccaacacccactgtcaatccacgaaagaaactttgggccttcccatctgactcttcaagagacttgccaagccccaagaaagcaaagactgaagaaatgcctcagcttaactttggaatggctgatcctactcaaatgggaggcctgagtatgctgctgttagctggagaacatgctcttggcacaccagaggtatcctctggcacatgcaggcctgatgtttcagaatctcctgaattacgtcagaagtcaccattgtttcagtttgccgagatatcttcaagtacgtcccactctgatgcttctacaaagcagtgtcaaacatctgccttgtttcagtttgcagagatttcttcaaacacttcgcagttgggtggtgctgagcctgtaaaacgctgtggaaagtctgcactctttcaactggcagagatgtgcctggcatcagaagggatgaaaatggaagaatcaaagctaataaaagcaaaagaatccgatggtggaagaattaaagaattagagaagggaaaggaagaaaaagaaattaaaatggagaaaacagatgaaactaggttacagaaggaagcagaatttgaaaaatcggctaaggaaaatttaagagattctaaggaattgagaaattttgaggcattgcaaatagatgacataatggctataaaaatggaagatcccaaagaaattagaaaggaagagttagaagaagatcacaaatgtagtcattttcctgatttttcttattctgccagtagcaagataataattagtgatgttcccagtagaaaggatcatatgtgccatcctcatggaattatgatcattgaggatcccgcagcattaaacaagccagaaaagctaaaaaagaaaaagaagaaaagcaaaatggatcgacatggaaatgataaatccacacccaagaagacttgcaaaaagaggcagtcttcggaatctgacattgagagcgtcatatataccattgaagccgtcgcaaaaggagactggggcatagagaaacttggagatacccctcgcaagaaggtccgcacatcctcaagtggcaagggaagcattttggatgccaagccaccaaagaaaaaagtgaaatcaagagagaagaaaatgtcaaaggagaaatcctcagacaccaccaaagagtcaagacctccagatttcattagtatttctgctagcaagaacatttctggtgagacaccagagggtataaaagcagaccattgacccctatggaagatgcactaccacccagcctatcaggacaggccaacctgangacagtgctgtcacagaaaatagaactgggggttccggaaattcnaangnctttc

SEQ ID NO: 753 - DNA, 265 bp, Homo sapiens
  SITE (261): n equals a,t,g, or c
  SITE (264): n equals a,t,g, or c
aaaaggagaagaagaaaaagaaggaaaaagagaaggagaagaaggagaaggaaagagagaaagagaagagagagcgagagaagagagaaaaagagaaggagaaacacaagcatgaaaaaataaaagtggaaccagtcgctctggccccgagtccagttatccccagattaactctccgagtcggtgctggccaagacaagattgtcatcagcaagtggtccctgcccccgaggccaagccggcgccctcgcagaacaagcngang

SEQ ID NO: 754 - DNA, 522 bp, Homo sapiens
  SITE (360): n equals a,t,g, or c
  SITE (468): n equals a,t,g, or c
  SITE (499): n equals a,t,g, or c
  SITE (505): n equals a,t,g, or c
ctctatttcaggacttgaatggacaaagtctttttcatcagacatcagaaggagacttggacgatttggctcaggatttaaaggacttgtaccataccccatcttttctgaacttttatccccttggtgaagatattgacattatttttaacttgaaaagcaccttcacagaacctgtcctgtggaggaaggaccaacaccatcaccgcgtggagcagctgaccctgaatggcctcctgcaggctcttcagagcccctgcatcattgaaggggaatctggcaaaggcaagtccaytctgctgcagcgcattgccatgctctggggctccggaaagtgcaaggctctgaccaagtttcaanttcgtcttctttcctcctgttcagcagggcccagggtgggactttttgaaaccctctgtgatcaattccgggtataccgggacattcaggaggcagacattcaggccnggtgctgaggtgcggcagagggttcttttcntcttgntggtacatggattcaag

SEQ ID NO: 755 - DNA, 567 bp, Homo sapiens
  SITE (414): n equals a,t,g, or c
  SITE (505): n equals a,t,g, or c
  SITE (532): n equals a,t,g, or c
caccagtgttagaagttttggtggggaagacaattgagcagtctcttctggaagtaatggaagaagaagagctggctaacctgcgggccagtcagcgtgagtatgaagaactacggaatagtgaacgtsctgaagttcaacgacttgaaagagcaagagaggcgacaccgagaagaaaaagaacggcgtaagaaacagcagtgggaaataatgcacaagcacaacgagacatcacaaaaaatcgccgcccgagcatttgcacagcgttacctggctgaccttctcccgtctgtttttggcagcctcagggatagtggctacttttatgatcccattgaaagagatattgagataggatttcttccatggctaatgaatgaagttgaaaaaaccatggaatatagcatggtgggnaagaacagtgcttgaacatgttgatccgtgagtggttgaaaaagaggcctgtgtatgtatgagccatggggaaagacacacatccagtctnccagaacccgaaggatgaagcctggtnggtccctgggagcaatgacagagttcactgggagg

SEQ ID NO: 756 - DNA, 1493 bp, Homo sapiens
  SITE (1135): n equals a,t,g, or c
  SITE (1492): n equals a,t,g, or c
gggaccgtgtaacwwctgaaattcagcttccttctcaaagtcctgtggaagaacaaagcccagcctmtttgtcttctctgcgttcacggagcacacaaatggaatcaactcgtgtttcascttctytccccagaagttaccggaaaactgatacagtcaggttaacatctgtggtcacaccaagaccctttggctctcagacaaggggaatctcatcactccccagatcttacacgatggatgatgcttggaagtataatggagatgttgaagacattaagagaactccaaacaatgtggtcagcacccctgcaccaagcccggacgcaagccaactggcttcaagcttatctagccagaaagaggtagcagcaacagaagaagatgtgacaaggctgccctctcctacatcccccttctcatctctttcccaagaccaggctgcyacttctaaagccacattgtcttccacatctggtcttgatttaatgtctgaatctggagaaggggaaatctccccacaaagagaagtctcaagatcccaggatcagttcagtgatatgagaatcagcataaaccagaccctgggaarartcttgactttgrgtttacaataaaatggkatattcctgggatcttcgtagcatcagttgaagcaggtagcccagcagaattttctcagctacaagtagatgatgaaattattgctattaacaacaccaagttttcatataacgattcaaaagagtgggaggaagccatggctaaggctcaagaaactggacacctagtgatggatgtgaggcgctatggaaaggctggttcacctgaaacaaagtggattgatgcaacttctggaatttacaactcagaaaaatcttcaaatctrtctgtaacaactgatttctccgaaagccttcagagttctaatattgaatccaaagaaatcaatggaattcatgatgaaagcaatgcttttgaatcaaaagcatctgaatccatttctttgaaaaacttaaaaaggcgatcacaattttttgaacaaggaagctctgattcggtggttcctgatcttccagttccaaccatcagtgccccgagtcgctgggtgtgggatcaagaggaggagcggaancggcaggagaggtggcagaaggagcaggaccgcctactgcaggaaaaatatcaacgtgagcaggagaaactgagggaagagtggcaaagggccaaacaggaggcagagagagagaattccaagtacttggatgaggaactgatggtccttaagctcaaacagcatgtctctggaccacacgggagccctctcttgccacctggggaagctacctgggagttgaagggttccaaktctttcagacagagaagggaacccgagcaggagaagaggagaggagacagccacaagaggaattgtttcctgaggaccaaggaaagaagccgcaggttcagttgttatttgagagagagaggna

SEQ ID NO: 757 - DNA, 656 bp, Homo sapiens
  SITE (19): n equals a,t,g, or c
  SITE (21): n equals a,t,g, or c
  SITE (72): n equals a,t,g, or c
tgcttcttgcacagtgcgntnggtggggggacttggagacagaagctggaaaatgggctgccccagcacaanactgtgcctctattctccatgtgcagcaacaaggcgggaggaagcactgaamcaacacaaamccctatctcaagaacttgttaacctccggggagagctagtcactgcttcaaccacctgtgagaaattagaaaaagccaggaatgagttacaaacagtgtatgaagcattcgtccagcagcaccaggctgaaaaaacagaacgagagaatcggcttaaagagttttacaccagggagtatgaaaagcttcgggacacttacattgaagaagcagagaagtacaaaatgcaattgcaagagcagtttgacaacttaaaytgcgcatgaaacctctaagttggaaattgaagctagccactcagagaaacttgaattgctaaagaaggcctatgaagcctccctttcagaaattaagaaaggccatgaaatagaaaagaaatcgcttgaagatttactttctgagaagcaggaatcgctagagaagcaaatcaatgatctgaagagtgaaaatgatgctttaaatgaaaaattgaaatcagaagaacaaaaaaaaaaaaaaaaaactcggggggggggcccggta

SEQ ID NO: 758 - DNA, 442 bp, Homo sapiens
  SITE (14): n equals a,t,g, or c
  SITE (17): n equals a,t,g, or c
ccggcccccccgtnttncccaaaaagagatgactgaacgcgagcagcgtgaacttaaaacactgctggatcgggccgcggattgccatggtcgcgtattgaccaactccgaaaccaacagcattaagaaagattacatcgrtaaattaatggttgagcgtgaggctgaagcgaaaaaagcccgccagttgaagaaaaagcaggcttataaaccggatcctgaagcgtcatttagctggtcagcaaatacgtcgacgcgcggcaggcgctaatccacaatcaacgcctgagattttcactcgtcagtgtgaacacaattttcccctcaccctaacccttttcccgaaggggcgaggggactgtccgggcacttttgggccgttttcatcagtctgaggcgttaatcagcgccccttctttttacgccccggcgaggtaaaacg

SEQ ID NO: 759 - DNA, 401 bp, Homo sapiens
  SITE (318): n equals a,t,g, or c
  SITE (346): n equals a,t,g, or c
  SITE (359): n equals a,t,g, or c
  SITE (400): n equals a,t,g, or c
ggaggaggaggcggcgggggtccaggaggccggccagcgcatggaggaggaggccatgaacggcgaccggactgagagcgactggcaggggctggtgagcgagtacctggtgtgtaagaggaagctgkagagtaagaaggaagccctgctgatcctctccaaggagctggacacctgtcaacaggaaagggaccagtacaaactcatggccaatcagctccgggagcgccaccagtcactgaagaagaagtaccgagagctgatttgatggagatccatcactttcctccttgaaaaaaggaaacaggctaattcttngcacaactattggagagattctccaggnccgaaattaaacncttggggagaaggaatttaaagaatttcagcaaaaggcttng

SEQ ID NO: 760 - DNA, 650 bp, Homo sapiens
gctcgtgccgaaaattcgctgcaagtacagcactttctagattgcycctggagtgtgggaacaacagtctctcctgtccacgttactgaatccagaaaaaagaaacaaattcaaggagcagcagccaaatacctacgttggctttaaagagttctctagaaagtgttcggaaaaatggagatccatctcaaagcatgaaaaggccaaatatgaagccctggccaaactcgacaaagcccgataccaggaagaaatgatgaattatgttggcaagaggaagaaacggagaaagcgggatccccaggcacccagacggcctccatcatccttcctactcttctgccaagaccactatgctcagctgaagagggagaacccgaactggtcggtggtgcaggtggccaaggccacagggaagatgtggtcaacagcgacagacctggagaagcacccttatgagcaaagagtggctctcctgagagctaagtacttcgaggaacttgaactctaccgtaaacaatgtaatgccaggaagaagtaccgaatgtcagctagaaaccggtgcagagggaaaagagtcaggcagagctgatggatccagtttgaaaaaacaaaatgccattcaaccgtaaaaaaaaaaaataataaaa

SEQ ID NO: 761 - DNA, 530 bp, Homo sapiens
  SITE (477): n equals a,t,g, or c
  SITE (483): n equals a,t,g, or c
  SITE (511): n equals a,t,g, or c
gccggtgctttgttctgtctgaggccaggaagtttgaccgcgctgccatgccgaaccgtaaggcsagccggaatgcttactatttcttcgtgcaggagaagatccccgaactacggcgacgaggcctgcctgtggctcgcgttgctgatgccatcccttactgctcctcagactgggcgcttctgagggaggaagaaaaggagaaatacgcagaaatggctcgagaatggagggccgctcagggaaaggaccctgggccctcagagaagcagaaacctgttttcacaccactgaggaggccaggcatgcttgtaccaaagcagaatgtttcacctccagatatgtcagctttgtctttaaaaggtgatcaagctctccttggaggcattttttattttttggaacatttttagccatggcgagctacctcctcattgtggaacagcgcttcctcccttgtggaaattggctgtgttnaagtantctcttccaagaaggtattatgggcagntttccacagttttataaaa

SEQ ID NO: 762 - DNA, 262 bp, Homo sapiens
aacaaagacagggaggacaagaggagcgccctgtcctgtgttatctccaaracagytcktyttytytctagtgaagatagagytcgtctcccagaagaattgcgaatcttgttcaaaaacgctatgaacttctagagcacaaaaagaggtgggcttctatgtctgaagaacaacggamagaatatttgaaaaagaaacgggaggagctgaaaaagaagttgaaggaaaaagccaaagaacgaagagagagagagagagagag

SEQ ID NO: 763 - DNA, 631 bp, Homo sapiens
  SITE (615): n equals a,t,g, or c
gcgattgagaggggcwgagggaattgtcctctgtggaagggactttcttttggccctaggcccttcctgcccctgtcgtcagcagagagatggaaaacttgatgactagctccaccctaccgcccctttttgcagatgaagacggttccaaggagagtaatgatctggctaccactgggttaaatcacccagaggttccatacagtagtggcgccacatcatccaccaacaatccagaatttgtggaggatctctctcaaggtcagttgcttcagagtgagtcttcaaatgcagcagaaggcaatgaacagaggcatgaagatgagcaacgaagtaaacgaggaggttggtccaaaggaagaaagaggaagaaacctcttcgagacagcaatgcacccaaatccccccttacaggatatgttcggttcatgaatgagcgtcgagaacaacttcgagcaaagagaccagaagtcccatttccagaaatcacaaggatgttaggcaatgaatggagtaaactgcctcctgaggaaaaacagcgctacttgatgaagcagacagagataaggagcgttacatgaaggaacctggaacagttttcgaaaacggggcctncaaggcttcgtaggaa

SEQ ID NO: 764 - DNA, 1498 bp, Homo sapiens
  SITE (1331): n equals a,t,g, or c
aacaggggagaggcccagcaatgaggaaatcatgcgtttttccaaattatttgaggatgagctgaccctggtacaacctgacacggccgcagctggtggccctgtgcaagctgctggagctacagtccatcggcaccaacaacttcctgcgcttccagcttaccatgcggctgcgctccataaaggcagacgacaagctgattgctgaggaaggggtggacagcctgaatgtcaaggagctgcaggcagcgtgtcgggcacgaggcatgcgggccctgggcgtcacggaagaccgcctgaggggtcagctgaagcagtggctggacctgcacctgcatcaggagatccccacatcgctgctcatcctgtcccgggccatgtacctcccggacaccctctctccagccgaccagctcaagtccacactgcagaccctcccagagattgtggcaaaggaagcacaggtgaaagtggccgaggtggagggcgagcaggtggacaacaaggccaagctggaggccacgctgcaggaggaggcggccatccagcaggagcaccgtgagaaggagctgcagaagcgctcggaggtggcgaaggattttgagcccgaacgtgtggtagctgctccccaaaggccggggaccgagccacagccagaaatgcctgacacagtcctgcagtcagagaccttgaaggacactgccccggtgctggagggcttgaaggaggaagagatyacgaaggaggaaatcgacatcctcagcgatgcctgctctaagctgcaggagcagaagaagtcactcaccaaggagaaggaggagctggagctgctgaaggaggatgtgcaggactacagcgaggacttgcaggagatcaagaaggaactttcaaagactggtgaagaaaartacgtggaagaatctaaagccagcaagagattgacaaaaagggtgcagcaaatgatcgggcagatcgatggcttgatctcgcagctggagatggaccagcaggctggcaagctggccccggccaacggcatgcccacgggggagaacgtcatcagtgtcgctgagctcatcaacgccatgaagcaagtcaagcacattcccgaaagcaagctcaccagcctggccgcagcactggatgaaaacaaggatggcaaggtcaacatcgacgacctcgtcaaggtgattgagctggtggacaaagaagatgttcacatctccaccagccaggtggctgagattgtagcaacactggaaaaagaggagaaggtggaggagaaggagaaggccaaagagaaggcagagaaggaggtcgcagaggtgaanagctagaaccmctggcctgggcacctgtcctcctgctgtgccgwcaccctgscaagggccgtgagggcgattgctttgtggtgattctcagtggctcatctaatattttggctggaataaatcagagacttccataatcaaaaaaaaaaaaaaaaaaaaaaaaaaaa

SEQ ID NO: 765 - DNA, 958 bp, Homo sapiens
cagcttaccttccatcacttcatccaggcggtagagcgtcaggttgatgcggtgatcggtaacgcgcccctgcgggaagttgtaagtacggttacggtcgctgcgatcgccactccccagcaggttacgacgggtagacgcttcggcctgttggcgttttgccatttcagcagcgtggatgcgagcaccgagaacagaaagtgctttagctttgtttttatgttgtgaacgttcgtcctgacattcaacaacaatcccggtcggcaagtgagtaatacgaattgccgaatcggtggtgttaacgtgctgaccacccgcccctgacgagcggaaagtatcaatgcgtaaatctgctgggttgatgtccggcagttctgcgtcaggcagttctggcattaccgcaacggtacaagcagaagtatgaatacgaccctgcgattccgtagcaggaacacgttgcacgcgatgaccgccggattcaaatttcagacgaccatacacaccatcaccgctaattttggcgaygaatsccgatctcccggcgatggtcaatgaaggcacttttcgcgctgacctgctcgaccgactggcttttgatgttgtacaactgccaccactgcgcgagcgcgaaagcgacataatgttgatggcagaatactttgccatcmagatgtgtcgggaaatcaagctgcctctgttcccggggtttacggagcgcgccagagaaacattgctgaattatcgttggccgggaaatattcgtgaattgaaaaacgtggtggaacgttcagtgtatcgccacggcaccagcgattatccgcttgatgacatcattattgatccctttaaacgcgtccgcctgaagacgtatcgccgtttcagaaaccacctcgcttccaacactgccgctggatttacgtgagtttcagatgcagcaggaaaaagagttgctgcaact

SEQ ID NO: 766 - DNA, 275 bp, Homo sapiens
  SITE (267): n equals a,t,g, or c
  SITE (275): n equals a,t,g, or c
attgtgagttatatggtgatgctgcgctggcggaagaatttattggtggcgatcgcacggacaatgaaaatggccgtctgagtcggctggaactggcacacggcggcacgctgtttcttgaaaagattgaatatctggcggtggagttacagtctgctttgcttcaggttatcaagcagggggggcccggtacccaattcgccctatagtgagtcgtattacaattcactggccgtcgttttacaacgtcgtgactgggaaaacccnaacaaagn

SEQ ID NO: 767 - DNA, 405 bp, Homo sapiens
  SITE (310): n equals a,t,g, or c
  SITE (397): n equals a,t,g, or c
  SITE (400): n equals a,t,g, or c
  SITE (404): n equals a,t,g, or c
ggcacgaggcggagcggcgcaagtggctcctgcgatggcggcggaagargaggctgcggcgggaggtaaagtgttgagagaggagaaccagtgcattgctcctgtggtttccagccgcgtgagtccagggacaagaccaacagctatggggtctttcagctcacacatgacagagtttccacgaaaacgcaaaggaagtrattcagacccatcccaagaagctcatagccaaactgaaaagcggaggagagataaaatgaataacctgattgaagaactgtctgcaatgatccctcagtcaaaccccatngcgcgtaaactggacaaacttacagttttaagaatggctgttcaacactttagatcttaaaaaggcttgacaaattcttatgttggnagnattnt

SEQ ID NO: 768 - DNA, 211 bp, Homo sapiens
gccgttttggccgcggaaaggctcaggacccaagaaggagcggagacgcactgagagcattaacagcgcattcgsgkagttgcgcgagtgcatccccaacgtgccggccgacaccaagctctccaagatcaagactctgcgcctarccaccagcttacatcgyctgacctgaatggacgtgctgggccaagggatgcacagtctgggcgat

SEQ ID NO: 769 - DNA, 454 bp, Homo sapiens
tgaaacgagacgacaccaaggatacctacaaattacsgcacagattaatagaaaagaaaagaagagaccgaattaatgaatgcattgctcagctgaaagatttactgcctgaacatctgaaattgacawctctgggacatctggagaaagctgtagtcttggaattaactttgaaacacttaaaagctttaaccgccttaaccgagcaacagcatcagaagataattgctttacagaatggggagcgatctctgaaatcgcccattcagtccgacttggatgcgttccactcgggatttcaaacatgcgccaaagaagtcttgcaatacctctcccggtttgagagctggacacccagggagccgcggtgtgtccagctgatcaaccacttgcacgccgtggccacccagttcttgcccaccccgcagctgttgactcaacaggtccctctgag

SEQ ID NO: 770 - DNA, 440 bp, Homo sapiens
  SITE (437): n equals a,t,g, or c
tgccagggcaaaatgacaatcgcccatgaggggagacaatcaagagtacaccaaagacagaagctgaagtggagcaggcagcaggcaacccaaggaaggacaccacctaaatcaagagtgctcatgaaggcagccatgaagcagagggagttttagacgtttgcccaaaaccatctttcaactttcatagtctacttatttattctcctaccccacttcaaacctggtaggagagggcagaaacctctgttagcaagctgggggagaaggaaaaacatcagagaggaacagaggagagaaggaccgtgccctccttaccaagcctgcagccagccctcgctcgggaaaggaaggagtctcagtgaagtgtactgattcctattttggactgacacttgtaattctgaattaagactgtgtttgtgaacttgcaatgncca

SEQ ID NO: 771 - DNA, 283 bp, Homo sapiens
  SITE (1): n equals a,t,g, or c
  SITE (109): n equals a,t,g, or c
nagcagctttgctcaggaccatcagctgcagaacatggacaaggaagatgcactgatctgttttgaggagcacatccgagctttggagagggaagaggaggaggaacgngagcgggcccggcttcgggagcgacgccaacaacgcaagaatcgggaggccttccagaccttcctggacgagstgcatgagacagggcagctgcactctatgtccacctggatggagctatatccagcagtcagcactgaagtccgctttgccaacatgctgggccagccgggt

SEQ ID NO: 772 - DNA, 2726 bp, Homo sapiens
gcgtcgcctaggaaacgaccgggcgaagcgactgccgcctcctccgagatcaaagccctgcagcagacccggaggctcctggcgaacgccagggagcggacgcgggtgcacaccatcagcgcagccttcgaggcgctcaggaagcaggtgccgtgctactcatatgggcagaagctgtccaaactggccatcctgaggatcgcctgtaactacatcctgtccctggcgcggctggctgaccttgactacagtgccgaccacagcaacctcagcttctccgagtgtgtgcagcgctgcacccgcaccctgcaggccgagggacgtgccaagaagcgcaagttgtgacttttcttcctcctctgcgagcccgaaggccacctcattagtgctcctgacactgcggaacttttctttctcaaggctgttgtcactggggatggttgaaagtgactattttcctaagaaaacagctggaggggacatgggagcaagaaggtgcttgggagcgcatctcagtgttgaggctcaaaacaggcagcgccatggcagagtcattccgccgtcaccctgaataaaccccatgcacacagacgagaacaatgtctcctcagagggagggtctgggagaccggacaccatgcagagacccccatcagctcatcagagagcttcacggagatgttctgggaggacaatcacattcataaatacgccggtgcctcggctctgccgctgactgcagcatgacatgaagccttttttaagaactggctgctgccgccaaagccttctgggatatgtctgcctggaacctgggcacctcctgggagcagtcactgggtggcctgtcaggggctgtggggtcctggggcagggccggcaactggaagccagccctggggaggaaaggagagaagggcaaggctgggctgctttcctcacagcccctggacactgagggaggagctgagttgggcctggggctgccatgtgtcagacagtggtgatgtgatggggggacacaggtcagtggcagggtactgggagtttcccctttcctttctcagttctttgcacccattttccatgggctgcctccccagatccagaagccccagcagcccctcaccccagcagtggaaaaagcccgtcattgacacggctgtgggtggccggctttgcaaaagcctcacatttggggctttggagggctttttgcatttcatctttacacaggctcctgcacctcattcctcttgccctcctctcagctttcctcccacttccagttagagagatggcagctctggcaggaccaaatattgatgtttatcacagttttagggccatttgtctcaccatctgaagggctcagcgcaggcccacgggatcctctctccttgagtgacctctgggggcaggtatctggtttggatgctggagctggtccctactcttcccttgggggccgtgcggccgggtgctcaagtgttttaacctcaggaccctgattagttatcatgaagctaccccaccagctcctgggtctgttcatggattagtggcataaaggacgtaatattgttttgcaaaatctgctctccctcccatgtctcctgcccaagaagttggtcttcgtggggccaaaggcaaggaggacccgaggaaggaagaggaaccactgtccccagcccctggtatggcatggcgtcagcctagtgaccagaaattgcttttgaactctgaggcttccagaggacaagaggaagaggaggacagggctgccctgcccactgctcagccttgagccctgcacctggcacagtgcgaggcctcagacagggtgtcagcaggccctggctccccacatcccatccttaaacaggccatgccctttctacctgccccagcagaccagaaagcagtttccatgggaaacaacaaaccttccttgtgctcccaggataagtgtttctagagggcgaagtcgggagccattctctcctttaacatcttgccacctctgcccagaattcacagccaccggcgcctgtcttagctgccctggctgtcagccccaccagagcccctcctggctgctctgctgaaagctggtcagactgcctcactccatcccctacttagctcccctaaggcctagggggctccctacaggccaagggatgaggccagactcaatagaacacctgataggccccccaagtgacctggccctggccggtcactccctatgtcccaatttacaccccagcagcacagaactccttgctcaaaggggctatttttggcctctgtgctcatgccatcccttctgcctggaatgcccttctccactgtctgcctggctaactcctgctcattctggaaggctcagctcctcctgaaagccctccctgaccccaaccccagctccttcctcagggtgtcgtagcacagggatgcttttggtctaattcaggagagcatcatgtgatatgcttttaaagtaatgagttaaaatgttagacaatatgaaactctattatgtgatatattagatttcatgtcattacattgtattatattatatttttaggtggtatgctatgtgacataggatgcgatgtgatattacatcccatgacactatgttacacggtgttggattaaatgcctgtgtctctggctagactgtgaaaaaaaaaaaaaaaaaaaaaaaaaaaaaa

SEQ ID NO: 773 - DNA, 321 bp, Homo sapiens
gcgtcgcctaggaaacgaccgggcgaagcgactgccgcctcctccgagatcaaagccctgcagcagacccggaggctcctggcgaacgccagggagcggacgcgggtgcacaccatcagcgcagccttcgaggcgctcaggaagcaggtgccgtgctactcatatgggcagaagctgtccaaactggccatcctgaggatcgcytgtaactacatcctgtccctggcgcggctggctgaccttgactacagtgccgaccacagcaacctcagcttctccgartgtgtgcagcgctgcacccgcaccctgcaggccgaagga

SEQ ID NO: 774 - DNA, 1753 bp, Homo sapiens
  SITE (782): n equals a,t,g, or c
  SITE (1708): n equals a,t,g, or c
  SITE (1712): n equals a,t,g, or c
  SITE (1723): n equals a,t,g, or c
gctcgaaattaaccctcctaaagggaacaaaagctggagctccaccgcggtggcggccgctctagaactagtggatcccccgggctgcaggaattckgcacgaggctgcggcgggaggaaaactgaaaaggaaagaactggcctactgaaaagtttcatcattttctattgggcttcccctccaaggtctgtgatgaggcatggacagtgaacacaggcagcctgtcttacacataggtaaagtgttgagagaggagaaccagtgcattgctcctgtggtttccagccgcgtgagtccagggacaagaccaacagctatggggtctttcagctcacacatgacagagtttccacgaaaacgcaaaggaagtgattcagacccatcccaagaagctcatagccaaactgaaaagcggaggagagataaaatgaataacctgattgaagaactgtctgcaatgatccctcagtgcaaccccatggcgcgtaaactggacaaacttacagttttaagaatggctgttcaacacttgagatctttaaaaggcttgacaaattcttatgtgggaagtaattatagaccatcatttcttcaggataatgagctcagacatttaatccttaagactgcagaaggcttcttatttgtggttggatgtgaaagaggaaaaattctcttcgtttctaagtcagtctccaaaatacttaattatgatcaggctaktttgactggacaaagcttatttgacttcttacatccaaaagatgttgccaaagtaaanggaacaactttcttcttttgatatttcaccaagagaaaagctaatagatgccaaaactggtttgcaagttcacagtaatctccacgctggwarggacacgtgtgtattctggctcaagacgatcttttttctgtcggataaagagttgtaaaatctctgtcaaagaagagcatggatgcttacccaactcaaagaagaaagagcacagaaaattctatactatccattgcactggttacttgagaagctggcctccaaatattgttggaatggaagaaagaaaggaacagtaagaaagacarcagtarttttacctgccttgtggccattggaagattacmgccatatattgttccmcagaacagkggagagattaatgtgaaaccwactgaatttataacccggtttgcagtgaatggaaaatttgtctatgtgacaatgatgacacagccatggctgcatttatgaattacttagaagcagaggggggcctgggagaccctggggacttcagtgacatccagtggaccctctagcctttgatttttaactccaaaaatgagaaacattttaaagcatttcatttacgaaaaactgtctcaactattcttaagtactgtattgatattgtttgtatcttttattaatgttctaccactttttatagatttgcatcttcctgtcacagggatgtggggaaatacgttttcctcccaagagaaccaagtttattatagactcctttattcagtgaaatggcttataatccactagttgccatatttttgctaaaatatttctaaccaagaatactacttacatattgttttggctttgttttatttttgatgcagttttttttagttgaggtaatgtaatatattgatgttttcctttgtgtctaagatccatttataatagtaggnttgntataatttggnacattttccattccctggcggaatttccct

SEQ ID NO: 775 - DNA, 526 bp, Homo sapiens
  SITE (471): n equals a,t,g, or c
tcagtgtgtgcggaacaagcagccgagagcggagaggcgccgctgtagttaactcctccctgcccgccgcgccgaccctccccaggaacccccagggagccagcatgaagcgagctcaccccgagtacagctcctcggacagcgagctggacgagaccatcgaggtggagaaggagagtgcggacgagaatggaaacttgagttcggctctaggttccatgtccccaactacatcttcccagattttggccagaaaaagacggagaggaataattgagaagcgccgacgagaccggatcaataacagtttgtctgagctgagaaggctggtacccagtgcttttgagaagcagggatctgctaagctagaaaaagccgagatcctgcagatgaccgtggatcacctgaaaatgctgcatacggcaggagggaaaggktactttgacgcgcacgcccttgctatggactatnggagtttgggatttcgggaatgcctggcataagttgcscgttatttgacattatt

SEQ ID NO: 776 - DNA, 489 bp, Homo sapiens
ggttgctcaaccttgaagaccacagggcccacacacrgtcttcaaacaccctcctgtactcacatctctgcagatgaaaaascagctgaaaggagtcgaaaggctccaccaattcctctaaaactgaagcctgattactggagtgacaaactacagaaagaagsagaagcgtttgcttattatcgccggacacacactgccaatgagcggcggcggcgtggtgaaatgagggatctctttgagaaattaaagatcacattgggattacttcattcttccaaggtttccaaaagtctcattcttactcgagccttcagtgaaattcagggactaacagatcaggcagacaaattgataggacagaaaaatctcctgactcgaaaacggaatattctgatacggaaagtatcgtctctttcaggtaagacagaagaagtggtcctgaagaagctagagtatatttatgcaaaacagcaagcactagaggca

SEQ ID NO: 777 - DNA, 618 bp, Homo sapiens
  SITE (610): n equals a,t,g, or c
aatttctcttttctctcacaagcccatccatccatttcaatgacaaagatggcgaccacgaccaaagcttttacatcacagatgacccggatgacaacgccgaccgcagcgaaacgtccagcatagcggacccgagctccccaaatccattcggatccagcaatccctttaaatccaaaagtaatgatcggccgggtcacaagcgttttcgaacgcaaatgagcaatcttcaactcaaggttctcaaggcttgctttagtgactaccgaactccaaccatgcaagaatgtgaaatgttagggaatgagattggtctgcccaaacgcgtagtccaggtgtggttccaaaatgcaagggcaaaggaaaagaaatttaaaattaacatagggaagcctttcatgatcaatcaaggcggaacggaaggcaccaaaccagagtgtaccctctgcggggtgaagtactctgcccgcttgtccatcagagatcacattttctccaaacagcacatttcaaaagtgaggagaccgttggcagtcagctcgatcggagaagattcttgctccgacacgttcgcagtgtggaagcagacttgtcgataagaagttaactncttggttt

SEQ ID NO: 778 - DNA, 304 bp, Homo sapiens
ccgggagaggacgacgttcactcgggcgcagctagatgtgctggaagcactgwttgccaagacccggtacccagacatmttcatgcgagaggaggtggyactgaaaatcaacttgcccgagtcgagggtgcaggtatggtttaagaatcgaagagctaagtgccgccaacaacagcaacaacagcagaatggaggtcaaaacaaagtgagacctgccaaaaagaagacatctccagctcgggaagtgagttcagagagtggaacaagtggccaattcactcccccctctagcacctcagtcccg

SEQ ID NO: 779 - DNA, 1095 bp, Homo sapiens
  SITE (151): n equals a,t,g, or c
  SITE (481): n equals a,t,g, or c
gcatgcacgcgtacgtaagcttggatcctctagagcggccgccctttttttttttttttttttttttttttttttttttttttttttgcggcagagtctcgactttattctcaaatattgggaaagtagcctggacaacatagcgggaccncctctctaaaaaaaaaagttttttaaattagcctggggtggtgctgcacgcctgtaatgccagctagtcgggaggttgaggcaggaggatcgcttgagcccaggaggtcgcgactgcagtgagcggtgatcgctccacggcactccagcctgggcgacagagcgaggccctgtctcagacaacaaaacaaacttacaaaaaaaccgggaaaggtgagcgtctggactgtgggccgraagaggcccaagtggacctccttcctccaccctggaactctggccagagcagagcgcgaggtgagragtccagggccccagagcccaggattgncggcggctttgtcttcaatcgtccacctgtatctcctcgtctgacaggtggggccgggagtcagggccggcagggccgaggcagaggccgggatctggagcgccctcgggcagtgctaagctgcacaggacttccggggacaacgcgcgtagcgaggcgacgtcggcgcgcatctcctccacatcgcgcttgagcttggctcgccggttctggaaccaagtgaccacctgcgcgttggccaggccgagtcgcgtagctagcccgtctcgctcggacggcgccaggtacttctggaagacgaagcgccgctccagctccagcacctgttgcgcggtgaacgcagtgcgtgacttgcgccgtttgcggccgaagggaccagggcccagcgcgtccggacctgcccgcccttctggggtggagcctttgaggcttttaggagcctcaggctgagcaggctataagttgagggtgacatcagaggcgagtaagagtcagggcagccgacccagcgtggtggtggtaacaggacttagatcatgcccttcccggacgcgtgggtcgacccgggaattccggaccggtacctgcaggcgtaccagctttccctatagtag

SEQ ID NO: 780 - DNA, 905 bp, Homo sapiens
  SITE (168): n equals a,t,g, or c
  SITE (190): n equals a,t,g, or c
  SITE (775): n equals a,t,g, or c
  SITE (800): n equals a,t,g, or c
  SITE (836): n equals a,t,g, or c
  SITE (849): n equals a,t,g, or c
  SITE (875): n equals a,t,g, or c
  SITE (892): n equals a,t,g, or c
  SITE (900): n equals a,t,g, or c
aattcggcacgagctaccaatcaaaatgggagggagaataatgagcgattatctacatccaatggaaagatgtcaccaactcgctaccatgcaaacagcatgggtcagaggtcatacagttttgaagcctcagaagaggacctagatgtagatgataaagtggaaganttaatgaggagggacagcagtntgataaaagaggaaatcaaagcctttcttgccaatcggaggatttcccaagcagttgttgcacaggtaacaggtatcagtcagagccggatctctcattggctgttgcagcagggatcagacctgagtgaacagaagaaaagagcattttaccgatggtatcaacttgagaagacaaaccctggcgctacactaagtatgwgaccagcccccattccaatagaggaccctgaatggagacaaacgcctcccccagtctctgccacatctggtactttccgactgygacgagggagtcgatttacctggagaaaggagtgcctggctgttatggaaagttacttcaatgagaatcaatacccagatgaagcaaagagggaagaaattgcaaacgcttgcaatgcagttatacagaagccaggcaaaaagctgtcagatctggaaagagttacctccctgaaagtatataattggtttgctaacagaaggaaggagatcaagaggagagccaatattgcaatcctggagagtcatgggatagatgtgcagagtccaggaggccactcaaacagtgatgatgtcgacnggaatgactactctgagcaagcttnctttacaagctttattggttaacacattgagctgcncggggaggacagntttacactagttctaggatgacagtnccaagccatatggcccnccaagaanccctt

SEQ ID NO: 781 - DNA, 587 bp, Homo sapiens
gcggccgctccaacatcaggcgctccagccatggcgcgttcgctcgyccacgacaccgtgktctastgcctgwktgtataccaggtaaaaataagccccacacctcagctgggggcagcatcaagcgcagaaggccatgttggccaaggagctccaggcctcatgggtaatatgaaccctgagggcggtgtgaaccacgagaacggcatgaaccgcgatggcggcatgatccccgagggcggcggtggaaaccaggagcctcggcagcagccgcagcccccgccggaggagccggcccaggcggccatggagggtccgcagcccgagaacatgcagccacgaactcggcgcacgaagttcacgctgttgcaggtggaggagctggaaagtgttttccgacacactcaataccctgatgtgcccacaagaagggaacttgccgaaaacttaggtgtgactgaagacaaagwgcgggtttggtttaagaataaaagggccagatgtaggcgacatcagagagaattaatgctcgccaatgaactacgtgctgacccagacgactgtgtctacatcgtcgtggactagcc

SEQ ID NO: 782 - DNA, 713 bp, Homo sapiens
  SITE (708): n equals a,t,g, or c
  SITE (713): n equals a,t,g, or c
cgcagctttgcgttccctgtgcgccggaagtgatcccctgcgtggctgggctgctcgggttagatcgtcaggaaaagcctaaagattagactgtaagaaaagaaaatagaagccatgtttcgaagacctgtattacaggtacttcgtcagtttgtaagacatgagtccgaaacaactaccagtttggttcttgaaagatccctgaatcgtgtgcacttacttgggcgagtgggtcaggaccctgtcttgagacaggtggaaggaaaaaatccagtcacaatattttctctagcaactaatgagatgtggcgatcaggggatagtgaagtttaccaactgggtgatgtcagtcaaaagacaacatggcacagaatatcagtattccggccaggcctcagagacgtggcatatcaatatgtgaaaaaggggtctcgaatttatttggaagggaaaatagactatggtgaatacatggataaaaataatgtgaggcgacaagcaacaacaatcatagctgataatattatatttctgagtgaccagacgaaagagaaggagtagaaaggatgattcttctttggccatcatttggtacagtctcatttccaagtcatgtataatctttatggcttccaaggacaagaattaaaatactcttttacgtaaaaaaaaaaaaaaaaaaaaaaaaaaaaaaaaaaaaaaaaaaanaaaan

SEQ ID NO: 783 - DNA, 245 bp, Homo sapiens
  SITE (236): n equals a,t,g, or c
  SITE (244): n equals a,t,g, or c
cggatctaagtacaattaaacaaagactggaaaacaggttttacaggcgggtttcttccctaatgtgggaagttcgatatatagagcataatacacgaacatttaatgagcctggaagccctattgtgaaatctgctaaattcgtgactgatcttcttctacattttataaaggatcagacttgttataacataattccactttataaatccaatgaagaaggaaagttttgcccngaattccng

SEQ ID NO: 784 - DNA, 2138 bp, Homo sapiens
  SITE (148): n equals a,t,g, or c
  SITE (155): n equals a,t,g, or c
  SITE (164): n equals a,t,g, or c
  SITE (172): n equals a,t,g, or c
ctgttgaaagaaacgggccccaaatcgaaagtttaccctggactttcatgtttttaaagatggagttcgacagattcctatagaaagcattcctgggattacacttctcattcagtgtttcactttgttgacgtataggagagacagnctggaanccgagtggnaaagaganaagtaaagagcccagagaccctgaccagctttacagcacgctcaagagcatcctccagcaggtgaagagccatcaaagcgcttggcccttcatggaacctgtgaagagaacagaagctccaggatattatgaagttataaggttccccatggatctgaaaaccatgagtgaacgcctcaagaataggtactacgtgtctaagaaattattcatggcagacttacagcgagtctttaccaattgcaaagagtacaacccccctgagagtgaatactacaaatgtgccaatatcctggagaaattcttcttcagtaaaattaaggaagctggattaattgacaagtgattttttttcccctctgcttcttagaaactcaccaagcagtgtgcctaaagcaaggtggtttagttttttacaaagaattggacatgatgtattgaagagacttgtaaatgtaataattagcacttttgaaaaaacaaaaaacctccttttarcttttcagatatgtatttaaattgaagycatrggacatttttattttatggaatagattttaawctatttactactattaaggtagattttctatggcatgtccattagctatttcatgatagatgattaggggtttcctcaaaacctgtgtgtgaggaaattgcacacagtagcaaaatttggggaaatccataacattttcagaccatgaatgaatgtttccatttttttctaatggaatgtgagagtttatttttattttattctgaaggactttaaggaagggatacatgattttaaaaaagcctgtaagaggtgaaatatgtgatgtttgaagtctctttatagactttttatatatattttttaaaacactcatctagatgaggtgctttgagcagttctgaaaaatgcagttccaggaaagcaactgctttggttcctaaggaagaaattctaaataatgcaaacttttaaaataagcatctaggtttttgataattctgtctacttacaacaaacttgttagtacataaccactattttaataattattttctctacacaaatgtgtaatatcatatttgactttgcttatgcaggccataagttccaaaagataatttccctgcccacaaaggcataaacttgaaaacacatgagattgaatcaacatgctttaataggaaaagatgtatggtctatatatgtatcaatctggtgaatcctcgttctaataaaggttctttttcttttctatgatacacacagccacgctgataatatgcaaatgaacattttcctttatgtctctccagataatgtttattgtctgaggtaaattaaattcccaccagggtttgctgtcagtattttaacacccacattagtatatgcgtccagggtcataaccccctaaaatccatcatgcaaccttattaatctgtcttgggattccagtttagtgcttggatttatttcctgattacactacatagaaaagtgagacatctgccattcccaactctgggaaaaccaactaatatacaaccatataaatgaaggccatcttgatggtctcaacactaatttttatgatgcaaatttatacactgatttttgtaaaggacaaagttttaaaagcgtatttaacttgatgttttctatcagcataaataaaatggtcatgaatagtcattaaaaacagttgccagtgataatctgcatgaaggaaaaagaaccctgcaaatggctattgagttggaagtattgtttttgatatgtaagagatattcagaatgctcacactgaaaatgcctcaactttttaaagtgtaagaaaccaccatgagtggtgtctagatttctaatgaagaatcatgatacagtttggattaagtatcttggactggttttaaacagtgctttgtacctcggccgcgaccacgctaagccgaattccagcacg

SEQ ID NO: 785 - DNA, 424 bp, Homo sapiens
tctccaaccccagcaagcccggccgcaagaccaaccagctgcagtacatgcagaatgtggtggtgaagacgctctggaaacaccagttcgcctggcccttctaccagcccgtggacgcaatcaaattgaacctgccggattatcataaaataattaaaaacccaatggatatggggactattaagaagagactagaaaataattattattggagtgcaagcgaatgtatgcaggacttcaacaccatgtttacaaattgttacatttataacaagcccacagatgacatagtgctaatggcccaagctttagagaaaatttttctacaaaaagtggcccagatgccccaagaggaagttgaaattattaccccctgctccaaaggggcaaaggtcggaagccggctgcgggagcccagagcgcc

SEQ ID NO: 786 - DNA, 997 bp, Homo sapiens
ccagcttacttgaaggagatcctggagcagcttcttgaagccatagttgtagctacaaatccatcaggacgtctcattagcgaactttttcagaaactgccttctaaagtgcaatatccagattattatgcaataattaaggagcctatagatctcaagaccattgcccagaggatacagaatggaagctacaaaagtattcatgcaatggccaaagatatagatctcctcgcaaaaaatgccaaaacttataatgagcctggctctcaagtattcaaggatgcaaattcaattaaaaaaatattytatatgaaaaaggctgaaattgaacatcatgaaatggctaagtcaagtcttcgaatgaggactccatccaaccttgctgcagccagactgacaggtccttcacacagtaaaggcagccttggtgaagagagaaatcccactagcaagtattaccgtaataaaagagcagtacaaggaggtcgtttatcagcaattacaatggcacttcaatatggctcagaaagtgaagaagatgctgctttagctgctgcacgctatgaagagggagagtcagaagcagaaagcatcacttcctttatggatgtttcaaatcctttttatcagctttatgacacagttaggagttgtcggaataaccaagggcagctaatagctgaacctttttaccatttgccttcaaagaaaaaataccctgattattaccagcaaattaaaatgcccatatcactacaacagatccgaacaaaactgaagaatcaagaatatgaaactttagatcatttggagtgtgatctgaatttaatgtttgaaaatgccaaacgctataatgtgcccaattcagccatctacaagcgagttctaaaattgcagcaagttatgcaggcaaagaagaaagagcttgccaggagagacgatatcgaggacggagacagcatgatctcttcagccacctctgatactggtwgtgcca

SEQ ID NO: 787 - DNA, 1829 bp, Homo sapiens
  SITE (1823): n equals a,t,g, or c
tgatagtctgtttcaatgctacaatgttcaatgaagaagaaagttttgtctgattctgaggatgaagagaaagatgctgatgtgccaggaacttctactcgaaaaaggaaggaccatcagcctagaagaagattacgtaatagagcccagtcttacgatattcaagcatggaagaaacagtgtgaagaattgttaaatctcatatttcaatgtgaagattcagagcctttccgtcagccggtagatctccttgaatatccagactacagagacatcattgacactccaatggattttgctaccgttagagaaactttagaggctgggaattatgagtcaccaatggagttatgtaaagatgtcagacttattttcagtaattccaaagcatatacaccaagcaaaagatcaaggatttacagcatgagtttgcgcctgtctgctttctttgaagaacacattagttcagttttatcagattataaatctgctcttcgttttcataaaagaaataccataaccaaaaggaggaagaaaagaaacagaagcagctctgtttccagtagtgctgcatcaagccctgaaaggaaaaaaaggatcttaaaaccccagctaaaatcagaaagctctacctctgcattctctacacctacacgatcaataccgccaagacacaatgctgctcagataaacggtaaaacagaatctagttctgtggttcgaaccagaagcaaccgagtggttgtagatccagttgtcactgagcaaccatctacttcttcagctgcaaagacttttattacaaaagctaatgcatctgcaataccagggaaaacaatactagagaattctgtgaaacattccaaagctttgaatactctttccagtcctggtcaatccagttttagtcatggcactaggaataattctgcaaaagaaaacatggaaaaggaaaagccagtcaaacgtaaaatgaagtcatctgtactcccaaaggcgtccactctttcaaagtcatcagctgtcattgagcaaggagattgtaagaacaacgctcttgtaccaggaaccattcaagtaaatggccatggaggacagccatcaaaacttgtgaagaggggacctggaaggaaacctaaagtagaagttaataccaatagtggtgaaattatacacaagaaaaggggtagaaagcccaaaaagctacagtatgcaaagccagaagatttagagcaaaataatgtgcatcccatcagagatgaagtacttccttcttcaacatgcaattttctttctgaaactaataatgtaaaggaagatttgttacagaaaaagaatcgtggaggtaggaagcccaaaaggaagatgaagacacaaaaattagatgcagatctcctagtccctgcaagtgtcaaagtgttaaggagaagtaaccgaaaaaagatagatgatcctatagatgaggaagaagagtttgaagaactcaaaggctctgaaccccacatgagaactagaaatcaaggtcgaaggacagctttctataatgaggatgactctgaagaggagcaaaggcagctgttgttcgaagacacctctttaacttttggaacttctagtagaggacgagtccgaaagttgactgaaaaagcaaaagctaatttaattggttggtaacttgtaccaaaatattttacttcaaaatctataaagcaggtacagttaaggaataagtagaactaaggcttctgcttccttgctgctgtggtggagtagggaatgttatgatttgatttgcaaaaaaaaaaaaaaaaaaaaaaaaaaangggggg

SEQ ID NO: 788 - DNA, 1203 bp, Homo sapiens
  SITE (1081): n equals a,t,g, or c
  SITE (1103): n equals a,t,g, or c
  SITE (1198): n equals a,t,g, or c
aacctggcttactgaacagtaacaataaggagcaggatggacggaatgatttctactgctgggtttgtcaccgggaaggccaagtcctttgctgtgagctctgtccccgggtttatcacgctaagtgtctgagastgacatcggaaccagagggggactggttttgtcctgaatgtgagaaaattacagtagcagaatgcatcgagacccagagtaaagccatgacaatgctcaccattgaacagttatcctacctgctcaagtttgccattcagaaaatgaaacagccaggggacagatgcattccagaagcccgttccattggaacagcaccctgactatgcggaatacatcttccatccaatggacctttgtacattggaaaagaatgcgaaaaagaaaatgtatggctgcacagaagccttcctggctgatgcaaagtggattttgcacaactgcatcatttataatgggggaaatcacaaattgacgcaaatagcgaaagtagtcatcaaaatctgtgaacatgagatgaatgaaatcgaagtatgtccagaatgttatctagctgcttgccaaaaacgarataactggttttgtgagccttgtagcaatccacatcctttggtctgggccaaactgaaggggtttccattctggcctgcaaaagctctaagggataaagacgggcaggtcgatgcccgattctttggacaacatgacagggcctgggttccaataaataattgctacctcatgtctaaagaaattcctttttctgtgaaaaagactaagagcatcttcaacagtgccatgcaagagatggaggtttacgtggagaacatccgcagaagtttggggtttttaattactctccatttaggacaccctacacacccaacagccagtatcaaatgctgctcgatcccaccaaccccagcgccggcactgccaagatagacaagcaggagaaggtcaagctcaactttgacatgacggcatcccccaagatcctgatgagcaagcctgtgctgagtgggggcacaggccgccggatttccttgttcggatatggccgcgntcccccatggaggcacaaattnttctgtggcacacggggttccgacgtgggagcagggtgttggaggaaggaagggccacgttcgagccattttcagttgcgaggcgagggattccntggga

SEQ ID NO: 789 - DNA, 664 bp, Homo sapiens
gcgccgcggcayggagcaatagcagcagcgtgcgccacgkggcggggcggcggtcggtgacggccrkgggctgcaggcggcggacggctggaaagaagttggattccatgggttccaagagaagaagagctacctccccttccagcagtgtcagcggggactttgatgatgggcaccattctgtgtcaacaccaggcccaagcaggaaaaggaggagactttccaatcttccaactgtagatcctattgccgtgtgccatgaactctataataccatccgagactataaggatgaacagggcagacttctctgtgagctcttcattagggcaccaaagcgaagaaatcaaccagactattatgaagtggtttctcagcccattgacttgatgaaaatccaacagaaactaaaaatggaagagtatgatgatgttaatttgctgactgctgacttccagcttctttttaacaatgcaaagtcctattataagccagattctcctgaatataaagccgcttgcaaactctgggatttggtaccttcgaacaagaaatgagtttggttcagaaaggrgaagcagwtgacgaaagatgatgatgagatkggcaagacatcagggcacagtggactgaaggatcttcctcccagctttacttgaaggga

SEQ ID NO: 790 - DNA, 274 bp, Homo sapiens
  SITE (269): n equals a,t,g, or c
aagtgaaacgactagaacaacaagaagaagatacatttagagaactgaggattttcttaagaaatgttacacataggcttgctattgacaagcgattcckagtgtttactaagcctgttgaccctgatgaggttcctgattatgtcactgtaataaagcaaccaatggacctttcatctgtaatcagtaaaattgatctacacaagtatctgactgtgaaagactatttgagaggtattgatctaatctgtagtaatgccttagatacnatcca

SEQ ID NO: 791 - DNA, 404 bp, Homo sapiens
  SITE (389): n equals a,t,g, or c
aaaaagaggaaacaaagacctcaagaaaagaaaaatggaggaaaacacttctattaacttgtcaaaacaagaaagttttacttcagttaagaaacctaaaagagatgactccaaggacctagctctttgcagtatgattctgactgaaatggaaactcatgaggatgcatggccttttctacttcctgtaaacttgaaacttgttcctggttataagaaagttattaagaagcctatggatttttccacaattagagagaaactaagtwgtggacagtatccaaaccttgaaacctttgctctaratgtcaggcttgtttttgacactgkggaaacatttatgaarrwtratycygatatwggcagagctgggccacaattttgggggngtatttttgaaaata

SEQ ID NO: 792 - DNA, 7053 bp, Homo sapiens
  SITE (154): n equals a,t,g, or c
gaaagctgctcctgctctctctctaaattattgcttttaaacttatcttcaagcatatctttgtctttctttttattttctttgctgggactcttgaaggcgtgtacttcggcatctccagagtcctctctctctctctgccagcagcctccgncctccccactctgtgaggtgtctgttccatctttctgctttcgagttttctgcaagaagcacaagaagcacaagtcggacaaacacctctacgaggagtatgtagagaagcccttgaagctggtcctcaaagtaggagggamcgaagtcaccgaactctccacgggcagctcggggcacgactccagcctcttcgaagacaaaaacgatcatgacaaacacaaggacagaaagcggaaaaagagaaagaaaggagagaagcagattccaggggaagaaaaggggagaaaacggagaagagttaaggaggataaaaagaagcgagatcgagaccgggtggagaatgaggcagaaaaagatctccagtgtcacgcccctgtgagattagacttgcctcctgagaagcctctcacaagctctttagccaaacaagaagaagtagaacagacaccccttcaagaagctttgaatcaactgatgagacaattgcagagaaaagatccaagtgctttcttttcatttcctgtgactgattttattgctcctggctactccatgatcattaaacacccaatggattttagtaccatgaaagaaaagatcaagaacaatgactatcagtccatagaagaactaaaggataacttcaaactaatgtgtactaatgccatgatttacaataaaccagagaccatttattataaagctgcaaagaagctgttgcactcaggaatgaaaattcttagccaggaaagaattcagagcctgaagcagagcatagacttcatggctgacttgcagaaaactcgaaagcagaaagatggaacagacacctcacagagtggggaggacggaggctgctggcagagagagagagaggactctggagatgccgaagcacacgccttcaagagtcccagcaaagaaaataaaaagaaagacaaagatatgcttgaagataagtttaaaagcaataatttagagagagagcaggagcagcttgaccgcatcgtgaaggaatctggaggaaagctgaccaggcggcttgtgaacagtcagtgcgaatttgaaagaagaaaaccagatggaacaacgacgttgggacttctccatcctgtggatcccattgtaggagagccaggctactgccctgtgagactgggaatgacaactggaagacttcagtctggagtgaatactttgcaggggttcaaagaggataaaaggaacaaagtcactccagtgttatatttgaattatgggccctacagttcttatgcaccgcattatgactccacatttgcaaatatcagcaaggatgattctgatttaatctattcaacctatggggaagactctgatcttccaagtgatttcagcatccatgagtttttggccacgtgccaagattatccgtatgtcatggcagatagtttactggatgttttaacaaaaggagggcattccaggaccctacaagagatggagatgtcattgcctgaagatgaaggccatactaggacacttgacacagcaaaagaaatggagattacagaagtagagccaccagggcgtttggactccagtactcaagacaggctcatagcgctgaaagcagtaacaaattttggcgttccagttgaagtttttgactctgaagaagctgaaatattccagaagaaacttgatgagaccaccagattgctcagggaactccaggaagcccagaatgaacgtttgagcaccagaccccctccgaacatgatctgtctcttgggtccctcatacagagaaatgcatcttgctgaacaagtgaccaataatcttaaagaacttgcacagcaagtaactccaggtgatatcgtaagcacgtatggagttcgaaaagcaatggggatttccattccttcccccgtcatggaaaacaactttgtggatttgacagaagacactgaagaacctaaaaagacggatgttgctgagtgtggacctggtggaagttgaggctgcctggtatttgattatatattatgtacatactttttcattcttaacttagaaatgcttttcagaagatattaaatatttgtaaattgtgtttttaattaaactttggaacagcgaatttggatgttccagaggttggacttgtattaggtaataaagctggacctgggactcgtgaggaaggaatgtgcttggggctgttgccatacctgtgcagcattctttcaaaatagtgccttccaatgcttcttccttatgtcccacagacaggatcatcactaagaagcgttcttaaaacggccccatccagtgagattttccgttatacgaacatacttgaaataattttagaatttactactgtggttctgcccctgcatacccagtgggaatgatgcccttgtatgggtaattaggcacctcccacccacccctgacaaaagcacactgggagttttatagcactgtcacatggctagtgttcttttttggttttttccgttttttaaagaaagaggagttacttagtactatagcaaagtaataagccaaataagataaactaagtcatccttgaatagatcagggaattaccagattaccaaaaggtgacatttctactttacttactgtttatctgaaatacaaaggtcaagtacccaaggagttgaactctaagtaggagaccacaagattcatggcccccttttatcagcaagctgagataaatggtgattttgctgaatcggtatagaacctgttatacacaagggaaaaaaatcaggatggagatagatagatagatagccttgttcagtgaacaaattaagtttgaaggcccttatacaatccttctataaatcacccaggcaggaagccatttgatttctattattttcctgactttgaaaattaattagtatttaggaagaacaaatagggtaaaggaaaattaattccctcaaaagacttaaaatcttatgctaaaagagtcaaattttcaagttgtttgagtctacttttaatctctagtgagttcatgaggaccacgaaaataaaataccttcagatatttgagtttttcaaattgctaatttaatgtataaaaagcagctaaacactggtactttataaaaatgaaacagcattttgaaacaaatgttacagatctataaatattcattatatagaataaaccctagttacttgcatgcaccacctcaaatcatatttctttacactgacctattatatacacaaagtatacagtggttaatgatcttctcttctgtttgtttgtttgtttgtttgttaggaaatttcctcaataagccagaaaaccttaggtattattttcacaaaagttaactcaggagaaattgtaaggaagtccttgacccatggagaaggtcactgtttgtttgtttgttagatacgtgtgtctgtcataaaacaaaatgacaccagtaattacttggtaatttaaaaacaagttcataaaaagaaaatacctgcaggtaatttttatggtcagttatattctataacctgaacactgaaaactaaaaacttttacttacaaactattattatctgagcacagcacagtgctttgctttaattggaaataaaaatgcatgagtgagtggtagtcagttatttgttaaactcccaactggggtttctgttgttactgaagaaaaaaacaaatattccaagagtacaaatatgctgacctcagagaggcccagtgcactaatgtgtttctatgttatattagcaacagaaaccttcctgacttgccaggagagcccccgccgggcagccctggtcactgctagatcttgagagcacagatttcagtatagtattcatgtgaaaccagcccttcatgtaaaaagttttggtgtgtaaaaaaggcaacttaagcgaggctaattgcccttaccagcattgttgccatgaaattcctttatacagcaagttcttctattcatactgattccacttatgtgcagcacatgagagctgccactagtctacccagcacctttgtgcaaattagaatacacctgcccttcctcgggctgataaagccacacgacacagcacaggcagacaggttcaattttcgttccctccaccgccacccccgcacttagctgtactcttaatttgcagcccggggcaactcatcccaggaccccaacaagtctggtcagtcacccaatctgcaaccctgtataatcatcttgtaaaggctcctgtatgcaagactttgtgtagaactttacggggttcatggggacacctagctaagaatccctgctatgtagggaaactgagtgcattagaaatcctggcgatgctctggtgatgaggccaccggttaagtcttccggttatgaagtccattcagaaaaagtcacgggcagtttggtcatttctcaccctgttgttacagttaggttgactttcaattccttgggaagttgaagcacagtaagacacatccccaaaacctggctttttgcatttgccttgactcacgcagtttcagagcaagaacggctcagcatttgtgagggggcgggcttcccagatccaggagcctctgcatgcacccatgcggagtagatccttctagttttgaagctctccagagttagctgtgaagactaaaggaaagaagagatgcactcacaggttgtccaagttgtctctaaacagactccattcctttctggtaagaaaagtaagatacagttgaaggacggcaggggagaacgcaaagatgtgtgagtaatcaaggaagaggtgaaaggccgcaccttactttcaaagcacctctctccagaatgcttgcctcacaagctgcctcattcaaaggcaaggctctgctgctccccgccttcttgctgtgaccacattcctcaggactctatccccacagccagctgaccccataagctgatgctagacagtagtcctccttacatgtcagtggttaaaaaggcagagcatacactggagggaagagatttatgtctagtgtctgaaaagtcattcaaaaggataaaaaccccattaatgtattcatttaaaacaaacatgccagacaaggcaaaaagtaacagtgttaattgtggtgtttttctctctacctgtttgaaaccgtttacagatgtaaaacacccctttcagcttcatttaccagaatgcctctgtgagaaatgctgtcattgccaggcccaccagggagagggagtctccaatccgtgctagacagctcagcttactcccccttggtgtctagaaaaacagacctcacttgtgcgtgcccacaggccactgaggtggaagtctgttttcatcatgtgctaaagttgcctgcctggcacctcagggaacaaagatctcaaagtcagccccgaaccagtgaacattctccagctggcctggaaactgttacagaccaggcacagagcttctggcctcccctgcgcattatggctcagtggctgcttcgagccagaatctggtgcatgtgtctgagaaatcctccagtgcaggtccaaagaagccaacatgcacagccatctgcatgcctttgggattggcgtggggcggagagtcttctcctgggcttgcttcagggaaggagactggcttcccggcctttttcggaatccagcaggagccctcagtwcagccccacccctgaaacttggcagtgtccgtacagacaaagtaagtcctcagctcgcctttgcctttgacgktgatcaggscasggcattcacmagagtacccgaggccctggaggatggtgcaggtctcctcggtaacctggattttcccaagttctccagtgctttccattcggctggccacattgacagtgtttccccagatgtcatactgaggttttcgggccccaatcactccagcaatcacaggcccatggtttatgccgaacgcggaggcggaaggagttgaaggagtgcctgttgatgccgtccagcttactcatcagggcgatgctgaactccaccatgacaccaatgtgggcatgctgmcgctccagctcctggttctcgtgccctgaggcgacgctgagccctgcagctgccatgtacgtgctgccgatggtcttgatcttctccacgccgctgaacttgggcttcagtaggagctcgtcgaagtcggcaatgatctcattgagcaggcgtaggcactccagcccttctttgttgacatcgcactctgtgtagaacactttgaagtccggcacggaggcaaacatgacacagacgcagtcataggactgatggtaccagtcctcgtttaacttgtcaccgataaagtgggcagccacgtgggctggcaggacgttctccagaagaaggcggttcacgttctccatggtctcaaactcctcgtgctccttcttgaacttcttcttccataggcagtccaagcggcagtaatagtcaatctgtctggagagtgtaagcagggtgatgtagaacaggaccaggtagaaattggtcatggtcttcaggtccttccaggaacagctaggggtgccactggtggtgccgttgggcttggtgaggttgcccaggccttggccgcagcagtcccactgccagcatggggagaggttgaagagcaccaggtaggccaccagggccactgtcagcagcacaacctttggctccaggctcatcctcaggaagaccgagcaggcgatgaagcccaggacacagctgcaggtgtagtacgggaggggctcacacagggctcttgtcttgctgctcgcggccagtaggcctgtctcattgccaacaggcagctctggaacttggaaaggcatcaggggcaggttgc

SEQ ID NO: 793 - DNA, 844 bp, Homo sapiens
  SITE (679): n equals a,t,g, or c
gggaggaccagggtgaagtatatgtgtcagagatggaagaccagcccccttcaggcgagtgtgatgatgcctttaacattaaggagactcccttggtggatacacttttcagccatgctacctcctcaaagctgactgatctaagccaggatgaccctgttcaggatcatttgctatttaagaagactctcctgccagtctgtaagatgattgccagtcacaggttcagcagtccatttctgaagcctgtgtcagaaaggcaggccccagggtacaaggatgtggtgaaaagacccatggacttaactagcctgaagagaaatctctctaagggtcggattcgcaccatggcccaattcctgcragacctgatgctgatgttccaaaatgctgtaatgtacaatgactctgatcatcatgtataccatatggctgtggagatgcggcgagaagtcctggagcagattcaggtactgaatatctggttagacaaaagaaaaggctcaagtagtctggaaggagaaccagctaacccagtrgatgatggaaaacctgktttctaacctggrgctgctatcctgacttttttagagtttgaatctctcccggaactctgacctagagaggatcctggtacttctttgccatgtcctcattttcttttccaacaagaataatnccttaactcacaaccaacgagtcaaagatgcatgtggacataatataaagaaaaaaaggggaagctgaggtttggatttatgccataaatgttgcccacatctttgttccatcggcttgatttaaagacaattccattagatcttttctaagccttttactctat

SEQ ID NO: 794 - DNA, 518 bp, Homo sapiens
  SITE (448): n equals a,t,g, or c
gcccaaactcaagctgagtaggaagagtggcatttctcctaaaaaatcaaaatacatgactccaatgcagcagaaactaaatgaggtctatgaagctgtaaagaactatactgataagaggggtcgccgcctcagtgccatatttctgaggcttccctctagatctgagttgcctgactactatctgactattaaaaagcccatggacatggaaaaaattcgaagtcacatgatggccaacaagtamcaagatattgactctatggttgaggactttgtcatgatgtttaataatgcctgtacrtacaatgagccggagtctttgatctacaaagatgctcttgktctacacaaagtcctgcttgaaacacgcakagacctggagggagawgaggactctcatgtccaaatgtgactttgctgattcaagagcttatccacaatcttnttgtgtcagtcatgagtcatcaggatgatgagggaagatgctacagcgattctttagcagaaattcctgc

SEQ ID NO: 795 - DNA, 1268 bp, Homo sapiens
  SITE (1): n equals a,t,g, or c
  SITE (20): n equals a,t,g, or c
  SITE (22): n equals a,t,g, or c
  SITE (24): n equals a,t,g, or c
  SITE (36): n equals a,t,g, or c
  SITE (674): n equals a,t,g, or c
  SITE (1235): n equals a,t,g, or c
  SITE (1247): n equals a,t,g, or c
  SITE (1268): n equals a,t,g, or c
nacggaatacttacgggggnantnaacggaaatgcntctgagacgctttgaaagccagggygatgctcagacagtgtgccagccaaaatgacttgggggaggggagccgcttccccactgttgctcttttttaaacaaattgagttcctttttttaagatagaaattcttttcatggtcctctgaaagaagcaatagtaacaatcttatattggatcatgggggaagcaaatgtgtgtattttaagtgagttcctgcgagtcatacactgcgatgatgctccgcctttacccgttcagttgggagcttattgtgagattggatcatttccttttgagtgttcttctctttggtacaaaacctattgtgggtgacaggagcagtgttttcctgctggacccgcaagccaccagctatttcctggtgacacaagctcttctcaggcggggctgcctgcaggctcccgttttctgagcccacgctgcccacagctgaccccagcgcagcccgggcacgcggcactttacatgggggcagcttgggcccagactcctccgctgtgtagcagatgaggaaaatcaggccagaggacaacaggctggcgttttgttgggaactgaagaggaatctgttgaacacagcgaccagatgaccttccatttcaccggcggcarnagtttcagcgtgcagttcccaaaccccaaagctgaccctgcgccccatttgaatacggccagagcctgctggttcactttgggtagagccgtgcctcttgggcaggctcccatagtgaccacgtccccacgaatgggaaagcacgttagtgggagggacgtaggacacgtgtggaccgccaggccctctcagtccattttccggggctgctcggtgctgctgttaagacgtgagtgcatttcacttggaagaacccattgtacaaagttcaaggctaagagttctgaattctggcgtcagcttcctcaggattttcttcagttgcaagtacctttccactgaaaatatgagcatgcccgcctggctagtaggcatctgtaagagtgtcgccaggcccgcgccagctgaggcctcagactagccaggcaagagccgtctgaccagttggctggcggtggttctggtsgwgcacgagggagcccgggtggtgccctgagcctcgagctgctctctgtcactgtcttgaatcagactcagaaaggcttcttcaaagccctgcgngcaattcckttnagtccccgttagtatcccgtn

SEQ ID NO: 796 - DNA, 712 bp, Homo sapiens
  SITE (3): n equals a,t,g, or c
  SITE (7): n equals a,t,g, or c
  SITE (9): n equals a,t,g, or c
  SITE (10): n equals a,t,g, or c
  SITE (680): n equals a,t,g, or c
  SITE (684): n equals a,t,g, or c
  SITE (706): n equals a,t,g, or c
  SITE (712): n equals a,t,g, or c
ctnaacngnnacmtctcmccgccgtmtccaaccgcgtgacagaccacacctgtcccagcggaggccccctctcacccagcctcaccaccccgctgcccccgctggacatctctgtggctgagcagcagcagctgggctacatgccgctgcgggatgattacgagatcgagtatgaccaggatgccgagacgctcatcagcgggctctctgtcaactatgatgacgacgacgtggagatcgagctgaagcgcgcccacgtggacatgtacgtgcggaagctgaaagagagacagcggcggaagaacatcgcccgtgactacaatctggtgccagccttcctggggaaggacaagaaggagaaggaaaaggcgctgaagcgcaagatcaccaaggaggagaaggagctgcgcctgaagctgaggccgctgtaccagttcatgtcatgcaaggagtttgatgacctttttgaaaacatgcacaaagaaaaaatgctccgggccaagatccgagaactgcagcggtaccggcgaaacgggatcaccaagatggaagagtcggcagagtacgaggcagcgcggcataaacgggagaagaggaaggagaacaaaaacctasccggctccaaacggggaaaggaggacggcaaagacagcgggttcgccgccattaagaaccttganggtntccccttctgccccccttagancccgtn

SEQ ID NO: 797 - DNA, 629 bp, Homo sapiens
  SITE (607): n equals a,t,g, or c
  SITE (626): n equals a,t,g, or c
  SITE (627): n equals a,t,g, or c
  SITE (628): n equals a,t,g, or c
  SITE (629): n equals a,t,g, or c
tagaactagtggatcccccgggctgcaggaattcggcacgagtgtgccccgagtgcttctcggccggcgccgagatcggccaccaccgccgctaccacggctaccagctggtggacggcgggcgcttcacgctctgggggcccgaggccgagggcggctggaccagtcgcgaggagcagctgctgctggacgccatcgagcagttcggcttcggaaactgggaagatatggctgcccacgttggtgcttcccggactccccaagaggtgatggagcattacgtgagcatgtacatccacgggaacctggggaaggcctgcatccccgacaccatccccaaccgcgtgacagaccacacctgtcccagcggaggccccctctcacccagcctcaccaccccgctgcccccgctggacatctctgtggctgagcagcagcagctgggctacatgccgctgcgggatgattacgagatcgagtatgaccaggatgccgagacgctcatcagcgggctctctgtcaactatgatgacgacgacgtggagatcgagctgaagcgcgcccacgtggacatgtaaatgcggaaggaagaatttccctttaaagnccccccttaaggctccgtnnnn

SEQ ID NO: 798 - protein, 181 aa, Homo sapiens
  SITE (37): Xaa equals any of the naturally occurring L-amino acids
RKLYLSWSLDYENKNLSVNLNFGRKISLKKMDKMILXKADKPKVDEEGDENEDDKDYHRSDPQIAICLDCLRNNGQSGDNVVKGLMKKFIRCSTRVTVGTIKKFLSLKLKLPSSYELDVLCNGEIMGKDHTMEFIYMTRWRLRGENFRCLNCSASQVCSQDGPLYQSYPMVLQYRPRIDFG

SEQ ID NO: 799 - protein, 224 aa, Homo sapiens
PRVRAARSRGPFPGVSTDDSAVPPPGGAPHFGHYRTGGGAMGLRSRSVSSVAGMGMDPSTAGGVPFGLYTPASRGTGDSKRAPGGGGSASDSTYAHGNGYQETGGGHHRDGMLYLGSRASLANALPLHIAPRWFSSHSGFKCPICSKSVASDEMEMHFIMCLSKPRLSYNDDVLTKDAGECVICLEELLQGDTIARLPCLCIYHKSCIDSWFEVNRSCPEHPAD

SEQ ID NO: 800 - protein, 209 aa, Homo sapiens
ACMPILSSSGSKMAACGGTCKNKVTVSKPVWDFLSKETPARLARLREEHRVSILIDGETSDIYVLQLSPQGPPPAPPNGLYLARKALKGLLKEAEKELKKAQRQGELMGCLALGGGGEHPEMHRAGPPPLRAAPLLPPGARGLPPPPPPLPPPLPPRLREEAEEQESTCPICLGEIQNAKTLEKCRHSFCEGCITRALQVKKACPMCGR

SEQ ID NO: 801 - protein, 392 aa, Homo sapiens
  SITE (238): Xaa equals any of the naturally occurring L-amino acids
FEFPVRLGRGGAVLVGRRWRVGGHQAYPWRHSRPPGLAAVMESGGRPSLCQFILLGTTSVVTAALYSVYRQKARVSQELKGAKKVHLGEDLKSILSEAPGKCVPYAVIEGAVRSVKETLNSQFVENCKGVIQRLTLQEHKMVWNRTTHLWNDCSKIIHQRTNTVPFDLVPHEDGVDVAVRVLKPLDSVDLGLETVYEKFHPSIQSFTDVIGHYISGERPKGIQETEEMLKVGATLTGXGELVLDNNSVRLQPPKQGMQYYLSSQDFDSLLQRQESSVRLWKVLALVFGFATCATLFFILRKQYLQRQERLRLKQMQEEFQEHEAQLLSRAKPEDRESLKSACVVCLSSFKSCVFLECGHVCSCTECYRALPEPKKCPICRQAITRVIPLYNS

SEQ ID NO: 802 - protein, 473 aa, Homo sapiens
GTRECPLCLVRLPPERAPRLLSCPHRSCRDCLRHYLRLEISESRVPISCPECSERLNPHDIRLLLADPPLMHKYEEFMLRRYLASDPDCRWCPAPDCGYAVIAYGCASCPKLTCEREGCQTEFCYHCKQIWHPNQTCDMARQQRAQTLRVRTKHTSGLSYGQESGPDDIKPCPRCSAYIIKMNDGSCNHMTCAVCGCEFCWLCMKEISDLHYLSPSGCTFWGKKPWSRKKKILWQLGTLIGAPVGISLIAGIAIPAMVIGIPVYVGRKIHSRYEGRKTSKHKRNLAITGGVTLSVIASPVIAAVSVGIGVPIMLAYVYGVVPISLCRGGGCGVSTANGKGVKIEFDEDDGPITVADAWRALKNPSIGESSIEGLTSVLSTSGSPTDGLSVMQGPYSETASFAALSGGTLSGGILSSGKGKYSRLEVQADVQKEIFPKDTASLGAISDNASTRAMAGSIISSYNPQDRFSMIHA

SEQ ID NO: 803 - protein, 124 aa, Homo sapiens
  SITE (2): Xaa equals any of the naturally occurring L-amino acids
CXQDMKSAVITPCSHFFHAGCLKKWLYVQETCPLCHCHLKNSSQLPGLGTEPVLQPHAGAEQNVMFQEGTEPPGQEHTPGTRIQEGSRDNNEYIARRPDNQEGAFDPKEYPHSAKDEAHPVESA

SEQ ID NO: 804 - protein, 450 aa, Homo sapiens
HASEPLKQKQVVDGVSYLLQEIYGIENKYNTQDSKVSEDEVSDNSAECVVCLSDVRNTLILPCRHLCLCNTCADTLRYQANNCPICRLPFRALLQIRAMRKKLGPLSPTSFNPIISSQTSDSEEHPSSENIPPGYEVVSLLEALNGPLTPSPAVPPLHVLGDGHLSGMLPSYGSDGHLPPVRTISPLDRLSDSSSQGLKLKKSLSKSTSQNSSVLHEEEDEHSCSESETQLSQRPSVQHLGEECGVTPESENLTLSSSGAIDQSSCTGTPLSSTISSPEGPASSSLAQSVMSMASSQISTDTVSSMSGSYIAPGTEEEGEALSSPQPASRAPSEEGEGLPAESPDSNFAGLPAGEQDAEGNDVIEEEDGSPTQEGQRTCAFLGMECDNNNDFDIASVKALDNKLCSEVCLPGAWQADDNAVSRNAQRRRLSSSSLEDSETRPCVWGPLAV

SEQ ID NO: 805 - protein, 247 aa, Homo sapiens
WQSWLQRQCHSGWGRKPWWGRKGQRAAGQGRVPEEAASEAQRAVAGRQALLHDGAGGQWVPHVAGARGPTVLPEGLVAAALGLSPPLTPGWGRQRLRRQAAQDGRVDSQRGQAVVGEEHSLTAAGGAGDELVLGAGLVENLQALLTHRVQAGQHAGPPLGDIVGVPTGGALQGLACRRRRSRRGRGARPNHVLIHNDLILWGHAGKAQLRASLTGPPWQWRGMGCPFQGRHVPPTGLVDKDLCVCSC

SEQ ID NO: 806 - protein, 204 aa, Homo sapiens
WKTGPGWAQWSGPRRHGARGLGEYSDGLRGCDVADGTLWVRPFADAYCTLHAEQVVSAGHKGGSHFALKADHAIPPAAGAPQAAPTKFREALERLSRGAPRESGQLGSRGSGRGAVCARGPSAGLGGRGGGGGGRGEEHGGGRGVLLARPQRGASLGHAVVHILLAHAIARKEVPAVAKVPALLTQAWGLKARVHSALADAACS

SEQ ID NO: 807 - protein, 351 aa, Homo sapiens
AGQRSPPGTPLSATLSLVMSQCCRKIKDTVQKLASDHKDIHSSVSRVGKAIDRNFDSEICGVVSDAVWDAREQQQQILQMAIVEHLYQQGMLSVAEELCQESTLNVDLDFKQPFLELNRILEALHEQDLGPALEWAVSHRQRLLELNSSLEFKLHRLHFIRLLAGGPAKQLEALSYARHFQPFARLHQREIQVMMGSLVYLRLGLEKSPYCHLLDSSHWAEICETFTRDACSLLGLSVESPLSVSFASGCVALPVLMNIKAVIEQRQCTGVWNHKDELPIEIELGMKCWYHSVFACPILRQQTSDSNPPIKLICGHVISRDALNKLINGGKLKCPYCPMEQNPADGKRIIF

SEQ ID NO: 808 - protein, 366 aa, Homo sapiens
RRQLGVALIPSHRMDYKSSLIQDGNPMENLEKQLICPICLEMFTKPVVILPCQHNLCRKCANDIFQAANPYWTSRGSSVSMSGGRFRCPTCRHEVIMDRHGVYGLQRNLLVENIIDIYKQECSSRPLQKGSHPMCKEHEDEKNNIYCLTCEVPTCSMCKVFGIHKACEVAPLQSVFQGQKTELNNCISMLVAGNDRVQTIITQLEDSRRVTKENSHQVKEELSQKFDTLYAILDEKKSELLQRITQEQEKKLSFIEALIQQYQEQLDKSTKLVETAIQSLDEPGGATFLLTAKQLIKSIVEASKGCQLGKTEQGFENMDFFTLDLEHIADALRAIDFGTDEEEEEFIEEEDQEEEESTEGKEEGHQ

SEQ ID NO: 809 - protein, 426 aa, Homo sapiens
  SITE (414): Xaa equals any of the naturally occurring L-amino acids
  SITE (415): Xaa equals any of the naturally occurring L-amino acids
  SITE (420): Xaa equals any of the naturally occurring L-amino acids
IPMERPEEGKQSPPPQPWGRLLRLGAEEGEPHVLLRKREWTIGRRRGCDLSFPSNKLVSGDHCRIVVDEKSGQVTLEDTSTSGTVINKLKVVKKQTCPLQTGDVIYLVYRKNEPEHRSGGGGISPKGSGPSVASDEVSSFASALPDRKTASFSSLEPQDQEDLEPVKKKMRGDGDLDLNGQLLVAQPRRNAQTVHEDVRAAAGKPDKMEETLTCIICQDLLHDCVSLQPCMHTFCAACYSGWMERSSLCPTCRCPVERICKNHILNNLVEAYLIQHPDKSRSEEDVQSMDARNKITQDMLQPKVRRSFSDEEGSSEDLLELSDVDSESSDISQPYVVCRQCPEYRRQAAQPPHCPAPEGEPGAPQALGDAPFTSVSLTTVRITCALCKEATPCAPAASAHARPESGTRTGPRVXXLNKCXGLLQAF

SEQ ID NO: 810 - protein, 391 aa, Homo sapiens
TSSGRENTVSWLTAGEENALFLWQASVGSVIEMMAGCGEIDHSINMLPTNRKANESCSNTAPSLTVPECAICLQTCVHPVSLPCKHVFCYLCVKGASWLGKRCALCRQEIPEDFLDKPTLLSPEELKAASRGNGEYAWYYEGRNGWWQYDERTSRELEDAFSKGKKNTEMLIAGFLYVADLENMVQYRRNEHGRRRKIKRDIIDIPKKGVAGLRLDCDANTVNLARESSADGADSVSAQSGASVQPLVSSVRPLTSVDGQLTSPATPSPDASTSLEDSFAHLQLSGDNTAERSHRGEGEEDHESPSSGRVPAPDTSIEETESDASSDSEDVSAVVAQHSLTQQRLLVSNANQTVPDRSDRSGTDRSVAGGGTVSVSVRSRRPDGQCTVTEV

SEQ ID NO: 811 - protein, 160 aa, Homo sapiens
SGGVCVPGPSLGALFPSFPLGPTISLLLDLSFQDFTSSQSWSVESSTSDSPTSIAMIKEMSESLLTAGSCSLLVVKMTSPSWGMGSVSWTTCKAPTVRTAGSKVTELSFTVVSLAPVIWLVGGPPREPSKSVGKSSMQSALGGIPRALRMFILHSCRIPA

SEQ ID NO: 812 - protein, 112 aa, Homo sapiens
GRVRSDPGGGGLAYAAYANGLGAQLPGLQPSDTSGSSSSSSSSSSSSSSSSGLRRKGSRDCSVCFESEVIAALVPCGHNLFCMECANRICEKSEPECPVCHTAVTQAIRIFS

SEQ ID NO: 813 - protein, 280 aa, Homo sapiens
  SITE (231): Xaa equals any of the naturally occurring L-amino acids
VAPSRKLGSARAPAPALQIRKGTSSGLPGRGGGSGPGNNLSSVAGNWRGSSFAVERPGMAKYQGEVQSLKLDDDSVIEGVSDQVLVAVVVSFALIATLVYALFRNVHQNIHPENQELVRVLREQLQTEQDAPAATRQQFYTDMYCPICLHQASFPVETNCGHLFCGACIIAYWRYGSWLGAISCPICRQTVTLLLTVFGEDDQSQDVLRLHQDINDYNRRFSGQPRSIMEXIMDLPTLLKGMHSGKMFSSPGGLFGCSHQDNTLLIGGTFFSLSLIIPPP

SEQ ID NO: 814 - protein, 154 aa, Homo sapiens
KCQHSDGKTNAAPALVSTLLQLRGAVPSSHRRQHEEGVSGCPSSESQVGPHSLNFHSWRHMGQCCCTCCACSHLRMQCMWKQWEHWPHTSGQSSPGTLQSGQHPLNAILQMPQFSSLATQSQVATPFQHLIFTFMAAEPHVEDIFKDLKWAWPT

SEQ ID NO: 815 - protein, 204 aa, Homo sapiens
  SITE (202): Xaa equals any of the naturally occurring L-amino acids
  SITE (203): Xaa equals any of the naturally occurring L-amino acids
  SITE (204): Xaa equals any of the naturally occurring L-amino acids
IPSFSQRRQLTLSANAQVLSDSVPPVPVPRMACTKTLQQSQPISAGATTTTTAVAPAGGHSGSTECDLECLVCREPYSCPRLPKLLACQHAFCAICLKLLLCVQDNTWSITCPLCRKVTAVPGGLICSLRDHEAVVGQLAQPCTEVSLCPQGLVDPADLAAGHPSLVGEDGQDEVSANHVAARRLAAHLLLLPCSLSSSGPXXX

SEQ ID NO: 816 - protein, 74 aa, Homo sapiens
  SITE (23): Xaa equals any of the naturally occurring L-amino acids
VNAQIKPVERAVKRANHRILNYXNIFLLQIPQMPATKIKHFLHQQSASLQYFLFHCWFILCALRPQLRPPRSLF

SEQ ID NO: 817 - protein, 108 aa, Homo sapiens
HASAQFERSPGGGPAAPVSSSCSSSASSSASSSSSSSSSSSSSSSSSGLRRKGSRDCSVCFESEVIAALVPCGHNLFCMECANRICEKSEPECPVCHTAVTQAIRIFS

SEQ ID NO: 818 - protein, 658 aa, Homo sapiens
  SITE (5): Xaa equals any of the naturally occurring L-amino acids
  SITE (48): Xaa equals any of the naturally occurring L-amino acids
  SITE (64): Xaa equals any of the naturally occurring L-amino acids
  SITE (71): Xaa equals any of the naturally occurring L-amino acids
RRRRXAPQMPGLPGLPERAGDRALWPQLLPPLPAEGTPGARAALPGPXPPPPPVPLMLKGPPRXRRLWRRXRRFRLQNQRRPQPPGREVVSGPARAGPGGRQARGATAPGALPGALAAACEALRAEPSDLIVKIYRAESYAGLQEFKAAIEDLNAVLFQLPDWPEVYFRKGKVLCDAGFLGDALQLFLQCLALDEDFAPAKLQVQKILCDLLLPENLKEGLKESSWSSLPCTKNRPFDFHSVMEESQSLNEPSPKQSEEIPEVTSEPVKGSLNRAQSAQSINSTEMPAREDCLKRVSSEPVLSVQEKGVLLKRKLSLLEQDVIVNEDGRNKLKKQGETPNEVCMFSLAYGDIPEELIDVSDFECSLCMRLFFEPVTTPCGHSFCKNCLERCLDHAPYCPLCKESLKEYLADRRYCVTQLLEELIVKYLPDELSERKKIYDEETAELSHLTKNVPIFVCTMAYPTVPCPLHVFEPRYRLMIRRSIQTGTKQFGMCVSDTQNSFADYGCMLQIRNVHFLPDGRSVVDTVGGKRFRVLKRGMKDGYCTADIEYLEDVKVENEDEIKNLRELHDLVYSQACSWFQNLRDRFRSQILQHFGSMPEREENLQAAPNGPAWCWWLLAVLPVDPRYQLSVLSMKSLKERLTKIQHILTYFSRDQSK

SEQ ID NO: 819 - protein, 441 aa, Homo sapiens
DPRVRPRRQRLREAAARRRSLSPATMSTKQITCRYFMHGVCREGSQCLFSHDLANSKPSTICKYYQKGYCAYGTRCRYDHTRPSAAAGGAVGTMAHSVPSPAFHSPHPPSEVTASIVKTNSHEPGKREKRTLVLRDRNLSGMAERKTQPSMVSNPGSCSDPQPSPEMKPHSYLDAIRSGLDDVEAKQLLQQRAAAVPLRSCWGVPVWGCLCLPAREVCEICRLQVLHPFDPEQRKAHEKICMLTFEHEMEKAFAFQASQDKVCSICMEVILEKASASERRFGILSNCNHTYCLSCIRQWRCAKQFENPIIKSCPECRVISEFVIPSVYWVEDQNKKNELIEAFKQGMGKKACKYFEQGKGTCPFGSKCLYRHAYPDGRLAEPEKPRKQLSSQGTVRFFNSVRLWDFIENRESRHVPNNEDVDMTELGDLFMHLSGVESSEP

SEQ ID NO: 820 - protein, 431 aa, Homo sapiens
STHASAHASGWNEYLTTRIEQNLVLNCTCPIADCPAQPTGAFIRAIVSSPEVISKYEKALLRGYVESCSNLTWCTNPQGCDRILCRQGLGCGTTCSKCGWASCFNCSFPEAHYPASCGHMSQWVDDGGYYDGMSVEAQSKHLAKLISKRCPSCQAPIEKNEGCLHMTCAKCNHGFCWRCLKSWKPNHKDYYNCSAMVSKAARQEKRFQDYNERCTFHHQAREFAVNLRNRVSAIHEVPPPRSFTFLNDACQGLEQARKVLAYACVYSFYSQDAEYMDVVEQQTENLELHTNALQILLEETLLRCRDLASSLRLLRADCLSTGMELLRRIQERLLAILQHSAQDFRVGLQSPSVEAWEAKGPNMPGSQPQASSGPEAEEEEEDDEDDVPEWQQDEFDEELDNDSFSYDESENLDQETFFFGDEEEDEDEAYD

SEQ ID NO: 821 - protein, 414 aa, Homo sapiens
ILPCQHNLCRKCASDIFQASNPYLPTRGGTTMASGGRFRCPSCRHEVVLDRHGVYGLQRNLLVENIIDIYKQESTRPEKKSDQPMCEEHEEERINIYCLNCEVPTCSLCKVFGAHKDCQVAPLTHVFQRQKSELSDGIAILVGSNDRVQGVISQLEDTCKTIEECCRKQKQELCEKFDYLYGILEERKNEMTQVITRTQEEKLEHVRALIKKYSDHLENVSKLVESGIQFMDEPEMAVFLQNAKTLLKKISEASKAFQMEKIEHGYENMNHFTVNLNREEKIIREIDFYREDEDEEEEEGGEGEREGEGEVGGEAVEVEEVENVQTEFPGEDENPEKASELSQVELQAAPGALPVSSPEPPPALPPAADAPVTQIGFEAPPLQGQAAAPASGSGADSEPARHIFSFSWLNSLNE

SEQ ID NO: 822 - protein, 146 aa, Homo sapiens
ESCSALCAPATLLSQRTPGSASGLLQPEGLFRAQWRAHDEGSWDVVPKHPLYLEIRASQLASLGIRLLDNDKLALQSCCDTYWDKGLDYSFTTYYLGLCPVVSKRRQDTYHRTVVRTGVTVISAMPTLTTSLHDSASFNFWASPRV

SEQ ID NO: 823 - protein, 759 aa, Homo sapiens
  SITE (18): Xaa equals any of the naturally occurring L-amino acids
  SITE (19): Xaa equals any of the naturally occurring L-amino acids
  SITE (21): Xaa equals any of the naturally occurring L-amino acids
  SITE (257): Xaa equals any of the naturally occurring L-amino acids
  SITE (299): Xaa equals any of the naturally occurring L-amino acids
FSCVGKIRLYDAMIYVYXXGXNEFISPMEKLFRVIAPPLNAGKTLTDEQVVMGNKLLVYISCCLAGRAYPLGDIPEDLVPLVKNQVFEFLIRLHSAEASPEEEIYPYIRTLLHFDTREFLNVLALTFEDFKNDKQAVEYQQRIVDILLKVMVENSDFTPSQVGCLFTFLARQLAKPDNTLFVNRTLFDQVLEFLCSPDDDSRHSERQQVLLELLQAGGIVQFEESRLIRMAEKAEFYQICEFMYEREHQYDKIIDCXLRDPLREEEVFNYIHNILSIPGHSAEEKQSVWQKAMDHIEEXVSLKPCKAAELVATHFSGHIETVIKKLQNQVLLFKFLRSLLDPREGIHVNQELLQISPCITEQFIELLCQFNPTQVIETLQVLECYRLEETIQITQKYQLHEVTAYLLEKKGDIHGAFLIMLERLQSKLQEVTHQGENTKEDPSLKDVEDTMVETIALCQRNSHNLNQQQREALWFPLLEAMMAPQKLSSSAIPHLHSEALKSLTMQVLNSMAAFIALPSILQRILQDPVYGKGKLGEIQGLILGMLDTFNYEQTLLETTTSLLNQDLHWSLCNLRASVTRGLNPKQDYCSICLQQYKRRQEMADEIIVFSCGHLYHSFCLQNKECTVEFEGQTRWTCYKCSSSNKVGKLSENSSEIKKGRITPSQVKMSPSYHQSKGDPTAKKGTSEPVLDPQQIQAFDQLCRLYRGSSRLALLTELSQNRSSESYRPFSGSQSAPAFNSIFQNENFQLQLIPPPVTED

SEQ ID NO: 824 - protein, 354 aa, Homo sapiens
RQQHWTRENHLYNYQNEVDDDLVCHICLQPLLQPLDTPCGHTFCYKCLRNFLQEKDFCPLDRKRLHFKLCKKSSILVHKLLDKLLVLCPFSSVCKDVMQRCDLEAHLKNRCPGASHRRVALERRKTSRTQAEIENENGPTLLDPAGTLSPEADCLGTGAVPVERHLTSASLPTWSEEPGLDNPAFEESAGADTTQQPLSLPEGEITTIEIHRSNPYIQLGISIVGGNETPLINIVIQEVYRDGVIARDGRLLAGDQILQVNNYNISNVSHNYARAVLSQPCNTLHLTVLRERRFGNRAHNHSDSNSPREEIFQWLFINGTLVNSLALNWCEGQMSQGFLFLTCWKGGWLPRTAG

SEQ ID NO: 825 - protein, 155 aa, Homo sapiens
KCQHSDGKTNAAPALVSTLLQLRGAVPSSHRRQHEEGVSGCPSSESQVGPHSLNFHSWRHMGQCCCTCCACSHLRMQCMWKQWEHWPHTSGQSSPGTLQSGQHPLNAILQMPQFSSLATQSQVATPFQHLIFTFMAAEPPYPPFRWQRRRPRGKV

SEQ ID NO: 826 - protein, 118 aa, Homo sapiens
PGGAAMADVEDGEETCALASHSGSSGSKSGGDKMFSLKKWNAVAMWSWDVECDTCAICRVQVMDACLRCQAENKQEDCVVVWGECNHSFHNCCMSLWVKQNNRCPLCQQDWVVQRIGK

SEQ ID NO: 827 - protein, 184 aa, Homo sapiens
TLSGNTDSPVIVTATASSPGSSRRPRRWVPWRESGAPGTPCTPGTLAAGRPRRRAAAAPSGGRTGPGARGPGAGAASSQSAWPGPSWVAARRAPMGADIRGRGTGRRPAPSCGAGSRGRSCGRTRWTPGPGNSPGRWGRSTPPGCPQLPCCFPAAETESDVRRGRGQQAASGRGEARRLPLVPN

SEQ ID NO: 828 - protein, 113 aa, Homo sapiens
LSREQRDALEVQVKKLQEELERLHAGPEPQALPAFSDLEALSLSTLYSLQKQLRAHLEQVDKAVFHMQSVKCLKCQEQKRAVLPCQHAALCELCAEGSECPICQPGRAHTLQS

SEQ ID NO: 829 - protein, 155 aa, Homo sapiens
RDGARRWGGCQSPLTWAPGFYRRFDLATSGRRLRGQTAEPAGRQRPRREPEAMDEQSVESIAEVFRCFICMEKLRDARLCPHCSKLCCFSCIRRWLTEQRAQCPHCRAPLQLRELVNCRWAEEVTQQLDTLQLCSLTKHEENEKDKYVLNFFVQY

SEQ ID NO: 830 - protein, 363 aa, Homo sapiens
TLICRMAGCGEIDHSINMLPTNRKANESCSNTAPSLTVPECAICLQTCVHPVSLPCKHVFCYLCVKGASWLGKRCALCRQEIPEDFLDKPTLLSPEELKAASRGNGEYAWYYEGRNGWWQYDERTSRELEDAFSKGKKNTEMLIAGFLYVADLENMVQYRRNEHGRRRKIKRDIIDIPKKGVAGLRLDCDANTVNLARESSADGADSVSAQSGASVQPLVSSVRPLTSVDGQLTSPATPSPDASTSLEDSFAHLQLSGDNTAERSHRGEGEEDHESPSSGRVPAPDTSIEETESDASSDSEDVSAVVAQHSLTQQRLLVSNANQTVPDRSDRSGTDRSVAGGGTVSVSVRSRRPDGQCTVTEV

SEQ ID NO: 831 - protein, 368 aa, Homo sapiens
  SITE (266): Xaa equals any of the naturally occurring L-amino acids
  SITE (337): Xaa equals any of the naturally occurring L-amino acids
WRWRWRRKPTARTASTRHIFFLHIKEALLAGHLLCSPEQAVELSALLAQTKFGDYNQNTAKYNYEELCAKELSSATLNSIVAKHKELEGTSQASAEYQVLQIVSAMENYGIEWHSVRDSEGQKLLIGVGPEGISICKDDFSPINRIAYPVVQMATQSGKNVYLTVTKESGNSIVLLFKMISTRAASGLYRAITETHAFYRCDTVTSAVMMQYSRDLKGHLASLFLNENINLGKKYVFDIKRTSKEVYDHARRALYNAGVVDLVSRXNQSPSHSPLKSSESSMNCSSCEGLSCQQTRVLQEKLRKLKEAMLCMVCCEEEINSTFCPCGHTVCCESCAXQLQVGESAAHFCLQPHLSLLLTGSRSQVLAR

SEQ ID NO: 832 - protein, 636 aa, Homo sapiens
QRLWRSWRSEIRELCFSEKRVAFWTCFRPPTSQRERIASQRKTNSEVPMHRSAPSQTTKRSRSPFSTTRRSWDDSESSGTNLNIDNEDYSRYPPREYRASGSRRGMAYGHIDSYGADDSEEEGAGPVERPPVRGKTGKFKDDKLYDPDNGARSLAGPPPHFSSFSRDVREERDKLDPVPAARCSASRADFLPQSSVASQSSSEGKLATKGDSSERERREQNLPARPSRAPVSICGGGENTSKSAEEPVVRPKIRNLASPNCVKPKIFFDTDDDDDMPHSTSRWRDTANDNEGHSDGLARRGRGESSSGYPEPKYPEDKREARSDQVKPEKVPRRRRTMGDPDFWTHSDDYYKYCDEDSDSDKEWIAALRRKYRSREQTLSSSGESWETLPGKEEREPPQAKVSASTGTSPGPGASASAGAGAGASAGSNGSNYLEEVREPSLQEEQASLEEGEIPWLQYHENDSSSEGDNDSGHELMQPGVFMLDGNNNLEDDSSVSEDLEVDWSLFDGFADGLGVAEAISYVDPQFLTYMALEERLAQAMETALAHLESLAVDVEVANPPASKESIDALPEILVTEDHGAVGQEMCCPICCSEYVKGEVATELPCHHYFHKPCVSIWLQKSGTCPVCRCMFPPPL

SEQ ID NO: 833 - protein, 208 aa, Homo sapiens
SCLVRFLPAEMHNFEEELTCPICYSIFEDPRVLPCSHTFCRNCLENILQASGNFYIWRPLRIPLKCPNCRSITEIAPTGIESLPVNFALRAIIEKYQQEDHPDIVTCPEHYRQPLNVYCLLDKKLVCGHCLTIGQHHGHPIDDLQSAYLKEKDTPQKLLEQLTDTHWTDLTHLIEKLKEQKSHSEKMIQGDKEAVLQYFKELNDTLEQ

SEQ ID NO: 834 - protein, 266 aa, Homo sapiens
  SITE (115): Xaa equals any of the naturally occurring L-amino acids
  SITE (244): Xaa equals any of the naturally occurring L-amino acids
  SITE (250): Xaa equals any of the naturally occurring L-amino acids
  SITE (260): Xaa equals any of the naturally occurring L-amino acids
  SITE (266): Xaa equals any of the naturally occurring L-amino acids
LNAAMAQTVQNVTLSLTLPITCHICLGKVRQPVICINNHVFCSICIDLWLKNNSQCPACRVPITPENPCKEIIGGTSESEPMLSHTVRKHLRKTRLELLHKEYEDEIDCLQKEVXELKSKNLSLESQIKTILDPLTLVQGNQNEDKHLVTDNPSKINPETVAEWKKKLRTANEIYEKVKDDVDKLKEANKKLKLENGGLVRENLRLKAEVDNRSPPKVWKVCSCCSSSPKVEQYGAWKPNSPSXKAPGNXVLKVILEELXFSSWHX

SEQ ID NO: 835 - protein, 503 aa, Homo sapiens
PPASSRATMDSLAESRWPPGLAVMKTIDDLLRCGICFEYFNIAMIIPQCSHNYCSLCIRKFLSYKTQCPTCCVTVTEPDLKNNRILDELVKSLNFARNHLLQFALESPAKSPASSSSKNLAVKVYTPVASRQSLKQGSRLMDNFLIREMSGSTSELLIKENKSKFSPQKEASPAAKTKETRSVEEIAPDPSEAKRPEPPSTSTLKQVTKVDCPVCGVNIPESHINKHLDSCLSREEKKESLRSSVHKRKPLPKTVYNLLSDRDLKKKLKEHGLSIQGNKQQLIKRHQEFVHMYNAQCDALHPKSAAEIVQEIENIEKTRMRLEASKLNESVMVFTKDQTEKEIDEIHSKYRKKHKSEFQLLVDQARKGYKKIAGMSQKTVTITKEDESTEKLSSVCMGQEDNMTSVTNHFSQSKLDSPEELEPDREEDSSSCIDIQEVLSSSESDSCNSSSSDIIRDLLEEEEAWEASHKNDLQDTEISPRQNRRTRAAESAEIEPRNKRNRN

SEQ ID NO: 836 - protein, 201 aa, Homo sapiens
HESEPTGSVSNRNMERAESRSGRGGSGGGSSSGSSSSSSSSSSSSSSSSSSSSPSSSSGGESSETSSDLFEGSNEGSSSSGSSGARREGRHRAPVTFDESGSLPFLSLAQFFLLNEDDDDQPRGLTKEQIDNLAMRSFGENDALKTCSVCITEYTEGNKLRKLPCSHEYHVHCIDRWLSENSTCPICRRAVLASGNRESVV

SEQ ID NO: 837 - protein, 231 aa, Homo sapiens
  SITE (16): Xaa equals any of the naturally occurring L-amino acids
AREMAAQQRDCGGAAXLAGPAAEADPLGRFTCPVCLEVYEKPVQVPCGHVFCSACLQECLKPKKPVCGVCRSALAPGVRAVELERQIESTETSCHGCRKNFFLSKIRSHVATCSKYQNYIMEGVKATIKDASLQPRNVPNRYTFPCPYCPEKNFDQEGLVEHCKLFHSTDTKSVVCPICASMPWGDPNYRSANFREHIQRRHRFSYDTFVDYDVDEEDMMNQVLQRSIIDQ

SEQ ID NO: 838 - protein, 236 aa, Homo sapiens
  SITE (211): Xaa equals any of the naturally occurring L-amino acids
GPHLLSFPHGCWKGRLPGSASSQIPGLKDRLLVAVQRGHLRGVLSVGEEAVSPPLRLLQPFQRGDAFVPAGGPPRGEAGAGLSGAVPVPGRMVSLPPALRVPAVVSLRPRRERGDLEAVIEDAESKLSVALRQREQVLVHVLQRWPALVCGSCGGGRTIFCAPGLFRKLLDKTRLASWTDIIRQARDDLHGAAVAEVPSGMRRRLGHGRRXLLRAARPPRGTRRRPFAAPSPADAP

SEQ ID NO: 839 - protein, 121 aa, Homo sapiens
  SITE (48): Xaa equals any of the naturally occurring L-amino acids
  SITE (101): Xaa equals any of the naturally occurring L-amino acids
  SITE (106): Xaa equals any of the naturally occurring L-amino acids
RQSSAPAQDCALGSRWGPAGAASAGGTCRRAAGSAAMKVKIKCWNGVXTWLWVANDENCGICRMAFNGCCPDCKVPGDDCPLVWGQCSHCFHMHCILKWLXGQQVXQHCPMCRQNGSSRIR

SEQ ID NO: 840 - protein, 171 aa, Homo sapiens
GTSAIEQGPRAVSEGWAAMASYFDEHDCEPSDPEQETRTNMLLELARSLFNRMDFEDLGLVVDWDHHLPPPAAKTVVENLPRTVIRGSQAELKCPVCLLEFEEEETAIEMPCHHLFHSSCILPWLSKTNSCPLCRYELPTDDDTYEEHRRDKARKQQQQHRLENLHGAMYT

SEQ ID NO: 841 - protein, 285 aa, Homo sapiens
RKSSSVHNAASGLLGSRAPGRHRHLGRCRCRHRLVSPSPAMAEDLSAATSYTEDDFYCPVCQEVLKTPVRTTACQHVFCRKCFLTAMRESGAHCPLCRGNVTRRERACPERALDLENIMRKFSGSCRCCAKQIKFYRMRHHYKSCKKYQDEYGVSSIIPNFQISQDSVGNSNRSETSTSDNTETYQENTSSSGHPTFKCPLCQESNFTRQRLLDHCNSNHLFQIVPVTCPICVSLPWGDPSQITRNFVSHLNQRHQFDYGEFVNLQLDEETQYQTAVEESFQVNI

SEQ ID NO: 842 - protein, 422 aa, Homo sapiens
RHEQLSPSTACHPKGCKIKALRAKTNTYIKTPVRGEEPIFVVTGRKEDVAMAKREILSAAEHFSMIRASRNKNGPALGGLSCSPNLPGQTTVQVRVPYRVVGLVVGPKGATIKRIQQQTHTYIVTPSRDKEPVFEVTGMPENVDRAREEIEMHIAMRTGNYIELNEENDFHYNGTDVSFEGGTLGSAWLSSNPVPPSRARMISNYRNDSSSSLGSGSTDSYFGSNRLADFSPTSPFSTGNFWFGDTLPSVGSEDLAVDSPAFDSLPTSAQTIWTPFEPVNPLSGFGSDPSGNMKTQRRGSQPSTPRLSPTFPESIEHPLARRVRSDPPSTGNHVGLPIYIPAFSNGTNSYSSSNGGSTSSSPPESRRKHDCVICFENEVIAALVPCGHNLFCMECANKICEKRTPSCPVCQTAVTQAIQIHS

SEQ ID NO: 843 - protein, 284 aa, Homo sapiens
VWMAWQVSLLELEDWLQCPICLEVFKESLMLQCGHSYCKGCLVSLSYHLDTKVRCPMCWQVVDGSSSLPNVSLAWVIEALRLPGDPEPKVCVHHRNPLSLFCEKDQELICGLCGLLGSHQHHPVTPVSTVCSRMKEELAALFSELKQEQKKVDELIAKLVKNRTRIVNESDVFSWVIRREFQELRHPVDEEKARCLEGIGGHTRGLVASLDMQLEQAQGTRERLAQAECVLEQFGNEDHHEFIWKFHSMASRLTKTEELEKKWRNGLAASHSLPQQVRPQRRTP

SEQ ID NO: 844 - protein, 203 aa, Homo sapiens
  SITE (198): Xaa equals any of the naturally occurring L-amino acids
SMSSGKSARYNRFSGGPSNLPTPDVTTGTRMETTFGPAFSAVTTITKADGTSTYKQHCRTPSSSSTLAYSPRDEEDSMPPISTPRRSDSAISVRSLHSESSMSLRSTFSLPEEEEEPEPLVFAEQPSVKLCCQLCCSVFKDPVITTCGHTFCRRCALKSEKCPVDNVKLTVVVNNIAVAEQIGELFIHCRQCRVTGKXESPHL

SEQ ID NO: 845 - protein, 163 aa, Homo sapiens
HIEMALPKDAIPSLSECQCGICMEILVEPVTLPCNHTLCKPCFQSTVEKASLCCPFCRRRVSSWTRYHTRRNSLVNVELWTIIQKHYPRECKLRASGQESEEVADDYQPVRLLSKPGELRREYEEEISKVAAERRASEEEENKASEEYIQRLLAEEEEEEKKK

SEQ ID NO: 846 - protein, 146 aa, Homo sapiens
KIKIKKKRKTNLFRERRKHYLFKLSPLRTKSVPMNEPSDTFSAKRLSRSAWRSPAIAVAGEELVEDGLQRLVHLHGIAAAQVVAAGRAAEHLCPKGSVQAVLAHVVLAHGRDGPEHQLLTADTLERLLHFTQEQLERAAARRPVLE

SEQ ID NO: 847 - protein, 772 aa, Homo sapiens
  SITE (214): Xaa equals any of the naturally occurring L-amino acids
GDSNLDGTVTEMAIHAAAVLLCGQNELLEPLKNLAFSPATMAHAFLPTMPEDLAQARRWKGLERVHWYTCPNGHPCSVGECGRPMEQSICIDCHAPIGGIDHKPRDGFHLVKDKADRTQTGHVLGNPQRRDVVTCDRGLPPVVFLLIRLLTHLALLLGASQSSQALINIIKPPVRDPKGFLQQHILKDLEQLAKMLGHSADETIGVVHLVLRRXLQEQHQLSSRRLLNFDTELSTKEMRNNWEKEIAAVISPELEHLDKTLPTMNNLISQDKRISSNPVAKIIYGDPVTFLPHLPRKSVVHCSKIWSCRKRITVEYLQHIVEQKNGKERVPILWHFLQKEAELRLVKFLPEILALQRDLVKQFQNVQQVEYSSIRGFLSKHSSDGLRQLLHNRITVFLSTWNKLRRSLETNGEINLPKDYCSTDLDLDTEFEILLPRRRGLGLCATALVSYLIRLHNEIVYAVEKLSKENNSYSVDAAEVTELHVISYEVERDLTPLILSNCQYQVEEGRETVQEFDLEKIQRQIVSRFLQGKPRLSLKGIPTLVYRHDWNYEHLFMDIKNKMAQDSLPSSVISAISGQLQSYSDACEVLSVVEVTLGFLSTAGGDPNMQLNVYTQDILQMGDQTIHVLKALNRCQLKHTIALWQFLSAHKSEQLLRLHKEPFGEISSRYKADLSPENAKLLSTFLNQTGLDAFLLELHEMIILKLKNPQTQTEERFRPQWSLRDTLVSYMQTKESEILPEMASQFPEEILLASCVSVWKTAAVLKWNREMR

SEQ ID NO: 848 - protein, 110 aa, Homo sapiens
LLNSNISSEEDCQNQKLWDEVLSHLVEGPNFLKKLEQSFMCVCCQELVYQPVTTECFHNVCKDCLQRSFKAQVFSCPACRHDLGQNYIMIPNEILQTLLDLFFPGYSKGR

SEQ ID NO: 849 - protein, 439 aa, Homo sapiens
LKAGTPAGTGPEFPGRPTRPREVAHSRRAAGGGGPGGPGGSGDFLLIYLANLEAKSRQVAALLPPRGRRSANDELFRAGSRLRRQLAKLAIIFSHMHAELHALFPGGKYCGHMYQLTKAPAHTFWRESCGARCVLPWAEFESLLGTCHPVEPGCTALALRTTIDLTCSGHVSIFEFDVFTRLFQPWPTLLKNWQLLAVNHPGYMAFLTYDEVQERLQACRDKPGSYIFRPSCTRLGQWAIGYVSSDGSILQTIPANKPLSQVLLEGQKDGFYLYPDGKTHNPDLTELGQAEPQQRIHVSEEQLQLYWAMDSTFELCKICAESNKDVKIEPCGHLLCSCCLAAWQHSDSQTCPFCRCEIKGWEAVSIYQFHGQATAEDSGNSSDQEGRELELGQVPLSAPPLPPRPDLPPRKPRNAQPKVRLLKGNSPPAALGPQDPAPA

SEQ ID NO: 850 - protein, 225 aa, Homo sapiens
ITIQFFFVSVSFFIITAATVGYFIFYSARRLRNARAQSRKQRQLKADAKKAIGRLQLRTLKQGDKEIGPDGDSCAVCIELYKPNDLVRILTCNHIFHKTCVDPWLLEHRTCPMCKCDILKALGIEVDVEDGSVSLQVPVSNEISNSASSHEEDNRSETASSGYASVQGTDEPPLEEHVQSTNESLQLVNHEANSVAVDVIPHVDNPTFEEDETPNQETAVREIKS

SEQ ID NO: 851 - protein, 108 aa, Homo sapiens
  SITE (27): Xaa equals any of the naturally occurring L-amino acids
  SITE (37): Xaa equals any of the naturally occurring L-amino acids
  SITE (63): Xaa equals any of the naturally occurring L-amino acids
  SITE (87): Xaa equals any of the naturally occurring L-amino acids
  SITE (90): Xaa equals any of the naturally occurring L-amino acids
  SITE (104): Xaa equals any of the naturally occurring L-amino acids
IKMDESALLDLLECPVCLERLDASAKXLPCQHTFCKXCLLGIVGSRNELRCPECRTLVGSGVXELPSNTCWSDFWMASNRGLGNLVXWGXWGPLHNAIKSPEQXVGQL

SEQ ID NO: 852 - protein, 251 aa, Homo sapiens
CQGRCERLRRVGVEPQLSRGLALFWSPRPNPPEEMSGGLAPSKSTVYVSNLPFSLTNNDLYRIFSKYGKVVKVTIMKDKDTRKSKGVAFILFLDKDSAQNCTRAINNKQLFGRVIKASIAIDNGRAAEFIRRRNYFDKSKCYECGESGHLSYACPKNMLGEREPPKKKEKKKKKKAPEPEEEIEEVEESEDEGEDPALDSLSQAIAFQQAKIEEEQKKWKPSSGVPSTSDDSRRPRIKKSTYFSDEEELSD

SEQ ID NO: 853 - protein, 107 aa, Homo sapiens
NLISYDFQILSGTLVTNCVKKIPKVLFIGFPHEQNKKLKETHTKSRVYFSLTLGYFVLCGPTPVTYPSAHVLIFKGGGAICNSMTRFSTMETHRARIPQSSRVGEPG

SEQ ID NO: 854 - protein, 195 aa, Homo sapiens
GTRMATPMHRLIARRQAFDTELQPVKTFWILIQPSIVISEANKQHVRCQKCLEFGHWTYECTGKRKYLHRPSRTAELKKALKEKENRLLLQQSIGETNVERKAKKKRSKSVTSSSSSSSDSSASDSSSESEETSTSSSSEDSDTDESSSSSSSSASSTTSSSSSDSDSDSSSSSSSSTSTDSSSDDEPPKKKKKK

SEQ ID NO: 855 - protein, 154 aa, Homo sapiens
AAGQMWRGRAGALLRVWGFWPTGVPRRRPLSCDAASQAGSNYPRCWNCGGPWGPGREDRFFCPQCRALQAPDPTRDYFSLMDCNRSFRVDTAKLQHRYQQLQRLVHPDFFSQRSQTEKDFSEKHSTLVNDAYKTLLAPLSRGLYLAKAPWNRDS

SEQ ID NO: 856 - protein, 536 aa, Homo sapiens
  SITE (35): Xaa equals any of the naturally occurring L-amino acids
  SITE (98): Xaa equals any of the naturally occurring L-amino acids
  SITE (111): Xaa equals any of the naturally occurring L-amino acids
  SITE (145): Xaa equals any of the naturally occurring L-amino acids
  SITE (514): Xaa equals any of the naturally occurring L-amino acids
  SITE (525): Xaa equals any of the naturally occurring L-amino acids
ATAKYEDVKECGKHVERALLVELNKISLKEENVCXEKNSPVDQSDFFYEFSKLIFTKGKSPTVVCSLCKREGHLKKDCPEDFKRIQLEPLPPLTPKFXNILDQVCIQCYKXFSPTIIEDQAREHIRQNLESFIRQDFPGTKLSLXGSSKNGFGFKQSDLDVCMTINGLETAEGLDCVRTIEELARVLRKHSGLRNILPITTAKVPIVKFFHLRSGLEVDISLYNTLALHNTRLLSAYSAIDPRVKYLCYTMKVFTKMCDIGDASRGSLSSYAYTLMVLYFLQQRNPPVIPVLQEIYKGEKKPEIFVDGWNIYFFDQIDELPTYWSECGKNTESVGQLWLGLLRFYTEEFDFKEHVISIRRKSLLTTFKKQWTSKYIVIEDPFDLNHNLGAGLSRKMTNFIMKAFINGRRVFGIPVKGFPKDYPSKMEYFFDPDVLTEGELAPNDRCCRICGKIGHFMKDCPMRRKVRRRRDQEDALNQRYPENKEKRTKRTKKFTTSTQKGRCQQKKISPYSAXLRKPSQCGQLXTWGGRRSSGHQ

SEQ ID NO: 857 - protein, 253 aa, Homo sapiens
CRAIGEDGINWSISDKDIEAQIANNRTPGRWTQRYYSANKNIICRNCDKRGHLSKNCPLPRKVRRCFLCSRRGHLLYSCPAPLCEYCPVPKMLDHSCLFRHSWDKQCDRCHMLGHYTDACTEIWRQYHLTTKPGPPKKPKTPSRPSALAYCYHCAQKGHYGHECPEREVYDPSPVSPFICYYDDKYEIQEREKRLKQKIKVLKKNGVIPEPSKLPYIKAANENPHHDIRKGRASWKSNRWPQENKETQKKKKK

SEQ ID NO: 858 - protein, 140 aa, Homo sapiens
  SITE (105): Xaa equals any of the naturally occurring L-amino acids
  SITE (106): Xaa equals any of the naturally occurring L-amino acids
KNQHFHQFYIQTKPHGIGVICVFSVSLGLASSPSCHGTAAVGHSLSCWMAEAHSASHYPEALDGRLEGLEIPNCHGSIDASSAKFATILLVHLINRDLSDAILVXXSLSFQRRESWDRGSPDGLGAEDSRTLGSRRSLLC

SEQ ID NO: 859 - protein, 188 aa, Homo sapiens
IRHEPGPPGPRWACSLEDRIAAMSSKDFFACGHSGHWARGCPRGGAGGRRGGGHGRGSQCGSTTLSYTCYCCGESGRNAKNCVLLGNICYNCGRSGHIAKDCKDPKRERRQHCYTCGRLGHLARDCDRQKEQKCYSCGKLGHIQKDCAQVKCYRCGEIGHVAINCSKARPGQLLPLRQIPASSQGMSQ

SEQ ID NO: 860 - protein, 251 aa, Homo sapiens
TLVLALIEEKWRSHRILRMNSGRPETMENLPALYTIFQGEVAMVTDYGAFIKIPGCRKQGLVHRTHMSSCRVDKPSEIVDVGDKVWVKLIGREMKNDRIKVSLSMKVVNQGTGKDLDPNNVIIEQEERRRRSFQDYTGQKIPLEAVLNTTCKKCGCKGHFAKDCFMQPGGTKYSLIPDEEEEKEEAKSAEFEKPDPTRNPSRKRKKAQKSHPNRDRESSDSDSSDSESDTGKRARHTSKDSKAAKKKKKKK

SEQ ID NO: 861 - protein, 534 aa, Homo sapiens
YFTNFCLDKLGQPLLNENPQLSEGWEIPKYHQVFSHIVSLEGQEIQVKAKRPKPHCFNCGSEEHQMKDCPMPRNAARISEKRKEYMDACGEANNQNFQQRYHAEEVEERFGRFKPGVISEELQDALGVTDKSLPPFIYRMRQLGYPPGWLKEAELENSGLALYDGKDGTDGETEVGEIQQNKSVTYDLSKLVNYPGFNISTPRGIPDEWRIFGSIPMQACQQKDVFANYLTSNFQAPGVKSGNKRSSSHSSPGSPKKQKNESNSAGSPADMELDSDMEVPHGSQSSESFQFQPPLPPDTPPLPRGTPPPVFTPPLPKGTPPLTPSDSPQTRTASGAVDEDALTLEELEEQQRRIWAALEQAESVNSDSDVPVDTPLTGNSVASSPCPNELDLPVPEGKTSEKQTLDEPEVPEIFTKKSEAGHASSPDSEVTSLCQKEKAELAPVNTEGALLDNGSVVPNCDISNGGSQKLFPADTSPSTATKIHSPIPDMSKFATGITPFEFENMAESTGMYLRIRSLLKNSPRNQQKNKKASE

SEQ ID NO: 862 - protein, 100 aa, Homo sapiens
FFFFLFFLCFAWGASFLRDSLLASSCLRFGRFWLVPSKDPFFMSSHDVAGKGLLLYVVLTRAHLVIISSVVPHRATAQLLTAHESPRAAELASRADAWVD

SEQ ID NO: 863 - protein, 378 aa, Homo sapiens
TRPPTRPPTRPVVHASTLDRVLKTAQQPALVVETSTAATGTPSTVLHAARPPIKLLLSSSVPADSAISGQTSCPNNVQISVPPAIINPRTALYTANTKVAFSAMSSMPVGPLQGGFCANSNTASPSSHPSTSFANMATLPSCPAPSSSPALSSVPESSFYSSSGGGGSTGNIPASNPNHHHHHHHQQPPAPPQPAPPPPGCIVCTSCGCSGSCGSSGLTVSYANYFQHPFSGPSVFTFPFLPFSPMCSSGYVSAQQYGGGSTFPVVHAPYSSSGTPDPVLSGQSTFAVPPMQNFMAGTAGVYQTQGLVGSSNGSSHKKSGNLSCYNCGATGHRAQDCKQPSMDFNRPGKRAPWPRPPGSRRTSAHKCLVFMKSKLLSL

SEQ ID NO: 864 - protein, 198 aa, Homo sapiens
  SITE (12): Xaa equals any of the naturally occurring L-amino acids
  SITE (20): Xaa equals any of the naturally occurring L-amino acids
AYKMLYQKTTTXGETKLLAXEIYDILQSSNMADGDSFNEMNSRRRKAQFFLGTTNKRAKTVVLHIDGLDDTSRRNLCEEALLKIKGVISFTFQMAVQRCVVRIRSDLKAEALASAIASTKVMKAQQVVKSESGEEMLVPFQDTPVEVEQNTELPDYLPEDESPTKEQDKAVSRVGSHPEGGASWLSTAANFLSRSFYW

SEQ ID NO: 865 - protein, 753 aa, Homo sapiens
  SITE (486): Xaa equals any of the naturally occurring L-amino acids
WIPRAAGIRHELCLANMSAEYTSKVQIFEHGGLEPLIRLLSSPDPDVKKNSMECIYNLVQDFQCRAKLQELNAIPPILDLLKSEYPVIQLLALKTLGVIANDKESRTMLRDNQGLDHLIKILETKELNDLHIEALAVIANCLEDMDTMVQIQQTGGLKKLLSFAENSTIPDIQKNAAKAITKAAYDPENRKLFHEQEVEKCLVALLGSENDGTKIAASQAISAMCENSGSKDFFNNQGIPQLIQLLKSDNEEVREAAALALANLTTCNPANANAAAEADGIDPLINLLSSKRDGAIANAATVLTNMAMQEPLRLNIQNHDIMHAIISPLRSANTVVQSKAALAVTATACDVEARTELRNSGGLEPLVELLRSKNDEVRKHASWAVMVCAGDELTANELCRLGALDILEEVNVSGTRKNKFSEAAYNKLLNNNLSLKYSQTGYLSSSNIINDGFYDYGRINPGTKLLPLKELCLQEPSDLRAVLLIXSKSYVSPPSSMEDKSDVGYGRSISSSSSLRRSSKEKNKKNSYHFSAGFGSPIEDKSEPASGRNTVLSKSATKEKGWRKSKGKKEEEKVKEEEEVMVVPKFVGEGSSDKEWCPPSDPDFSMYVYEVTKSILPITNIKEQIEDLAKYVAEKMGGKIPKEKLPDFSWELHISELKFQLKSNVIPIGHVKKGIFYHRALLFKALADRIGIGCSLVRGEYGRAWNEVMLQNDSRKGVIGGLPAPEMYVIDLMFHPGGLMKLRSREADLYRFI

SEQ ID NO: 866 - protein, 331 aa, Homo sapiens
HEHLRSHTQEKVVACPTCGGMFANNTKFLDHIRRQTSLDQQHFQCSHCSKRFATERLLRDHMRNHVNHYKCPLCDMTCPLPSSLRNHMRFRHSEDRPFKCDCCDYSCKNLIDLQKHLDTHSEEPAYRCDFENCTFSARSLCSIKSHYRKVHEGDSEPRYKCHVCDKCFTRGNNLTVHLRKKHQFKWPSGHPRFRYKEHEDGYMRLQLVRYESVELTQQLLRQPQEGSGLGTSLNESSLQGIILETVPGEPGRKEEEEEGKGSEGTALSASQDNPSSVIHVVNQTNAQGQQEIVYYVLSEAPGEPPPAPEPPSGGIMEKLQGIAEEPEIQMV

SEQ ID NO: 867 - protein, 242 aa, Homo sapiens
RPDLSSVILRKFFIEKEKFYGCSKGGKAFPWKPNLILHLRTHSGERPFRGKVYHKAFMVRTQLTIHQRTHTGEKPYAGLDYEKAFLKKAQLMKHQGIHTEKRPYGCRECQEAFIWKLDLNNHKKTHHAVRKSHECRECGKVLSSKKNFVIHQRTHTGEKPFKCKVCDKAFTSKGNLIVYQRTHIGNKSYECSDCDRAFSSKVYLMTHQPIHTGERPYDAMKVNKLSPKRQVSVSIEKLAMQE

SEQ ID NO: 868 - protein, 121 aa, Homo sapiens
ERVHTGEKTYECKECGKAFLYSTHFRIHERTHTREKPYECKQCGRVFIYFSHLRRHERSHTGVKPCECKQCGKAFTCLNSLKVHKRIHTGERPFQCRQCGKAFSYSKSLHVHERTHSRQKP

SEQ ID NO: 869 - protein, 247 aa, Homo sapiens
VGGPLVKVDILEFIREFILAKNHINVRNVGRLLVGAQILLNMGSFILMRSHTYVRNVERPLEEVTSLLYIREFTLVKSHMSVKNVGRAIPLPHTFFYIREFIKVENPMNVRSVRKPLLCIEILLGIRIFILVRNFLKCKECGKTFRRSSHLTAHQSIHADKKPYECKECGKAFKMYGYLTQHQKIHTGGKPYECKECGKAFSRASNLVQHERIHTGEKPYVCKQCGKTFRYGSALKAHQRIHRSIKV

SEQ ID NO: 870 - protein, 57 aa, Homo sapiens
  SITE (34): Xaa equals any of the naturally occurring L-amino acids
NDFTYVYEPKHSENTKNFYQYLSYSFFRLSFRFXVVPHNFITKFYYSGIIQRVVVLK

SEQ ID NO: 871 - protein, 534 aa, Homo sapiens
  SITE (460): Xaa equals any of the naturally occurring L-amino acids
  SITE (479): Xaa equals any of the naturally occurring L-amino acids
KQSRSSPLKMPLRDKYCQTDHHHHGCCEPVYILEPGDPPLLQQPLQTSKSGIQQIIECFRSGTKQLKHILLKDVDTIFECKLCRSLFRGLPNLITHKKFYCPPSLQMDDNLPDVNDKQSQAINDLLEAIYPSVDKREYIIKLEPIETNQNAVFQYISRTDNPIEVTESSSTPEQTEVQIQETSTEQSKTVPVTDTEVETVEPPPVEIVTDEVAPTSDEQPQESQADLETSDNSDFGHQLICCLCRKEFNSRRGVRRHIRKVHKKKMEELKKYIETRKNPNQSSKGRSKNVLVPLSRSCPVCCKSFATKANVRRHFDEVHRGLRRDSITPDIATKPGQPLFLDSISPKKSFKTRKQKSSSKAEYNLTACKCLLCKRKYSSQIMLKRHMQIVHKITLSGTNSKREKGPNNTANSSEIKVKVEPADSVESSPPSITHSPQNELKGTNHSNEKKNTPAAQKNKXKQDSESPKSTSPSAAGGQXKTRKPKLSAGFDFKQLYCKLCKRQVTSKQNLTKHIELHTDGNNIYVKFYKGLFAL

SEQ ID NO: 872 - protein, 153 aa, Homo sapiens
VPEAGTLPEQKTCQQSEEIPSNPWNGDIKGGNEEARLRSEEQQKQRQEPVLPICNMTFSSPVVAQSHYLGKTHAKNLKLKQQSTKVEALHQNREMIDPDKFCSLCHATFNDPVMAQQHYVGKKHRKQETKLKLMARYGRLADPAVTDFPGEGA

SEQ ID NO: 873 - protein, 115 aa, Homo sapiens
NMKSPTGDQLSFPPVSSTWLSGLLQPHMQAEVKEEKIVPTSAHDQERYQRSFSSVTCAAHMVSWRRRCRDRWSEREKLRLQSVHRKGLMPVCLRKWRVSSSERANFQEQPSQVHL

SEQ ID NO: 874 - protein, 270 aa, Homo sapiens
GTRRRSLGVSVRSWDELPDEKRADTYIPVGLGRLLHDPPEDCRSDGGSSSGSGSSSAGEPGGAESSSSPHAPESETPEPGDAEGPDGHLATKQRPVARSKIKFTTGTCSDSVVHSCDLCGKGFRLQRMLNRHLKCHNQVKRHLCTFCGKGFNDTFDLKRHVRTHTGIRPYKCNVCNKAFTQRCSLESHLKKIHGVQQQYAYKQRRDKLYVCEDCGYTGPTQEDLYLHVNSAHPGSSFLKKTSKKLAALLQGKLTSAHQENTSLSEEEERK

SEQ ID NO: 875 - protein, 175 aa, Homo sapiens
EIFRWRVNFIRHLRSRREQEKPHECSVCGELFSDSEDLDGHLESHEAQKPYRCGACGKSFRLNSHLLSHRRIHLQPDRLQPVEKREQAASEDADKGPKEPLENGKAKLSFQCCECGKAFQRHDHLARHRSHFHLKDKARPFQCRYCVKSFTQNYDLLRHERLHMKRRSKQALNSY

SEQ ID NO: 876 - protein, 631 aa, Homo sapiens
IILGTDSAHAEIADRCYLQVQWLRLSLQEMRPWITEVPRVFAGPWTRSEARPQSPMSEAVGSPSERLRALFRTRARRVAEMEAQSRALQLRGEGEGDGGRGPRTSSALAVWLKLARAGSDSARIPSELSRRLQVVACTRGGMSRLFGLEQEIRELQAEAGRTRGALEVLGARIQELQAEPGNPLSSRREAELYSPVQKANPGTLAAEIRALREAYIRDGGRDPGVLGQIWQLQVEASALELQRSQTRRGRAGATSGELPVVEAENRRLEAEILALQMQRGRAPLGPQDLRLLGDASLQPKGRRDPPLLPPPVAPLLPPLPGFSEVQFLGGAKAVRTRGGLGEQVGGSSALSSWGNMSSYKAFWRSQLSSPQPQLPGTMTRNLGLDSHFLLPTSDMLGPAPYDPGAGLVIFYDFLRGLEASWIWVQLRTGLARDGRDTGRTTALPPALCLPPPPAPGPMGNCAILASRQPVPRLPPSSSVSLVCELQVWQGLAWARAPQPKAWVSLGLFDQDQRVLSGRWRLPLRALPLDPSLSLGQLNGIPQAGQAELFLRLVNARDAAVQTLAEINPASVHEYQYPPPVSSTSSLEANFLTPAVGFADPPPRTEEPLSGVKDRDEGLGPHHSSDLPPVSF

SEQ ID NO: 877 - protein, 175 aa, Homo sapiens
FSLACLSSRCSLCGYVCSHPPSLKSHMWKHASDQNYNYEQVNKAINDAISQSGRVLGKSPGKTQLKSSEESADPVTGSSENAVSSSELMSQTPSEVLGTNENEKLSPTSNTSYSLEKISSLAPPSMEYCVLLFCCCICGFESTSKENLLDHMKEHEGEIVNIILNKDHNTALNTN

SEQ ID NO: 878 - protein, 318 aa, Homo sapiens
EQKLELHRGGGRSRTSGSPGLQEFGTSGPGEGQAPPAFPDCAGGFLTTAADSAREDPPASTGITDYGGAGRDFLRGTGVTEDVFPDSYVSAWHEESSGGPESCPVETSAPPDCALAGPRPTGVKTPGPPVALFPFHLGAPGPPAPTPPTPSGPAPAPPPTFYPTLQPDAAPSAQLGETQAVPAAPAAQATAISGTPVRAPGGQGAEQPAYECSHCRKTFSSRKNYTKHMFIHSGEKPHQCAVCWRSFSLRDYLLKHMVTHTGVRAFQCAVCAKRFTQKSSLNVHMRTHRPERAPCPACGKVFSHRALLERHLAAHPAP

SEQ ID NO: 879 - protein, 184 aa, Homo sapiens
IFGEDIWCPAPHGARCQGRRLLSRRTEDSHLNGYGRGMAEDYMVLDLSTTSSLQSSSSIHSSRESDAGSDEGILLDDIDGASDSGESAHKAEAPALPGSLGAEVSGSLMFSSLSGSNGGIMCNICHKMYSNKGTLRVHYKTVHLREMHKCKVPGCNMMFSSVRSRNRHSQNPNLHKNIPFTSVD

SEQ ID NO: 880 - protein, 130 aa, Homo sapiens
LVKCPKGEFSFHSNKDRFAHSLKQNVAMNIQPLHTYKDVRMIPPTKHTHSHTRTHTHMHTRACTHAHMHTHIRTRKHMHTCTHVHTCTHAHTCTGPGSSSIIMVVISERHLRLRQQVLDKYVHVYLVLVL

SEQ ID NO: 881 - protein, 252 aa, Homo sapiens
WLRQKGQGRPGMWPSLEALCSLFAARSTGRQAQSAPTPAWDEDTAQIGPKRIRKAAKRELMPCDFPGCGRIFSNRQYLNHHKKYQHIHQKSFSCPEPACGKSFNFKKHLKEHMKLHSDTRDYICEFCARSFRTSSNLVIHRRIHTGEKPLQCEICGFTCRQKASLNWHQRKHAETVAALRFPCEFCGKRFEKPDSVAAHRSKSHPALLLAPQESPSGPLEPCPSISAPGPLGSSEGSRPSASPQAPTLLPQQ

SEQ ID NO: 882 - protein, 141 aa, Homo sapiens
  SITE (20): Xaa equals any of the naturally occurring L-amino acids
  SITE (28): Xaa equals any of the naturally occurring L-amino acids
  SITE (40): Xaa equals any of the naturally occurring L-amino acids
  SITE (43): Xaa equals any of the naturally occurring L-amino acids
  SITE (46): Xaa equals any of the naturally occurring L-amino acids
  SITE (49): Xaa equals any of the naturally occurring L-amino acids
CQMQCTFLFSLMVLSFSFFXASEEESGXPFQCPICGLVIXRKXYWXRHXVIHTGLKSHQCPLCPFRCVRKDNLKSHMKVSHLPTAPPGEAGTARASVHGLVQEASWPREGASLMKHADDSTPRSKVEFNRKVLMSTLQPRT

SEQ ID NO: 883 - protein, 577 aa, Homo sapiens
DNMELIVKQISDDSESHWVAPEHTERSVPQDPDFAEVSDLKGMVQRWQVNPTVGKSRQNPSQKRDLDAITDISPKQSTHGERGHRCSDCGKFFLQASNFIQHRRIHTGEKPFKCGECGKSYNQRVHLTQHQRVHTGEKPYKCQVCGKAFRVSSHLVQHHSVHSGERPYGCNECGKNFGRHSHLIEHLKRHFREKSQRCSDKRSKNTKLSVKKKISEYSEADMELSGKTQRNVSQVQDFGEGCEFQGKLDRKQGIPMKEILGQPSSKRMNYSEVPYVHKKSSTGERPHKCNECGKSFIQSAHLIQHQRIHTGEKPFRCEECGKSYNQRVHLTQHQRVHTGEKPYTCPLCGKAFRVRSHLVQHQSVHSGERPFKCNECGKGFGRRSHLAGHLRLHSREKSHQCRECGEIFFQYVSLIEHQVLHMGQKNEKNGICEEAYSWNLTVIEDKKIELQEQPYQCDICGKAFGYSSDLIQHYRTHTAEKPYQCDICRENVGQCSHTKQHQKIYSSTKSHQCHECGRGFTLKSHLNQHQRIHTGEKPFQCKECGMNFSWSCSLFKHLRSHERTDPINTLSVEGSLL

SEQ ID NO: 884 - protein, 143 aa, Homo sapiens
GCRNSARGSPHPASLPLPQPLLSSPHPASLPPSPARRSQNRHQGGSRCSTMTGIAAASFFSNTCRFGGCGLHFPTLADLIEHIEDNHIDTDPRVLEKQELQQPTYVALSYINRFMTDAARREQESLKKKIQPKLSLTLSSSVS

SEQ ID NO: 885 - protein, 176 aa, Homo sapiens
RKGPSTMEDPNPEENMKQQDSPKERSPQSPGGNICHLGAPKCTRCLITFADSKFQERHMKREHPADFVAQKLQGVLFICFTCARSFPSSKALITHQRSHGPAAKPTLPVATTTAQPTFPCPDCGKTFGQAVSLRRHRQMHEVRAPPGTFACTECGQDFAQEAGLHQHYIRHARGEL

SEQ ID NO: 886 - protein, 375 aa, Homo sapiens
  SITE (55): Xaa equals any of the naturally occurring L-amino acids
GCRIRYEVPQPPPQPEPRSVPQPGAGARSPNVRQPRPQLLPSRGAPSASGVPLPXVRPELYTVLVLKGHMRKHKAFFDHACPVCGRCFKEPWFLKNHMKVHASKLGPLRAPGPASGPARAPQPPDLGLLAYEPLGPALLLVPAPTPAERREPPSLLGYLSLRAGEGRPNGEGAEPGPGRSFGGFRPLSSALPARARRHRAEEPEEEEEVVEAEEETWARGRSLGSLASLHPRPGEGPGHSASAAGAQARSTATQEENGLLVGGTRPEGGRGATGKDCPFCGKSFRSAHSPQSASASAHRRAALQVSALRLRGHPVRLAQVSPTAPPPGAEERGRPRATPGATASFPAGFGPAIWSQAVSAACDLGGGRLKSPASF

SEQ ID NO: 887 - protein, 269 aa, Homo sapiens
  SITE (82): Xaa equals any of the naturally occurring L-amino acids
  SITE (151): Xaa equals any of the naturally occurring L-amino acids
  SITE (189): Xaa equals any of the naturally occurring L-amino acids
STRKFGKAFAFSPDLAKHIRLRTRGKHYVCNECGKEFTCFSKLNIHIRVHTGEKPYECNKCGKAFTDSSGLIKHRRTHTGEXPYECKECGKAFANSSHLTVHMRTHTGEKPYQCKECGKAFINSSSFKSHMQTHPGVKPYDCQQCGKAFIXSSFLIRHLRSHSAERPFECEECGKAFRYSSHLSQHKRXHTGERPYKCQKCGQAFSISSGLTVHMRTHTGERPFECQECGKAFTRSTYLIRHLRSHSVEKPYKECGQTFSNSSCLTECV

SEQ ID NO: 888 - protein, 219 aa, Homo sapiens
PGAAWSRPDLRGCCTGPQPALRMLVLPSPCPQPLAFSSVETMEGPPRRTCRSPEPGPSSSIGSPQASSPPRPNHYLLIDTQGVPYTVLVDEESQREPGASGAPGQKKCYSCPVCSRVFEYMSYLQRHSITHSEVKPFECDICGKAFKRASHLARHHSIHLAGGGRPHGCPLCPRRFRDAGELAQHSRVHSGERPFQCPHCPRRFMEQNTLQKHTRWKHP

SEQ ID NO: 889 - protein, 152 aa, Homo sapiens
  SITE (37): Xaa equals any of the naturally occurring L-amino acids
PSVAPAHLQCGDCGFTCKQSRCMQQHRRLKHEGVKPXQCPFCDFSTTRRYRLEAHQSRHTGIGRIPCSSCPQTFGTNSKLRLHRLRVHDKTPTHFCPLCDYSGYLRHDITRHVNSCHQGTPAFACSQCEAQFSSETALKQHALRRQPEAAKA

SEQ ID NO: 890 - protein, 342 aa, Homo sapiens
  SITE (25): Xaa equals any of the naturally occurring L-amino acids
  SITE (43): Xaa equals any of the naturally occurring L-amino acids
  SITE (212): Xaa equals any of the naturally occurring L-amino acids
DLPDSSHPGGPQEGPHRAEAVRLRXCGKAFPKAYLLKKHQEVXVRERRFRCGDCGKLYKTIAHVRGHRRVHSDERPYPCPKCGKRYKTKNAQQVHFRTHLEEKPHVCQFCSRGFREKGSLVRHVRHHTGEKPFKCYKCGRGFAEHGTLNRHLRTKGGCLLEVEELLVSEDSPAAATTVLTEDPHTVLVEFSSVVADTQEYIIEATADDAETXEATEIIEGTQTEVDSHIMKVVQQIVHQASAGHQIIVQNVTMDEETALGPEAAAADTITIATPESLTEQVAMTLASAISEGTVLAARAGTSGTEQATVTMVSSEDIEILEHAGELVIASPEGQLEVQTVIV

SEQ ID NO: 891 - protein, 399 aa, Homo sapiens
PTVLTSRRDSSSHEETPGSHPLYGHGECKWPGCETLCEDLGQFIKHLNTEHALDDRSTAQCRVQMQVVQQLEIQLAKESERLQAMMAHLHMRPSEPKPFSQPLNPVPGSSSFSKVTVSAADSFPDGLVHPPTSAAAPVTPLRPPGLGSASLHGGGPARRRSSDKFCSPISSELAQNHEFYKNADVRPPFTYASLIRQAILETPDRQLTLNEIYNWFTRMFAYFRRNTATWKNAVRHNLSLHKCFVRVENVKGAVWTVDEREYQKRRPPKMTGSPTLVKNMISGLSYGALNASYQAALAESSFPLLNSPGMLNPGSASSLLPLSHDDVGAPVEPLPSNGSSSPPRLSPPQYSHQVQVKEEPAEAEEDRQPGPPLGAPNPSASGPPEDRDLEEELPGEELS

SEQ ID NO: 892 - protein, 210 aa, Homo sapiens
ALAAAGASEELTAQLLVVHEGSDGLQREGLQAAAAGLAASLLTTQLVPHPGNCEELAKCLSTELISSLEHRGHQEGAKTMQTPVNIPVPVLRLPRGPDGFSRGFAPDGRRAPLRPEVPEIQECPIAQESLESQEQRARAALRERYLRSLLAMVGHQVSFTLHEGVRVAAHFGATDLDVANFYVSQLQTPIGVQAEALLRCSDIISYTFKP

SEQ ID NO: 893 - protein, 361 aa, Homo sapiens
GTRRTHTGERPFECPECGKAFREKSTVIIHYRTHTGEKPYECNECGKAFTQKSNLIVHQKTHTGEKTYECTKCGESFIQKLDLIIHHSTHTGKKPHECNECKKTFSDKSTLIIHQRTHTGEKPHKCTECGKSFNEKSTLIVHQRTHTGEKPYECDVCGKTFTQKSNLGVHQRTHSGEKPFECNECEKAFSQKSYLMLHQRGHTGEKPYECNECEKAFSQKSYLIIHQRTHTEEKPYKCNECGKAFREKSKLIIHQRIHTGEKPYECPVCWKAFSQKSQLIIHQRTHTGEKPYACTECGKAFREKSTFTVHQRTHTGEKPYKCTECGKAFTQKSNLIVHQRTHAGKKAHGRGHTRKSKFMAH

SEQ ID NO: 894 - protein, 178 aa, Homo sapiens
LRKIPHFRSPRHRSHLPAPRWVLAPAPVWQGPGSVGARSRRRRHGVSTSLIRETPFTKAMEVEAAEARSPAPGYKRSGRRYKCLSCTKTFPNAPRAARHAATHGPADCSEEVAEVKPKPETEAKAEEASGEKVSGSAAKPRPYACPLCPKAYKTAPELRSHGRSHTGEKPFPCPECGR

SEQ ID NO: 895 - protein, 547 aa, Homo sapiens
GPRCWKFLILSSVNCETLRIGKAWPQSSGQERYWTPRTHSSASEAQRGSLAELSVAAAGLWAGCASNHPKNSAQNLTKDSTLKHEGFYSENLTESRKFLKSREKQSSLTEIKGSVYETTYSPPECPFCGKIEEHSEDMETHVKTKHANLLDIPLEDCDQPLYDCPMCGLICTNYHILQEHVDLHLEENSFQQGMDRVQCSGDLQLAHQLQQEEDRKRRSEESRQEIEEFQKLQRQYGLDNSGGYKQQQLRNMEIEVNRGRMPPSEFHRRKADMMESLALGFDDGKTKTSGIIEALHRYYQNAATDVRRVWLSSVVDHFHSSLGDKGWGCGYRNFQMLLSSLLQNDAYNDCLKGMLIPCIPKIQSMIEDAWKEGFDPQGASQLNNRLQGTKAWIGACEVYILLTSLRVKCHIVDFHKSTGPLGTHPRLFEWILNYYSSEGEGSPKVVCTSKPPIYLQHQGHSRTVIGIEEKKNRTLCLLILDPGCPSREMQKLLKQDIEASSLKQLRKSMGNLKHKQYQILAVEGALSLEEKLARRQASQVFTAEKIP

SEQ ID NO: 896 - protein, 362 aa, Homo sapiens
WEGAAAMERVNDASCGPSGCYTYQVSRHSTEMLHNLNQQRKNGGRFCDVLLRVGDESFPAHRAVLAACSEYFESVFSAQLGDGGAADGGPADVGGATAAPGGGAGGSRELEMHTISSKVFGDILDFAYTSRIGGRLESFPELMTAAKFLLMRPVIEICQEVIKQFNVQILVPPARADIMLFRPPGTSDLGFPLDMTNGAALAANSNGIAGSMQPEEEAARAAGAAIAGQASLPVLPGVDRLPMVAGPLSPQLLTSPFPSVASSAPPLTGKRGRGRPRKANLLDSMFGSPGGLREAGILPCGLCGKVFTDANRLRQHEAQHGVTSLQLGYIDLPPPRLGENGLPISEDPDGPRKRSRTGRGGL

SEQ ID NO: 897 - protein, 125 aa, Homo sapiens
SRPPGPAPPPAGSVDEGVSEGLPTLQSTSSTNAPPDDDDRLENVQYPYQLYIAPSTSSTERPSPNGPDRPFQCPTCGVRFTRIQNLKQHMLIHSGIKPFQCDRCGKKFTRAYSLKMHRLKHEVIS

SEQ ID NO: 898 - protein, 342 aa, Homo sapiens
  SITE (95): Xaa equals any of the naturally occurring L-amino acids
  SITE (106): Xaa equals any of the naturally occurring L-amino acids
  SITE (145): Xaa equals any of the naturally occurring L-amino acids
  SITE (301): Xaa equals any of the naturally occurring L-amino acids
  SITE (311): Xaa equals any of the naturally occurring L-amino acids
  SITE (316): Xaa equals any of the naturally occurring L-amino acids
  SITE (319): Xaa equals any of the naturally occurring L-amino acids
  SITE (320): Xaa equals any of the naturally occurring L-amino acids
  SITE (330): Xaa equals any of the naturally occurring L-amino acids
LKTETSEEKARRYKDRPSQLNAVFQEQKKMIQAQESITLEDVAVDFTWEEWQLLGAAQKDLYRDVMLENYSNLVAVGYQASKPDALFKLEQGEQXWTIEDGIHSGXCSDIWKVDHVLERLQSESLVNRRKPCHEHDAFENIVHCXKSQFLLGQNHDIFDLRGKSLKSNLTLVNQSKGYEIKNSVEFTGNGDSFLHANHERLHTAIKFPASQKLISTKSQFISPKHQKTRKLEKHHVCSECGKAFIKKSWLTDHQVMHTGEKPHRCSLCEKAFSRKFMLTEHQRTHTGEKPYECPECGKAFXKKSRLNIHQXTHTGXKPXXCSECGKGFIXKGISLYTANSYR

SEQ ID NO: 899 - protein, 411 aa, Homo sapiens
  SITE (396): Xaa equals any of the naturally occurring L-amino acids
LSGCPGALLRQTDCHSLRMAALSPTFATSTQDSTCLQDSEFPVSSKDHSCPQNLDLFVCSGLEPHTPSVGSQESVTFQDVAVDFTEKEWPLLDSSQRKLYKDVMLENYSNLTSLGYQVGKPSLISHLEQEEEPRTEERGAHQGACADWETPSKTKWSLLMEDIFGKETPSGVTMERAGLGEKSTEYAHLFEVFGMDPHLTQPMGRHAGKRPYHRRDYGVAFKGRPHLTQHMSMYDGRKMHECHQCQKAFTTSASLTRHRRIHTGEKPYECSDCGKAFNDPSALRSHARTHLKEKPFDCSQCGNAFRTLSALKIHMRVHTGERPYKCDQCGKAYGRSCHLIAHKRTHTGERPYECHDCGKAFQHPSHLKEHVRNHTGEKPYACTQWTKAFRWKSNFXLHKKNHMVGEDLTIV

SEQ ID NO: 900 - protein, 524 aa, Homo sapiens
LLEEIESMTASVDVGKFPCDQLECKSSFTTYLNYVVHLEADHGIGLRASKTEEDGVYKCDCEGCDRIYATRSNLLRHIFNKHNDKHKAHLIRPRRLTPGQENMSSKANQEKSKSKHRGTKHSRCGKEGIKMPKTKRKKKNNLENKNAKIVQIEENKPYSLKRGKHVYSIKARNDALSECTSRFVTQYPCMIKGCTSVVTSESNIIRHYKCHKLSKAFTSQHRNLLIVFKRCCNSQVKETSEQEGAKNDVKDSDTCVSESNDNSRTTATVSQKEVEKNEKDEMDELTELFITKLINEDSTSVETQANTSSNVSNDFQEDNLCQSERQKASNLKRVNKEKNVSQNKKRKVEKAEPASAAELSSVRKEEETAVAIQTIEEHPASFDWSSFKPMGFEVSFLKFLEESAVKQKKNTDKDHPNTGNKKGSHSNSRKNIDKTAVTSGNHVCPCKESETFVQFANPSQLQCSDNVKIVLDKNLKDCTELVLKQLQEMKPTVSLKKLEVHSNDPDMSVMKDISIGKATGRGQY

SEQ ID NO: 901 - protein, 238 aa, Homo sapiens
  SITE (135): Xaa equals any of the naturally occurring L-amino acids
  SITE (153): Xaa equals any of the naturally occurring L-amino acids
  SITE (156): Xaa equals any of the naturally occurring L-amino acids
  SITE (185): Xaa equals any of the naturally occurring L-amino acids
  SITE (195): Xaa equals any of the naturally occurring L-amino acids
  SITE (196): Xaa equals any of the naturally occurring L-amino acids
  SITE (210): Xaa equals any of the naturally occurring L-amino acids
KHGWKLGQGLGKSLQGRTDPIPIVVKYDVMGMGRMEMELDYAEDATERRRVLEVEKEDTEELRQKYKDYVDKEKAIAKALEDLRANFYCELCDKQYQKHQEFDNHINSYDHAHKQRLKDLKQREFARNVSSRSRXDEKKQEKALRRLHELAEXRKXAECAPGSGPMFKPTTVAVDEEGGEDDKDXSATNSGTGAXXSCGLGSEFSTDKGXPFTAVQITNTHWTGPGSWVSFPRHQLWH

SEQ ID NO: 902 - protein, 79 aa, Homo sapiens
  SITE (64): Xaa equals any of the naturally occurring L-amino acids
AQARMGDSRDLCPHLDSIGEVTKEDLLLKSKGTCQSCGVTGPNLWACLQVACPYVGCGESFADXSTIHAQAKKHNLTVN

SEQ ID NO: 903 - protein, 114 aa, Homo sapiens
EFVFLNGEKHLGIRVILIQIFTEKNPEECNKKQSLQQDHTTHRTLIYIGVKFYKYLIFILDSNCIYISGNHTKAKSVNMVNVENILSWKFVVKAIFLMENQVFTGKISEAMSSE

SEQ ID NO: 904 - protein, 174 aa, Homo sapiens
  SITE (3): Xaa equals any of the naturally occurring L-amino acids
  SITE (22): Xaa equals any of the naturally occurring L-amino acids
  SITE (49): Xaa equals any of the naturally occurring L-amino acids
  SITE (68): Xaa equals any of the naturally occurring L-amino acids
  SITE (100): Xaa equals any of the naturally occurring L-amino acids
  SITE (141): Xaa equals any of the naturally occurring L-amino acids
YPXARKPGLESPLHPWLHPDQXPECWEGMGSQAVSLGILGLAPVHSPWXLDGVLHHPHLLGCCLGELXLQVLGRQAPCLWSCSLNAFDSSGVAITFVVRXSLALRIEADLTDITGNDGPLGLEQGSPKSVGEHSLLHRVHXAVVAEEAKGRGWLEWEGQDLLEVQWGLHDRGLP

SEQ ID NO: 905 - protein, 217 aa, Homo sapiens
  SITE (185): Xaa equals any of the naturally occurring L-amino acids
  SITE (192): Xaa equals any of the naturally occurring L-amino acids
  SITE (195): Xaa equals any of the naturally occurring L-amino acids
  SITE (200): Xaa equals any of the naturally occurring L-amino acids
  SITE (207): Xaa equals any of the naturally occurring L-amino acids
RSGAAAAIQTSGAGKLPRMQKEMKMIKDEDVHFDLAVKKTPSFPHCLQPVASRGKAPQRHPFPEALRGPFSQFRYEPPPGDLDGFPGVFEGAGSRKRKSMPTKMPYNHPAEEVTLALHSEENKNHGLPNLPLLFPQPPRPKYDSQMIDLCKWASNSTAAWEHFGGKPVKQEPIKPSAVWPQPTPXPFLPTPXPYXPKFHXGFMFPLXCGLVLGLSLS

SEQ ID NO: 906 - protein, 139 aa, Homo sapiens
  SITE (102): Xaa equals any of the naturally occurring L-amino acids
KSNFKCSICEKAFLYEKSFLKHSKHRHGVATEVVYRCDTCGQTFANRCNLKSHQRHVHSSERHFPCELCGKKFKRKKDVKRHVLQVHEGGGDGTVRPVRQGXEFQDSAALHERTHTGDRPYGCTESAPGSRSRPRSRRT

SEQ ID NO: 907 - protein, 83 aa, Homo sapiens
RPTRPAPGATVCAPTVLAAAWPGPWTMAAEAARALQRRCSQATGPIWRTLRTHEGRRRSWARTTRAWPLRMRCWRTTRMRKTR

SEQ ID NO: 908 - protein, 334 aa, Homo sapiens
PRVRKEGEREGERQREQGSGKGVGLLQPFRPQELGVKEHKCGICGREFTLLANMKRHVLIHTNIRAYQCHLCYKSFVQKQTLKAHMIVHSDVKPFKCKLCGKEFNRMHNLMGHMHLHSDSKPFKCLYCPSKFTLKGNLTRHMKVKHGVMERGLHSQGLGRGRIALAQTAGVLRSLEQEEPFDLSQKRRAKVPVFQSDGESAQGSHCHEEEEEDNCYEVEPYSPGLAPQSQQLCTPEDLSTKSEHAPEVLEDACKEEKEDASKGEWEKRSKGDLGAEGGQERDCAGRDECLSLRAFQSTRRGPSFSDYLYFKHRDESLKELLERKMEKQAVLLGI

SEQ ID NO: 909 - protein, 448 aa, Homo sapiens
GGKPYTCSQCGKAFIKKCRLIYHQRTHTGEKPHGCSVCGKAFSTKFSLTTHQKTHTGEKPYICSECGKGFIEKRRLIAHHRTHTGEKPFICNKCGKGFTLKNSLITHQQTHTGEKLYTCSECGKGFSMKHCLMVHQRTHTGEKPYKCNECGKGFALKSPLIRHQRTHTGEKPYVCTECRKGFTMKSDLIVHQRTHTAEKPYICNDCGKGFTVKSRLIVHQRTHTGEKPYVCGECGKGFPAKIRLMGHQRTHTGEKPYICNECGKGFTEKSHLNVHRRTHTGEKPYVCSECGKGLTGKSMLIAHQRTHTGEKPYICNECGKGFTMKSTLSIHQQTHTGEKPYKCNECDKTFTKKTCLIQHQRFHTGKTSFACTECGKFSLRKNDLITHQRIHTGEKPYKCSDCGKAFTTKSGLNVHQRKHTGERPYGCSDCGKAFAHLSILVKHKRIHR

SEQ ID NO: 910 - protein, 308 aa, Homo sapiens
KTQRSRGRYVNQMIINYVKRPATREGTPPRTHQRHHKENSFECKDCGKAFSRGYQLSQHQKIHTGEKPYECKECKKAFRWGNQLTQHQKIHTGEKPYECKDCGKAFRWGSSLVIHKRIHTGKNPMNVKTVERPFGVVMSSLSTRDSTLGRKTTNAKTVGRPLAVCINLFSTREFIVGRSLTSVKTVGRLLFVVQASFSIKEFTQVRNPMNVKNVGRPLLESITLLSIRRSTLVRSLTNVRSVGRPFAGVRASLSTRGYIRARSRTSAQNVGRPSIVAITSLSTRESTQAKPRINVRSVGRLSFMGRAS

SEQ ID NO: 911 - protein, 289 aa, Homo sapiens
STHASDCRKLYSLLKHLKLCHSRFIFNYVYHPKGARIDVSINECYDGSYAGNPQDIHRQPGFAFSRNGPVKRTPITHILVCRPKRTKASMSEFLESEDGEVEQQRTYSSGHNRLYFHSDTCLPLRPQEMEVDSEDEKDPEWLREKTITQIEEFSDVNEGEKEVMKLWNLHVMKHGFIADNQMNHACMLFVENYGQKIIKKNLCRNFMLHLVSMHDFNLISIMSIDKAVTKLREMQQKLEKGESASPANEEITEEQNGTANGFSEINSKEKALETDSVSGVSKQSKKQKL

SEQ ID NO: 912 - protein, 159 aa, Homo sapiens
RPTRPPKQKLSKKQKKKKQKPAQNYDDNFNVNGPGEGVKVDPEDTNLNQDSAKELEDSPQENVSVTEIIKPCDDPKSEAKSVPKPKGKKTKDMKKPVRVPAEPQTMSVLISCTTCHSEFPSRNKLFDHLKATGHARAPSSSSLNSATSSQSKKEKRKNR

SEQ ID NO: 913 - protein, 179 aa, Homo sapiens
TRPIKTDLDAMDIKGQESSSDQEQVDVESIDFSKENKMDMTSPEQSRNVLQFTEEKEAFISEEEIAKYMKRGKGKYYCKICCCRAMKKGAVLHHLVNKHNVHSPYKCTICGKAFLLESLLKNHVAAHGQSLLKCPRCNFESNFPRGFKKHLTHCQSRHNEEANKKLMEALEPPLEEQQI

SEQ ID NO: 914 - protein, 322 aa, Homo sapiens
SRVDPRVRFSRSSSLIQHERIHTGEKPHKCNQCGKAFSQSSSLFLHHRVHTGEKPYVCNECGRAFGFNSHLTEHVRIHTGEKPYVCNECGKAFRRSSTLVQHRRVHTGEKPYQCVECGKAFSQSSQLTLHQRVHTGEKPYDCGDCGKAFSRRSTLIQHQKVHSGETRKCRKHGLAFVHGSSLTADGQIPTGEKHGRAFNHGANLILRWTVHTGEKSFGCNEYGKAFSPTSRPTEDQIMHAGEKPYKCQECGNAFSGKSTLIQHQVTHTGQKPCHCSVYGKAFSQSSQLTPPQQTRVGEKPALNDGSKRYFIHIKKIFQERHF

SEQ ID NO: 915 - protein, 166 aa, Homo sapiens
  SITE (26): Xaa equals any of the naturally occurring L-amino acids
  SITE (46): Xaa equals any of the naturally occurring L-amino acids
  SITE (55): Xaa equals any of the naturally occurring L-amino acids
  SITE (130): Xaa equals any of the naturally occurring L-amino acids
INSPPTPVDTFRGEPHVCEECGHGFXQKSSLKSHRRTHSGEKPYVXGECGRGFSXRIVLNGHWRTHTGEKPYTCFECGRNFSLKSALSVHQRIHSGEKPYACTECGQGFITKSQLIRHQRTHTGEKPYVXGECGRGFIAQSTLHYHRSTQFKEKPYVCSQFGRGFL

SEQ ID NO: 916 - protein, 72 aa, Homo sapiens
MWQGLKVKSETRILQRILAGEKPNKCNECGKVFWHNSHIVQYCKNSCLRETKTLRVGNHYDFKHSSTSENPY

SEQ ID NO: 917 - protein, 161 aa, Homo sapiens
HASVDPRVRPRVRPRVRRTHTGEKPYICNECGKGFTMKSTLSIHQQTHTGEKPYKCNECDKTFRKKTCLIQHQRFHTGKTSFACTECGKFSLRKNDLITHQRIHTGEKPYKCSDCGKAFTTKSGLNVHQRKHTGERPYGCSDCGKAFAHLSILVKHRRIHR

SEQ ID NO: 918 - protein, 150 aa, Homo sapiens
  SITE (11): Xaa equals any of the naturally occurring L-amino acids
KKTLLILLPIXGTPAGTGPEFPGYECSVCGKGFSHSYVLIEHQRTHTGEKPYKCPDCGKSFSQSSSLIRHQRTHTGEKPYKCLECEKSFGCNSTLIKHQRIHTGEKPYQCPECGKNFSRSSNLIHTRKCTQERNPMKVLNMRKVWVRTAM

SEQ ID NO: 919 - protein, 168 aa, Homo sapiens
FGTRRTHTGEKPYKCELCDKGFAQKCQLVFHSRMHHGEEKPYKCDVCNLQFATSSNLKIHARKHSGEKPYVCDRCGQRFAQASTLTYHVRRHTGEKPYVCDTCGKAFAVSSSLITHSRKHTGEKPYICGICGKSFISSGELNKHFRSHTGERPLSANYVEILTQILKI

SEQ ID NO: 920 - protein, 293 aa, Homo sapiens
GWQQGVGLPQPIPPLHLLHHIVHCFSILTFQFFIRINIFPIVSIQVLFLLLAVLLLLLCQLLRLLFKPLEPGWFLTRVSVVGPTATSTHGHDIPGLLCRRWGRLLGRHGRLGLDGLLDGRVHGILVHTVHAQSFLQVLFIHHLHFPIHCLHGLLLQLNVTPGLEVVLVGVERGKLLTANGAVGGRALALLLRDGPLRPHSLLEALGGHWGHAGHLPPQVVAVPVRLIVGPLHVRVAERHPASYAGVRRHCQARNKNRPSQTPGDQRRGPTRPSDLNPPQQPGRATRHADFPRA

SEQ ID NO: 921 - protein, 105 aa, Homo sapiens
  SITE (28): Xaa equals any of the naturally occurring L-amino acids
  SITE (43): Xaa equals any of the naturally occurring L-amino acids
  SITE (47): Xaa equals any of the naturally occurring L-amino acids
  SITE (49): Xaa equals any of the naturally occurring L-amino acids
KAFQKDTVFFNHMEEKPYKWNGSEIAFXQMSDLTVHQTSHMEXKPYXCXECGKSFCKKSKFIIHQRTHTGEKPYECNQCGKSFCQKGNPLLCIREHTQGSKPYVM

SEQ ID NO: 922 - protein, 102 aa, Homo sapiens
  SITE (3): Xaa equals any of the naturally occurring L-amino acids
  SITE (54): Xaa equals any of the naturally occurring L-amino acids
  SITE (74): Xaa equals any of the naturally occurring L-amino acids
LDXKIPLVFPKTLVFPRQLKIQVKEEPVEEAEEEAPEASTAPKEAGPSKEASLXPCEKCWKMFTVHKQLERHQXLLCSVKPFICHVCNKAFRTNFRLWSHFQ

SEQ ID NO: 923 - protein, 151 aa, Homo sapiens
TSLKMMQAVGGAPARPTGEYICNQCGAKYTSLDSFQTHLKTHLDTVLPKLTCPQCNKEFPNQESLLKHVTIHFMITSTYYICESCDKQFTSVDDLQKHLLDMHTFVFFRCTLCQEVFDSKVSIQLHLAVKHSNEKKVYRCTSCNWDFPQRN

SEQ ID NO: 924 - protein, 131 aa, Homo sapiens
  SITE (102): Xaa equals any of the naturally occurring L-amino acids
ANVKYQLRRTGGTKFLKNLDTGHPVFFCNDCASQIRTPSTYISHLESHLGFRLRDLSKLSTEQINSQIAQTKSPSEKMVTSSPEEDLGTSYQCKLCNRTFAXKHAVKLHLSKTHGKSPEDHLLYVSELEKQ

SEQ ID NO: 925 - protein, 276 aa, Homo sapiens
  SITE (198): Xaa equals any of the naturally occurring L-amino acids
  SITE (203): Xaa equals any of the naturally occurring L-amino acids
  SITE (229): Xaa equals any of the naturally occurring L-amino acids
  SITE (237): Xaa equals any of the naturally occurring L-amino acids
ETMYPFIVTLEGNALQGPILQKDYVQLENQWETPPEDLQTDLAKLVDQQNPTLGETPENSNLEEPLNPKPHKKKSPGEKPHRCPQCGKCFARKSQLTGHQRIHSGEEPHKCPECGKRFLRSSDLYRHQRLHTGERPYECTVCKKRFTRRSHLIGHQRTHSEEETYKCLECGKSFCHGSSLKRHLKTHTGEKPHRCHNXGKSFXRLTALTLHQRTHTEERPFKCNYCGKXFRQRPSLXIHLRIHTGEKPYKCTHCSKSFRQRAGLIMHQVTHFRGLI

SEQ ID NO: 926 - protein, 351 aa, Homo sapiens
  SITE (312): Xaa equals any of the naturally occurring L-amino acids
  SITE (317): Xaa equals any of the naturally occurring L-amino acids
  SITE (318): Xaa equals any of the naturally occurring L-amino acids
STPLLSSMESVINPNITSQDKNEQGGMLCSQMENLPSTALPAQMEDLTKTVLPLNIDSGSDPFLPLPAESSSMSLFPSPADSGTNSVFSQLENNTNHYSSQIEGNTNSSFLKGGNGENAVFPSQVNVANNFSSTNAQQSAPEKVKKDRGRGPNGKERKPKHNKRAKWPAIIRDGKFICSRCYRAFTNPRSLGGHLSKRSYCKPLDGAEIAQELLQSNGQPSLLASMILSTNAVNLQQPQQSTFNPEACFKDPSFLQLLAENRSPAFLPNTFPRSGVTNFNTSVSQEGSEIIKQALETAGIPSTFEGAEMLSXVSTGXXSDASQVNATVMPNPTVPPLLHTVCHPNTLLTNQ

SEQ ID NO: 927 - protein, 308 aa, Homo sapiens
  SITE (142): Xaa equals any of the naturally occurring L-amino acids
  SITE (143): Xaa equals any of the naturally occurring L-amino acids
  SITE (144): Xaa equals any of the naturally occurring L-amino acids
  SITE (200): Xaa equals any of the naturally occurring L-amino acids
VSTPVPPPPPGEETNLEASSSDEQPASLTIAHVKPSIMKRNGSFPKYYACHLCGRRFTLRSSLREHLQIHTGVPFTSSQQGESRVPLTLCSNAADLGKDAMEVPEAGMISDSELQHISDSPIIDGQQQSETPPPSDIADIDXXXQADQEREVKRRKYECTICGRKFIQKSHWREHMYIHTGKPFKCSTCDKSFCRANQAXRHVCLNQSIDTYTMVDKQTLELCTFEEGSQMDNMLVQTNKPYKCNLCDKTFSTPNEVVKHSCQNQNSDVFALDEGRSILLGSGDSEVTEPDHPVLASIKKEQETVLLD

SEQ ID NO: 928 - protein, 164 aa, Homo sapiens
ARAFSRVMIGSPRGGASNFPYYRRIAPKMPVVTSVRSSQIPENSTSSQLMMNGATSSFENGHPSQPGPPQLTRASADVLSKCKKALSEHNVLVVEGARKYACKICCKTFLTLTDCKKHIRVHTGEKPYACLKCGKRFSQSSHLYKHSKTTCLRWQSSNLPSTLL

SEQ ID NO: 929 - protein, 468 aa, Homo sapiens
ATLPRRGTGGCSGQCCRHRHHHLRPRFPQPGQSLPLSRSPPWRPSLSPGLRPPSTPRFFPGRNPPSTPSLPLILSLNPAASLGISMLPHRGIGDSLLIGFLGIRSPSTLQLKILIIHESMMQNSQTSAYLPVENRKKKKRKEPVFHFFCDTCDRGFKNQEKYDKHMSEHTKCPELDCSFTAHEKIVQFHWRNMHAPGMKKIKLDTPEEIARWREERRKNYPTLANIERKKKLKLEKEKRGAVLTTTQYGKMKGMSRHSQMAKIRSPGKNHKWKNDNSRQRAVTGSGSHLCDLKLEGPPEANADPLGVLINSDSESDKEEKPQHSVIPKEVTPALCSLMSSYGSLSGSESEPEETPIKTEADVLAENQVLDSSAPKSPSQDVKATVRNFSEAKSENRKKSFEKTNPKRKKDYHNYQTLFEPRTHHPYLLEMLLAPDIRHERNVILQCVRYIIKKDFFGLDTNSAKSKDV

SEQ ID NO: 930 - protein, 195 aa, Homo sapiens
  SITE (57): Xaa equals any of the naturally occurring L-amino acids
  SITE (76): Xaa equals any of the naturally occurring L-amino acids
  SITE (82): Xaa equals any of the naturally occurring L-amino acids
  SITE (85): Xaa equals any of the naturally occurring L-amino acids
  SITE (130): Xaa equals any of the naturally occurring L-amino acids
  SITE (141): Xaa equals any of the naturally occurring L-amino acids
  SITE (163): Xaa equals any of the naturally occurring L-amino acids
  SITE (173): Xaa equals any of the naturally occurring L-amino acids
  SITE (186): Xaa equals any of the naturally occurring L-amino acids
KIFSDWLSFNQHKEIHTKCKSYGSHLFDYAFIQNSALRPHSVTHTREITLECRVCGXTFSKNSNLRRHEMIHTGEXPHGCHXCGXAFTHCSDLRKHERTHTGEKPYGCHLCGKAFSKSSNLRRHEMIHTXEKAQICHLCGXAFTHCSDLRKHERTHLGDKPYXMSPMWEGFQXQVLTLRHHEGLTXERNLMNVIY

SEQ ID NO: 931 - protein, 388 aa, Homo sapiens
GPTLQFTLRWTGETNDKSTAPIAKPLATRNSESLHQENKPGSVKPTQTIAVKESLTTDLQTRKEKDTPNENRQKLRIFYQFLYNNNTRQQTEARDDLHCPWCTLNCRKLYSLLKHLKLCHSRFIFNYVYHPKGARIDVSINEGYDGSYAGNPQDIHRQPGFAFSRNGPVKRTPITHILVCRPKRTKASMSEFLESEDGEVEQQRTYSSGHNRLYFHRDTCLPLRPQEMEVDSEDEKDPEWLREKTITQIEEFSDVNEGEKEVMKLWNLHVMKHGFIADNQMNHACMLFVENYGQKIIKKNLCRNFMLHLVSMHDFNLISIMSIDKAVTKLREMQQKLEKGESASPANEEITEEQNGTANGFSEINSKEKALETDSVSGVSKQSKKQKL

SEQ ID NO: 932 - protein, 284 aa, Homo sapiens
LVPFECTECGKSFSWSSHLIAHMRMHTGEKPFKCDECEKAFRDYSALSKHERTHSGAKPYKCTECGKSFSWSSHLIAHQRTHTGEKPYNCQECGKAFRERSALTKHEIIHSGIKPYECNKCGKSCSQMAHLVRHQRTHTGEKPYECNKCGKSFSQSCHLVAHRRIHTGEKPYKCNQCERSFNCSSHLIAHRRTHTGEKPYRCNECGKAFNESSSLIVHLRNHTGEKPYKCNHCEKAFCKNSSLIIHQRMHSGEKRFICSECGKAFSGHSALLQHQRNHSEEKLN

SEQ ID NO: 933 - protein, 271 aa, Homo sapiens
VEGWTCISPEVRAWAYILLSRVRTARVLKGDEPRVKEWGPEFRDRSAKIAVYHLQELASAELAKEWPKRKVLQDLVPDDRKLKYTRPGLPTFSQEVLHKWKTDIKKYHRIQCPNQGCEAVYSSVSGLKAHLGSCTLGNFVAGKYKCLLCQKEFVSESGVKYHINSVHAEDWFVVNPTTTKSFEKLMKIKQRQQEEEKRRQQHRSRRSLRRRQQPGIELPETELSLRVGKDQRRNNEELVVSASCKEPEQEPVPAQFQKVKPPKTNHKRGRK

SEQ ID NO: 934 - protein, 287 aa, Homo sapiens
FFFFFFFFFFFIQAFFNAKSYYKWGEYRKASSHKHTLVQHQSVCSEGGLYECSKCEKAFTCKNTLVQHQQIHTGQKMFECSECEESFSKKCHLILHKIIHTGERPYECSDREKAFIHKSEFIHHQRRHTGGVRHECGECRKTFSYKSNLIEHQRVHTGERPYECGECGKSFRQSSSLFRHQRVHSGERPYQCCECGKSFRQIFNLIRHRRVHTGEMPYQCSDCGKSFSCKSELIQHQRIHSGERPYECRECGKSFRQFSNLIRHRSIHTGDRPYECSECELVPNSCS

SEQ ID NO: 935 - protein, 241 aa, Homo sapiens
QKSPLIIHQRIHTGEKPYECRECGKAFSQKSQLIIHHRAHTGEKPYECTECGKAFCEKSHLIIHKRIHTGEKPYKCAQCEEAFSRKTELITHQLVHTGEKPYECTECGKTFSRKSQLIIHQRTHTGEKPYKCSECGKAFCQKSHLTGHQRIHTGEKPYICTECGKAFSQKSHLPGHQRIHTGEKPYICAECGKAFSQKSDLVLHQRIHTGERPYQCAICGKAFIQKSQLTVHQRIHTVVKS

SEQ ID NO: 936 - protein, 241 aa, Homo sapiens
  SITE (221): Xaa equals any of the naturally occurring L-amino acids
  SITE (238): Xaa equals any of the naturally occurring L-amino acids
  SITE (239): Xaa equals any of the naturally occurring L-amino acids
KLVPSTKKRALQDLAPPCSPEPAGMAAEVALSESAKDQKAANPYVTPNNRYGYQNGASYTWQFEARKAQILKCMECGSSHDTLQQLTAHMMVTGHFLKVTTSASKKGKQLVLDPVVEEKIQSIPLPPTTHTRLPASSIKKQPDSPAGSTTSEEKKEPEKEKPPVAGDAEKIKEESEDSLEKFEPSTLYPYLREEDLDDSPKGGLDILKSLENTVSTALQSXNGAPSWGGYPSIMQLQXXAP

SEQ ID NO: 937 - protein, 212 aa, Homo sapiens
RPTPPHLQLGVGQRAVRQALRHVRRAAEPLADPYGISRDRQTAVGLPQLVVSGQRCRGRHGLPHAHPHLGRTGQPWDAGAAQPPPRAGTQQPLPPLLQEPASHAWRPRAGARRHRTVLLPLRPLRTETDHRLGAGVSVRAAGRASEGEEGEGEGRSPGRGGITAQAADTRAWGGLGPRKERNVYRIYLPDSSDRDPVGHSPSPHFHLPTQTL

SEQ ID NO: 938 - protein, 184 aa, Homo sapiens
  SITE (91): Xaa equals any of the naturally occurring L-amino acids
  SITE (176): Xaa equals any of the naturally occurring L-amino acids
  SITE (179): Xaa equals any of the naturally occurring L-amino acids
  SITE (181): Xaa equals any of the naturally occurring L-amino acids
  SITE (182): Xaa equals any of the naturally occurring L-amino acids
FSQADTASGATHQTARGHKRVYQCNICSKIFQNSSNLSRHVRSHGDKLFKCEECAKLFSRKESLKQHVSYKHSRNEVDGEYRYRCGTCEKXFRIESALEFHNCRTDDKTFQCEMCFRFFSTNSNLSKHKKKHGDKKFACEVCSKMFYRKDVMLDHQRRHLEGVRRVNERTWSRWGXPGXFXXEP

SEQ ID NO: 939 - protein, 79 aa, Homo sapiens
VSVVQPLLQVLASPPAQQQDGLEAHQVRLSAHNCGNENCNTSFIQNYHLTFLAETHLVPLFIHMHIFFLFTHLFILRMI

SEQ ID NO: 940 - protein, 483 aa, Homo sapiens
HELSPAQKDLYRDVMLENYSNLVSVGYQAGKPDALTKLEQGEPLWTLEDEIHSPAHPEIEKADDHLQQPLQNQKILKRTGQRYEHGRTLKSYLGLTNQSRRYNRKEPAEFNGDGAFLHDNREQMPTEIEFPESRKPISTKSQFLKHQQTHNIEKAHECTDCGKAFLKKSQLTEHKRIHTGKKPHVCSLCGKAFYKKYRLTEHERAHRGEKPHGCSLCGKAFYKRYRLTEHERAHKGEKPYGCSECGKAFPRKSELTEHQRIHTGIKPHQCSECGRAFSRKSLLVVHQRTHTGEKPHTCSECGKGFIQKGNLNIHQRTHTGEKPYGCIDCGKAFSQKSCLVAHQRYHTGKTPFVCPECGQPCSQKSGLIRHQKIHSGEKPYKCSDCGKAFLTKTMLIVHHRTHTGERPYGCDECEKAYFYMSCLVKHKRIHSREKRGDSVKVENPSTASHSLSPSEHVQGKSPVNMVTVAMVAGQCEFAHILHS

SEQ ID NO: 941 - protein, 246 aa, Homo sapiens
ARGKSFNVRGQLNRHKTIHTGIKPFACKVCEKAFSYSGDLRVHSRIHTGEKPYECKECGKAFMLRSVLTEHQRLHTGVKPYECKECGKTFRVRSQISLHKKIHTDVKPYKCVRCGKTFRFGFYLTEHQRIHTGEKPYKCKECGKAFIRRGNLKEHLKIHSGLKPYDCKECGKSFSRRGQFTEHQKIHTGVKPYKCKECGKAFSRSVDLRIHQRIHTGEKPYECKQCGKAFRQYSHLYQHQKTHTVI

SEQ ID NO: 942 - protein, 177 aa, Homo sapiens
RENPLWFFIFLTCMTLLLKEGYLLLKPVYQRVWLLLLWIPGQYQSCSTLWMSHSASTPIGLYHCKQLAEPFLNVQFIWSRTGFCVYSDVLRKLRLVNEALPTIATGKGPLGPVDALVPQHVSPFPEVLVTLRAVKRPLPCVQALMAEQLRLQAETLVTLGTLKRLLSRVRSDVLDEL

SEQ ID NO: 943 - protein, 185 aa, Homo sapiens
DDIHVARIPAIFRPPVPPQSPHVCLDPPSEQRNQSVPWCNDSGKEGWAERKQGQRPGGSSLRVRLTAMTVLQAGGEAGRRAGTGAGGGAFHLAGEWRVDAGSSTTSPVLDHIWMIGWVAASMLGQVVAPGELLGAEGAGEALLARVRPVVAGQLVGTRKLLVAVEPVAGERALTRVGALVGLELV

SEQ ID NO: 944 - protein, 261 aa, Homo sapiens
ETLTSNLRMPLTLTSNTQVIGTAGNTYLPALFTTQPAGSGPKPFLFSLPQPLAGQQTQFVTVSQPGLSTFTAQLPAPQPLASSAGHSTASGQGEKKPYECTLCNKTFTAKQNYVKHMFVHTGEKPHQCSICWRSFSLKDYLIKHMVTHTGVRAYQCSICNKRFTQKSSLNVHMRLHRGEKSYECYICKKKFSHKTLLERHVALHSASNGTPPAGTPPGARAGPPGVVACTEGTTYVCSVCPAKFDQIEQFNDHMRMHVSDG

SEQ ID NO: 945 - protein, 147 aa, Homo sapiens
RNHMNVMNVVNHSVKRQISIYIREFIQGRNPMFVMNVGSPFARKQPSLYIRKYIPARNPMNVLSVGKPLAGSHISFIIKELIRERNHINVVNVESASARRQILLYIRELTQVRNPMFVMSVVSLSVIRETSLSIKELTREKTLKCNK

SEQ ID NO: 946 - protein, 219 aa, Homo sapiens
HEKSPTTATGNSSCPSTETEEEKAKRLLYCSLCKVAVNSASQLEAHNSGTKHKTMLEARNGSGTIKAFPRAGVKGKGPVNKGNTGLQNKTFHCEICDVHVNSETQLKQHISSRRHKDRAAGKPPKPKYSPYNKLQKTAHPLGVKLVFSKEPSKPLAPRILPNPLAAAAAAAAVAVSSPFSLRTAPAATLFQTSALPPALLRPAPGPIRTAHTPVLFAPY

SEQ ID NO: 947 - protein, 323 aa, Homo sapiens
FLHHFSFETGEKPHRCHLCPFASAYERHLEAHMRSHTGEKPYKCELCSFRCSDRSNLSHHRRRKHKMVPIKGTRSSLSSKKMWGVLQKKTSNLGYSRRALINLSPPSMVVQKPDYLNDFTHEIPNIQTDSYESMAKTTPTGGLPRDPQELMVDNPLNQLSTLAGQLSSLPPENQNPASPDVVPCPDEKPFMIQQPSTQAVVSAVSASIPQSSSPTSPEPRPSHSQRNYSPVAGPSSEPSAHTSTPSIGNSQPSTPAPALPVQDPQLLHHCQHCDMYFADNILYTIHMGCHGYENPFQCNICGCKCKNKYDFACHFARGQHNQH

SEQ ID NO: 948 - protein, 338 aa, Homo sapiens
  SITE (335): Xaa equals any of the naturally occurring L-amino acids
RLLSGGAGDRQKRWQCRMCEKSYTSKYNLVTHILGHNGIKPHSCPHCSKLFKQPSHLQTHLLTHQGTRPHKCQVCHKAFTQTSHLKRHMLLHSEVKPYSCHFCGRGFAYPSELKAHEVKHESGRCHVCVECGLDFSTLTQLKRHLASHQGPTLYQCLECDKSFHYRSQLQNHMLKHQNVRPFVCTECGMEFSQIHHLKQHSLTHKGVKEFKCEVCGREFTLQANMKRHMLIHTSVRPYQCHICFKTFVQKQTLKTHMIVHSPVKPFKCKVCGKSFNRMYNLLGHMHLHAGSKPFKCPYCSSKFNLKGNLSRHMKVKHGVMDIGLDSQDPMMELTXLTL

SEQ ID NO: 949 - protein, 183 aa, Homo sapiens
  SITE (75): Xaa equals any of the naturally occurring L-amino acids
  SITE (150): Xaa equals any of the naturally occurring L-amino acids
  SITE (176): Xaa equals any of the naturally occurring L-amino acids
  SITE (181): Xaa equals any of the naturally occurring L-amino acids
  SITE (183): Xaa equals any of the naturally occurring L-amino acids
FCRFHVLNYFTCGEAFPAPTDLLQHEATPSGEEPHSSSSKHIQAFFNAKSYYKWGEYRKASSHKHTLVQHQSVCXEGGLYECSKCEKAFTCKNTLVQHQQIHTGQKMFECSECEESFSKKCHLILHKIIHTGERPYECSDREKAFIHKSXFIHHQRRHTGGVRHECGECRKTFSYXSNLIXHX

SEQ ID NO: 950 - protein, 141 aa, Homo sapiens
  SITE (31): Xaa equals any of the naturally occurring L-amino acids
PYECKVCRKTFTFYRNLTLHQSIHTDEKPFXCKECGKTFRRSSHLTAHQSIHADKKPYECKECGKAFKMYGYLTQHQKIHTGGKPYECKECGKAFSRASNLVQHERIHTGEKPYVCKQCGKTFRYGSALKAHQRIHRSIKV

SEQ ID NO: 951 - protein, 212 aa, Homo sapiens
GRPTRPRPYGCSECGKSYSSRSYLAVHKRIHNGEKPYECNDCGKTFSSRSYLTVHKRIHNGEKPYECSDCGKTFSNSSYLRPHLRIHTGEKPYKCNQCFREFRTQSIFTRHKRVHTGEGHYVCNQCGKAFGTRSSLSSHYSIHTGEYPYECHDCGRTFRRRSNLTQHIRTHTGEKPTHVMSVGNPLPIAFLLQFTGEYIMERNPKKKKKKKK

SEQ ID NO: 952 - protein, 47 aa, Homo sapiens
MNPGFELSYCTTVSQKKIHNFCLNSIFIKMKALAKVKKKKKKKKKKK

SEQ ID NO: 953 - protein, 200 aa, Homo sapiens
FFFFFFFFFFFFFFFFFFFFFWIGFIHFIVKEINSPKGFPRSAPSPLGPPGKRGSKGPGLTAPMSLGGGTRGEGELTAKGLGGAPPPPAGLGPGGVRGGARPAHLAGRRRRGARSLARVGPQVVLERLLVAEALGAVRAGVGPLARVRALVLQQVMLLREALAALGAVVGPLACVDAPVFQEVVLADEALGNCCGRVGRP

SEQ ID NO: 954 - protein, 708 aa, Homo sapiens
  SITE (328): Xaa equals any of the naturally occurring L-amino acids
KEKSLHHVDQRPPLWHPGRPGTSQSAAMNASSEGESFAGSVQIPGGTTVLVELTPDIHICGICKQQFNNLDAFVAHKQSGCQLTGTSAAAPSTVQFVSEETVPATQTQTTTRTITSETQTITVSAPEFVFEHGYQTYLPTESNENQTATVISLPAKSRTKKPTTPPAQKRLNCCYPGCQFKTAYGMKDMERHLKIHTGDKPHKCEVCGKCFSRKDKLKTHMRCHTGVKPYKCKTCDYAAADSSSLNKHLRIHSDERPFKCQICPYASRNSSQLTVHLRSHTGDAPFQCWLCSAKFKISSDLKRHMRVHSGEKPFKCEFCNVRCTMKGXLKSHIRIKHSGNNFKCPHCDFLGDSKATLRKHSRVHQSEHPEKCSECSYSCSSKAALRIHERIHCTDRPFKCNYCSFDTKQPSNLSKHMKKFHGDMVKTEALERKDTGRQSSRQVAKLDAKKSFHCDICDASFMREDSLRSHKRQHSEYSESKNSDVTVLQFQIDPSKQPATPLTVGHLQVPLQPSQVPQFSEGRVKIIVGHQVPQANTIVQAAAAAVNIVPPALVAQNPEELPGNSRLQILRQVSLIAPPQPSRCPSEAGAMTQPAVLLTTHEQTDGATLHQTLIPTASGGPQEGSGNQTFITSSGITCTDFEGLNALIQEGTAEVTVVSDGGQNIAVATTAPPVFSSSSQQELPKQTYSIIQGAAHPALLCPADSIPD

SEQ ID NO: 955 - protein, 165 aa, Homo sapiens
PRVRSDLIKHQRIHTGEKPYKCSECRKAFSQCSALTLHQRIHTGKKPNPCDECGKSFSRRSDLINHQKIHTGEKPYKCDACGKAFSTCTDLIEHQKTHAEEKPYQCVQCSRSCSQLSELTIHEEVHCGEDSQNVMNVRKPLVCTPTLFSTRDTVPEKNLMNAVDY

SEQ ID NO: 956 - protein, 378 aa, Homo sapiens
  SITE (315): Xaa equals any of the naturally occurring L-amino acids
  SITE (340): Xaa equals any of the naturally occurring L-amino acids
HEQLQQHLRSHREGVFKCPLCSRVFPSPSSLDQHLGDHSSESHFLCVDCGLAFGTEALLLAHRRAHTPNPLHSCPCGKTFVNLTKFLYHRRTHGVGGVPLPTTPVPPEEPVIGFPEPAPAETGEPEAPEPPVSEETSAGPAAPGTYRCLLCSREFGKALQLTRHQRFVHRLERRHKCSICGKMFKKKSHVRNHLRTHTGERPFPCPDCSKPFNSPANLARHRLTHTGERPYRCGDCGKAFTQSSTLRQHRLVHAQHFPYRCQECGVRFHRPYRLLMHRYHHTGEYPYKCRECPRSFLLRRLLEVHQLVVHAGRHXPLPILWGCLPLLTAAPGAPLCSRCXQAPRRFECGTCGKKVGSAARLQAHEAAHAAAGLGEVLG

SEQ ID NO: 957 - protein, 600 aa, Homo sapiens
AGIRHEHYVCESCDKQFSSVDDLQKHLLDMHTFVLYHCTLCQEVFDSKVSIQVHLAVKHSNEKKMYRCTACNWDFRKEADLQVHVKHSHLGNPAKAHKCIFCGETFSTEVELQCHITTHSKKYNCKFCSKAFHAIILLEKHLREKHCVFDAATENGTANGVPPMATKKAEPADLQGMLLKNPEAPNSHEASEDDVDASEPMYGCDICGAAYTMEVLLQNHRLRDHNIRPGEDDGSRKKAEFIKGSHKCNVCSRTFFSENGLREHLQTHRGPAKHYMCPICGERFPSLLTLTEHKVTHSKSLDTGTCRICKMPLQSEEEFIEHCQMHPDLRNSLTGFRCVVCMQTVTSTLELKIHGTFHMQKLAGSSAASSPNGQGLQKLYKCALCLKEFRSKQDLVKLDVNGLPYGLCAGCMARSANGQVGGLAPPEPADRPCAGLRCPECSVKFESAEDLESHMQVDHRDLTPETSGPRKGTQTSPVPRKKTYQCIKCQMTFENEREIQIHVANHMIEEGINHECKLCNQMFDSPAKLLCHLIEHSFEGMGGTFKCPVCFTVFVQANKLQQHIFAVHGQEDKIYDCSQCPQKFFFQTELQNHTMSQHAQ

SEQ ID NO: 958 - protein, 333 aa, Homo sapiens
GTSPIEERGDLFGKALNLNTDFVSLRQVPYKYDLYEKTLKYNSDLLNSNRSYAGKQTDECNEFGKALLYLKQEKTHSGVEYSEYNKSGKALSHKAAIFKHQKIKNLVQPFICTYCDKAFSFKSLLISHKRIHTGEKPYECNVCKKTFSHKANLIKHQRIHTGEKPFECPECGKAFTHQSNLIVHQRAHMEKKPYECSECGKTFAQKFELTTHQRIHTGERPYECNECAKTFFKKSNLIIHQKIHTGEKRYECSECGKSFIQNSQLIIHMRTHTGEKPYECTECGKTFSQRSTLRLHLRIHTGEKPYECSECGKAFSRKSRLSVHQRVHIGEKP

SEQ ID NO: 959 - protein, 273 aa, Homo sapiens
HSHVPRITEINKALQRKSRGVYWHSELQKGLESEPTSRRQCRNSPGESEEKTPSQEKMSHQSFCARDKACTHILCGKNCSQSVHSPHKPALKLEKVSQCPECGKTFSRSSYLVRHQRIHTGEKPHKCSECGKGFSERSNLTAHLRTHTGERPYQCGQCGKSFNQSSSLIVHQRTHTGEKPYQCIVCGKRFNNSSQFSAHRRIHTGESPYKCAVCGKIFNNSSHFSAHRKTHTGEKPYRCSHCERGFTKNSALTRHQTVHMKAVLSSQEGRDAL

SEQ ID NO: 960 - protein, 935 aa, Homo sapiens
  SITE (400): Xaa equals any of the naturally occurring L-amino acids
  SITE (404): Xaa equals any of the naturally occurring L-amino acids
  SITE (434): Xaa equals any of the naturally occurring L-amino acids
  SITE (507): Xaa equals any of the naturally occurring L-amino acids
ALLIGSQRTSGPESSMKVTSSIPVFDLQDGGRKICPRCNAQFRVTEALRGHMCYCCPEMVEYQKKGKSLDSEPSVPSAAKPPSPEKTAPVASTPSSTPIPALSPPTKVPEPNENVGDAVQTKLIMLVDDFYYGRDGGKVAQLTNFPKVATSFRCPHCTKRLKNNIRFMNHMKHHVELDQQNGEVDGHTICQHCYRQFSTPFQLQCHLENVHSPYESTTKCKICEWAFESEPLFLQHMKDTHKPGEMPYVCQVCQYRSSLYSEVDVHFRMIHEDTRHLLCPYCLKVFKNGNAFQQHYMRHQKRNVYHCNKCRLQFLFAKDKIEHKLQHHKTFRKPKQLEGLKPGTKVTIRASRGQPRTVPVSSNDTPPSALQEAAPLTSSMDPLPVFLYPPVQRSIQKRAXRKMXVMGRQTCLECSFEIPDFPNHFPTYEHCSLXRYSTCCSRAYANHMINNHVPRKSPKYLALFKNSVSGIKLACTSCTFVTSVGDAMAKHLVFNPSHRSSSILPRXLTWIAHSRHGQTRDRVHDRNVKNMYPPPSFPTNKAATVKSAGATPEEKLAEWVLTQREQQLPVNEETLFQKATKIGRSLEGGFKISYEWAVRFMLRHHLTPHARRAVAHTLPKDVAENAGLFIDFVQRQIHNQDLPLSMIVAIDEISLFLDTEVLSSDDRKENALQTVGTGEPWCDVVLAILADGTVLPTLVFYRGQMDQPANMPDSILLEAKESGYSDDEIMELWSTRVWQKHTACQRSKGMLVMDCHRTHLSEEVLAMLSASSTLPAVVPAGCSSKIQPLDVCIKRTVKNFLHKKWKEQAREMADTACDSDVLLQLVLVWLGEVLGVIGDCPELVQRSFLVASVLPGPDGNINSPTRNADMQEELIASLEEQLKLSGEHSESSTPRPRSSPEETIEPESLHQLFEGESETESFYGFEEADLDLMEI

SEQ ID NO: 961 - protein, 261 aa, Homo sapiens
NSARGKKLFKCNECKKTFTQSSSLTVHQRIHTGEKPYKCNECGKAFSDGSSFARHQRCHTGKKPYECIECGKAFIQNTSLIRHWRYYHTGEKPFDCIDCGKAFSDHIGLNQHRRIHTGEKPYKCDVCHKSFRYGSSLTVHQRIHTGEKPYECSVCGKAFSHRQSLSVHQRIHSGKKPYECKECRKTFIQIGHLNQHKRVHTGERSYNYKKSRKVFRQTAHLAHHQRIHTGESSTCPSLPSTSNPVDLFPKFLWNPSSLPSP

SEQ ID NO: 962 - protein, 163 aa, Homo sapiens
  SITE (46): Xaa equals any of the naturally occurring L-amino acids
  SITE (143): Xaa equals any of the naturally occurring L-amino acids
KFKSSLEVMMLCSECPTVFVDAETLMSCGLLETLKFGVLELQEHLXTYNVKREAAEQWLDDCKRTFGAKEDMYRINTDAQQMEILAELELCRRLYKLHFQLLLLFQAYCKLINQVNTIKNEAEVINMSEELAQLGKYPPKKLXSASRKTEGNWTFPKAGTNYF

SEQ ID NO: 963 - protein, 298 aa, Homo sapiens
  SITE (257): Xaa equals any of the naturally occurring L-amino acids
  SITE (261): Xaa equals any of the naturally occurring L-amino acids
  SITE (273): Xaa equals any of the naturally occurring L-amino acids
RDLINVRYVGGAFILPSHFKYMKNLTLERNPMSVSNVGKPLFPSLPFDIMKGLTLERTPMSVSNLGKPSDLSKIFDFIKGHTLERNPVNVRNVEKHSIISLLCKYMKGCTEERSSVNVSIVGKHSYLPRSFEYMQEHTMERNPMNVKNAEKHSACLLPFIDMKRLTLEGNTMNASNVAKLSLLPVLFNIMKEHTREKPYQCKQCAKAFISSTSFQYHERTHMGEKPYECMPSGKAFISSSSLQYHERTHTGEKPYEXKQCXKAFRSASHLQMXGRTHTGEKPYECKQYGKAFRPDKIL

SEQ ID NO: 964 - protein, 103 aa, Homo sapiens
AAGFLIENQTLNIIIEFISEKNLTNVKNVTKFSISIHALKYIGEFILERNHRNVRFVTRHSGVIHTWHNILEFTLERNRASVMSVTEPSVVSQHLFTIKQSMS

SEQ ID NO: 965 - protein, 72 aa, Homo sapiens
  SITE (58): Xaa equals any of the naturally occurring L-amino acids
CLNKCGAVPKEFPTCVALIRPFSSVNSLMSHESVVVHKGFSTFSALISPFTSVNCLMXHEIGTVLKEFPTFV

SEQ ID NO: 966 - protein, 129 aa, Homo sapiens
  SITE (114): Xaa equals any of the naturally occurring L-amino acids
GTSVVHKKSSRYLGKITASLEIRAIKKPIDFVLNKVAKRGPSRDEAKHSDSKHDGTSNSPSKKYEVADVGIEVKVTKNFSLHRCNKCGKAFAKKTYLEHHKKTHKANASNSPEXNKTKGRSTRSKALVW

SEQ ID NO: 967 - protein, 316 aa, Homo sapiens
RGSMEGSRPRAPSGHLAPSPPAFDGELDLQRYSNGPAVSAGSLGMGAVSWSESRAGERRFPCPVCGKRFRFNSILALHLRAHPGAQAFQCPHCGHRAAQRALLRSHLRTHQPERPRSPAARLLLELEERALLREARLGRARSSGGMQATPATEGLARPQAPSSSAFRCPYCKGKFRTSAERERHLHILHRPWKCGLCSFGSSQEEELLHHSLTAHGAPERPLAATSAAPPPQPQPQPPPQPEPRSVPQPEPEPEPEREATPTPAPAAPEEPPAPPEFRCQVCGQSFTQSWFLKGHMRKHKASFDHACPVCGRSRGS

SEQ ID NO: 968 - protein, 413 aa, Homo sapiens
LAFFTVYRNQNYLVPSPVLRILDHTAFSTEKSADIVICDEECDSPESVNQQTQEESPIEVHTAEDVPIAVEVHAISEDYDIETENNSSESLQDQTDEEPPAKLCKILDKSQALNVTAQQKWPLLRANSSGLYKCELCEFNSKYFSDLKQHMILKHKRTDSNVCRVCKESFSTNMLLIEHAKLHEEDPYICKYCDYKTVIFENLSQHIADTHFSDHLYWCEQCDVQFSSSSELYLHFQEHSCDEQYLCQFCEHETNDPEDLHSHVVNEHACKLIELSDKYNNGEHGQYSLLSKITFDKCKNFFVCQVCGFRSRLHTNVNRHVAIEHTKIFPHVCDDCGKGFSSMLEYCKHLNSHLSEGIYLCQYCEYSTGQIEDLKIHLDFKHSADLPHKCSDCLMRFGNERELISHLPVHETT

SEQ ID NO: 969 - protein, 120 aa, Homo sapiens
GLQEFGTSQCNLCGKRFMQLISLQFHQRTHTGERPYTCDVCQKQFTQKSYLKCHKRSHTGEKPFECKDCKKVFTYRGSLKEHQRIHSGEKPYKCSKCPRAFSRLKLLRRHQKTHPEATSQ

SEQ ID NO: 970 - protein, 120 aa, Homo sapiens
FGRGKIHTGEKPYKCNQCGKVFNQASYLTRHQIIHTGERPYRCSKCGKAFRGCSGLTAHLAIHTEKKSHECKECGKIFTQKSSLTNHHRIHIGEKPYKCTLCSKVFSHNSDLAQHQRVHS

SEQ ID NO: 971 - protein, 131 aa, Homo sapiens
PGRPTRPQVVVVEQNGSFQVKIPKNFVCEHCFGAFRSSYHLKRHILIHTGEKPFECDICDMRFIQKYHLERHKRVHSGEKPYQCERCHQVRLIPATIPHTHFSFPRIRATLHSCLTKEPPALLAIIVNTSG

SEQ ID NO: 972 - protein, 472 aa, Homo sapiens
PRVRLKEAKSWQEEQSAQAQRLKDKVAQMKDTLGQAQQRVAELEPLKEQLRGAQELAASSQQKATLLGEELASAAAARDRTIAELHRSRLEVAEVNGRLAELGLHLKEEKCQWSKERAGLLQSVEAEKDKILKLSAEILRLEKAVQEERTQNQVFKTELAREKDSSLVQLSESKRELTELRSALRVLQKEKEQLQEEKQELLEYMRKLEARLEKVADEKWNEDATTEDEEAAVGLSCPAALTDSEDESPEDMRLPPYGLCERGDPASSPAGPREASPLVVISQPAPISPHLSGPAEDSSSDSEAEDEKTVLMAAVQSGGEEANLLFPELGRAFYDMARGFTGGTLSETSTGGPATPTWKECPICKERFPAERDKDALEDHMDGHFFFSTQDPFTFERSYSLVHAQIHTHAHTHSHTCIHLGFMPIFYHTGLHDILFPKNCFCVPCFHPKISHFILSYLALLSQGGVLFGSSG

SEQ ID NO: 973 - protein, 223 aa, Homo sapiens
  SITE (109): Xaa equals any of the naturally occurring L-amino acids
  SITE (155): Xaa equals any of the naturally occurring L-amino acids
VHEEEKFYKQDECREGFRQSPDCSQPQGAPAVEKTFLCQQCGKTFTRKKTLVDHQRIHTGEKPYQCSDCGKDFAYRSAFIVHKKKHAMKRKPEGGPSFSQDTVFQVPQXSHSKEEPYKCSQCGKAFRNHSFLLIHQRVHTGEKPYKCRECGKAFXWSSNLYRHQRIHSLQKQYDCHESEKTPNVEPKILTGEKRFWCQECGKTFTRKRTLLDHKGIHSGREAL

SEQ ID NO: 974 - protein, 363 aa, Homo sapiens
GSTHASGLLPRPRGLSPECRKTVMGSCSTVGGVGYGDSKDCILEPLSLPESPGGTTTLEGSPSVPCIFCEEHFPVAEQDKLLKHMIIEHKIVIADVKLVADFQRYILYWRKRFTEQPITDFCSVIRINSTAPFEEQENYFLLCDVLPEDRILREELQKQRLREILEQQQQERNDTNFHGVCMFCNEEFLGNRSVILNHMAREHAFNIGLPDNIVNCNEFLCTLQKKLDNLQCLYCEKTFRDKNTLKDHMRKKQHRKINPKNREYDRFYVINYLELGKSWEEVQLEDDRELLDHQEDDWSDWEEHPASAVCLFCEKQAETIEKLYVHMEDAHEFDLLKIKSELGLNFYQQVKLVNFIRRQVHQC

SEQ ID NO: 975 - protein, 199 aa, Homo sapiens
HETPSTSQSWLQRHMLTHSGDKPFKCVVGGCNASFASQGGLARHVPTHFSQQNSSKVSSQPKAKEESPSKAGMNKRRKLKNKRRRSLPRPHDFFDAQTLDAIRHRAICFNLSAHIESLGKGHSVVFHSTVIAKRKEDSGKIKLLLHWMPEDILPDVWVNESERHQLKTKVVHLSKLPKDTALLLDPNIYRTMPQKRLKR

SEQ ID NO: 976 - protein, 406 aa, Homo sapiens
AREKSHIREHHRVHIGVKPFEYGKSFNRNSTLPVHQRTHATDKYSDYHPCTETFSYQSTFSVHQKVHIRAKPYEYNECGKSCSMNSHLIWPQKSHTGEKPYECPECGKAFSEKSRLRKHQRTHTGEKPYKCDGCDKAFSAKSGLRIHQRTHTGEKPFECHECGKSFNYKSILIVHQRTHTGEKPFECNECGKSFSHMSGLRNHRRTHTGERPYKCDECGKAFKLKSGLRKHHRTHTGEKPYKCNQCGKAFGQKSQLRGHHRIHTGEKPYKCNHCGEAFSQKSNLRVHHRTHTGEKPYQCEECGKTFRQKSNLRGHQRTHTGEKPYECNECGKAFSEKSVLRKHQRTHTGEKPYNCNQCGEAFSQKSNLRVHQRTHTGEKPYKCDKCGRTFSQKSSLREHQKAHPGD

SEQ ID NO: 977 - protein, 433 aa, Homo sapiens
GSTHASEGFYTVYRNVFEMIAKEELESVLEEEVDDFPTFGDSQSDYDTVVHPFYAYWQSFCTQKNFAWKEEYDTRQASNRWEKRAMEKENKKIRDKARKEKNELVRQLVAFIRKRDKRVQAHRKLVEEQNAEKARKAEEMRRQQKLKQAKLVEQYREQSWMTMANLEKELQEMEARYEKEFGDGSDENEMEEHELKDEEDGKDSDEAEDAELYDDLYCPACDKSFKTEKAMKNHEKSKKHREMVALLKQQLEEEEENFSRPQIDENPLDDNSEEEMEDAPKQKLSKKQKKKKQKPAQNYDDNFNVNGPGEGVKVDPEDTNLNQDSAKELEDSPQENVSVTEIIKPCDDPKSEAKSVPKPKGKKTKDMKKPVRVPAEPQTMSVLISCTTCHSEFPSRNKLFDHLKATGHARAPSSSSLNSATSSQSKKEKRKNR

SEQ ID NO: 978 - protein, 262 aa, Homo sapiens
HASGNQLTCGCRESYICKVNRKEDYSRCLQIMLDKGKLWFRCSLCSATAQNLTDMNTHIHQVHKEKSDEEEQQYVIKCGTCTKAFHDPESAQQHFHRKHCFLQKPSVAHFGSEKSNLYKFTASASHTERKLKQAINYSKSLDMEKGVENDLSYQNIEEEIVELPDLDYLRTMTHIVFVDFDNWSNFFGHLPGHLNQGTFIWGFQGGNTNWKPPLNCKIYNYLNRIGCFFLHPRCSKRKDAADFAICMHNVTVMITWVPKILQ

SEQ ID NO: 979 - protein, 481 aa, Homo sapiens
HASDCSFVSAFRHNLDRHMQTHHGHHKPFRCKLCSFKSSYNSRLKTHILKAHAGEHAYKCSWCSFSTMTISQLKEHSLKVHGKALTLPRPRIVSLLSSHSHHSSQKATPAEEVEDSNDSSYSEPPDVQQQLNHYQSAALARNNSRVSPVPLSGAAAGTEQKTEAVLHCEFCEFSSGYIQSIRRHYRDKHGGKKLFKCKDCSFYTGFKSAFTMHVEAGHSAVPEEGPKDLRCPLCLYHTKYKRNMIDHIVLHREERVVPIEVCRSKLSKYLQGVVFRCDKCTFTCSSDESLQQHIEKHNELKPYKCQLCYYETKHTEELDSHLRDEHKVSRNFELVGRVNLDQLEQMKEKMESSSSDDEDKEEEMNSKAEDRELMRFSDHGAALNTEKRFPCEFCGRAFSQGSEWERHVLRHGMALNDTKQVSREEIHPKEIMENSVKMPSIEEKEDDEAIGIDFSLKNETVAICVVTADKSLLENAEAKKE

SEQ ID NO: 980 - protein, 207 aa, Homo sapiens
TRPVSSEVSTLHKRKGRQSNWNPQHLLILQAQFASSLFQTSEGKYLLSDLGPQERMQISKFTGLSMTTISHWLANVKYQLRKTGGTKFLKNMDKGHPIFYCSDCASQFRTPSTYISHLESHLGFQMKDMTRLSVDQQSKVEQEISRVSSAQRSPETIAAEEDTDSKFKCKLCCRTFVSKHAVKLHLSKTHSKSPEHHSQFVTDVDEE

SEQ ID NO: 981 - protein, 590 aa, Homo sapiens
THASALCRALERAWRLRWTTRPVVEMSGRSKRESRGSTRGKRESESRGSSGRVKRERDREREPEAASSRGSPVRVKREFEPASAREAPASVVPFVRVKREREVDEDSEPEREVRAKNGRVDSEDRRSRHCPYLDTINRSVLDFDFEKLCSISLSHINAYACLVCGKYFQGRGLKSHAYIHSVQFSHHVFLNLHTLKFYCLPDNYEIIDSSLEDITYVLKPTFTKQQIANLDKQAKLSRAYDGTTYLPGIVGLNNIKANDYANAVLQALSNVPPLRNYFLEEDNYKNIKRPPGDIMFLLVQRFGELMRKLWNPRNFKAHVSPHEMLQAVVLCSKKTFQITKQGDGVDFLSWFLNALHSALGGTKKKKKTIVTDVFQGSMRIFTKKLPHPDLPAEEKEQLLHNDEYQETMVESTFMYLTLDLPTAPLYKDEKEQLIIPQVPLFNILAKFNGITEKEYKTYKENFLKRFQLTKLPPYLIFCIKRFTKNNFFVEKNPTIVNFPITNVDLREYLSEEVQAVHKNTTYDLIANIVHDGKPSEGSYRIHVLHHGTGKWYELQDLQVTDILPQMITLSEAYIQIWKRRDNDETNQQGA

SEQ ID NO: 982 - protein, 63 aa, Homo sapiens
RETQKLALSLCHVRLPHKDCHLQTRSRWAFLRHQICLHLDLGLASLQNSKKEMVAWLGLSWKA

SEQ ID NO: 983 - protein, 135 aa, Homo sapiens
GTSQDSTDTESNHEDRVAGVVSLPQGPPPQPPPTIVVGRHSPAYAKEDPKPQEGLLRGTPGPSKEVLRVVGESGEPVKAFKCEHCRILFLDHVMFTIHMGCHGFRDPFECNICGYHSQDRYEFSSHIVRGEHKVG

SEQ ID NO: 984 - protein, 289 aa, Homo sapiens
ARGGTPAPASLPGGSKEEEEKAKRLLYCALCKVAVNSLSQLEAHNKGTKHKTILEARSGLGPIKAYPRLGPPTPGEPEAPAQDRTFHCEICNVKVNSEVQLKQHISSRRHRDGVAGKPNPLLSRHKKSRGAGELAGTLTFSKELPKSLAGGLLPSPLAVAAVMAAAAGSPLSLRPAPAAPLLQGPPITHPLLHPAPGPIELRTDPSSSPRTDLNPEPLPFNSPPPAGTQASGLPARPSSRHSLNDLSFPPPTPRYGVPGKGRGSGGGGLQKGGNTPDLREPRPLPFPLP

SEQ ID NO: 985 - protein, 134 aa, Homo sapiens
HEKAFSTRSSLTGHNSIHTGEKPYECHDCGKTFRKSSYLTQHVRTHTGEKPYECNECGKSFSSSFSLTVHKRIHTGEKPYECSDCGKAFNNLSAVKKHLRTHTGEKPYECNHCGKSFTSNSYLSVHKRIHNRWI

SEQ ID NO: 986 - protein, 157 aa, Homo sapiens
  SITE (3): Xaa equals any of the naturally occurring L-amino acids
  SITE (5): Xaa equals any of the naturally occurring L-amino acids
  SITE (54): Xaa equals any of the naturally occurring L-amino acids
FGXRXGKAFNQQSHLSRHRRLHTGEKPYKCEACDKVFGQKSALESHKRIHTGEXPYRCQVCDTAFTWNSQLARHTRIHTGEKTYKCNECGKTFSYKSSLVWHRRLHGGEKSYKCKVCDKAFVCRSYVAKHTRIHSGMKPYKCNECSKTFSNRSSLVC

SEQ ID NO: 987 - protein, 483 aa, Homo sapiens
AIAGTAFPTMAEVVAEVAEMPTQMSPGAVEMSTPMSAEMMEMSTEVTEMTPGEALASSLFFQHHQFMCSECGSLYNTLEEVLSHQEQHMLAVSEEEALTTQNVGLEPELVPGAEGPFQCGECSQLILSPGELLAHQDAHLRESANQIQYQCWDCQELFPSPELWVAHRKAQHLSATVAEPPVPPPLPPPTPLPPPSPPSEVKMEPYECPECSTLCATPEEFLEHQGTHFDSLEKEERNGLEEEEEDDEEDEEDDEEMEDEEAMAEVGDDAVGGDESTAGWAQGCGDCPQHQPSAGARRQHRRTAHSPASATHPFHCSQCQRSFSSANRLQAHGRAHVGGTHECTTCSKVFKKAASLEQHRRLHLRPVAFARAPRLPITGLYNKSPYYCGTCGRWFRAMAGLRLHQRVHARARTLTLQPPRSPSPAPPPPPEPQQTIMCTELGETIAIIETSQPLALEDTLQLCQAALGASEAGGLLQLDTAFV

SEQ ID NO: 988 - protein, 300 aa, Homo sapiens
HGCLFCAFTTSSMELMALHLQANHLGKAKRKDNTIGVTVNCKDQAREASKMALLPSLQSNKDLGLSNMISSLDSASEKMAQGQLKETLGEQKSGAWTGHVDPAFCNFPSDFYKQFGVYPGMVGSGASSSCPNKEPDGKAHSEEDVPILIPETTSKNTTDDLSDIASSEDMDSSKGENNDEEDVETEPEMMTKPLSALSKDSSSDGGDSLQPTGTSQPVQGLVSPLSQAPEKQWHSQGLLQAQDPLAGLPKPERGPQSLDKPMNMLSVLRAYSSDGLAAFNGLASSTANSGCIKRPDLCGK

SEQ ID NO: 989 - protein, 260 aa, Homo sapiens
ARGGKAFARRPSLRLHRKTHQVPAAPAPCPCPVCGRPLANQGSLRNHMRLHTGEKPFLCPHCGRAFRQRGNLRGHLRLHTGERPYRCPHCADAFPQLPELRRHLISHTGEAHLCPCVARPSETHTRSELTSACTPERGPFPVPSVAVLTRWPPSCGATSNLTWRTSPTAAPPVAWATPSRRASGGISSVTGLRHPAAHPLCLLLLLSPLWCSCRLSHNCWTHTERRKSPPPGMLLRSPFQKARRSALWCQRSQMPPPAWC

SEQ ID NO: 990 - protein, 523 aa, Homo sapiens
  SITE (66): Xaa equals any of the naturally occurring L-amino acids
  SITE (208): Xaa equals any of the naturally occurring L-amino acids
  SITE (210): Xaa equals any of the naturally occurring L-amino acids
  SITE (211): Xaa equals any of the naturally occurring L-amino acids
  SITE (270): Xaa equals any of the naturally occurring L-amino acids
GFTAARRRQKGDKCGEESSPVHTSTFLSNTLKKKCEESDSESPATFSTEEPSFYPCTKCNVNFREXKHLHRHMMYHLDGNSHFRHLNVPRPYACRECGRTFRDRNSLLKHMIIHQERRQKLMEEIRELKELQDEGRSARLQCPQCVFGTNCPKTFVQHAKTHEKDKRYYCCEECNFMAVTENELECHRGIAHGAVVKCPMVTSDIAQXKXXKKTFMKDSVVGSSKKSATYICKMCPFTTSAKSVLKKHTEYLHSSSCVDSFGSPLGLDKXKNDILEEPVDSDSTKTLTKQQSTTFPKNSALKQDVKRTFGSTSQSSSFSKIHKRPHRIQKARKSIAQSGVNMCNQNSSPHKNVTIKSSVDQKPKYFHQAAKEKSNAKANSHYLYRHKYENYRMIKKSGESYPVHFKKEEASSLNSLHLFSSSSNSHNNFISDPHKPDAKRPESFKDHRRVAVKRVIKESKKESSVGGEDLDSYPDFLHKMTVVVLQKLNSAEKKDSYETEDESSWDNVELGDYTTQAIEDENL

SEQ ID NO: 991 - protein, 196 aa, Homo sapiens
HASGNHCGKAFSDPSSLRLHLRIHTGEKPYECNQCFHVFRTSCNLKSHKRIHTGENHHECNQCGKAFSTRSSLTGHNSIHTGEKPYECHDCGKTFRKSSYLTQHVRTHTGEKPYECNECGKSFSSSFSLTVHKRIHTGEKPYECSDCGKAFNNLSAVKKHLRTHTGEKPYECNHCGKSFTSNSYLSVHKRIHNRWI

SEQ ID NO: 992 - protein, 187 aa, Homo sapiens
GRVGPGASNDFKYGLLPESWPKQETWENGESSLIMNKLKCPHCSYVAKYRRTLKRHLLIHTGVRSFSCDICGKLFTRREHVKRHSLVHKKDKKYKCMVCKKIFMLAASVGIRHGSRRYGVCVDCADKSQPGGQEGVDQGQDTEFPRDEEYEENEVGEADEELVDDGEDQNDPSRWDESGEVCMSLDD

SEQ ID NO: 993 - protein, 177 aa, Homo sapiens
SRERPYECSKCGIFFTYAADLTQHQKVHNRGKPYECCECGKFFSQHSSLVKHRRVHTGESPHVCGDCGKFFSRSSNLIQHKRVHTGEKPYECSDCGKFFSQRSNLIHHKRVHTGRSAHECSECGKSFNCNSSLIKHWRVHTGERPYKCNECGKFFSHIASLIQHQIVHTGERPHGLW

SEQ ID NO: 994 - protein, 272 aa, Homo sapiens
RVGNKKKTQQRGSKCSEIVFGCHQNSPESCSWPGRPRTGPGRASADQAFWKIGKVVRELGGSWRAPGGSWGLVLPGSVSASGPGGAAPPVGSDERDSHRDAGGLRPLGRVMAHQVLHHRVFGHVLHQVGLRGVGPPTHAAAVGLGVLDGVGREVDLQRSGVRIGPVAVGTLVGLVLVVLALVRLEVGELSESLLAARMWALVGSVACVDSGVLLEVGELPEGLITVGAVVGLDAQVDAQVLGQVGGVGKGLGAVRALVGLGLCVRLGVDLHL

SEQ ID NO: 995 - protein, 413 aa, Homo sapiens
PRCGGDAEGGSRSRVREESDPALVQGPPCPSWGQNSSPGEWAGPVFRASRPAFRLLQRCLLAAFPALSPWRRTLVLEMAATLLMAGSQAPVTFEDMAMYLTREEWRPLDAAQRDLYRDVMQENYGNVVSLDFEIRSENEVNPKQEISEDVQFGTTSERPAENAEENPESEEGFESGDRSERQWGDLTAEEWVSYPLQPVTDLLVHKEVHTGIRYHICSHCGKAFSQISDLNRHQKTHTGDRPYKCYECGKGFSRSSHLIQHQRTHTGERPYDCNECGKSFGRSSHLIQHQTIHTGEKPHKCNECGKSFCRLSHLIQHQRTHSGEKPYECEECGKSFSRSSHLAQHQRTHTGEKPYECNECGRGFSERSDLIKHYRVHTGERPYKCDECGKNFSQNSDLVRHRRAHTGREAIPL

SEQ ID NO: 996 - protein, 359 aa, Homo sapiens
HEDYWFETKMSALKQSTSEASVLGERTKSVMMEKGLDWEGRSSTEKNYKCKECGKVFKYNSSFISHQRNHTSEKPHKCKECGIAFMNSSSLLNHHKVHAGKQPYRCIECGKFLKKHSTFINHQRIHSREKPHKCIECGKTFRKNSILLSHQRIHTGQKPYKCNDCGKAFAQNAALTRHERIHSGEKPFKCNKCGRAFRDNSTVLEHQKIHTGEKPYQCNECGKAFRKSSTLISHQRMHTGEKPYHCSKCGKSFRYSSSFAGHQKTHSGNKPYQCRDCGKAFTKSSTLTGHQRIHTGEKPYHCKKCGKAFRHSSGLVEHQRLHTGEKPYKCNECGKAFPRSSALKQHKKIHNKERAMKCS

SEQ ID NO: 997 - protein, 152 aa, Homo sapiens
HASDTKEHPFKCNECGKTFSHSAHLSKHQLIHAGENPFKCSKCDRVFTQRNYLVQHERTHARKKPLVCNECGKTFRQSSCLSKHQRIHSGEKPYVCDYCGKAFGLSAELVRHQRIHTGEKPYLSGMRESLHPELMPFYSPESSHWGEALQMW

SEQ ID NO: 998 - protein, 267 aa, Homo sapiens
PRETCPSLRKGVQQRLNLNFVGVSIVQFGGWCFLKFLCFFCFFNKFTLTPEVKKIVFSWTLHQVLSLLSYYKRKGQGLTRGWERLLMAVAGSGRAGRADGGAAGVGAAVVAEGAGPRAPAAPLQHSRVEVGVAARVLGQVVAAHEALLADGAAELLLARVCAVVPRQLVGARELLVAVLPAAGEGPLTCVSSQVRLEVRRFPVNFLAARVVALVLPLRGLEVGATSAPPDPLSEAGLAAPRGPRLPLGLQPRLGLRLAPRRAGGRGR

SEQ ID NO: 999 - protein, 128 aa, Homo sapiens
VAMGKRYFCDYCDRSFQDNLHNRKKHLNGLQHLKAKKVWYDMFRDAAAILLDEQNKRPCRKFLLTGQCDFGSNCRFSHMSERDLQELSIQVEEERRAREWLLDAPEAPRGPSGGLAGEESQAAELSPK

SEQ ID NO: 1000 - protein, 46 aa, Homo sapiens
NPLKAGRISQTNKTQKSTHHKRKDRYVYYVKSVAIFLKNGTLSEIK

SEQ ID NO: 1001 - protein, 383 aa, Homo sapiens
HEQLQQHLRSHREGVFKCPLCSRVFPSPSSLDQHLGDHSSESHFLCVDCGLAFGTEALLLAHRRAHTPNPLHSCPCGKTFVNLTKFLYHRRTHGVGGVPLPTTPVPPEEPVIGFPEPAPAETGEPEAPEPPVSEETSAGPAAPGTYRCLLCSREFGKVLQLTRHQRFVHRLERRHKCSICGKMFKKKSHVRNHLRTHTGERPFPCPDCSKPFNSPANLARHRLTHTGERPYRCGDCGKAFTQSSTLRQHRLVHAQHFPYRCQECGVRFHRPYRLLMHRYHHTGEYPYKCRECPRSFLLRRLLEVHQLVVHAGRQPHRCPSCGAAFPSSLRLREHRCAAAAAQAPRRFECGTCGKKVGSAARLQAHEAAHAAAGPWKRYSGLKE

SEQ ID NO: 1002 - protein, 91 aa, Homo sapiens
  SITE (20): Xaa equals any of the naturally occurring L-amino acids
HYRRAMTSHARVRKLGSSRXAAGGRRLGSHRESRVRKKETPEKISSSVPFDIQNKLEIIQRWRREDELWESRHGFFLSKKKKKKKKKNPPR

SEQ ID NO: 1003 - protein, 186 aa, Homo sapiens
RVDPRVRLKGLIGKRAMKCPYCDFYFMKNGSDLQRHIWAHEGVKPFKCSLCEYATRSKSNLKAHMNRHSTEKTHLCDMCGKKFKSKGTLKSHKLLHTADGKQFKCAVCDYTAAQKPQLLRHMEQHVSFKPFRCAHCHYSCNISGSLKRHYNRKHPNEEYANVGTGELAAEVLIQQGGLKCPVCTFL

SEQ ID NO: 1004 - protein, 154 aa, Homo sapiens
ARPEVFDDASDQDSTDKPWRPYYNYKPKKKSRQLKKMRKVNWRKEHGNRSPSHKCKYPAELDCAVGKAPQDKPFEEEETKEMPKLQCELCDGDKAVGAGNQGRPHRHLTSRPYACELCAKQFQSPSTLKMHMRCHTGEKPYQCKPCPPGTFSRA

SEQ ID NO: 1005 - protein, 341 aa, Homo sapiens
TRPRRCQHKKKCRKTLKPRMSVSADERGGLENMRPPNNSSPVQEDAENASCELCGLTITEEDLSSHYLAKHIENICACGKCGQILVKGRQLQEHAQRCGEPQDLTMNGLGNTEEKMDLEENPDEQSEIRDMFVEMLDDFRDNHYQINSIQKKQLFKHSACPFRCPNCGQRFETENLVVEHMSSCLDQDMFKSAIMEENERDHRRKHFCNLCGKGFYQRCHLREHYTVHTKEKQFVCQTCGKQFLRERQLRLHNDMHKGMARYVCSICDQGNFRKHDHVRHMISHLSAGETICQVCFQIFPNNEQLEQYMDVHLYTCGICGAKFNLRKDMRSHYNAKHLKRT

SEQ ID NO: 1006 - protein, 265 aa, Homo sapiens
HASAPQVVTLHVAEPGGGAAAESQLGPPDLPQITLAPGPFGGTGYSVITAPPMEEGTSAPGTPYSEEPAGEAAQAVVVSDTLKEAGTHYIMATDGTQLHHIELTADGSISFPSPDALASGAKWPLLQCGGLPRDGPEPPSPAKTHCVGDSQSSASSPPATSKALGLAVPPSPPSAATAASKKFSCKICAEAFPGRAEMESHKRAHAGPGAFKCPDCPFSARQWPEVRVGAGCSCVSAVIHWATRLYNKPLMSALSSQILCSPLSG

SEQ ID NO: 1007 - protein, 201 aa, Homo sapiens
SRFLMTLNHTGWRQNTPKGAFLRIQTLQKSVTLKAWYKGGRSTPLWGNQGRILPRKGIWMQSQTSALSKAHMAREGTDAAIVANSSSKPQTLFSIGASTLEKNRLSAENVGRATISGCTSPSTSAVHTGEKPYKCQVCGKAFRVSSHLVQHHSVHSGERPYGCNECGKNFGRHSHLIEHLKRHFREKSQRCSEQKKVRTQN

SEQ ID NO: 1008 - protein, 184 aa, Homo sapiens
RPTRPGLAPPEPADRPCAGLRCPECSVKFESAEDLESHMQVDHRDLTPETSGPRKGTQTSPVPRKKTYQCIKCQMTFENEREIQIHVANHMIEEGINHECKLCNQMFDSPAKLLCHLIEHSFEGMGGTFKCPVCFTVFVQANKLQQHIFAVHGQEDKIYDCSQCPQKFFFQTELQNHTMSQHAQ

SEQ ID NO: 1009 - protein, 151 aa, Homo sapiens
  SITE (88): Xaa equals any of the naturally occurring L-amino acids
DISEDKLSVVGEATGGPTRNGARGPGSEGVWEPGSWPERPRGDAGAEWEPLGIPQGNKLLGGSVPACHELKAFANQGCVLVPPRLDDXTEKGACPPIRRGKNFSSTSDLSKPPMPCEEKKTYDCSECGKAFSRSSSLIKHQRIHTGEKPFK

SEQ ID NO: 1010 - protein, 333 aa, Homo sapiens
GTPARTGPEFPGAFMNQAFLQSHIQRRHTEENSHFEYQKNAQIEKLRSEIVVLKEELQLTRSELEAAHHASAVRFSKEYEMQKTKEEDFLKLFDRWKEEEKEKLVDEMEKVKEMFMKEFKELTSKNSALEYQLSEIQKSNMQIKSNIGTLKDAHEFKEDRSPYPQDFHNVMQLLDSQESKWTARVQAIHQEHKKEKGRLLSHIEKLRTSMIDDLNASNVFYKKRIEELGQRLQEQNELIITQRQQIKDFTCNPLNSISEPKGNPLAWQAFESQPAAPAVPMNAPALHTLETKSSLPMVHEQAFSSHILEPIEELSEEEKGRENDQKLNNNKMH

SEQ ID NO: 1011 - protein, 178 aa, Homo sapiens
HASAGEKSFQCNQCGKTFGQKSNLRIHQRTHTGEKTYQCNECEKSFWRKDHLIQHQKTHTGEKPFKCNECGKTFARTSTLRVHQRIHTGEKPFKCNECGKKFVRKAILSDHQRIHTGEKPFQCNKCGKTFGQKSNLRIHQRTHSGEKSYECNEYGKLCKKSTLSLYQENSGRGESLLM

SEQ ID NO: 1012 - protein, 206 aa, Homo sapiens
SYSYFFIQLCNHIASGKKCQYVGNCSFAHSPEEREVWTYMKENGIQDMEQFYELWLKSQKNEKSEDIASQSNKENGKQIHMPTDYAEVTVDFHCWMCGKNCNSEKQWQGHISSEKHKEKVFHTEDDQYCWQHRFPTGYFSICDRYMNGTCPEGNSCKFAHGNAELHEWEERRDALKMKLNKARKDHLIGPNDNDFGKYSFLFKDLN

SEQ ID NO: 1013 - protein, 164 aa, Homo sapiens
HEKPYKCKECGKAFHRYSILSTHKKIHTGEKPHKCGECGKAFNWSSTLITHKIIHSGEKPYKYEECGKAFNQSSHLMRHKKIHSKRNLTNVNSVARSLRSPQLLLHIRSFILERNLTNVRNVAKVLANSQTLLNTRRFILERNPTNVKNVAYLLTSSHNLLYIR

SEQ ID NO: 1014 - protein, 148 aa, Homo sapiens
  SITE (144): Xaa equals any of the naturally occurring L-amino acids
STKFSGDGKSFLHGNYEELYSAAKFSVSTKANSTKSQVSKHQRTHEIEKNHVCSECGKAFVKKSQLTDHERVHTGEKPYGCTLCAKVFSRKSRLNEHQRIHKREKSFICSECGKVFTMKSRLIEHQRTHTGEKPYICNECGKGXPGKP

SEQ ID NO: 1015 - protein, 99 aa, Homo sapiens
  SITE (53): Xaa equals any of the naturally occurring L-amino acids
EYNGIICNTKDPCLRGWIAHLPCDYYALHVCIKYLMYPVNMYTYCVPTKIKTXKFLKSIISEKFSMYHNYQRRKLISFIKFILKNLSPQKNSRKGYFNC

SEQ ID NO: 1016 - protein, 295 aa, Homo sapiens
TRVNGDGKSFLHAKHEQFHNEMNFPEGGNSVNTNSQFIKHQRTQNIDKPHVCTECGKAFLKKSRLIYHQRVHTGEKPHGCSICGKAFSRKSGLTEHQRNHTGEKPYVCNECGKGFSQKTCLISHQRFHTGKTPFVCTECGKSCSHKSGLINHQRIHTGEKPYTCSDCGKAFRDKSCLNRHRRTHTGERPYGCSDCGKAFSHLSCLVYHKGMLHAREKCVGSVKLENPCSESHSLSHTRDLIQDKDSVNMVTLQMPSVAAQTSLTNSAFQAESKVAIVSQPVVRSSVSADSRICTE

SEQ ID NO: 1017 - protein, 121 aa, Homo sapiens
HELVPRKAIEKSETTSEHTCQLCGGWFDTKIGLSNHVRGHLKRLGKTKWDAHKSPICVLNEMMQNEEKYEKILKALNSRRIIPRPFVAQKLASNEYDETKPELPSGKKNQSLTLIELHFLY

SEQ ID NO: 1018 - protein, 159 aa, Homo sapiens
  SITE (33): Xaa equals any of the naturally occurring L-amino acids
DGNILITLSFAIILYSIFKTVHFIIFTFRIFCXRSDMTVMLKSKIMKSSKSSLFSVCSSSSERISLYFGLVSCPSAKFLNWVCSRSLAIAFSSLPSESEEFLKIRAVVAIAFSRSEHFLRAFTEASCLDIEILLGIFLGAQVDVGAAEGLGSPSKWRDL

SEQ ID NO: 1019 - protein, 429 aa, Homo sapiens
GTRKGEMGAKGDKGSPGFYGKKGAKGEKGNAGFPGLPGPAGEPGRHGKDGLMGSPGFKGEAGSPGAPGQDGTRGEPGIPGFPGNRGLMGQKGEIGPPGQQGKKGAPGMPGLMGSNGSPGQPGTPGSKGSKGEPGIQGMPGASGLKGEPGATGSPGEPGYMGLPGIQGKKGDKGNQGEKGIQGQKGENGRQGIPGQQGIQGHHGAKGERGEKGEPGVRGAIGSKGESGVDGLMGPAGPKGQPGDPGPQGPPGLDGKPGREFSEQFIRQVCTDVIRAQLPVLLQSGRIRNCDHCLSQHGSPGIPGPPGPIGPEGPRGLPGLPGRDGVPGLVGVPGRPGVRGLKGLPGRNGEKGSQGFGYPGEQGPPGPPGPEGPPGISKEGPPGDPGLPGKDGDHGKPGIQGQPGPPGICDPSLCFSVIARRDPFRKGPNY

SEQ ID NO: 1020 - protein, 160 aa, Homo sapiens
MLPRCAYILDCFVLFWFGFFSGTESVTVTQAGVQWRDLRSLQPLPPRFKQFSCLSLWPPPHLANFFFFFFFFCIFSRDRVSSCRIRYQAYRYRRPRGGARYPIRPIVSRITIHWPSFYNVVTGKTLALPNLIALQHIPLSPAGVIAKRPAPIALPNSCAA

SEQ ID NO: 1021 - protein, 159 aa, Homo sapiens
ARGKTTGACTQVSGPLPVKCVARPLPSPCAWQNIAASTQANDPTPALTVARATAPSPTSGSTARPISSSIRQLCGSSWQRRRLPLAWPSWRLLWRRYPWWKPLRSTLWPRLRGSRSVADSARLPLWHLHSLLLKALQHPLKHLYILCPFLFPSPPPCKF

SEQ ID NO: 1022 - protein, 166 aa, Homo sapiens
  SITE (1): Xaa equals any of the naturally occurring L-amino acids
  SITE (137): Xaa equals any of the naturally occurring L-amino acids
XKPPPALPWSLLIGLPASILVLSREIFNKKQVKITSEKMTTYKRHNFLTEYQIVHNGEKVYECKECRKTFIRRSTLSQHLRIHTGEKPYKCKECGQAFRQRAHLIRHHKLHTGEKPYECKECGKAFTVLQELTQHQXLHTGEKPYECKECGKAFRVHQQLARHQRI

SEQ ID NO: 1023 - protein, 118 aa, Homo sapiens
  SITE (90): Xaa equals any of the naturally occurring L-amino acids
  SITE (92): Xaa equals any of the naturally occurring L-amino acids
  SITE (93): Xaa equals any of the naturally occurring L-amino acids
  SITE (96): Xaa equals any of the naturally occurring L-amino acids
  SITE (105): Xaa equals any of the naturally occurring L-amino acids
  SITE (112): Xaa equals any of the naturally occurring L-amino acids
VLQAFFSNTKSCSVEILADLKELSVFHFLSSVSYDSLCFPPSSLCSCHSVHQPTLLKCRYFFKARRKCYHSHQRVQRWAVRRSRVQNHTXLXXGEXGKPWRVDDXEGSGSHXGEGAWA

SEQ ID NO: 1024 - protein, 158 aa, Homo sapiens
DPRVRKAFTSDNNECNEPEKSFSLDSTIDTDQRVLRIQNIDDTDKYDMGVNQNSAAGKQEQINLIQDVQSSEYKESLMDLSHLSKCDSIPATEKSYKCDACEKVFHQSSALSRHQRIHTREKPYKCKECEKSFSQSSSLSRHKRIHTREKPYKCEASD

SEQ ID NO: 1025 - protein, 147 aa, Homo sapiens
  SITE (120): Xaa equals any of the naturally occurring L-amino acids
DPRVRSGNRPEDLRAAQLPGRLELLLNNFCSAMSPAPDAAPAPASISLFDLSADAPVFQGLSLVSHAPGEALARAPRTSCSGSGERESPERKLLQGPMDISEKLFCSTCDQTFQNHQEQXEHYKLDWHRFNLKQRLKDKPLLSALGL

SEQ ID NO: 1026 - protein, 252 aa, Homo sapiens
QGICQGKAEFEEEAKNPGLETHRKRKRSGNSDSIERDAAQEAEAGTGLEPGSNSGQCSVPLKKGKDAPIKKESLGHWSQGLKISMQDPKMQVYKDEQVVVIKDKYPKARYHWLVLPWTSISSLKAVAREHLELLKHMHTVGEKVIVDFAGSSKLRFRLGYHAIPSMSHVHLHVISQDFDSPCLKNKKHWNSFNTEYFLESQAVIEMVQEAGRVTVRDGMPELLKLPLRCHECQQLLPSIPQLKEHLRKHWTQ

SEQ ID NO: 1027 - protein, 194 aa, Homo sapiens
TRPQKGLPDAHLGLPPGLAKKSSSLKEVVAGAPRPGLLSLAKPLDAPAVNKAIKSPPGFSAKGLGHPPSSPLLKKTPLALAGSPTPKNPEDKSPQLSLSPRPASPKAQWPQSEDEGPLNLTLDSDGGRELDCQLCGAWFETRKGLSSHARAHLRHLGVSDPDAKGSPIDVLHGLIRRDGVQIRLPPRRGALAHP

SEQ ID NO: 1028 - protein, 571 aa, Homo sapiens
HYRRYACRYRSGIPGSTHASAEPGPPPSVITFAHPAPSVIVHGGSSSGGGGSGTASTGGSQAASVITYTAPPRPPKKREYPPPPPEPAATPTSPATAVSPATAAGPAMATTTEEAKGRNPRAGRTLTYTAKPVGGIGGGGGPPTGAGRGPSQLQAPPPLCQITVRIGEEAIVKRRISETDLRPGELSGEEMEESEEDEEEEDEEEEEEDEEESKAGGEDQLWRPYYSYKPKRKAGAAGGASVGGSGLPRGRRPPRWRQKLERRSWEETPAAESPAGRARTERRHRCGDCAQTFTTLRKLRKHQEAHGGGSHSSRAGRRPSTRFTCPHCAKVCKTAAALSRHGQRHAAERPGGTPTPVIAYSKGSAGTRPGDVKEEAPQEMQVSSSSGEAGGGSTAAEEASETASLQDPIISGGEEPPVVASGGSYVYPPVQEFPLALIGGGREPGGGRGKSGSEGPVGAGEGDRMEGIGAAKVTFYPEPYPLVYGPQLLAAYPYNFSNLAALPVALNMVLPDEKGAGALPFLPGVFGYAVNPQAAPPAPPTPPPPTLPPPIPPKGEGERAGVERTQKGDVG

SEQ ID NO: 1029 - protein, 77 aa, Homo sapiens
REPSAHAHLYSQHPSFQTQQAKLIYKCAMCDTVFTHKPLLSSHFDQHLLPQRVSVFKCPFCPLLFAQKRTMLGTSQE

SEQ ID NO: 1030 - protein, 240 aa, Homo sapiens
  SITE (185): Xaa equals any of the naturally occurring L-amino acids
  SITE (186): Xaa equals any of the naturally occurring L-amino acids
HEPLRRWSEVGEELKRPGADRRVKAMPPPGKVPRKENLWLQCEWGSCSFVCSTMEKFFEHVTQHLQQHLHGSGEEEEEEEEDDPLEEEFSCLWQECGFCSLDSSADLIRHVYFHCYHTKLKQWGLQALQSQADLGPCILDFQSRNVIPDIPDHFLCLWEHCENSFDNPEWFYRHVEAHSLCCEYXXVGKDNPVVLCGWKGCTCTFKDRSKLREHLRSHTQGESGSLPHLWGHCLPTIPSS

SEQ ID NO: 1031 - protein, 95 aa, Homo sapiens
PQAALGSHFSASLESSITPWLETVFKIAHSLEGSSQLCWCFQWWRRSSFRPSISAQSRQLKPEWDHKRNVWRPGHSGPWQVSLGLLVPDWGPSFS

SEQ ID NO: 1032 - protein, 113 aa, Homo sapiens
WIPRAAGIRHELIRHSIIHTGEKPYECSECGKAFSRSSSLTQHQRMHTGRNPISVTDVGRPFTSGQTSVNIQELLLGKNFLNVTTEENLLQEEASYMASDRTYQRETPQVSSL

SEQ ID NO: 1033 - protein, 347 aa, Homo sapiens
PKATSQGQASPVCPGLLKSRAHRRSFSISGSEDSDSASEEDLQTLDRERATFEKLSRPPGFYPHRVLFQNAQGQFLYAYRCVLGPHQDPPEEAELLLQNLQSRGPRDCVVLMAAAGHFAGAIFQGREVVTHKTFHRYTVRAKRGTAQGLRDARGGPSHSAGANLRRYNGATLYKDVRDLLAGPSWAKALEEAGTILLRAPRSGRSLFFGGKGAPLQRGDPRLWDIPLATRRPTFQELQRVLHKLTTLHVYEEDPREAVRLHSPQTHWKTVREERKKPTEEEIRKICRDEKEALGQNEESPKQGSGSEGEDGFQVELELVELTVGTLDLCESEVLPKRRRRKRKKKKK

SEQ ID NO: 1034 - protein, 102 aa, Homo sapiens
RKEVLHYPEDVLDKKKKTKKQKNKNHLHQVLEVQEFLVYQLNFNKTKLKEHFIVHLYKILSSVTGFRSPPSLEDHQLIHRIVFPRCLLACHGLKCVYTITCR

SEQ ID NO: 1035 - protein, 94 aa, Homo sapiens
RARDATPWVGDVERCLGRGAAAARDRSWASLEVLPRGVSQAVPPQITVSPEHFAALLAAVGLDVCMGEKVSFQITSLIKGSSTCGTFVWRFLHV

SEQ ID NO: 1036 - protein, 316 aa, Homo sapiens
HASAFPCPQCDKAYGTQRDLKEHQVVHSGARPFACDQCGKAFARRPSLRLHRKTHQVPAAPAPCPCPVCGRPLANQGSLRNHMRLHTGEKPFLCPHCGRAFRQRGNLRGHLRLHTGERPYRCPHCADAFPQLPELRRHLISHTGEAHLCPVCGKALRDPHTLRAHERLHSGERPFPCPQCGRAYTLATKLRRHLKSHLEDKPYRCPTCGMGYTLPQSLRRHQLSHRPEAPCSPPSVPSAASEPTVVLLQAEPQLLDTHREEEVSPARDVVEVTISESQEKCFVVPEEPDAAPSLVLIHKDMGLGAWAEVVEVEMGT

SEQ ID NO: 1037 - protein, 404 aa, Homo sapiens
ENWRTEWPRVRRPSERRPRGRGRGQLEGAAFPVRRLWPQLQVLLGRGKAPEHPLGGETVRVQRLREGLHPQLARGPAPAGAQRGEALRVRRVRQGLRPELQPPPAPARAHGREALRVRRLRQGLRPEVGRRQAPPHPHRREAVRVRRVREALPAQLERGPAPADPPRGEPVRVPGVRPGLQPELQPPPAPARAHGGAALRLPGLRPRLQPQLLPPRAPPHPHRGEAPPVRPLRARVPGAVGLLPAPAAPHGREAVPLHRVRPRLPPELPPHPAPAGAWRRVSRGCGGRDAGGLVGARPRPGEAPVRPVRGEEVTAGCAPGSRVAKASPGLHPPWLGSNQERQGSGKASAARGRRFPEAGRSQGSVPGRPPASETPSLPRSAAAGQWPVIESVIPPQPGLHQNPA

SEQ ID NO: 1038 - protein, 243 aa, Homo sapiens
HEPAWSSGQRLQRGRRLGGERPFMCETCGKSFASKEYLKHHNRIHTGSKPFKCEVCFRTFAQRNSLYQHIKVHTGERPYCCDQCGKQFTQLNALQRHRRIHTGERPFMCNACGRTFTDKSTLRRHTSIHDKNTPWKSFLVIVDGSPKNDDGHKTEQPDEEYVSSKLSDKLLSFAENGHFHNLAAVQDTVPTMQENSSADTACKADDSVVSQDTLLATTISELSELTPQTDSMPTQLHSLSNME

SEQ ID NO: 1039 - protein, 264 aa, Homo sapiens
ARAGKRVSTCPFCFGPFVTTEAYELHLKERHHIMPTVHTVLKSPAFKCIHCCGVYTGNMTLAAIAVHLVRCRSAPKDSSSDLQAQPGFIHNSELLLVSGEVMHDSSFSVKRKLPDGHLGAEDQRHGEEQPPILNADAAPGPEKVTSVVPFKRQRNESRTEGPIVKDEALQILALDPKKYEGRSYEEKKQFLKDYFHKKPYPSKKEIELLSSLFWVWKIDVASFFGKRRYICMKAIKNHKPSVLLGFDMSELKNVKHRLNFEYEP

SEQ ID NO: 1040 - protein, 129 aa, Homo sapiens
ELLSVLALPRCACPEGVSSHLRQLHSSVDVPLSSGHAEGCLKQSCRSLLSQPWIKTEARNLIRNADFLSSILRNGEGYSKEKNGICFLGRSARLALRAQGGKVTKGLDYYKSYKYVVRPIDLYSQVFVM

SEQ ID NO: 1041 - protein, 238 aa, Homo sapiens
  SITE (190): Xaa equals any of the naturally occurring L-amino acids
  SITE (236): Xaa equals any of the naturally occurring L-amino acids
ENSICACGKCGQILVKGRQLQEHAQRCGEPQDLTMNGLGNTEEKMDLEENPDEQSEIRDMFVEMLDDFRDNHYQINSIQKKQLFKHSACPFRCPNCGQRFETENLVVEHMSSCLDQDMFKSAIMEENERDHRRKHFCNLCGKGFYQRCHLREHYTVHTKEKQFVCQTCGKQFLRERQLRLHNDMHKGMAXGEIGPLNLWRSERSEFGEDMGKNQSSTDNLKYRPRNIRSEVAPSFXSS

SEQ ID NO: 1042 - protein, 100 aa, Homo sapiens
TRPRTRGRTRGVFFRLENVQYPYQLYIAPSTSSTERPSPNGPDRPFQCPTCGVRFTRIQNLKQHMLIHSGIKPFQCDRCGKKFTRAYSLKMHRLKHEVIS

SEQ ID NO: 1043 - protein, 363 aa, Homo sapiens
STHASGPIEVHTAEDVPIAVEVHAISEDYDIETENNSSESLQDQTDEEPPAKLCKILDKSQALNVTAQQKWPLLRANSSGLYKCELCEFNSKYFSDLKQHMILKHKRTDSNVCRVCKESFSTNMLLIEHAKLHEEDPYICKYCDYKTVIFENLSQHIADTHFSDHLYWCEQCDVQFSSSSELYLHFQEHSCDEQYLCQFCEHETNDPEDLHSHVVNEHACKLIELSDKYNNGEHGQYSLLSKITFGKCKNFFVCQVCGFRSRLHTNVNRHVAIEHTKIFPHVCDDCGKGFSSMLEYCKHLNSHLSEGIYLCQYCEYSTGQIEDLKIHLDFKHSADLPHKCSDCLMRFGNERELISHLPVHETT

SEQ ID NO: 1044 - protein, 326 aa, Homo sapiens
FGTSGDGGGSKMAQAIFEALEGMDNQTVLAVQSLLDGQGAVPDPTGQSVNAPPAIQPLDDEDVFLCGKCKKQFNSLPAFMTHKREQCQGNAPALATVSLATNSIYPPSAAPTAVQQAPTPANRQISTYITVPPSPLIQTLVQGNILVSDDVLMSAMSAFTSLDQPMPQGPPPVQPEHAFRAQLPHPASTSSSTSSTTAPTATTSASTTSTPEPGPPWASQPWWERCGGGVQCCCAPGWEWNGGDPGTGDAALPTPRGEQRGQGGRGHWSWTSWPTRTHPEHQLCARHCAGDTMKTRPGPGLHGVYHITGEKDFNQSITPTDVRCKP

SEQ ID NO: 1045 - protein, 457 aa, Homo sapiens
GKSFLHAKHEQFHNEMNFPEGGNSVNTNSQFIKHQRTQNIDKPHVCTECGKAFLKKSRLIYHQRVHTGEKPHGCSICGKAFSRKSGLTEHQRNHTGEKPYECTECDKAFRWKSQLNAHQKIHTGEKSYICSDCGKGFIKKSRLINHQRVHTGEKPHGCSLCGKAFSKRSRLTEHQRTHTGEKPYECTECDKAFRWKSQLNAHQKAHTGEKSYICRDCGKGFIQKGNLIVHQRIHTGEKPYICNECGKGFIQKGNLLIHRRTHTGEKPYVCNECGKGFSQKTCLISHQRFHTGKTPFVCTECGKSCSHKSGLINHQRIHTGEKPYTCSDCGKAFRDKSCLNRHRRTHTGERPYGCSDCGKAFSHLSCLVYHKGMLHAREKCVGSVKLENPCSESHSLSHTRDLIQDKDSVNMVTLQMPSVAAQTSLTNSAFQAESKVAIVSQPVARSSVSADSRICTE

SEQ ID NO: 1046 - protein, 192 aa, Homo sapiens
RKHQKVHTGIKPFKCSDCGKTFNRKDALVLHQRIHTGERPYECSKCGKTFSVLSTLIRHRKVHIGERPYECTECGKFFKYNNSFILHQRVHTGERPFECKQCGKGYVTRSGLYQHWKVHTGERPYECSLCGKTFTTRSYRNRHQQFHTEERSYECTECGKAFKHSSTLLQHKKVHTPERRQEDRAHGKVVSC

SEQ ID NO: 1047 - protein, 236 aa, Homo sapiens
  SITE (12): Xaa equals any of the naturally occurring L-amino acids
  SITE (43): Xaa equals any of the naturally occurring L-amino acids
  SITE (44): Xaa equals any of the naturally occurring L-amino acids
  SITE (226): Xaa equals any of the naturally occurring L-amino acids
  SITE (228): Xaa equals any of the naturally occurring L-amino acids
GGRGGPERGGRXWEGGGGRGSGGGMDGWDGSIREVLYRGNADXXLFQDQDDDELWLGDSGITNWDNVDYMWDEEEEEEEEDQDYYLGGLRPDLRIDVYREEEILEAYDEDEDEELYPDIHPPPSLPLPGQFTCPQCRKSFTRRSFRPNLQLANMVQIIRQMCPTPYRGNRSNDQGMCFKHQEALKLFCEVDKEAICVVCRESRSHKQHSVLPLEEVVQEYQVREMXEXGGMKGVER

SEQ ID NO: 1048 - protein, 85 aa, Homo sapiens
GTSNSSQFSAHRRIHTGESPYKCAVCGKIFNNSSHFSAHRKTHTGEKPYRCSHCERGFTKNSALTRHQTVHMKAVLSSQEGRDAL

SEQ ID NO: 1049 - protein, 151 aa, Homo sapiens
GPPGGPAQPSPLPTSRCENCLLRFRTHRSLFKHLHVCAEHAQSPAPPPPPALDREPPAPERPPEVDPASAPGLPFPLLEPFTTPAPAPTGPFLPYLNPAPFGLSPPRLRPFLAAAPGPPASSAAVWKKSQGAGSSPRRPQGGSDAPSGACR

SEQ ID NO: 1050 - protein, 78 aa, Homo sapiens
GTRFSWLTCLLRHERIHTGKKSYECQQCGKAFTRSRFLRGHEKTHTGEKMHECKECGKALSSLSSLHRHKRTHWRDTL

SEQ ID NO: 1051 - protein, 216 aa, Homo sapiens
  SITE (86): Xaa equals any of the naturally occurring L-amino acids
  SITE (89): Xaa equals any of the naturally occurring L-amino acids
  SITE (132): Xaa equals any of the naturally occurring L-amino acids
  SITE (198): Xaa equals any of the naturally occurring L-amino acids
GLVNVRPLEAIWDIMQTYLMRIIFLQKRNPISVINVEKPLFIDHRLLNMRKHIKERELSLMEQIKEFILERNHHECTDCGKTFLWXTQXTEHQRIHTGEKPFECNVCGKAFRHSSSLGQHENAHTGEKPYQXSLCGKAFQRSPPLFNTSEFTLERNPIDVIYVGGPLGMAHPSLNTRSHTVERSPSSVRNVGKPLVDXLPLSNMRGLILERNLLNV

SEQ ID NO: 1052 - protein, 150 aa, Homo sapiens
GTRKNQRVLASPTSTSQLHSEFSDWHLWKCGQCFKTFTQRILLQMHVCTQNPDRPYQCGHCSQSFSQPSELRNHVVTHSSDRPFKCGYCGRAFAGATTLNNHIRTHTGEKPFKCERCERSFTQATQLSRHQRMPNECKPITESPESIEVD

SEQ ID NO: 1053 - protein, 170 aa, Homo sapiens
  SITE (142): Xaa equals any of the naturally occurring L-amino acids
  SITE (152): Xaa equals any of the naturally occurring L-amino acids
  SITE (158): Xaa equals any of the naturally occurring L-amino acids
  SITE (162): Xaa equals any of the naturally occurring L-amino acids
  SITE (167): Xaa equals any of the naturally occurring L-amino acids
SQGSSKGNHLCGSELDITSLASDSVLNHHQLGYADRRPCESNECGNAIRQNSHFIQHGGKMFVYLENGQSLNHGMALTIHNKINTAEKPFECHQCGKVFNRRHSLSEHQRIHTGEKPYECQECGRAFTHSSTLTRHLRTHTXRRSPTGAVSXGKLQQXSSLXQHQRXTPG

SEQ ID NO: 1054 - protein, 49 aa, Homo sapiens
TSGSLRKPCKYNEFGKTFFQKLQIIKHQSVHTKIYFCRYIKYERYSIQN

SEQ ID NO: 1055 - protein, 404 aa, Homo sapiens
HEVHSGEKPFKCEFCNVRCTMKGNLKSHIRIKHSGNNFKCPHCDFLGDSKATLRKHSRVHQSEHPEKCSECSYSCSSKAALRIHERIHCTDRPFKCNYCSFDTKQPSNLSKHMKKFHGDMVKTEALERKDTGRQSSRQVAKLDAKKSFHCDICDASFMREDSLRSHKRQHSEYNESKNSDVTVLQFQIDPSKQPATPLTVGHLQVPLQPSQVPQFSEGRVKIIVGHQVPQANTIVQAAAAAVNIVPPALVAQNPEELPGNSRLQILRQVSLIAPPQSSRCPSEAGAMTQPAVLLTTHEQTDGATLHQTLIPTASGGPQEGSGNQTFITSSGITCTDFEGLNALIQEGTAEVTVVSDGGQNIAVATTAPPVFSSSSQQELPKQTYSIIQGAAHPALLCPADSIPD

SEQ ID NO: 1056 - protein, 149 aa, Homo sapiens
  SITE (8): Xaa equals any of the naturally occurring L-amino acids
  SITE (109): Xaa equals any of the naturally occurring L-amino acids
  SITE (144): Xaa equals any of the naturally occurring L-amino acids
CVWKGVCXGIRPGEAPAGHTGEKPYLCPECGKGFADSSARVKHLRTHSGERPHACPECDRTFSLSSTLLRHRLTHMEPQDFSFPGYPLPALIPSPPPPPLGTSPPLTPXSPSHSGEPFGLPGLEPEPGGPQAWGATPTTGGATXPTSAL

SEQ ID NO: 1057 - protein, 110 aa, Homo sapiens
  SITE (43): Xaa equals any of the naturally occurring L-amino acids
TTAGWQIRDLGSERLIWQKGAETTGALRLSGPYPTSLWGGAVXSADRRSERQPSAKGPSTMEDPNPEREHEAAGFTQGEKSPEPREATSCHLGGPRKLPPVCLHSLFGRF

SEQ ID NO: 1058 - protein, 172 aa, Homo sapiens
DEVSLLSPRLVCNGMMSAHCKLRLPGSSDSPTSASQVAGITGTCHHAWLIFVLLVEMGYDHLGQAALKLLTSGDPPTSGLPKCWDYRHEPPLPALLDYIQYNSYWKEILQVRAMWQNLTTLLHRKAFMFEKNYTNTDCEKDINICLHLNTREFILNKSKIRAITVKRSFRKI

SEQ ID NO: 1059 - protein, 312 aa, Homo sapiens
RGGRARGGQGPRLNICGICGKSFGRGSTLIQHQRIHTGEKPYKCEVCSKAFSQSSDLIKHQRTHTGERPYKCPRCGKAFADSSYLLRHQRTHSGQKPYKCPHCGKAFGDSSYLLRHQRTHSHERPYSCTECGKCYSQNSSLRSIRGCTPVRGPSAVASAARASPSGRPLSPMPAATPGRSPSSALSAASALARARCWPSTPAPTCQAAPTAAPTAARPSIAPPLSSSTSAPTRASGPTGAPCAARASAAPPRFCSITGSTVASGLTSAMTAERPSPRAPTSSATSGPTRRAGADLGPQQGWEVWAEDKGPGS

SEQ ID NO: 1060 - protein, 366 aa, Homo sapiens
HEKQLRSLAGMKYHVMANHNSLPILKAGDEIDEPSERERLRTVLKRLGKLRCMRESCSSSFTSIMGYLYHVRKCGKGAAELEKMTLKCHHCGKPYRSKAGLAYHLRSEHGPISFFPESGQPECLKEMNLESKSGGRVQRRSAKIAVYHLQELASAELAKEWPKRKVLQDLVPDDRKLKYTRPGLPTFSQEVLHKWKTDIKKYHRIQCPNQGCEAVYSSVSGLKAHLGSCTLGNFVAGKYKCLLCQKEFVSESGVKYHINSVHAEDWFVVNPTTTKSFEKLMKIKQRQQEEEKRRQQHRSRRSLRRRQQPGIELPETELSLRVGKDQRRNNEELVVSASCKEPEQEPVPAQFQKVKPPKTNHKRGRK

SEQ ID NO: 1061 - protein, 513 aa, Homo sapiens
  SITE (176): Xaa equals any of the naturally occurring L-amino acids
  SITE (231): Xaa equals any of the naturally occurring L-amino acids
  SITE (232): Xaa equals any of the naturally occurring L-amino acids
  SITE (233): Xaa equals any of the naturally occurring L-amino acids
  SITE (248): Xaa equals any of the naturally occurring L-amino acids
  SITE (284): Xaa equals any of the naturally occurring L-amino acids
  SITE (324): Xaa equals any of the naturally occurring L-amino acids
ACQEIPTEERPHPYDMGGQSFQHSVDLTGHEGVPTAESPLICNECGKTFQGNPDLIQRQIVHTGEASFMCDDCGKTFSQNSVLKNRHRSHMSEKAYQCSECGKAFRGHSDFSRHQSHHSSERPYMCNECGKAFSQNSSLKKHQKSHMSEKPYECNECGKAFRRSSNLIQHQRIHSXEKPYVCSECGKAFRRSSNLIKHHRTHTGEKPFECGECGKAFSQSAHLRKHQRVHXXXKPYECNDCGKPFSRXSNLIKHHRVHTGEKPYKCSDCGKAFSQSSSLIQHRXIHTGEKPHVCNVCGKAFSYSSVLRKHQIIHTGEKPYRCSXCGKAFSHSSALIQHQGVHTGDKPYACHECGKTFGRSSNLILHQRVHTGEKPYECTECGKTFSQSSTLIQHQRIHNGLKPHECNQCGKAFNRSSNLIHHQKVHTGEKPYTCVECGKGFSQSSHLIQHQIIHTGERPYKCSECGKAFSQRSVLIQHQRIHTGVKPYDCAACGKAFSQRSKLIKHQLIHTRE

SEQ ID NO: 1062 - protein, 175 aa, Homo sapiens
  SITE (139): Xaa equals any of the naturally occurring L-amino acids
STTAPELDDNVQKANCFSTESTDTPKAPVITLPSEAREQMATLGERTFNCCYPGCHFKTVHGMKDLDRHLRIHTGDKPHKCEFCDKCFSRKDNLTMHMRCHTSVKPHKCHLCDYAAVDSSSLKKHLRIHSDERPYKCQXCPYASRNSSQLTVHLRSHTGESLTRKPQSLTFSLIS

SEQ ID NO: 1063 - protein, 585 aa, Homo sapiens
  SITE (159): Xaa equals any of the naturally occurring L-amino acids
  SITE (164): Xaa equals any of the naturally occurring L-amino acids
  SITE (207): Xaa equals any of the naturally occurring L-amino acids
  SITE (214): Xaa equals any of the naturally occurring L-amino acids
  SITE (216): Xaa equals any of the naturally occurring L-amino acids
  SITE (217): Xaa equals any of the naturally occurring L-amino acids
  SITE (234): Xaa equals any of the naturally occurring L-amino acids
  SITE (236): Xaa equals any of the naturally occurring L-amino acids
  SITE (267): Xaa equals any of the naturally occurring L-amino acids
  SITE (298): Xaa equals any of the naturally occurring L-amino acids
  SITE (319): Xaa equals any of the naturally occurring L-amino acids
  SITE (349): Xaa equals any of the naturally occurring L-amino acids
  SITE (352): Xaa equals any of the naturally occurring L-amino acids
  SITE (362): Xaa equals any of the naturally occurring L-amino acids
  SITE (375): Xaa equals any of the naturally occurring L-amino acids
  SITE (384): Xaa equals any of the naturally occurring L-amino acids
  SITE (408): Xaa equals any of the naturally occurring L-amino acids
  SITE (414): Xaa equals any of the naturally occurring L-amino acids
  SITE (418): Xaa equals any of the naturally occurring L-amino acids
  SITE (431): Xaa equals any of the naturally occurring L-amino acids
  SITE (449): Xaa equals any of the naturally occurring L-amino acids
  SITE (450): Xaa equals any of the naturally occurring L-amino acids
  SITE (495): Xaa equals any of the naturally occurring L-amino acids
EPGKRTLLAVGNCRVMPQVTFNDVAIDFTHEEWGWLSSAQRDLYKDVMVQNYENLVSVGLSVTKPYVITLLEDGKEPWMMEKKLSKGMIPDWESRWENKELSTKKDNYDEDSPQTVIIEKVVKQSYEFSNSKKNLEYIEKLEGKHGSQVDHFRPAILTXRESPXADSVYKYNIFRSTFHSKSTLSEPQKISAEGNSHKYDILKKNLXKKSVIKXEXXNGGKKLLNSNKSGAAFXQXKSLTLPQTCNREKIYTCSECGKAFGKQSILXRHWRIHTGEKPYECRECGKTFSHGSSLTRHXISHSGEKPYKCIECGKAFSHXSSLTNHQSTHTGEKPYECMNCGKSFSRVSXLIXHLRIHTQEKXYECRICGKAFIHXSSLIHHQKXHTGEKPYECRECGKAFCCSSHLTXHQRIHXMEKXYECNKCLKVFSSXSFLVQHQSIHTEEKPFEXXKCRKSFNQLESLNMHLRNHIRLKPYECSICGKAFSHRSSLLQHHXIHTGEKPYECIKCGKTFSCSSNLTVHQRIHTGEKPYKCNECGKAFSKGSNLTAHQRVHNGEKPNSVVSVEKPLDYMNHYTCEKSYRRETV

SEQ ID NO: 1064 - protein, 164 aa, Homo sapiens
AAGEHVRTHTGIKPYECKECGQAFAQYSGLSIHIRSHSGKKPYQCKECGKAFTTSTSLIQHTRIHTGEKPYECVECGKTFITSSRRSKHLKTHSGEKPFVCKICGKAFLYSSRLNVHLRTHTGEKPFVCKECGKAFAVSSRLSRHERIHTGEKPYECKDMSVTI

SEQ ID NO: 1065 - protein, 547 aa, Homo sapiens
  SITE (289): Xaa equals any of the naturally occurring L-amino acids
  SITE (290): Xaa equals any of the naturally occurring L-amino acids
PPRCGGDAEGGSRSRVREESDPALVQGPPCPSWGQNSSPGEWAGPVFRASRPAFRLLQRCLLAAFPALSPWRRTLVLEMAATLLMAGSQAPVTFEDMAMYLTREEWRPLDAAQRDLYRDVMQENYGNVVSLDFEIRSENEVNPKQEISEDVQFGTTSERPAENAEENPESEEGFESGDRSERQWGDLTAEEWVSYPLQPVTDLLVHKEVHTGIRYHICSHCGKAFSQISDLNRHQKTHTGDRPYKCYECGKGFSRSSHLIQHQRTHTGERPYDCNECGKSFGRSSHLIXXRHPTGEKPHKCNECGKSFCRLSHLIQHQRTHSGEKPYECEECGKSFSRSSHLAQHQRTHTGEKPYECNECGRGFSERSDLIKHYRVHTGERPYKCDECGKNFSQNSDLVRHRRAHTGEKPYHCNECGENFSRISHLVQHQRTHTGEKPYECNACGKSFSRSSHLITHQKIHTGEKPYECNECWRSFGERSDLIKHQRTHTGEKPYECVQCGKGFTQSSNLITHQRVHTGEKPYECTECEKSFSRSSALIKHKRVHTD

SEQ ID NO: 1066 - protein, 778 aa, Homo sapiens
  SITE (8): Xaa equals any of the naturally occurring L-amino acids
  SITE (10): Xaa equals any of the naturally occurring L-amino acids
  SITE (22): Xaa equals any of the naturally occurring L-amino acids
  SITE (46): Xaa equals any of the naturally occurring L-amino acids
  SITE (55): Xaa equals any of the naturally occurring L-amino acids
  SITE (361): Xaa equals any of the naturally occurring L-amino acids
AEAGRGRXAXAAARCPRAAGGXLIQPSVSELSRAVRTNILCTVRGXGKILPNSPXLNMHLVKSHRLQDGIVNPTIRKDLKTGPKFYCCPIEGCPRGPERPFSQFSLVKQHFMKMHAEKKHKCSKCSNSYGTEWDLKRHAEDCGKTFRCTCGCPYASRTALQSHIYRTGHEIPAEHRDPPSKKRKMENCAQNQKLSNKTIESLNNQPIPRPDTQELEASEIKLEPSFEDSCGSNTDKQTLTTPPRYPQKLLLPKPKVALVKLPVMQFSVMPVFVPTADSSAQPVVLGVDQGSATGAVHLMPLSVGTLILGLDSEACSLKESLPLFKIANPIAGEPISTGVQVNFGKSPSNPLQELGNTCQKXSISSINVQTDLSYASQNFIPSAQWATADSSVSSCSQTDLSFDSQVSLPISVHTQTFLPSSKVTSSIAAQTDAFMDTCFQSGGVSRETQTSGIESPTDDHVQMDQAGMCGDIFESVHSSYNVATGNIISNSLVAETVTHSLLPQNEPKTLNQDIEKSAPIINFSAQNSMLPSQNMTDNQTQTIDLLSDLENILSSNLPAQTLDHRSLLSDTNPGPDTQLPSGPAQNPGIDFDIEEFFSASNIQTQTEESELSTMTTEPVLESLDIETQTDFLLADTSAQSYGCRGNSNFLGLEMFDTQTQTDLNFFLDSSPHLPLGSILKHSSFSVSTDSSDTETQTEGVSTAKNIPALESKVQLNSTETQTMSSGFETLGSLFFTSNETQTAMDDFLLADLAWNTMESQFSSVETQTSAEPHTVSNF

SEQ ID NO: 1067 - protein, 188 aa, Homo sapiens
VADPLASKHLFHPVQSHPFISNLHTRHTEKLKKSLKVKTRSGRVSRPPKYKAKDYKFIKTEDLADGHLSDSDDYSELCVEEDEDQRERHALFDLSSCSLRPKSFKCQTCEKSYIGKGGLARHFKLNPGHGQLDPEMVLSEKASGSTLRGCTEERTLSLTSLGLSMPADPCEGGARSCLVTESARGGLQ

SEQ ID NO: 1068 - protein, 115 aa, Homo sapiens
HERHQRIHSEEKPFDCVDCGKAFSAQEQLKRHLRIHTQESSYVCDECGKALTSKRNLHQHQRIHTGEKPYECSKYEKAFGTSSQLGHLEHVYSGEKPVLDICRFGLPEFFTPFYW

SEQ ID NO: 1069 - protein, 124 aa, Homo sapiens
EQTLSGRCQLQVETCSSKYPPWGGSLGMLAVLEAFWRQVTFSYCRFYQRFFTAGVVIEAMSAPHTAALQRVCPPLHCAQGRQTSPLSFQSLKGIRSSLKPWEDVIPALYGWFSHGHDQLLAVKT

SEQ ID NO: 1070 - protein, 563 aa, Homo sapiens
ARVRYSIKCLECHKQMRDYMVLAAHFQRTTEETEGLTCQVCQMLLPNQCSFCAHQRIHAHKSPYCCPECGVLCRSAYFQTHVKENCLHYARKVGYRCIHCGVVHLTLALLKSHIQERHCQVFHKCAFCPMAFKTASSTADHSATQHPTQPHRPSQLIYKCSCEMVFNKKRHIQQHFYQNVSKTQVGVFKCPECPLLFVQKPELMQHVKSTHGVPRNVDELSSLQSSADTSSSRPGSRVPTEPPATSVAARSSSLPSGRWGRPEAHRRVEARPRLRNTGWTCQECQEWVPDRESYVSHMKKSHGRTLKRYPCRQCEQSFHTPNSLRKHIRNNHDTVKKFYTCGYCTEDSPSFPRPSLLESHISLMHGIRNPDLSQTSKVKPPGGHSPQVNHLKRPVSGVGDAPGTSNGATVSSTKRHKSLFQCAKCSFATDSGLEFQSHIPQHQVDSSTAQCLLCGLCYTSASSLSRHLFIVHKVRDQEEEEEEEAAAAEMAVEVAEPEEGSGEEVPMETRENGLEECAGEPLSADPEARRLLGPAPEDDGGHNDHSQPQASQDQDSHTLSPQV

SEQ ID NO: 1071 - protein, 190 aa, Homo sapiens
ACRACALKVASPCEVLKDGATARRGEESDQSWEVGVQKGAFDGSGMGTPRSGILPGQGARPCSRPPEVLGLVRQAVFLEAVGVGEALAAGGAAEGPAALVGSQVLTEVAGILEGLEAGGAAELGPRRLMGALVAQHGAQVEEALAAVLTAVGALAQVQPLVLQQVGAVAEGLATGAAALGPGHSVQPPLV

SEQ ID NO: 1072 - protein, 115 aa, Homo sapiens
  SITE (54): Xaa equals any of the naturally occurring L-amino acids
  SITE (65): Xaa equals any of the naturally occurring L-amino acids
  SITE (72): Xaa equals any of the naturally occurring L-amino acids
KGLLRGKALLLQLRELRKSLYQTLPPREPPAQHTGERPYSCNWESCSWSFFRSXELRRHMRVHTXYRPYKCXQCSREFMRSDHLKQHQKTHRPGPSDPQANNNNGEQDSPPAAGP

SEQ ID NO: 1073 - protein, 202 aa, Homo sapiens
QTGTAALPYPLKKKNGKILYECNICGKSFGQLSNLKVHLRVHSGERPFQCALCQKSFTQLAHLQKHHLVHTGERPHKCSVCHKRFSSSSNLKTHLRLHSGARPFQCSVCRSRFTQHIHLKLHHRLHAPQPCGLVHTQLPLASLACLAQWHQGALDLMAVASEKHMGYDIDEVKVSSTSQGKARAVSLSSAGTPLVMGQDQNN

SEQ ID NO: 1074 - protein, 404 aa, Homo sapiens
ARGEMVFNKKRHIQQHFYQNVSKTQVGVFKCPECPLLFVQKPELMQHVKSTHGVPRNVDELSNLQSSADTSSSRPGSRVPTEPPATSVAARSSSLPSGRWGRPEAHRRVEARPRLRNTGWTCQECQEWVPDRESYVSHMKKSHGRTLKRYPCRQCEQSFHTPNSLRKHIRNNHDTVKKFYTCGYCTEDSPSFPRPSLLESHISLMHGIRNPDLSQTSKVKPPGGHSPQVNHLKRPVSGVGDAPGTSNGATVSSTKRHKSLFQCAKCSFATDSGLEFQSHIPQHQVDSSTAQCLLCGLCYTSASSLSRHLFIVHKVRDQEEEEEEEAAAAEMAVEVAEPEEGSGEEVPMETRENGLEECAGEPLSADPEARRLLGPAPEDDGGHNDHSQPQASQDQDSHTLSPQV

SEQ ID NO: 1075 - protein, 244 aa, Homo sapiens
  SITE (237): Xaa equals any of the naturally occurring L-amino acids
DRHYCLLCSKEFLNPVATKSHSHNHIDAQTFACPDCGKAFESHQELASHLQAHARGHSQVPAQMEEARDPKAGTGEDQVVLPGQGKAQEAPSETPRGPGESVERARGGQAVTSMAAEDKERPFRCTQCGRSYRHAGSLLNHQKAHTTGLYPCSLCPKLLPNLLSLKNHSRTHTDPKRHCCSICGKAFRTAARLEGHGRVHAPREGPFTCPHCPRHFRRRISFVQHQQQHQESGRWPXPEPQWHQ

SEQ ID NO: 1076 - protein, 281 aa, Homo sapiens
  SITE (35): Xaa equals any of the naturally occurring L-amino acids
  SITE (40): Xaa equals any of the naturally occurring L-amino acids
  SITE (48): Xaa equals any of the naturally occurring L-amino acids
  SITE (215): Xaa equals any of the naturally occurring L-amino acids
  SITE (229): Xaa equals any of the naturally occurring L-amino acids
  SITE (250): Xaa equals any of the naturally occurring L-amino acids
  SITE (268): Xaa equals any of the naturally occurring L-amino acids
SWSSTAVAAALELVDPPGCRNSARGKKLFKCNECXKTFTXSSSLTVHXRIHTGEKPYKCNECGKAFSDGSSFARHQRCHTGKKPYECIECGKAFIQNTSLIRHWRYYHTGEKPFDCIDCGKAFSDHIGLNQHRRIHTGEKPYKCDVCHKSFRYGSSLTVHQRIHTGEKPYECDVCRKAFSHHASLTQHQRVHSGEKPFKCKECGKAFRQNIHLAXHLRIHTGEKPFECXECGKSFSISSQLATHQRIHTXEKPYECKVCSKAFTQKVXLHSSENPTGEETL

SEQ ID NO: 1077 - protein, 140 aa, Homo sapiens
VFRASASLTNQVIHNADNPYKCSECGKVFSCSSKLVIHRRMHTGEKPYKCHECGKLFSSNSNLSQHQRIHTGEKPYKCHECDKVFRSSSKLAQHQRIHTGEKPYKCHECDKVFNQIAHLVRHQKIHTGEKPYSCNKWQGL

SEQ ID NO: 1078 - protein, 136 aa, Homo sapiens
  SITE (87): Xaa equals any of the naturally occurring L-amino acids
  SITE (110): Xaa equals any of the naturally occurring L-amino acids
  SITE (128): Xaa equals any of the naturally occurring L-amino acids
GRFCKKKYSDVKNLIKHIRDAHDPQDKKVKEALDELCLMTREGKRHCSMTATSVKRNSRTSWTATAICWSTETSGLLPVSSVAMGPXSTRRWNCMSGSTPSCTSVPSAAXSSSAPSGCAPTSKRCTGXPKEALVFT

SEQ ID NO: 1079 - protein, 383 aa, Homo sapiens
HESTLASSNKKSKVNTALRNLRYRRGIHKCIECCSEIKDFANHFPTYVHCSFCRYNTSCSKAYVNHMMSFHSNRPSKRFCIFKKHSENLRGITLVCLNCDFLSDVSGLDNMATHLSQHKTHTCQVVMQKVSVCIPTSEHLSELKKEAPAKEQEPVSKEIARPNMAERETETSNSESKQDKAASSKEKNGCNANSFEGSSTTKSEESITVSDKENETCLADQETGSKNIVSCDSNIGADKVEKKKQIQHVCQEMELKMCQSSENIILSDQIKDHNSSEARFSSKNIKDLRLASDNVSIDQFLRKRHEPESVSSDVSEQGSIHLEPLTPSEVLEYEATEILQKGSGDPSAKTDEVVSDQTDDIPGGNNPSTTEATVDLEDEKERS

SEQ ID NO: 1080 - protein, 134 aa, Homo sapiens
  SITE (54): Xaa equals any of the naturally occurring L-amino acids
  SITE (81): Xaa equals any of the naturally occurring L-amino acids
  SITE (111): Xaa equals any of the naturally occurring L-amino acids
  SITE (132): Xaa equals any of the naturally occurring L-amino acids
LVPRIHTGEKPYKCLECGKNFSDRSNLNTHQRIHTGEKPYKCLECGKSFSDHSXSHHSPENSHGGKALLNVENVGKASTRXSNLLKHQRIHLGGNPDHVVSLGETLPKAHXLVLTGGILQKRQLLNNLKVSXRT

SEQ ID NO: 1081 - protein, 263 aa, Homo sapiens
TRLYRGKSRGVYWHSELQKGLESEPTSRRQCRNSPGESEEKTPSQEKMSHQSFCARDKACTHILCGKNCSQSVHSPHKPALKLEKVSQCPECGKTFSRSSYLVRHQRIHTGEKPHKCSECGKGFSERSNLTAHLRTHTGERPYQCGQCGKSFNQSSSLIVHQRTHTGEKPYQCIVCGKRFNNSSQFSAHRRIHTGESPYKCAVCGKIFNNSSHFSAHRKTHTGEKPYRCSHCERGFTKNSALTRHQTVHMKAVLSSQEGRDAL

SEQ ID NO: 1082 - protein, 68 aa, Homo sapiens
FFFFFLRRSLTLLPRLECSGAISAHCKLCLPGSRYSPASASRVAGIAGACHHAQLIFCIFSRDGVSSC

SEQ ID NO: 1083 - protein, 71 aa, Homo sapiens
TQVPSVAPQTSLNISGLLANRNVVLVGQPVVRCAASGDNRGFAQDRNLVNAVNVVVPSVINYVLFYVTENP

SEQ ID NO: 1084 - protein, 420 aa, Homo sapiens
AAAAGAAETRGRAVSKMEEKPSGPIPDMLATAEPSSSETDKEVLSPAVPAAAPSSSMSEEPGPEQAATPPVWERGGAGGMRQGSSPAPDSCQPGPGPSPGLTSIVSGTSEDLRPPRRRPPPGKQIPCSSPGCCLSFPSVRDLAQHLRTHCPPTQSLEGKLFRCSALSCTETFPSMQELVAHSKLHYKPNRYFKCENCLLRFRTHRSLFKHLHVCAEHAQSPAPPPPPALDREPPAPERPPEVDPASAPGLPFPLLEPFTTPAPAPTGPFLPYLNPAPFGLSPPRLRPFLAAAPGPPASSAAVWKKSQGAGSSPRRPQGGSDAPSVRLLHGLAARHDPAPGGPPPRRPRGPRGRAAAPRRPRGSGPACTQGVAAAVRGGASSVLAALNPAALGVGHGMWVVLSFGGGCREGGLGWTIKKAP

SEQ ID NO: 1085 - protein, 90 aa, Homo sapiens
QGLSQASFYAKHRRIHTGEKPHKCDDCGKAFNSHSHLTRHQRMHTGQKSYKCHQCAKVFSLSSLLAGYQKIHFGDSCSKYNVYSKPSSIN

SEQ ID NO: 1086 - protein, 427 aa, Homo sapiens
  SITE (82): Xaa equals any of the naturally occurring L-amino acids
  SITE (108): Xaa equals any of the naturally occurring L-amino acids
  SITE (128): Xaa equals any of the naturally occurring L-amino acids
  SITE (136): Xaa equals any of the naturally occurring L-amino acids
  SITE (418): Xaa equals any of the naturally occurring L-amino acids
VFLLLRPQPARILFRKGRNHINVVNVGKASVGVTVLPSTGSLILGRNPLSIKSVSKVLTGMLPFLCIRKLTRATNSMCVMNXGQLLVRVHTCGHQKTHTGEKPCKSQXSDHPPSHDTQPGEHQKTHTXSKSYNCNXCGKAFTRIFHLTRHQKIHTRKRYECSKCQATFNLRKHLIQHQKTHAAKTTSECQECGKIFRHSSLLIEHQALHAGEEPYKCNERGKSFRHNSTLKIHQRVHSGEKPYKCSECGKAFHRHTHLNEHRRIHTGYRPHKCQECVRSFSRPSHLMRHQAIHTAEKPYSCAECKETFSDNNRLVQHQKMHTVKTPYECQECGERFICGSTLKCHESVHAREKQGFFVSGKILDQNPEQKEKCFKCNKCEKTFSCSKYLTQHERIHTRGVKPFECDQCGKAFGQSTRXIHHQRITLE

SEQ ID NO: 1087 - protein, 172 aa, Homo sapiens
VAMGKRYFCDYCDRSFQDNLHNRKKHLNGLQHLKAKKVWYDMFRDAAAILLDEQNKRPCRKFLLTGQCDFGSNCRFSHMSERDLQELSIQVEEERRAREWLLDAPELPEGHLEDWLEKRAKRLSSAPSSRAEPIRTTVFQYPVGWPPVQELPPSLRAPPPGGWPLQPRVQWG

SEQ ID NO: 1088 - protein, 275 aa, Homo sapiens
APQASAGPSLHISDHTLFLYRRWGRLSALRSSVGSGRSRRAGILQLHIMQVHCGGGGVFAHTLVWVGLVRVVPAYVLDHLELLLGLVVAEAAKEGVAVGVGEGMMAQASSPAESTVAHIAHIGFGLTVLAKVGAQQEARLEGLATLLTHESPCFSMPGLLVHTQCISPVGAVLTLGTLVWLQSCMLGHVVFQLVDPLALVATLRAQVLPFLLVDPHVVLETRGISTGIGAEVTVVRLFPSVDAAVPGDLLSVLGAVSTIGALVETSAPMPFHMVI

SEQ ID NO: 1089 - protein, 134 aa, Homo sapiens
VDPRVRCKDRPFKCDFCSFDTKRPSSLAKHVDKVHRDEAKTENRAPLGKEGLREGSSQHVAKIVTQRAFRCETCGASFVRDDSLRCHKKQHSDQSENKNSDLVTFPPESGASGQLSTLVSVGQLEAPLEPSQDL

SEQ ID NO: 1090 - protein, 129 aa, Homo sapiens
  SITE (27): Xaa equals any of the naturally occurring L-amino acids
  SITE (80): Xaa equals any of the naturally occurring L-amino acids
  SITE (84): Xaa equals any of the naturally occurring L-amino acids
  SITE (112): Xaa equals any of the naturally occurring L-amino acids
EPEKLAACAPFLKWMREKTVRCLFCKXLVSEEELIHHLLMHGLGCLFCPCTFHDIKGLSEHSRNRHLGKKKLPMDYSNRXFQLXVDANGNLLFPHLDFITILPKEKLGEREXYLAILAGIHSKSLVPVY

SEQ ID NO: 1091 - protein, 178 aa, Homo sapiens
ETKTIVKSEDTLRQVSRPAKYTAKAEFIKRDDLADGHLPDSDDDSEVSVEEDQRERQALFDLSSCSLRPKSFKCQTCKKSYIGKWGLAQHFKLNPGHGQLDPEMVLSEKANGSTLRGCTEERTLSLTFPRLSVPAAPREGGARSCLVRESARGGLGELSPLQLSLQPALATTSFPTLS

SEQ ID NO: 1092 - protein, 167 aa, Homo sapiens
  SITE (113): Xaa equals any of the naturally occurring L-amino acids
GPRCWKFLILSSVNCETLRIGKAWPQSSGQERYWTPRTHSSASEAQRGSLADSVWQLLASGPLLVNTMLSCNICGETVTSEPDMKAHLIVHMESEIICPFCKLSGVNYDEMCXHIETAHFEQNTLERNFERINTVQYGTSDNKKDNTLQCGMEVNSSILSGCASNHP

SEQ ID NO: 1093 - protein, 363 aa, Homo sapiens
TPLPRPPPPLSLPPPHPQGSSVGGGFAGLEFARPQESEPRASDLGAPRTWTVAAAGPRTPSAHIPVPAQRATPGKARLDEVMAAAALTSLSTSPLLLGAPVAAFSPEPGLEPWKEALVRPPGSYSSSSNSGDWGWDLASDQSSPSTPSPPLPPEAAHFLFGEPTLRKRKSPAQVMFQCLWKSCGKVLSTASAMQRHIRLVHLGRQAEPDQSDGEEDFYYTELDVGVDTLTDGLSSLTPVSPTASMPPAFPRLELPELLEPPALPSPLRPPAPPLPPPPVLSTVANPQSCHSDRVYQGCLTPARLEPQPTEVGACPPALSSRIGVTLRKPRGDAKKCRKVYGMERRDLWCTACRWKKACQRFLD

SEQ ID NO: 1094 - protein, 255 aa, Homo sapiens
VDPRVRRSLSPGAASSSSGDGDGKEGLEEPKGPRGSQGGGGGGSSSSSVVSSGGDEGYGTGGGGSSATSGGRRGSLEMSSDGEPLSRMDSEDSISSTIMDVDSTISSGRSTPAMMNGQGSTTSSSKNIAYNCCWDQCQACFNSSPDLADHIRSIHVDGQRGGVFVCLWKGCKVYNTPSTSQSWLQRHMLTHSGDKPFKCVVGGCNASFASQGGLARHVPTHFSQQNSSKVSSQPKAKEESPSKAGMNKRRKKKKK

SEQ ID NO: 1095 - protein, 323 aa, Homo sapiens; identical to SEQ ID NO: 947

SEQ ID NO: 1096 - protein, 403 aa, Homo sapiens
KSLSGKPSGSLGIVSNNSVETIGLLQSTSGKQGQISSNYDDAMQFSKKRRYLPTASSNSAFSINVGHMVSQQSVIQSAGVSVLDNEAPLSLIDSSALNAEIKSCHDKSGIPDEVLQSILDQYSNKSESQKEDPFNIAEPRVDLHTSGEHSELVQEENLSPGTQTPSNDKASMLQEYSKYLQQAFEKSTNASFTLGHGFQFVSLSSPLHNHTLFPEKQIYTTSPLECGFGQSVTSVLPSSLPKPPFGMLFGSQPGLYLSALDATHQQLTPSQELDDLIDSQKNLETSSAFQSSSQKLTSQKEQKNLESSTGFQIPSQELASQIDPQKDIEPRTTYQIENFAQAFGSQFKSGSRVPMTFITNSNGEVDHRVRTSVSDFSGYTNMMSDVSEPCSTRVKTPTSQSYR

SEQ ID NO: 1097 - protein, 197 aa, Homo sapiens
PRVRDCKDAACQFSLKVTHYHCTRENCGYKFCGRTHMYKHAQHHDRVDNLVLDDFKRFKASLSCHFADCPFSGTSTHFHCLRCRFRCTDSTKVTAHRKHHGKQDVISAAGFCQFSSSADCAVPDCKYKLKCSHFHCTFPGCRHTVVGMSQMDSHKRKHEKQERGEPAAEGPAPGPPISLDGSLSLGAEPGSLLFLQS

SEQ ID NO: 1098 - protein, 135 aa, Homo sapiens
VDPRVRYECKECGKAFSRGYHLTQHQKIHTGEKPFKCKECGKAFSWGSSLVKHERVHTNEKSYECKDCGKAFGSGYQLSVHQRFHTGEKLYQRKEFGKTFTCGSKLVHERTHSNDKPYKYNECGEAFLWTIYSNE

SEQ ID NO: 1099 - protein, 211 aa, Homo sapiens
  SITE (184): Xaa equals any of the naturally occurring L-amino acids
  SITE (202): Xaa equals any of the naturally occurring L-amino acids
  SITE (211): Xaa equals any of the naturally occurring L-amino acids
EHNECGKAFSWPSILSKHQRIHTGKKLYTCEDCGKSFSVHSYFIQHCKIHTREKPYECIKCGKAFSTHSSYVQHLKIHTGEKHHECNQCGKAFSHSSNLIHHQRIHSGEKPYKCKECGKAFNRQSNLIQHQEFILERNLMTVRSVAKPSVHNYFSFSIKRIHTGEKPYECMNVQNPLPDRTLTXHQRIHTGEKPYRCNECGXSFSQWLTSX

SEQ ID NO: 1100 - protein, 383 aa, Homo sapiens
TRMSRHEGVSCDACLKGNFRGRRYKCLICYDYDLCASCYESGATTTRHTTDHPMQCILTRVDFDLYYGGEAFSVEQPQSFTCPYCGKMGYTETSLQEHVTSEHAETSTEVICPICAALPGGDPNHVTDDFAAHLTLEHRAPRDLDESSGVRHVRRMFHPGRGLGGPRARRSNMHFTSSSTGGLSSSQSSYSPSNREAMDPIAELLSQLSGVRRSAGGQLNSSGPSASQLQQLQMQLQLERQHAQAARQQLETARNATRRTNTSSVTTTITQSTATTNIANTESSQQTLQNSQFLLTRLNDPKMSETERQSMESERADRSLFVQELLLSTLVREESSSSDEDDRGEMADFGAMGCVDIMPLDVALENLNLKESNKGNEPPPPPL

SEQ ID NO: 1101 - protein, 111 aa, Homo sapiens
DRSCSKMLIRQNLALDCKQKKSRSRSGSKKKMLTLPHGADEVYILRCRFCGLVFRGPLSVQEDWIKHLQRHIVNANLPRTGAGMVEVTSLLKKPASITETSFSLLMAEAAS

SEQ ID NO: 1102 - protein, 350 aa, Homo sapiens
VDPRVRFPSLLTLTEHKVTHSKSLDTGNCRICKMPLQSEEEFLEHCQMHPDLRNSLTGFRCVVCMQTVTSTLELKIHGTFHMQKTGNGSAVQTTGRGQHVQKLYKCASCLKEFRSKQDLVKLDINGLPYGLCAGCVNLSKSASPGINVPPGTNRPGLGQNENLSAIEGKGKVGGLKTRCSSCNVKFESESELQNHIQTIHRELVPDSNSTQLKTPQVSPMPRISPSQSDEKKTYQCIKCQMVFYNEWDIQVHVANHMIDEGLNHECKLCSQTFDSPAKLQCHLIEHSFEGMGGTFKCPVCFTVFVQANKLQQHIFSAHGQEDKIYDCTQCPQKFFFQTELQNHTMTQHSS

SEQ ID NO: 1103 - protein, 333 aa, Homo sapiens
PRVRPENTLEESTEGSSEFSELKQMLVQQRNCTEGIVIKTEEQDEEEEEEEEDELPQHLQSLGQLSGRYEASMYQTPLPGEMSPEGEESPPPLQLGNPAVKRLAPSVHGERHLSENRGASSQQQRNRRGERPFTCMECGKSFRLKINLIIHQRNHIKEGPYECAECEISFRHKQQLTLHQRIHRVRGGCVSPERGPTFNPKHALKPRPKSPSSGSGGGGPKPYKCPECDSSFSHKSSLTKHQITHTGERPYTCPECKKSFRLHISLVIHQRVHAGKHEVSFICSLCGKSFSRPSHLLRHQRTHTGERPFKCPECEKSFSEKSKLTNHCRVHSR

SEQ ID NO: 1104 - protein, 252 aa, Homo sapiens
WLRQKGQGRPGMWPSLEALCSLFAARSTGSQAQSAPTPAWDEDTAQIGPKRIRKAAKRELMPCDFPGCGRIFSNRQYLNHHKKYQHIHQKSFSCPEPACGKSFNFKKHLKEHMKLHSDTRDYICEFCARSFRTSSNLVIHRRIHTGEKPLQCEICGFTCRQKASLNWHQRKHAETVAALRFPCEFCGKRFEKPDSVAAHRSKSHPALLLAPQESPSGPLEPCPSISAPGPLGSSEGSRPSASPQAPTLLPQQ

SEQ ID NO: 1105 - protein, 140 aa, Homo sapiens
AAAARLNRLKKKEYVMGLESRVRGLAAENQELRAENRELGKRVQALQEESRYLRAVLANETGLARLLSRLSGVGLRLTTSLFRDSPAGDHDYALPVGKQKQDLLEEDDSAGGVCLHVDKDKVSVEFCSACARKASSSLKM

SEQ ID NO: 1106 - protein, 239 aa, Homo sapiens
  SITE (225): Xaa equals any of the naturally occurring L-amino acids
DPRVRAHAHILPRAGTVAPVPCTTLLPCQTLFLTDEEKRLLGQEGVSLPSHLPLTKAEERVLKKVRRKIRNKQSAQDSRRRKKEYIDGLESRVAACSAQNQELQKKVQELERHNISLVAQLRQLQTLIAQTSNKAAQTSTCVLILLFSLALIILPSFSPFQSRPEAGSEDYQPHRVTSRNILTHKDVTENLETQVVESRLREPPGAKDANGSTRTLLEKMGGKPXPSGRIRSVLHADEM

SEQ ID NO: 1107 - protein, 304 aa, Homo sapiens
  SITE (258): Xaa equals any of the naturally occurring L-amino acids
VNEIMILEGGGVMNLNPGNNLLHQPPAWTDSYSTCNVSSGFFGGQWHEIHPQYWTKYQVWEWLQHLLDTNQLDANCIPFQEFDINGEHLCSMSLQEFTRAAGTAGQLLYSNLQHLKWNGQCSSDLFQSTHNVIVKTEQTEPSIMNTWKDENYLYDTNYGSTVDLLDSKTFCRAQISMTTTSHLPVAESPDMKKEQDPPAKCHTKKHNPRGTHLWEFIRDILLNPDKNPGLIKWEDRSEGVFRFLKSEAVAQLWGKKKXNSSMTYEKLSRAMRYYYKREILERVDGRRLVYKFGKNARGWRENEN

SEQ ID NO: 1108 - protein, 172 aa, Homo sapiens
GTRLSGALLEDTNTFRGVVIKYSEPPEARIPKKRWRLYPFKNDEVLPVMYIHRQSAYLLGRHRRIADIPIDHPFCSKQHAVFQYRLVEYTRADGTVGRRVKPYIIDLGSGNGTFLNNKRIEPQRYYELKEKDVLKFGFSSREYVLLHESSDTSEIDRKDDEDEEEEEEVSDS

SEQ ID NO: 1109 - protein, 92 aa, Homo sapiens
  SITE (80): Xaa equals any of the naturally occurring L-amino acids
IPMERPEEGKQSPPPQPWGRLLRLGAEEGEPHVLLRKREWTIGRRRGCDLSFPSNKLVSGDHCRIVVDEKSGQVTLEDTXTSGTVINKLKVV

SEQ ID NO: 1110 - protein, 99 aa, Homo sapiens
  SITE (17): Xaa equals any of the naturally occurring L-amino acids
  SITE (96): Xaa equals any of the naturally occurring L-amino acids
CHSTPLCPRDKGPDFPXNKLVSGDHCRIVVDEKSGQVTLEDTSTSGTVINKLKVVKKQTCPLQTGDVIYLVYRKNEPEHNVAYLYESLSEKQGMTXESF

SEQ ID NO: 1111 - protein, 244 aa, Homo sapiens
  SITE (74): Xaa equals any of the naturally occurring L-amino acids
  SITE (159): Xaa equals any of the naturally occurring L-amino acids
  SITE (203): Xaa equals any of the naturally occurring L-amino acids
  SITE (229): Xaa equals any of the naturally occurring L-amino acids
GHRLVKGSPDPEELLFVPGRRDTPSLSSMPSALAIFTCRPNSHPFQERHVYLDEPIKIGRSVARCRPAQNNATXDCKVLSRNHALVWFDHKTGKFYLQDTKSSNGTFINSQRLSRGSEESPPCEILSGDIIQFGVDVTENTRKVTHGCIVSTIKLFLPXGMEARLRSDVIHAPLPSPVDKVAANTPSMYSQELFQLSQYLQEXLHREQMLEQKLATLQRLLAITQEASXTSWQALIDEDRLLSR

SEQ ID NO: 1112 - protein, 190 aa, Homo sapiens
VPVHARHCPGYCERSKDSLCGQMGLYGQACPSVTSLRMTSELESSLTSMDWLPQLTMRAAIQKSDATQNAHGTGISKKNALLDPNTTLDQEEVQQHKDGKPPYSYASLITFAINSSPKKKMTLSEIYQWICDNFPYYREAGSGWKNSIRHNLSLNKCFLKVPRSKDDPGKVGFIFLKQLNSSVCHLSCLN

SEQ ID NO: 1113 - protein, 201 aa, Homo sapiens
AAQPPCRRRRRRRTAPARAGQVAARTHSQVAVAPASPDRMSGSDGGLEEEPELSITLTLRMLMHGKEVGSIIGKKGETVKRIREQSSARITISEGSCPERITTITGSTAAVFHAVSMIAFKLDEDLCAAPANGGNVSRPPVTLRLVIPASQCGSLIGKAGPKIKEIREGFSVQGQYGAVTPAEVTKLQQLSSHAVPFAIPF

SEQ ID NO: 1114 - protein, 261 aa, Homo sapiens
GSTHASAERTITVKGAIENCCRAEQEIMKKVREAYENDVAAMSLQSHLIPGLNLAAVGLFPASSSAVPPPPSSVTGAAPYSSFMQAPEQEMVQVFIPAQAVGAIIGKKGQHIKQLSRFASASIKIAPPETPDSKVRMVIITGPPEAQFKAQGRIYGKLKEENFFGPKEEVKLETHIRVPASAAGRVIGKGGKTVNELQNLTAAEVVVPRDQTPDENDQVIVKIIGHFYASQMAQRKIRDILAQVKQQHQKGQSNQAQARRK

SEQ ID NO: 1115 - protein, 188 aa, Homo sapiens
LNCLYICLYYVPETVQVPLSKRAKFVGPGGYNLKKLQAETGVTISQVDEETFSVFAPTPSAMHEARDFITEICKDDQEQQLEFGAVYTATITEIRDTGVMVKLYPNMTAVLLHNTQLDQRKIKHPTALGLEVGQEIQVKYFGRDPADGRMRLSRKVLQSPATTVVRTLNDRSSIVMGEPISQSSSNSQ

SEQ ID NO: 1116 - protein, 620 aa, Homo sapiens
  SITE (533): Xaa equals any of the naturally occurring L-amino acids
HYRRYACRYRSGIPGSTHASGMMNKLYIGNLSPAVTADDLRQLFGDRKLPLAGQVLLKSGYAFVDYPDQNWAIRAIETLSGKVELHGKIMEVDYSVSKKLRSRKIQIRNIPPHLQWEVLDGLLAQYGTVENVEQVNTDTETAVVNVTYATREEAKIAMEKLSGHQFENYSFKISYIPDEEVSSPSPPQRAQRGDHSSREQGHAPGGTSQARQIDFPLRILVPTQFVGAIIGKEGLTIKNITKQTQSRVDIHRKENSGAAEKPVTIHATPEGTSEACRMILEIMQKEADETKLAEEIPLKILAHNGLVGRLIGKEGRNLKKIEHETGTKITISSLQDLSIYNPERTITVKGTVEACASAEIEIMKKLREAFENDMLAVNQQANLIPGLNLSALGIFSTGLSVLSPPAGPRGAPPAAPYHPFTTHSGYFSSLYPHHQFGPFPHHHSYPEQEIVNLFIPTQAVGAIIGKKGAHIKQLARFAGASIKIAPAEGPDVSERMVIITGPPEAQFKAQGRIFGKLKEENFFNPKEEVKLEXHIRVPSSTAGRVIGKGGKTVNELQNLTSAEVIVPRDQTPDENEEVIVRIIGHFFASQTAQRKIREIVQQVKQQEQKYPQGVASQRSK

SEQ ID NO: 1117 - protein, 192 aa, Homo sapiens
  SITE (71): Xaa equals any of the naturally occurring L-amino acids
  SITE (147): Xaa equals any of the naturally occurring L-amino acids
  SITE (160): Xaa equals any of the naturally occurring L-amino acids
  SITE (164): Xaa equals any of the naturally occurring L-amino acids
  SITE (165): Xaa equals any of the naturally occurring L-amino acids
  SITE (168): Xaa equals any of the naturally occurring L-amino acids
AEKPVTIHATPEGTSEACRMILEIMQKEADETKLAEEIPLKILAHNGLVGRLIGKEGRNLKKIEHETGTKXTISSLQDLSIYNPERTITVKGTVEACASAEIEIMKKLREAFENDMLAVNQQANLIPGLNLSALGIFSTGLSVLSPXAGPRGVPPLPPTXPSLXXPDXSPACTPITSLARSRIITLIQSRRL

SEQ ID NO: 1118 - protein, 371 aa, Homo sapiens
SLQGIIGISFGESVMEVLRPQLIRIDGRNYRKNPVQEQTYQHEEDEEDFYQGSMECADEPCDAYEVEQTPQGFRSTLRAPSLLYKHIVGKRGDTRKKIEMETKTSISIPKPGQDGEIVITGQHRNGVISARTRIDVLLDTFRRKQPFTHFLAFFLNEVEVQEGFLRFQEEVLAKCSMDHGVDSSIFQNPKKLHLTIGMLVLLSEEEIQQTCEMLQQCKEEFINDISGGKPLEVEMAGIEYMNDDPGMVDVLYAKVHMKDGSNRLQELVDRVLERFQASGLIVKEWNSVKLHATVMNTLFRKDPNAEGRYNLYTAEGKYIFKERESFDGRNILKLFENFYFGSLKLNSIHISQRFTVDSFGNYASCGQIDFS

SEQ ID NO: 1119 - protein, 171 aa, Homo sapiens
HASAHASAHASGAIIGKKGAHIKQLARFAGASIKIAPAEGPDVSERMVIITGPPEAQFKAQGRIFGKLKEENFFNPKEEVKLEAHIRVPSSTAGRVIGKGGKTVNELQNLTSAEVIVPRDQTPDENEEVIVRIIGHFFASQTAQRKIREIVQQVKQQEQKYPQGVASQRSK

SEQ ID NO: 1120 - protein, 203 aa, Homo sapiens
  SITE (4): Xaa equals any of the naturally occurring L-amino acids
PFLXPLTLTKGNKSWSSTAVAAALELLYPPGCFTRGQASQHVVRCRTQAFGGRRIQRQLEGGILDEIPQMRIFIITDRRFHGDWLFGDLQHFADLVFRHQHTFSQFFRRRFTAHLLQHLARNTVELVDGLNHMHRNTDGARLIRDRAGDRLTDPPGCVGGELVTTAVFEFINRFHQTDVAFLNQVKELQATVGVFLSDRNNQT

SEQ ID NO: 1121 - protein, 608 aa, Homo sapiens
HEHRLNDSYSCLGWFSPGQVFVLDEYCARNGVRGCHRHLCYLRDLLERAENGAMIDPTLLHYSFAFCASHVHGNRPDGIGTVTVEEKERFEEIKERLRVLLENQITHFRYCFPFGRPEGALKATLSLLERVLMKDIVTPVPQEEVKTVIRKCLEQAALVNYSRLSEYAKIEENQKDAENVGRLITPAKKLEDTIRLAELVIEVLQQNEEHHAEAFAWWSDLMVEHAETFLSLFAVDMDAALEVQPPDTWDSFPLFQLLNDFLRTDYNLCNGKFHKHLQDLFAPLVVRYVDLMESSIAQSIHRGFERESWEPVNNGSGTSEDLFWKLDALQTFIRDLHWPEEEFGKHLEQRLKLMASDMIESCVKRTRIAFEVKLQKTSRSTDFRVPQSICTMFNVMVDAKAQSTKLCSMEMGQEHQYHSKIDELIEETVKEMITLLVAKFVTILEGVLAKLSRYDEGTLFSSFLSFTAKAASKYVDVPKPGMDVADAYVTFVRHSQDVLRDKVNEEMYIERLFDQWYNSSMNVICTWLTDRMDLQLHIYQLKTLIRMVKKTYRDFRLQGVLDSTLNSKTYETIRNRLTVEEATASVSEGGGLQGISMKDSDEEDEEDD

SEQ ID NO: 1122 - protein, 498 aa, Homo sapiens
  SITE (83): Xaa equals any of the naturally occurring L-amino acids
SLEICQFDGENMYMSMTEPSQDYVPASQSYPGPSLESEDFNIPPITPPSLPDHSLVHLNEVESGYHSLCHPMNHNGLLPFHPXNMDLPEITVSNMLGQDGTLLSNSISVMPDIRNPEGTQYSSHPQMAAMRPRGQPADIRQQPGMMPHGQLTTINQSQLSAQLGLNMGGSNVPHNSPSPPGSKSATPSPSSSVHEDEGDDTSKINGGEKRPASDMGKKPKTPKKKKKKDPNEPQKPVSAYALFFRDTQAAIKGQNPNATFGEVSKIVASMWDGLGEEQKQVYKKKTEAAKKEYLKQLAAYRASLVSKSYSEPVDVKTSQPPQLINSKPSVFHGPSQAHSALYLSSHYHQQPGMNPHLTAMHPSLPRNIAPKPNNQMPVTVSIANMAVSPPPPLQISPPLHQHLNMQQHQPLTMQQPLGNQLPMQVQSALHSPTMQQGFTLQPDYQTIINPTSTAAQVVTQAMEYVRSGCRNPPPQPVDWNNDYCSSGGMQRDKALYLT

SEQ ID NO: 1123 - protein, 86 aa, Homo sapiens
GDAASQFLVFCQKHRDEVVAEHPDASGEEIEELLRSQWSLLSEKQRARYNTKFALVAPVQAEEDSGNVNGEKKKPHKEDTGPYRRC

SEQ ID NO: 1124 - protein, 451 aa, Homo sapiens
GVGKRPKRKCLQWHPLLAKKLLDFSEEEEEEDEEEDIDKVQLLGADGLEQDVGETEDDESPEQRARRPMNAFLLFCKRHRSLVRQEHPRLDNRGATKILADWWAVLDPKEKQKYTDMAKEYKDAFMKANPGYKWCPTTNKPVKSPTPTVNPRKKLWAFPSDSSRDLPSPKKAKTEEMPQLNFGMADPTQMGGLSMLLLAGEHALGTPEVSSGTCRPDVSESPELRQKSPLFQFAEISSSTSHSDASTKQCQTSALFQFAEISSNTSQLGGAEPVKRCGKSALFQLAEMCLASDGMKMEESKLIKAKESDGGRIKELEKGKEEKEIKMEKTDETRLQKEAEFEKSAKENLRDSKELRNFEALQIDDIMAIKMEDPKEIRKEELEDHKCSHFPDFSYSASSKIIISDVPSRKDHMCHPHGIMIIEDPAALNKPEKLKKKKKKKKKKKKKKKKK

SEQ ID NO: 1125 - protein, 121 aa, Homo sapiens
KEKKKKKEKEKEKKEKEREKEKREREKREKEKEKHKHEKIKVEPVALAPSPVIPRLTLRVGAGQDKIVISKVVPAPEAKPAPSQNRPKTPPPAPAPAPGPMLVSPAPVPLPLLAQAAAGPA

SEQ ID NO: 1126 - protein, 202 aa, Homo sapiens
  SITE (7): Xaa equals any of the naturally occurring L-amino acids
  SITE (8): Xaa equals any of the naturally occurring L-amino acids
  SITE (9): Xaa equals any of the naturally occurring L-amino acids
  SITE (29): Xaa equals any of the naturally occurring L-amino acids
  SITE (180): Xaa equals any of the naturally occurring L-amino acids
TWKIFAXXXAISAITSTYSSLLRYTCGSXVEATRAVMKHLAAVYQHGCLLGLSIAKRPLWRQESLQSVKNTTEQEILKAININSFVECGIHLYQESTSKSALSQEFEAFFQGKSLYINSGNIPDYLFDFFEHLPNCASALDFIKLDFYGGAMASWEKAAEDTGGIHMEEAPETYIPSRAXSLFFNWKQEFRTLEVTLRDFSK

SEQ ID NO: 1127 - protein, 146 aa, Homo sapiens
  SITE (124): Xaa equals any of the naturally occurring L-amino acids
PVLEVLVGKTIEQSLLEVMEEEELANLRASQREYEELRNSERAEVQRLEEQERRHREEKERRKKQQWEIMHKHNETSQKIAARAFAQRYLADLLPSVFGSLRDSGYFYDPIERDIEIGFLPWLXNEVEKTMEYSMVGRTVLEHVDP

SEQ ID NO: 1128 - protein, 485 aa, Homo sapiens
DPRVRDRVTTEIQLPSQSPVEEQSPASLSSLRSRSTQMESTRVSASLPRSYRKTDTVRLTSVVTPRPFGSQTRGISSLPRSYTMDDAWKYNGDVEDIKRTPNNVVSTPAPSPDASQLASSLSSQKEVAATEEDVTRLPSPTSPFSSLSQDQAATSKATLSSTSGLDLMSESGEGEISPQREVSRSQDQFSDMRISINQTPGKSLDFGFTIKWDIPGIFVASVEAGSPAEFSQLQVDDEIIAINNTKFSYNDSKEWEEAMAKAQETGHLVMDVRRYGKAGSPETKWIDATSGIYNSEKSSNLSVTTDFSESLQSSNIESKEINGIHDESNAFESKASESISLKNLKRRSQFFEQGSSDSGVPDLPVPTISAPSRWVWDQEEERKRQERWQKEQDRLLQEKYQREQEKLREEWQRAKQEAERENSKYLDEELMVLSSNSMSLTTREPSLATWEATWSEDLHHRCGHHTVPHPEKPFPFSFTVRLSAA

SEQ ID NO: 1129 - protein, 160 aa, Homo sapiens
GTSRGELVTASTTCEKLEKARNELQTVYEAFVQQHQAEKTERENRLKEFYTREYEKLRDTYIEEAEKYKMQLQEQFDNLNAAHETSKLEIEASHSEKLELLKKAYEASLSEIKKGHEIEKKSLEDLLSEKQESLEKQINDLKSENDALNEKLKSEKKKKK

SEQ ID NO: 1130 - protein, 87 aa, Homo sapiens
PRITQKEMTEREQRELKTLLDRARIAHGRVLTNSETNSIKKDYIDKLMVEREAEAKKARQLKKKQAYKPDPEASFSWSANTSTRGRR

SEQ ID NO: 1131 - protein, 549 aa, Homo sapiens
AATRRREEEEAAGVQEAGQRMEEEAMNGDRTESDWQGLVSEYLVCKRKLESKKEALLILSKELDTCQQERDQYKLRANQLRERHQSLKKKYRELIDGDPSLPPEKRKQANLAQLLRDSQDRNKHLGEEIKELQQRLGEVQGDNKLLRMTIAKQRLGDEAIGVRHFAAHEREDLVQQLERAKEQIESLEHDLQASVDELQDVKEERSSYQDKVERLNQELNHILSGHENRIIDVDALCMENRYLQERLKQLHEEVNLLKSNIAKYKNALERRKNSKGQGKSSSSALTGVLSAKQVQDLLSEDHGCSLPATPQTISDLKSLATALLETIHEKNMGIQHQRQTNKILWNRVAELEKKLKTLEVSGLWSLPGGKDTILFSDPTLSRGQRSRSPLLKFVEQPTENKADPKDGEAHKHEEDESCAAAEALTAPEDAGRPAVNSPANQSRGNQCKLFHPSLPQLPSEEEVNSLGREIIKLTKEQAAAELEEVRRESPIEGQRSETGPAPPGLSIQGELPKSHLDSFEASRPAAKASTPEDGKGIPEGGGMRSTVKT

SEQ ID NO: 1132 - protein, 195 aa, Homo sapiens
IQKKGELTNMGKEIQLKPKANVSSYVHFLLNYRNKFKEQQPNTYVGFKEFSRKCSEKWRSISKHEKAKYEALAKLDKARYQEEMMNYVGKRKKRRKRDPQAPRRPPSSFLLFCQDHYAQLKRENPNWSVVQVAKATGKMWSTATDLEKHPYEQRVALLRAKYFEELELYRKQCNARKKYRMSARNRCRGKRVRQS

SEQ ID NO: 1133 - protein, 136 aa, Homo sapiens
  SITE (116): Xaa equals any of the naturally occurring L-amino acids
RCFVLSEARKFDRAAMPNRKASRNAYYFFVQEKIPELRRRGLPVARVADAIPYCSSDWALLREEEKEKYAEMAREWRAAQGKDPGPSEKQKPVFTPLRRPGMLVPKQNVSPPDMSXLSLKGDQALLGGIFYFLEHF

SEQ ID NO: 1134 - protein, 141 aa, Homo sapiens
  SITE (105): Xaa equals any of the naturally occurring L-amino acids
SSKPHKHLPPAALHLIAYYKENKDREDKRSALSCVISKTARLLSSEDRARLPEELRSLVQKRYELLEHKKRWASMSEEQRKEYLKKKREELKKKLKEKAKERREXEMLERLEKQKRYEDQELTGKNLPAFRLVDTPEGLPN

SEQ ID NO: 1135 - protein, 233 aa, Homo sapiens
GNCPLWKGLSFGPRPLPAPVVSREMENLMTSSTLPPLFADEDGSKESNDLATTGLNHPEVPYSSGATSSTNNPEFVEDLSQGQLLQSESSNAAEGNEQRHEDEQRSKRGGWSKGRKRKKPLRDSNAPKSPLTGYVRFMNERREQLRAKRPEVPFPEITRMLGNEWSKLPPEEKQRYLDEADRDKERYMKELEQYQKTEAYKVFSRKTQDRQKGKSHRQDAARQPLMIMRKKQR

SEQ ID NO: 1136 - protein, 469 aa, Homo sapiens
GTRKNKAAKGSATKDFSVFFQKIRETGERPSNEEIMRFSKLFEDELTLDNLTRPQLVALCKLLELQSIGTNNFLRFQLTMRLRSIKADDKLIAEEGVDSLNVKELQAACRARGMRALGVTEDRLRGQLKQWLDLHLHQEIPTSLLILSRAMYLPDTLSPADQLKSTLQTLPEIVAKEAQVKVAEVEGEQVDNKAKLEATLQEEAAIQQEHREKELQKRSEVAKDFEPERVVAAPQRPGTEPQPEMPDTVLQSETLKDTAPVLEGLKEEEITKEEIDILSDACSKLQEQKKSLTKEKEELELLKEDVQDYSEDLQEIKKELSKTGEEKYVEESKASKRLTKRVQQMIGQIDGLISQLEMDQQAGKLAPANGMPTGENVISVAELINAMKQVKHIPESKLTSLAAALDENKDGKVNIDDLVKVIELVDKEDVHISTSQVAEIVATLEKEEKVEEKEKAKEKAEKEVAEVKS

SEQ ID NO: 1137 - protein, 196 aa, Homo sapiens
  SITE (2): Xaa equals any of the naturally occurring L-amino acids
  SITE (17): Xaa equals any of the naturally occurring L-amino acids
  SITE (194): Xaa equals any of the naturally occurring L-amino acids
  SITE (196): Xaa equals any of the naturally occurring L-amino acids
AXEGEHGGYKEIIAKIXGDGVYGRLKFESGGHRVQRVPATESQGRIHTSACTVAVMPELPDAELPDINPADLRIDTFRSSGAGGQHVNTTDSAIRITHLPTGIVVECQDERSQHKNKAKALSVLGARIHAAEMAKRQQAEASTRRNLLGSGDRSDRNRTYNFPQGRVTDHRINLTLYRLDEVMEGKLDMLIERXIX

SEQ ID NO: 1138 - protein, 167 aa, Homo sapiens
  SITE (8): Xaa equals any of the naturally occurring L-amino acids
  SITE (12): Xaa equals any of the naturally occurring L-amino acids
  SITE (18): Xaa equals any of the naturally occurring L-amino acids
  SITE (26): Xaa equals any of the naturally occurring L-amino acids
  SITE (35): Xaa equals any of the naturally occurring L-amino acids
IFNMLLAXFDRXALMLIXLFFLIRIXRLIHFGRQXARSSFPVLLCGEEGVGKALLSQAIHNESERAAGPYIAVNCELYGDAALAEEFIGGDRTDNENGRLSRLELAHGGTLFLEKIEYLAVELQSALLQVIKQGVITRLDARRLIPIDVKVIATTTADLAMLVEQNR

SEQ ID NO: 1139 - protein, 591 aa, Homo sapiens
  SITE (338): Xaa equals any of the naturally occurring L-amino acids
  SITE (376): Xaa equals any of the naturally occurring L-amino acids
  SITE (465): Xaa equals any of the naturally occurring L-amino acids
  SITE (485): Xaa equals any of the naturally occurring L-amino acids
  SITE (491): Xaa equals any of the naturally occurring L-amino acids
GMDSEHRQPVLHIGKVLREENQCIAPVVSSRVSPGTRPTAMGSFSSHMTEFPRKRKGSDSDPSQEAHSQTEKRRRDKMNNLIEELSAMIPQCNPMARKLDKLTVLRMAVQHLRSLKGLTNSYVGSNYRPSFLQDNELRHLILKTAEGFLFVVGCERGKILFVSKSVSKILNYDQASLTGQSLFDFLHPKDVAKVKEQLSSFDISPREKLIDAKTGLQVHSNLHAGRTRVYSGSRRSFFCRIKSCKISVKEEHGCLPNSKKKEHRKFYTIHCTGYLRSWPPNIVGMEEERNSKKDNSNFTCLVAIGRLQPYIVPQNSGEINVKPTEFITRFAVNGKFVXVDQRASAILGYLPQELLGTSCYEYFHQDDHNNLTDKHXAVLQSKEKILTDSYKFRAKDGSFVTLKSQWFSFTNPWTKELEYIVSVNTLVLGHSEPGEASFLPCSSQSSEESSRQSCMSVPGMSTGTXLGAGSIGTDIANEILDLQRXQSSSYXDDSSPTGLMKDTHTVNCRSMSNKELFPPSPSEMGELEATRQNQSTVAVHSHEPLLSDGAQLDFDALCDNDDTAMAAFMNYLEAEGGLGDPGDFSDIQWTL

SEQ ID NO: 1140 - protein, 187 aa, Homo sapiens
  SITE (12): Xaa equals any of the naturally occurring L-amino acids
  SITE (20): Xaa equals any of the naturally occurring L-amino acids
  SITE (27): Xaa equals any of the naturally occurring L-amino acids
  SITE (61): Xaa equals any of the naturally occurring L-amino acids
  SITE (110): Xaa equals any of the naturally occurring L-amino acids
  SITE (111): Xaa equals any of the naturally occurring L-amino acids
GSKIAPKGWKSXSLSPWVRXSLLLACXPPRAALGWAGGGYIYISLSLNVLKKIQRTLHVRXQVCGCSRRLPALSRSSAGCVAPVAGAQSLRSPLPSSPPGASGVAGLARXXARASAHWFNSSAQTCCGQPVRPLILFSTGPRAGGKPSCCCSSLFRLLSRPPSAFLSSALKASGSPDCASLASTSIR

SEQ ID NO: 1141 - protein, 165 aa, Homo sapiens
KRDDTKDTYKLPHRLIEKKRRDRINECIAQLKDLLPEHLKLTTLGHLEKAVVLELTLKHLKALTALTEQQHQKIIALQNGERSLKSPIQSDLDAFHSGFQTCAKEVLQYLSRFESWTPREPRCVQLINHLHAVATQFLPTPQLLTQQVPLSKGTGAPSAAGSAAA

SEQ ID NO: 1142 - protein, 159 aa, Homo sapiens
MLATNCGGRLKGCRIKLQNFPWFSPFLVQCQLRRLPFLSPLPVLKELPTREGRGHDAPLCWLPSLTIPPEAHSATAQKVKLPRVLLLLSKGTGRRRTSTRKLPEQHHCPQSSARDSHLLPCLRATLASSQPSPYHQSPLEQVTFLVPNSISSLSIPSTS

SEQ ID NO: 1143 - protein, 348 aa, Homo sapiens
GTSGTSSFAQDHQLQNMDKEDALICFEEHIRALEREEEEERERARLRERRQQRKNREAFQTFLDELHETGQLHSMSTWMELYPAVSTDVRFANMLGQPGSTPLDLFKFYVEELKARFHDEKKIIKDILKDRGFCVEVNTAFEDFAHVISFDKRAAALDAGNIKLTFNSLLEKAEAREREREKEEARRMRRREAAFRSMLRQAVPALELGTAWEEVRERFVCDSAFEQITLESERIRLFREFLQVLETECQHLHTKGRKHGRKGKKHHHKRSHSPSGSESEEEELPPPSLRPPKRRRRNPSESGSEPSSSLDSVESGGAALGGRGSPSSHLLGADHGFGKPRNQKKKKK

SEQ ID NO: 1144 - protein, 181 aa, Homo sapiens
HEAFFKNWLLPPKPSGICLPGTWAPPGSSHWVACQGLWGPGAGPATGSQPWGGKERRARLGCFPHSPWTLREELSWAWGCHVSDSGDVMGGHRSVAGYWEFPLSFLSSLHPFSMGCLPRSRSPSSPSPQQWKKPVIDTAVGGRLCKSLTFGALEGFLHFIFTQAPAPHSSCPPLSFPPTSS

SEQ ID NO: 1145 - protein, 92 aa, Homo sapiens
ATAPGLLYTFFNPKNYHYSNVVEWEECLESEDPVEAEFSCMTSCKPFKLCASASSFLKGGLISMFTSSSDSGILIHRTWVLGWNLELCCPVQ

SEQ ID NO: 1146 - protein, 339 aa, Homo sapiens
GTRRNASSRERRGAAVVNSSLPAAPTLPRNPQGASMKRAHPEYSSSDSELDETIEVEKESADENGNLSSALGSMSPTTSSQILARKRRRGIIEKRRRDRINNSLSELRRLVPSAFEKQGSAKLEKAEILQMTVDHLKMLHTAGGKGYFDAHALAMDYRSLGFRECLAEVARYLSIIEGLDASDPLRVRLVSHLNNYASQREAASGAHAGLGHIPWGTVFGHHPHIAHPLLLPQNGHGNAGTTASPTEPHHQGRLGSAHPEAPALRAPPSGSLGPVLPVVTSASKLSPPLLSSVASLSAFPFSFGSFHLLSPNALSPSAPTQAANLGKPYRPWGTEIGAF

SEQ ID NO: 1147 - protein, 146 aa, Homo sapiens
RPTRPAAERSRKAPPIPLKLKPDYWSDKLQKEAEAFAYYRRTHTANERRRRGEMRDLFEKLKITLGLLHSSKVSKSLILTRAFSEIQGLTDQADKLIGQKNLLTRKRNILIRKVSSLSGKTEEVVLKKLEYIYAKQQALEAQKKKK

SEQ ID NO: 1148 - protein, 316 aa, Homo sapiens
GTSPNPFGSSNPFKSKSNDRPGHKRFRTQMSNLQLKVLKACFSDYRTPTMQECEMLGNEIGLPKRVVQVWFQNARAKEKKFKINIGKPFMINQGGTEGTKPECTLCGVKYSARLSIRDHIFSKQHISKVRETVGSQLDREKDYLAPTTVRQLMAQQELDRIKKASDVLGLTVQQPGMMDSSSLHGISLPTAYPGLPGLPPVLLPGMNGPSSLPGFPQNSNTLTPPGAGMLGFPTSATSSPALSLSSAPTKPLLQTPPPPPPPPPPPPSSSLSGQQTEQQNKESEKKQTKPNKVKKIKEEELEATKPEKHPKKKKKK

SEQ ID NO: 1149 - protein, 141 aa, Homo sapiens
  SITE (22): Xaa equals any of the naturally occurring L-amino acids
  SITE (84): Xaa equals any of the naturally occurring L-amino acids
  SITE (114): Xaa equals any of the naturally occurring L-amino acids
RKQRRERTTFTRAQLDVLEALXAKTRYPDIFMREEVALKINLPESRVQVWFKNRRAKCRQQQQQQQNGGQNKVRPAKKKTSPAXEVSSEKWNKCQFTPPSSTSVPTIASSSAPXSIWSPASISPLSDPLSTSSSACRGPIP

SEQ ID NO: 1150 - protein, 159 aa, Homo sapiens
  SITE (1): Xaa equals any of the naturally occurring L-amino acids
  SITE (10): Xaa equals any of the naturally occurring L-amino acids
  SITE (28): Xaa equals any of the naturally occurring L-amino acids
XVQGPRAQDXRRLCLQSSTCISSSDRWXRESGPAGPRQRPGSGAPSGSAKLHRTSGDNARSEATSARISSTSRLSLARRFWNQVTTCALARPSRVASPSRSDGARYFWKTKRRSSSSTCCAVNAVRDLRRLRPKGPGPSASGPARPSGVEPLRLLGASG

SEQ ID NO: 1151 - protein, 118 aa, Homo sapiens
  SITE (22): Xaa equals any of the naturally occurring L-amino acids
  SITE (24): Xaa equals any of the naturally occurring L-amino acids
  SITE (109): Xaa equals any of the naturally occurring L-amino acids
  SITE (113): Xaa equals any of the naturally occurring L-amino acids
  SITE (118): Xaa equals any of the naturally occurring L-amino acids
PVTMVTSQGQVVTQAIPQGAIXIXNTQVNLDLTSLLDNEDKKSKNKRGVLPKHATNIMRSWLFQHLMHPYPTEDEKRQIAAQTNLTLLQVNNWFINARRRILQPMLDAXNPDXAPKSX

SEQ ID NO: 1152 - protein, 168 aa, Homo sapiens
  SITE (89): Xaa equals any of the naturally occurring L-amino acids
  SITE (112): Xaa equals any of the naturally occurring L-amino acids
  SITE (141): Xaa equals any of the naturally occurring L-amino acids
TQDYLFQLSAAALQRRFQKTQYLALPERAELAASLGLTQTQVKIWFQNKRSKIKKIMKNGEMPPEHSPSSSDPMACNSPQSPAVWEPQXRPARSATTLMPTLRPPTSPQRPXTWRTLHPGTQVQPAQSIPTCRRRAPYSNXWRWPPGHSIRWAALSYSLFWDYCVLLF

SEQ ID NO: 1153 - protein, 166 aa, Homo sapiens
  SITE (156): Xaa equals any of the naturally occurring L-amino acids
NSARATAETKPATAAVPTSQSVKHETALVNPDSFGIRAKKTKEQLAELKVSYLKNQFPHDSEIIRLMKITGLTKGEIKKWFSDTRYNQRNSKSNQCLHLNNDSSTTIIIDSSDETTESPTVGTAQPKQSWNPFPDFTPQKFKEKTAERFVSFRQVXSTALYLQMKN

SEQ ID NO: 1154 - protein, 213 aa, Homo sapiens
ARATNQNGRENNERLSTSNGKMSPTRYHANSMGQRSYSFEASEEDLDVDDKVEELMRRDSSVIKEEIKAFLANRRISQAVVAQVTGISQSRISHWLLQQGSDLSEQKKRAFYRWYQLEKTNPGATLSMRPAPIPIEDPEWRQTPPQSLPHLVLSDCDEGVDLPGERSAWLLWKVTSMRINTQMKQRGKKLQTLAMQLYRSQAKSCQIWKELPP

SEQ ID NO: 1155 - protein, 194 aa, Homo sapiens
AAAPTSGAPAMARSLVHDTVFYCLSVYQVKISPTPQLGAASSAEGHVGQGAPGLMGNMNPEGGVNHENGMNRDGGMIPEGGGGNQEPRQQPQPPPEEPAQAAMEGPQPENMQPRTRRTKFTLLQVEELESVFRHTQYPDVPTRRELAENLGVTEDKVRVWFKNKRARCRRHQRELMLANELRADPDDCVYIVVD

SEQ ID NO: 1156 - protein, 154 aa, Homo sapiens
EKKIEAMFRRPVLQVLRQFVRHESETTTSLVLERSLNRVHLLGRVGQDPVLRQVEGKNPVTIFSLATNEMWRSGDSEVYQLGDVSQKTTWHRISVFRPGLRDVAYQYVKKGSRIYLEGKIDYGEYMDKNNVRRQATTIIADNIIFLSDQTKEKE

SEQ ID NO: 1157 - protein, 254 aa, Homo sapiens
  SITE (207): Xaa equals any of the naturally occurring L-amino acids
DLSTIKQRLENRFYRRVSSLMWEVRYIEHNTRTFNEPGSPIVKSAKFVTDLLLHFIKDQTCYNIIPLYNSMKKKVLSDSEDEEKDADVPGTSTRKRKDHQPRRRLRNRAQSYDIQAWKKQCEELLNLIFQCEDSEPFRQPVDLLEYPDYRDIIDTPMDFATVRETLEAGNYESPMELCKDVRLIFSNSKAYTPSKRSRIYSMSLRLXAFFEEHISSVLSDYKSALRFHKRNTITKRKKNLKNRSKNRLKRKRKK

SEQ ID NO: 1158 - protein, 161 aa, Homo sapiens
  SITE (6): Xaa equals any of the naturally occurring L-amino acids
WIPWFXGIRHEVKGYGTHLMNHLKEYHIKHDILNFLTYADEYAIGYFKKQGFSKEIKIPKTKYVGYIKDYEGATLMGCELNPRIPYTEFSVIIKKQKEIIKKLIERKQAQIRKVYPGLSCFKDGVRQIPIESIPGITLLIQCFTLLTYRRDRLETEWKREK

SEQ ID NO: 1159 - protein, 235 aa, Homo sapiens
  SITE (129): Xaa equals any of the naturally occurring L-amino acids
  SITE (215): Xaa equals any of the naturally occurring L-amino acids
  SITE (221): Xaa equals any of the naturally occurring L-amino acids
SNPSKPGRKTNQLQYMQNVVVKTLWKHQFAWPFYQPVDAIKLNLPDYHKIIKNPMDMGTIKKRLENNYYWSASECMQDFNTMFTNCYIYNKPTDDIVLMAQALEKIFLQKVAQMPQEEVEIITPCSKGXKVGSRLREPRAQVHSKWRPCPLSPQRPPFRACPPPSPRRPSSLPPLYQPSLQTSRRSQSPQLPPHLLLPHPSSPWSLLRHLSSRKXALNGKXTQPLPRLRASLPAE

SEQ ID NO: 1160 - protein, 580 aa, Homo sapiens
KSYSMLFLKLESQVQAEDFVTYLWLNHPKRTILIIIKSSWSPMDLKIIEHNIRNDKYAGEEGMIEDMKLMFRNARHYNEEGSQVYNDAHILEKLLKEKRKELGPLPDDDDMASPKLKLSRKSGISPKKSKYMTPMQQKLNEVYEAVKNYTDKRGRRLSAIFLRLPSRSELPDYYLTIKKPMDMEKIRSHMMANKYQDIDSMVEDFVMMFNNACTYNEPESLIYKDALVLHKVLLETRRDLEGDEDSHVPNVTLLIQELIHNLFVSVMSHQDDEGRCYSDSLAEIPAVDPNFPNKPPLTFDIIRKNVENNRYRRLDLFQEHMFEVLERARRMNRTDSEIYEDAVELQQFFIKIRDELCKNGEILLSPALSYTTKHLHNDVEKERKEKLPKEIEEDKLKREEEKREAEKSEDSSGAAGLSGLHRTYSQDCSFKNSMYHVGDYVYVEPAEANLQPHIVCIERLWEDSAGEKWLYGCWFYRPNETFHLATRKFLEKEVFKSDYYNKVPVSKILGKCVVMFVKEYFKLCPENFRDEDVFVCESRYSAKPNLLRNNCGPCPSAHQVCPSGCASACGSRGLCICKCR

SEQ ID NO: 1161 - protein, 555 aa, Homo sapiens
SVSMLQCSMKKKVLSDSEDEEKDADVPGTSTRKRKDHQPRRRLRNRAQSYDIQAWKKQCEELLNLIFQCEDSEPFRQPVDLLEYPDYRDIIDTPMDFATVRETLEAGNYESPMELCKDVRLIFSNSKAYTPSKRSRIYSMSLRLSAFFEEHISSVLSDYKSALRFHKRNTITKRRKKRNRSSSVSSSAASSPERKKRILKPQLKSESSTSAFSTPTRSIPPRHNAAQINGKTESSSVVRTRSNRVVVDPVVTEQPSTSSAAKTFITKANASAIPGKTILENSVKHSKALNTLSSPGQSSFSHGTRNNSAKENMEKEKPVKRKMKSSVLPKASTLSKSSAVIEQGDCKNNALVPGTIQVNGHGGQPSKLVKRGPGRKPKVEVNTNSGEIIHKKRGRKPKKLQYAKPEDLEQNNVHPIRDEVLPSSTCNFLSETNNVKEDLLQKKNRGGRKPKRKMKTQKLDADLLVPASVKVLRRSNRKKIDDPIDEEEEFEELKGSEPHMRTRNQGRRTAFYNEDDSEEEQRQLLFEDTSLTFGTSSRGRVRKLTEKAKANLIGW

SEQ ID NO: 1162 - protein, 319 aa, Homo sapiens
  SITE (3): Xaa equals any of the naturally occurring L-amino acids
  SITE (23): Xaa equals any of the naturally occurring L-amino acids
  SITE (196): Xaa equals any of the naturally occurring L-amino acids
KPXLLNSNNKEQDGRNDFYCWVXHREGQVLCCELCPRVYHAKCLRLTSEPEGDWFCPECEKITVAECIETQSKAMTMLTIEQLSYLLKFAIQKMKQPGTDAFQKPVPLEQHPDYAEYIFHPMDLCTLEKNAKKKMYGCTEAFLADAKWILHNCIIYNGGNHKLTQIAKVVIKICEHEMNEIEVCPECYLAACQKRXNWFCEPCSNPHPLVWAKLKGFPFWPAKALRDKDGQVDARFFGQHDRAWVPINNCYLMSKEIPFSVKKTKSIFNSAMQEMEVYVENIRRSLGFLITLHLGHPTHPTASIKCCSIPPTPAPALPR

SEQ ID NO: 1163 - protein, 449 aa, Homo sapiens
HECELFIRAPKRRNQPDYYEVVSQPIDLMKIQQKLKMEEYDDVNLLTADFQLLFNNAKSYYKPDSPEYKAACKLWDLYLRTRNEFVQKGEADDEDDDEDGQDNQGTVTEGSSPAYLKEILEQLLEAIVVATNPSGRLISELFQKLPSKVQYPDYYAIIKEPIDLKTIAQRIQNGSYKSIHAMAKDIDLLAKNAKTYNEPGSQVFKDANSIKKIFYMKKAEIEHHEMAKSSLRMRTPSNLAAARLTGPSHSKGSLGEERNPTSKYYRNKRAVQGGRLSAITMALQYGSESEEDAALAAARYEEGESEAESITSFMDVSNPFYQLYDTVRSCRNNQGQLIAEPFYHLPSKKKYPDYYQQIKMPISLQQIRTKLKNQEYETLDHLECDLNLMFENAKRYNVPNSAIYKRVLKLQQVMQAKKKELARRDDIEDGDSMISSATSDTGSAKKKKK

SEQ ID NO: 1164 - protein, 458 aa, Homo sapiens
  SITE (30): Xaa equals any of the naturally occurring L-amino acids
  SITE (48): Xaa equals any of the naturally occurring L-amino acids
  SITE (75): Xaa equals any of the naturally occurring L-amino acids
  SITE (120): Xaa equals any of the naturally occurring L-amino acids
  SITE (147): Xaa equals any of the naturally occurring L-amino acids
GLALPGKLVRLPVPVRNSRVDPRVRVLPVXPPPEPRSLTAEEVKRLEXQEEDTFRELRIFLRNVTHRLAIDKRFXVFTKPVDPDEVPDYVTVIKQPMDLSSVISKIDLHKYLTVKDYLRXIDLICSNALEYNPDRDPGDRLIRHRAXALRDTAYAIIKEELDEDFEQLCEEIQESRKKRGCSSSKYAPSYYHVMPKQNSTLVGDKRSDPEQNEKLKTPSTPVACSTPAQLKRKIRKKSNWYLGTIKKRRKISQAKDDSQNAIDHKIESDTEETQDTSVDHNETGNTGESSVEENEKQQNASESKLELRNNSNTCNIENELEDSRKTTACTELRDKIACNGDASSSQIIHISDENEGKEMCVLRMTRARRSQVEQQQLITVEKALAILSQPTPSLVVDHERLKNLLKTVVKKSQNYNIFQLENLYAVISQCIYRHRKDHDKTSLIQKMEQEVENFSCSR

SEQ ID NO: 1165 - protein, 160 aa, Homo sapiens
  SITE (2): Xaa equals any of the naturally occurring L-amino acids
LXTGDTEDEDSASTSNSLKRGNKDLKKRKMEENTSINLSKQESFTSVKKPKRDDSKDLALCSMILTEMETHEDAWPFLLPVNLKLVPGYKKVIKKPMDFSTIREKLSSGQYPNLETFALDVRLVFDNCETFNEDDSDIGRAGHNMRKYFEKKWTDTFKVS

SEQ ID NO: 1166 - protein, 199 aa, Homo sapiens
EYVEKPLKLVLKVGGNEVTELSTGSSGHDSSLFEDKNDHDKHKDRKRKKRKKGEKQIPGEEKGRKRRRVKCEFERRKPDGTTTLGLLHPVDPIVGEPGYCPVRLGMTTGRLQSGVNTLQGFKEDKRNKVTPVLYLNYGPYSSYAPHYDSTFANISKDDSDLIYSTYGEDSDLPSDFSHCLKMKAILGHLTQQKKWRLQK

SEQ ID NO: 1167 - protein, 194 aa, Homo sapiens
GLQEFGTREDQGEVYVSEMEDQPPSGECDDAFNIKETPLVDTLFSHATSSKLTDLSQDDPVQDHLLFKKTLLPVCKMIASHRFSSPFLKPVSERQAPGYKDVVKRPMDLTSLKRNLSKGRIRTMAQFLRDLMLMFQNAVMYNDSDHHVYHMAVEMRREVLEQIQVLNIWLDKRKGSSSLEGEPANPVDDGKPVF

SEQ ID NO: 1168 - protein, 240 aa, Homo sapiens
GRPTRPPKLKLSRKSGISPKKSKYMTPMQQKLNEVYEAVKNYTDKRGRRLSAIFLRLPSRSELPDYYLTIKKPMDMEKIRSHMMANKYQDIDSMVEDFVMMFNNACTYNEPESLIYKDALVLHKVLLETRRDLEGDEDSHVPNVTLLIQELIHNLFVSVMSHQDDEGRCYSDSLAEIPAVDPNFPNKPPLTFDIIRKNVENNRYRRLDLFQEHMFEVLERARRMNRYVFKAIFILRICAI

SEQ ID NO: 1169 - protein, 264 aa, Homo sapiens
  SITE (104): Xaa equals any of the naturally occurring L-amino acids
  SITE (191): Xaa equals any of the naturally occurring L-amino acids
  SITE (253): Xaa equals any of the naturally occurring L-amino acids
  SITE (255): Xaa equals any of the naturally occurring L-amino acids
VVKCNFNVEEALRRLRFNVKVIRDGLCAWSEEECRNFEHGFRVHGKNFHLIQANKVRTRSVGECVEYYYLWKKSERYDYFAQQTRLGRRKYVPSGTTDADQDLXGSDPDGPGRPRPEQDTLTGMRTDPLSVDGTAGGLDEPGVASDGLPSSEPGPCSFQQLDESPAVPLSHRPPALADPASYQPAVTAPEXDASPRLAVDFALPKELPLISSHVDLSGDPEGDCGPSTGGFVGHRIWTHRHWGLEPFLAAHPXAXPGLHSDPCH

SEQ ID NO: 1170 - protein, 77 aa, Homo sapiens
  SITE (12): Xaa equals any of the naturally occurring L-amino acids
  SITE (25): Xaa equals any of the naturally occurring L-amino acids
  SITE (32): Xaa equals any of the naturally occurring L-amino acids
  SITE (64): Xaa equals any of the naturally occurring L-amino acids
  SITE (67): Xaa equals any of the naturally occurring L-amino acids
KGSFWRIDPASXAKLVEQAFRKRRXRGVSCFXTPFGPLSSRSAPASPTHPGLMSPRSGGLQTPXCLXREGLPHSTRP

SEQ ID NO: 1171 - protein, 149 aa, Homo sapiens
  SITE (67): Xaa equals any of the naturally occurring L-amino acids
HKWKQGMWSKEEIDILMNNIERYLKARGIKDATEIIFEMSKDERKDFYRTIAWGLNRPLFAVYRRVXRMYDDRNHVGKYTPEEIEKLKELRIKHGNDWATIGAALGRSASSVKDRCRLMKDTCNTGKWTEEEEKRLAEVVHELTSTEPG

SEQ ID NO: 1172 - protein, 268 aa, Homo sapiens
  SITE (58): Xaa equals any of the naturally occurring L-amino acids
  SITE (261): Xaa equals any of the naturally occurring L-amino acids
  SITE (262): Xaa equals any of the naturally occurring L-amino acids
LPPHAPVDPVEDLLTAACSSIFPGAGTNQELALHCLHESRGDILETLNKLLLKKPLRXHNHPLATYHYTGSDQWKMAERKLFNKGIAIYKKDFFLVQKLIQTKTVAQCVEFYYTYKKQVKIGRNGTLTFGDVDTSDEKSAQEEVEVDIKTSQKFPRVPLPRRESPSEERLEPKREVKEPRKEGEEEVPEIQEKEEQEEGRERSRRAAAVKATQTLQANESASDILISGATSPTPLGLPVARPRRSQGKGQGSHEGHYLFQXXKKKKTP

SEQ ID NO: 1173 - protein, 504 aa, Homo sapiens
  SITE (91): Xaa equals any of the naturally occurring L-amino acids
  SITE (92): Xaa equals any of the naturally occurring L-amino acids
  SITE (167): Xaa equals any of the naturally occurring L-amino acids
  SITE (198): Xaa equals any of the naturally occurring L-amino acids
  SITE (216): Xaa equals any of the naturally occurring L-amino acids
  SITE (486): Xaa equals any of the naturally occurring L-amino acids
GSGWKNSIRHNLSLNKCFLKVPRSKDDPGKGSYWAIDTNPKEDALPTRPKKRARSVERASTPYSIDSDSLGMECIISGSASPTLAINTVTXXVTLYNTDQDGSDSPRSSLNNSLSDQSLASVNLNSVGSVHSYTPVTSHPESVSQSLTPQQQPQYNLSERDKQLLFXEYNFEDLSASFRSLYKSVFEQSLSQQGLMNXPSESSQQSHTSCTYQHSXSSTVSTHPHSNQSSLSNSHGSGLNTTGSNSVAQVSLSHPQMHPQPSPHPPHRPHGLPQHPQRSPHPAPHPQQHSQLQSPHPQHPSPHQHIQHHPNHQHQTLTHQAPPPPQQVSCNSGVSNDWYATLDMLKESCRIASSVNWSDVDLSQFQGLMESMRQADLKNWSLDQVQFADLCSSLNQFFTQTGLIHSQSNVQQNVCHGAMHPTKPSQHIGTGNLYIDSRQNLPPSVMPPPGYPHIPQALSTPGTTMAGHHRAMNQQHMMPSQAFQMXRSLPPDDIQDDFDWDSIV

SEQ ID NO: 1174 - protein, 282 aa, Homo sapiens
  SITE (41): Xaa equals any of the naturally occurring L-amino acids
  SITE (65): Xaa equals any of the naturally occurring L-amino acids
RLPLPLTFPPPLFYHARHDGERARVTGEESIGQRSAKSPAXSAAAALHPPTAGHYSEPESGCSSXDEHDVGMRVGAEYQARIPEFDPGATKYTDKDNGGMLVWSPYHSIPDAKLDEYIAIAKEKHGYNVEQALGMLFWHKHNIEKSLADLPNFTPFPDEWTVEDKVLFEQAFSFHGKSFHRIQQMLPDKTIASLVKYYYSWKKTRSRTSLMDRQARKLANRHNQGDSDDDVEETHPMDGNDSDYDPKKEAKKEVMMITRSTCDCSTNLLKKNEQYFVLRKTF

SEQ ID NO: 1175 - protein, 171 aa, Homo sapiens
QRAGAGVPWRLGSAPVSSSSLSSSFSFASDATGSSAAAASSATAPSSHGCDLRGGKLNFKTTPMDADSDVALDILITNVVCVFRTRCHLNLRKIALEGANVIYKRDVGKVLMKLRKPRITATIWSSGKIICTGATSEEEAKFGARRLARSLQKLGFQVIFTDFKVVTFGSV

SEQ ID NO: 1176 - protein, 171 aa, Homo sapiens
  SITE (14): Xaa equals any of the naturally occurring L-amino acids
ELGKKYCVYCLAEXSPLRFRCTECQDIELCPECFSAGAEIGHHRRYHGYQLVDGGRFTLWGPEAEGGWTSREEQLLLDAIEQFGFGNWEDMAAHVGASRTPQEVMEHYVSMYIHGNLGKACIPDTIPNRVTDHTCPSGGPLSPSLTTPLPPLDISVAEQQQLGYMPLRDDY

SEQ ID NO: 1177 - protein, 129 aa, Homo sapiens
EIYNWFTRMFAYFRRNTATWKNAVRHNLSLHKCFVRVENVKGAVWTVDEREYQKRRPPKMTGSPTLVKNMISGLSYGALNASYQAALAESSFPLLNSPGMLNPGSASSLLPLSHDDVGAPVEPLPSNGS

SEQ ID NO: 1178 - protein, 335 aa, Homo sapiens
STNAGCTAVRATACKRQRTPASHDDPPACEVYRTQSRPSALESGIKCHSLQVRIGGFSTELTSYSNDPNRPPDSRHPRPLCHHNHQHAHGGTHPQRYSDKYNVPISSADIAQNQEFYKNAEVRPPFTYASLIRQAILESPEKQLTLNEIYNWFTRMFAYFRRNAATWKNAVRHNLSLHKCFVRVENVKGAVWTVDEVEFQKRRPQKISGNPSLIKNMQSSHAYCTPLNAALQASMAENSIPLYTTASMGNPTLGNLASAIREELNGAMEHTNSNESDSSPGRSPMQAVHPVHVKEEPLDPEEAEGPLSLVTTANHSPDFDHDRDYEDEPVNEDME

SEQ ID NO: 1179 - protein, 76 aa, Homo sapiens
AAGRQKTSSSFRRKVPWTSLKEDPREKLVGRAGKKPFLSLIQDSDREQLEAQGTTRAPSCSTRTTASQLVRRLLPG

SEQ ID NO: 1180 - protein, 162 aa, Homo sapiens
SLVSSRFLIPERTLSWEIARGGDVGDFKTYVDQACRAAEEFVNIYYETMDKRRRALTRLYLDKATLIWNGNAVSGLDALNNFFDTLPSSEFQVNMLDCQPVHEQATQSQTTVLVVTSGTVKFDGNKQHFFNQNFLLTAQSTPNNTVWKIASDCFRFQDWSSS

SEQ ID NO: 1181 - protein, 164 aa, Homo sapiens
  SITE (2): Xaa equals any of the naturally occurring L-amino acids
  SITE (3): Xaa equals any of the naturally occurring L-amino acids
  SITE (5): Xaa equals any of the naturally occurring L-amino acids
  SITE (10): Xaa equals any of the naturally occurring L-amino acids
SXXGXLTGDXTEIPWWSPPSIEPEMASVDFKTYVDQACRAAEEFVNVYYTTMDKRRRLLSRLYMGTATLVWNGNAVSGQESLSEFFEMLPSSEFQISVVDCQPVHDEATPSQTTVLVVICGSVKFEGNKQRDFNQNFILTAQASPSNTVWKIASDCFRFQDWAS

SEQ ID NO: 1182 - protein, 117 aa, Homo sapiens
  SITE (22): Xaa equals any of the naturally occurring L-amino acids
  SITE (25): Xaa equals any of the naturally occurring L-amino acids
  SITE (93): Xaa equals any of the naturally occurring L-amino acids
  SITE (116): Xaa equals any of the naturally occurring L-amino acids
SEARLNRLQALVPLSASRSLPXPPXSSLAVLAEAAPMNLTEDYMVFEDVAIHFSQEEWGILNDVQRHLHSDVMLENFALLSSVSCWHGAKDEXAPSKQCVSVRVSQVTTLKPALSXQ

SEQ ID NO: 1183 - protein, 164 aa, Homo sapiens
  SITE (149): Xaa equals any of the naturally occurring L-amino acids
PVVQQQPTPVTPKKYPLRQTRSSGSETEQVVDFSDRETKNTADHDESPPRTPTGNAPSSESDIDISSPNVSHDESIAKDMSLKDSGSDLSHRPKRRRFHESYNFNMKCPTPGCNSLGHLTGKHERHFSISGCPLYHNLSADECKVRAQXRDKQIEERMLSSQAR

SEQ ID NO: 1184 - protein, 432 aa, Homo sapiens
  SITE (31): Xaa equals any of the naturally occurring L-amino acids
  SITE (35): Xaa equals any of the naturally occurring L-amino acids
  SITE (38): Xaa equals any of the naturally occurring L-amino acids
  SITE (40): Xaa equals any of the naturally occurring L-amino acids
  SITE (44): Xaa equals any of the naturally occurring L-amino acids
  SITE (102): Xaa equals any of the naturally occurring L-amino acids
PQKKKWVECQSTSTVGGQSVKKVDLETLKEXSEFXKVXMXNLDXAQTSGIEEPSETKGSMQKSKFKYKLVPEEETTASENTEITSERQKEGIKLTIRISSRXKKPDSPPKVLEPENKQEKTEKEEEKTNVGRTLRRSPRISRPTAKVAEIRDQKADKKRGEGEDEVEEESTALQKTDKKEILKKSEKDTNSKVSKVKPKGKVRWTGSRTRGRWKYSSNDESEGSGSEKSSAASEEEEEKESEEAILADDDEPCKKCGLPNHPELILLCDSCDSGYHTACLRPPLMIIPDGEWFCPPCQHKLLCEKLEEQLQDLDVALKKKERAERRKERLVYVGISIENIIPPQEPDFSEDQEEKKKDSKKSKANLLERRSTRTRKCISYRFDEFDEAIDEAIEDDIKEADGGGVGRGKDISTITGHRGKDISTILDEERKE

SEQ ID NO: 1185 - protein, 166 aa, Homo sapiens
YIDGTFGRGGHSRLILSQLGEEGRLLAIDRDPQAIAVAKTIDDPRFSIIHGPFSALGEYVAERDLIGKIDGILLDLGVSSPQLDDAERGFSFMRDGPLDMRMDPTRGQSAAEWLQTAEEADIAWVLKTYGEERFAKRIARAIVERNREQPMTRTKELAEVVAAATP

SEQ ID NO: 1186 - protein, 97 aa, Homo sapiens
VEPPDKGKRARGAGSAPFIFFRSVGGEDTTLNRCSCSFRVLVVSAKFEGKPLLQRHRLVNACLAEELPHIHAFEQKTLTPDQWALSDRNEGWDLHSH

SEQ ID NO: 1187 - protein, 60 aa, Homo sapiens
FGGHLQAGIVVLGTVGRTGISAAFLGNTAEQVIDHLRCDLLVIKPDQYQTPVELDDEEDD

SEQ ID NO: 1188 - protein, 185 aa, Homo sapiens
SDRMRSHWKWEMVCTICQEEYSEAPNEMVICDKCGQGYHQLCHTPHIDSSVIDSDEKWLCRQCVFATTTKRGGALKKGPNAKALQVMKQTLPYSVADLEWDAGHKTNVQQCYCYCGGPGDWYLKMLQCCKCKQWFHEACVQCLQKPMLFGDRFYTFICSVCSSGPEYLKRLPLQWVDIAHLCLTT

SEQ ID NO: 1189 - protein, 139 aa, Homo sapiens
  SITE (3): Xaa equals any of the naturally occurring L-amino acids
  SITE (45): Xaa equals any of the naturally occurring L-amino acids
CVXVIIFRPKEKHREFSNLVLHFLNIWGNIFGMANFCRPPSVVPXFTQMISWKCSFFPALQSLQNQLPSGISMFRQSGWKAAGQDSQHRRLPPLEHTKHQLTLTWAWCRFPFRAVKWAVQMMLLEAITEHPAARQASPL

SEQ ID NO: 1190 - protein, 195 aa, Homo sapiens
  SITE (171): Xaa equals any of the naturally occurring L-amino acids
ARGFKKFIRRDFLLDEANGLLPDDKLTLFCEVSVVQDSVNISGHTNTNTLKVPECRLAEDLGNLWENTRFTDCSFFVRGQEFKAHKSVLAARSPVFNAMFEHEMEESKKNRVEINDLDPEVFKEMMRFIYTGRAPNLDKMADNLLAAADKYALERLKVMCEEALCSNLSSXRMLQIPLSLQILHQWQNQFEKHKP

SEQ ID NO: 1191 - protein, 135 aa, Homo sapiens
  SITE (133): Xaa equals any of the naturally occurring L-amino acids
GRLHGEKETRSNPGLSSEPRREGRKWDHEARGASNSSGQGDLNWGEEQNLQNKEEVVIMETDLAEMPEKGALSSQDSPHFQEKSTEEGEVAALRLTARSQETVTFKDVAMDFTPEEWGKLDPAQRDVMLGELXGT

SEQ ID NO: 1192 - protein, 100 aa, Homo sapiens
  SITE (75): Xaa equals any of the naturally occurring L-amino acids
TCHINICLLPSEHEDFLTVAESLKKEFDSPETADLKFRIDGKYIHVHKAVLKIRCEHFRSMFQSYWNEDMKEVIXIDQFSYPVYRAFLQYLYTDTVDLPP

SEQ ID NO: 1193 - protein, 159 aa, Homo sapiens
  SITE (138): Xaa equals any of the naturally occurring L-amino acids
AEHLSELYPKQIRAMLGQFSQAEALLMKAGVQPGTFDGVLMDLGCSSMQLDTPERGFSLRKDGPLDMRMDGGRYPDMPTAADVVNALDQQALASILRTYGEEKHAKKIASAIVQARSIYPITRTQQLASIVAGSLINXQQCLREKIIFTCVCALIPQTP

SEQ ID NO: 1194 - protein, 133 aa, Homo sapiens
GSWAILALIPPAVSTLSIAALVEGGHRLICRAGLKLHEVSTRMFAFGTRLCSRVNILPGSCSTKHIIHFFQFWVLPICYLAGDVVHVGARVAGEAVAALSLLHDQPVPAAGAEQQHGLELRRLQLPAAPPSDW

SEQ ID NO: 1195 - protein, 380 aa, Homo sapiens
  SITE (371): Xaa equals any of the naturally occurring L-amino acids
GTESAPCASARCVRAGESRGPPGSPPAAARTHAAPSERAAPSPAPRPNPSAAGCLLFPGEIMKRGRLPSSSEDSDDNGSLSTTWSQNSRSQHRRSSCSRHEDRKPSEVFRTDLITAMKLHDSYQLNPDEYYVLADPWRQEWEKGVQVPVSPGTIPQPVARVVSEEKSLMFIRPKKYIVSSGSEPPELGYVDIRTLADSVCRYDLNDMDAAWLELTNEEFKEMGMPELDEYTMERVLEEFEQRCYDNMNHAIETEEGLGIEYDEDVVCDVCQSPDGEDGNEMVFCDKCNICVHQACYGILKVPEGSWLCRTCALGVQPKCLLCPKKGGAMKPTRSGTKWVHVSCALWIPEVSIGSPEKMEPITKVSHIPSKXVGASVQPLQ

SEQ ID NO: 1196 - protein, 110 aa, Homo sapiens
  SITE (18): Xaa equals any of the naturally occurring L-amino acids
  SITE (86): Xaa equals any of the naturally occurring L-amino acids
  SITE (93): Xaa equals any of the naturally occurring L-amino acids
  SITE (109): Xaa equals any of the naturally occurring L-amino acids
AAGGSPRPSLLASESLAXPMLSGRLVLGLVSMAGRVCLCQGSAGSGAIGPVEAAIRTKLEEALSPEVLELRNESGGHAVPPGSETXFRVAVVXFRFEGLSPLQRQRLVXA

SEQ ID NO: 1197 - protein, 200 aa, Homo sapiens
  SITE (78): Xaa equals any of the naturally occurring L-amino acids
  SITE (83): Xaa equals any of the naturally occurring L-amino acids
  SITE (114): Xaa equals any of the naturally occurring L-amino acids
ISTCKFPKTVSNPGSSACPPQFLFCSQDHCFCPMGMESQWKQGPRAKHQKNHPGKSRERHVHFPGPLHQRHPSLAATXLPHAXTDVDRLDLLGLEAEIAGPDGRSFSGQQPIGXLSHACALTVEPFLAGGLTQNGILVIVHLTPTGTTWVHQAWGRLGPGAPTCLARGCQAVGIWSAPTPPTAVRGETGLVPINSSSRGA

SEQ ID NO: 1198 - protein, 101 aa, Homo sapiens
  SITE (7): Xaa equals any of the naturally occurring L-amino acids
RGRAARXPPGRPPPFFVPVAGGVSLPPQHGAISSVSQWGSTSPAAVAGSAPLPLPAAAVVHVSFPEVTSALLESLNQQRLQGQLCDVSIRVQGREFRAHRA

SEQ ID NO: 1199 - protein, 255 aa, Homo sapiens
SLARVRGQLRSLRASDLFTYKMLRYPYFCRMYKECLSCWLESGIPNLGVWPKRIHTTAEKYREYEAREQTDQTQVQELHRSQDRDFETMAKLHIPVMVDEVVHCLSPQKGQIFLDMTFGSGGHTKAILQKESDIVLYALDRDPTAYALAEHLSELYPKQIRAMLGQFSQAEALLMKAGVQPGTFDGVLMDLGCSSMQLDTPERGSSLRKDGPLDIRMDGGRNISSLCYLYTERLTTAIYLYCHQDFPGSSHICEQ

SEQ ID NO: 1200 - protein, 242 aa, Homo sapiens
  SITE (42): Xaa equals any of the naturally occurring L-amino acids
  SITE (60): Xaa equals any of the naturally occurring L-amino acids
  SITE (217): Xaa equals any of the naturally occurring L-amino acids
  SITE (224): Xaa equals any of the naturally occurring L-amino acids
  SITE (228): Xaa equals any of the naturally occurring L-amino acids
  SITE (232): Xaa equals any of the naturally occurring L-amino acids
  SITE (238): Xaa equals any of the naturally occurring L-amino acids
RTWVESQHPENCQEVVALVEGVTWMSEEEVLPAGQPAEGTTXCLEVTAQQEEKQEDAAIXPVTVLPEEPVTFQDVAVDFSREEWGLLGPTQRTEYRDVMLETFGHLVSVGWETTLENKELAPNSDIPEEEPAPSLKVQESSRDCALSSTLEDTLQGGVQEVQDTVLKQMESAQEKDLPQKKHFDNRESQANSGALDTNQVSLQKIDNPESQANSGAXDTNQVLXHKIXLENXCANVTXKLKV

SEQ ID NO: 1201 - protein, 132 aa, Homo sapiens
  SITE (45): Xaa equals any of the naturally occurring L-amino acids
  SITE (47): Xaa equals any of the naturally occurring L-amino acids
  SITE (123): Xaa equals any of the naturally occurring L-amino acids
GTKGLHRHSEHRQSPIFKPCPTQQDHVPVVLQHHISVEVLLTPVXVXPLLSGEVHRHILKREQLLPPGWWEHGFHGLVFCKGWDPGRLAELLTAPNLRQAASTRGWALLSGFPGLTRGLSGPXPSANHPLPE

SEQ ID NO: 1202 - protein, 96 aa, Homo sapiens
  SITE (83): Xaa equals any of the naturally occurring L-amino acids
  SITE (96): Xaa equals any of the naturally occurring L-amino acids
TLRLIRNALLQASVSFQDVTVEFSQEEWQHMGPVERTLYRDVMLENYSHLVSVGEHSLPWGSLQSAVLFLPLFLSLPYRNHVXSLLQWQFWFSLFX

SEQ ID NO: 1203 - protein, 98 aa, Homo sapiens
DSVTFDDVAVEFTPEEWALLDTTQKYLYRDVMLENYMNLASVDFFFCLTSEWEIQPRTKRSSLQQGFLKNQIFTGIQMFCIPLPEPTPGPFCTHSDWN

SEQ ID NO: 1204 - protein, 126 aa, Homo sapiens
  SITE (36): Xaa equals any of the naturally occurring L-amino acids
  SITE (93): Xaa equals any of the naturally occurring L-amino acids
  SITE (107): Xaa equals any of the naturally occurring L-amino acids
  SITE (112): Xaa equals any of the naturally occurring L-amino acids
  SITE (119): Xaa equals any of the naturally occurring L-amino acids
  SITE (125): Xaa equals any of the naturally occurring L-amino acids
PLSSVQGLKAAMQIQRVVIPVPTLGHRNPWVARDSXVPARDPAWLQEDKVEEEAMAPGLPTACSQEPVTFADVAVVFTPEEWVVLDSTQRSLXRDVMLENYRNLASXADQLXKPNAVAXLEERGXQ

SEQ ID NO: 1205 - protein, 182 aa, Homo sapiens
  SITE (23): Xaa equals any of the naturally occurring L-amino acids
  SITE (108): Xaa equals any of the naturally occurring L-amino acids
  SITE (129): Xaa equals any of the naturally occurring L-amino acids
  SITE (177): Xaa equals any of the naturally occurring L-amino acids
  SITE (182): Xaa equals any of the naturally occurring L-amino acids
LHWGPWGRLLQTSLRVVGCCRVXLGDATGSGSGAAAGPSSHCPSSDPTVLWKLVQGTCHCDHLDADTCFPTTARKNHGPGVTVIRGRGCGLHPERVAAAGPGAEDPVXGCDAGELQPPALCGLNCLLAXKAQLAQHKSFNRFSPRGCQVSKPAVISSLEQGKEPWMEEEEIRTWSFXRKLTX

SEQ ID NO: 1206 - protein, 92 aa, Homo sapiens
  SITE (57): Xaa equals any of the naturally occurring L-amino acids
KGLTSFCSSKTMAHGSVTFRDVAIDFSQEEWEFLDPAQRDLYRDVMWENYSNFISLXGPSISKPDVITLLDEERKEPGMVVREGTRRYCPGE

SEQ ID NO: 1207 - protein, 100 aa, Homo sapiens
  SITE (100): Xaa equals any of the naturally occurring L-amino acids
AEAQKEISILCPEQNRMAMSQESLTFKDVFVDFTLEEWQQLDSAQKNLYRDVMLENYSHLVSVGYLVAKPDVIFRLGPGEESWMADGGTPVRTCAEVWQX

SEQ ID NO: 1208 - protein, 156 aa, Homo sapiens
  SITE (27): Xaa equals any of the naturally occurring L-amino acids
  SITE (129): Xaa equals any of the naturally occurring L-amino acids
  SITE (135): Xaa equals any of the naturally occurring L-amino acids
HGAATSFARACVRAQMWAPREQLLGWXAEALPAKDSAWPWEEKPRYLGPVTFEDVAVLFTEAEWKRLSLEQRNLYKEVMLENLRNLVSLAESKPEVHTCPSCPLAFGSQQFLSQDELHNHPIPGFHAGXSTPPRXSWPRGSATVHKILLDKIHRGG

SEQ ID NO: 1209 - protein, 184 aa, Homo sapiens
  SITE (46): Xaa equals any of the naturally occurring L-amino acids
  SITE (125): Xaa equals any of the naturally occurring L-amino acids
  SITE (168): Xaa equals any of the naturally occurring L-amino acids
EPTRKLPTARHQSLKGRHLEKPTLTSTMIDFQMLNQLCRTIINPSXIPCLKYCGDQIGPVTFEDVAVLFTEAEWKRLSLEQRNLYKEVMLENLRNLVSLAESKPEVHTCPSCPLAFGSQQFLSQXELHNHPIPGFHAGNQLHPGNPCPEDQPQSQHPSDKNHRGAEAXDQPSGRRRQTLGLEYK

SEQ ID NO: 1210 - protein, 86 aa, Homo sapiens
LTYLRKKLRGRGKKEEEGMALSQGLFTFKDVAIEFSQEEWECLDPAQRALYRDVMLENYRNLLSLDEDNIPPEDGNHPCTSLHFSL

SEQ ID NO: 1211 - protein, 120 aa, Homo sapiens
SSNTTHYRESWYACRYRSGIPGRKRPRQSLVPEEESEMAAAEAVHHIHLQNFSRSLLETLNGQRLGGHFCDVTVRIREASLRAHRCVLAAGSPFFQDKLLLGHSEIRVPPVVPAQTVRHW

SEQ ID NO: 1212 - protein, 178 aa, Homo sapiens
  SITE (135): Xaa equals any of the naturally occurring L-amino acids
  SITE (139): Xaa equals any of the naturally occurring L-amino acids
  SITE (173): Xaa equals any of the naturally occurring L-amino acids
IITLTEKETQKRKKRKEKESVMATQGHLTFKDVAIEFSQEEWKCLEPVQKALYKDVMLENYRNLVFLGISPKCVIKELPPTENSNTGERFQTVALERHQSYDIENLYFREIQKHLHDLEFQWKDGETNDKEVPVXHENXLTGKRDQHSQGDVENNHIENQLTSNFEFTSGLNXRKFQT

SEQ ID NO: 1213 - protein, 129 aa, Homo sapiens
  SITE (39): Xaa equals any of the naturally occurring L-amino acids
GDRRRKARWRLTLFSPLRGGSEARWRRPGWPGPFPRSLXPLQLYSQAPMAAAALRDPAQQGYVTFEDVAVYFSQEEWRLLDDAQRLLYRNVMLENFTLLASLGLASSKTHEITQAGVMGGALHACLGKL

SEQ ID NO: 1214 - protein, 105 aa, Homo sapiens
ASAQVSVTFEDVAVTFTQEEWGQLDAAQRTLYQEVMLETCGLLMSLGCPLFKPELIYQLDHRQELWMATKDLSQSSYPGDNTKPKTTEPTFSHLALPEEVLLQEH

SEQ ID NO: 1215 - protein, 276 aa, Homo sapiens
  SITE (59): Xaa equals any of the naturally occurring L-amino acids
  SITE (138): Xaa equals any of the naturally occurring L-amino acids
  SITE (252): Xaa equals any of the naturally occurring L-amino acids
  SITE (276): Xaa equals any of the naturally occurring L-amino acids
CSAGTEVPASPIETPAAPGSCPRPRSYGGLTDSARGCVVFEDVFVYFSREEWELLDDAXRLLYHDVMLENFALLASLGIAFSRSRAVMKLERGEEPWVYDQVDMTSATEREAQRGLRPGCWHGVEDEEVSSEQSIFVXGVSEVRTLMAELESHPCDICGPILKDTLHLAKYHGGKARQKPYLCGACGKQFWFSTDFDQHQNQPNGGKLFPRKEGRDSVKSCRVHVPEKTLTCGKGRRDFSATSGLLQHQASXSSMKPHKSTKLVSGFLMGQRYPVX

SEQ ID NO: 1216 - protein, 142 aa, Homo sapiens
  SITE (124): Xaa equals any of the naturally occurring L-amino acids
  SITE (127): Xaa equals any of the naturally occurring L-amino acids
  SITE (132): Xaa equals any of the naturally occurring L-amino acids
SSESPGDQVMAAARLLPVPAGPQPLSFQAKLTFEDVAVLLSQDEWDRLCPAQRGLYRNVMMETYGNVVSLGLPGSKPDIISQLERGEDPWVLDRKGAKKSQGLWSDYSDNLKYDHTTACTQQDXLSXPWGMXKPRERVKIQT

SEQ ID NO: 1217 - protein, 261 aa, Homo sapiens
  SITE (142): Xaa equals any of the naturally occurring L-amino acids
  SITE (178): Xaa equals any of the naturally occurring L-amino acids
  SITE (244): Xaa equals any of the naturally occurring L-amino acids
  SITE (247): Xaa equals any of the naturally occurring L-amino acids
  SITE (251): Xaa equals any of the naturally occurring L-amino acids
ETMMQAQESLTLEDVAVDFTWEEWQFLSPAQKDLYRDVMLENYSNLVAVGYQASKPDALSKLERGEETCTTEDEIYSRICSDSGGASGGAYAEIRKIDDPLQHHLQNQSIQKSVKQCHEQNMFGNIVNQNKGHFLLKQDCDXFDLHEKPLKSNLSFENQKRSSGLKNSAEFNRDGKSXFHANHKQFYTEMKFPAIAKPINKSQFIKQQRTHNIENAHVCSECGKASSSCLSLLIIREFTLGEKXHVXQVCXGKSFLQKNPE

SEQ ID NO: 1218 - protein, 189 aa, Homo sapiens
  SITE (50): Xaa equals any of the naturally occurring L-amino acids
  SITE (117): Xaa equals any of the naturally occurring L-amino acids
  SITE (119): Xaa equals any of the naturally occurring L-amino acids
RSSPVVVNGPAESGVVANPSGCRSGGGGSTLDSILLPLQGLEEPEHPSRXVTSARHTKLTVGMATRVRTASIWVPPLQERNSSWDRIRKLQGQESILGQGTPGLQPLPGTPRQKQKXRXIEKVLEWLFISQEQPKITKSWGPLSFMDVFVDFTWEEWQLLDPAQKCLYRSVMLENYSNLVSLGYQHTQT

SEQ ID NO: 1219 - protein, 191 aa, Homo sapiens
NNLKLDEHIVFQGPLSFMDVFVDFTWEEWQLLDPAQKCLYRSVMLENYSNLVSLGYQHTKPDIIFKLEQGEELCMVQAQVPNQTCPNTVWKIDDLMDWHQENKDKLGSTAKSFECTTFGKLCLLSTKYLSRQKPHKCGTHGKSLKYIDFTSDYARNNPNGFQVHGKSFFHSKHEQTVIGIKYCESIESGKN

SEQ ID NO: 1220 - protein, 141 aa, Homo sapiens
DFYLYPERNKRGQMMTAVSLTTRPQESVAFEDVAVYFTTKEWAIMVPAERALYRDVMLENYEAVAFVVPPTSKPALVSHLEQGKESCFTQPQGVLSRNDWRAGWIGYLELRRYTYLAKAVLRRIVSKIFRNRQCWEDRRKA

SEQ ID NO: 1221 - protein, 162 aa, Homo sapiens
  SITE (149): Xaa equals any of the naturally occurring L-amino acids
  SITE (156): Xaa equals any of the naturally occurring L-amino acids
  SITE (162): Xaa equals any of the naturally occurring L-amino acids
TRAPPPRPPGPAAGAVPAASVARPARAEISLMMEGSRQTRVSRPYKISESSKVYRWADHSSTVLQRLNEQRLRGLFCDVVLVADEQRVPAHRNLLAVCSDYFNSMFTIGMREAFQKEVELIGASYIGLKAVVDFCTAGSWCWMAATLTXSWRRLTXCRSGRX

SEQ ID NO: 1222 - protein, 307 aa, Homo sapiens
  SITE (283): Xaa equals any of the naturally occurring L-amino acids
  SITE (293): Xaa equals any of the naturally occurring L-amino acids
IYHPAVVESTICSGIYTQCQFDIMLGGTDCRTFLTSHINLKKTLCDVILMVQERKIPAHRVVLAAASHFFNLMFTTNMLESKSFEVELKDAEPDIIEQLVEFAYTARISVNSNNVQSLLDAANQYQIEPVKKMCVDFLKEQVDASNCLGISVLAECLDCPELKATADDFIHQHFTEVYKTDEFLQLDVKRVTHLLNQDTLTVRAEDQVYDAAVRWLKYDEPNRQPFMVDILAKVRFPLISKNFLSKTVQAEPLIQDNPECLKMVISGMRYHLLSPEDREELVXGTRPRRKKHXLPHSPIWRLSTTVL

SEQ ID NO: 1223 - protein, 168 aa, Homo sapiens
GRMAASGVEKSSKKKTEKKLAAREEAKLLAGFMGVMNNMRKQKTLCDVILMVQERKIPAHRVVLAAASHFFNLMFTTNMLESKSFEVELKDAEPDIIEQLVEFAYTARISVNSNNVQSLLDAANQYQIEPVKKMCVDFLKEQVDASNCLGEAEKVDQSLPECGMLFTV

SEQ ID NO: 1224 - protein, 180 aa, Homo sapiens
  SITE (13): Xaa equals any of the naturally occurring L-amino acids
  SITE (159): Xaa equals any of the naturally occurring L-amino acids
  SITE (161): Xaa equals any of the naturally occurring L-amino acids
  SITE (163): Xaa equals any of the naturally occurring L-amino acids
RYRSGIPGSTHAXAMLMAGQRGAWTMGDVVEKSLEGPLAPSTDEPSQKTGDLVEILNGEKVKFDDAGLSLILQNGLETLRMENALTDVILCVDIQEFSCHRVVLAAASNYFRAMFCNDLKEKYEKRIIIKGVDAETMHTLLDYTYTSKALITKQNVQRXLXAXNLFQFLRMVGCLCQLPH

SEQ ID NO: 1225 - protein, 171 aa, Homo sapiens
  SITE (62): Xaa equals any of the naturally occurring L-amino acids
  SITE (85): Xaa equals any of the naturally occurring L-amino acids
  SITE (126): Xaa equals any of the naturally occurring L-amino acids
  SITE (138): Xaa equals any of the naturally occurring L-amino acids
  SITE (147): Xaa equals any of the naturally occurring L-amino acids
  SITE (154): Xaa equals any of the naturally occurring L-amino acids
  SITE (162): Xaa equals any of the naturally occurring L-amino acids
AARVRIQPRLQLSAVPPPVAARVITETQMDHTSPTYMLANLTHLHSEQLLQGLNLLRQHHEXCDIILRVGDVKIHAHKVVLASVXPYFKAMFTGNLSEKENSEVEFQCIDETALQAIVEYAYTGTXFISQDTVESLLXEQTTPDKTXPERKGGXFLKSQLDXGKLDLEISS

SEQ ID NO: 1226 - protein, 105 aa, Homo sapiens
RVGGGAESGLRGSPEWLSMDPVATHSCHLLQQLHEQRIQGLLCDCMLVVKGVCFKAHKNVLAAFSQYFRSLFQNSSSQKNDVFHWMLKCHGIRQILDSCTLLIRS

SEQ ID NO: 1227 - protein, 158 aa, Homo sapiens
RNCVPPLGCYRSRVKFHSDIKMQYSHHCEHLLERLNKQREAGFLCDCTIVIGEFQFKAHRNVLASFSEYFGAIYRSTSENNVFLDQSQVKADGFQKLLEFIYTGTLNLDSWNVKEIHQAADYLKVEEVVTKCKIKMEDFAFIANPSLQRYLVLLETLN

SEQ ID NO: 1228 - protein, 199 aa, Homo sapiens
  SITE (185): Xaa equals any of the naturally occurring L-amino acids
SRSRVKFHSDIKMQYSHHCEHLLERLNKQREAGFLCDCTIVIGEFQFKAHRNVLASFSEYFGAIYRSTSENNVFLDQSQVKADGFQKLLEFIYTGTLNLDSWNVKEIHQAADYLKVEEVVTKCKIKMEDFAFIANPSSTEISSITGNIELNQQTCLLTLRDYNNREKSEVSTDLIQANPKQGALXKKSSQTEKRRRVST

SEQ ID NO: 1229 - protein, 121 aa, Homo sapiens
WLLKKMAETSPEPSGQLVVHSDAHSDTVLASFEDQRKKGFLCDITLIVENVHFRAHKALLAASSEYFSMMFAEEGEIGQSIYMLEGMVADTFGILLEFIYTGYLHASEEKYRANPGYCFSS

SEQ ID NO: 1230 - protein, 164 aa, Homo sapiens
  SITE (2): Xaa equals any of the naturally occurring L-amino acids
  SITE (32): Xaa equals any of the naturally occurring L-amino acids
  SITE (34): Xaa equals any of the naturally occurring L-amino acids
  SITE (84): Xaa equals any of the naturally occurring L-amino acids
  SITE (119): Xaa equals any of the naturally occurring L-amino acids
  SITE (138): Xaa equals any of the naturally occurring L-amino acids
  SITE (140): Xaa equals any of the naturally occurring L-amino acids
  SITE (143): Xaa equals any of the naturally occurring L-amino acids
  SITE (161): Xaa equals any of the naturally occurring L-amino acids
AXLASCSPFFQLFYKERELDKRDLECIHNEIXTXPAFGLLLDFMYAGQLTLRGDTPVEDVLAAATNLHMNDIVKVCKRRLQARXLAEADSTKKEEETNSQLPSLEFLSSTSRGTQPSLXSAETSGHWGKGEWKGSAAXSXTVXPPDEPPMSSGGWTLHSLXMGD

SEQ ID NO: 1231 - protein, 151 aa, Homo sapiens
  SITE (148): Xaa equals any of the naturally occurring L-amino acids
TSRQHLLCRMSLSENSVFAYESSVHSTNVLLSLNDQRKKDVLCDVTIFVEGQRFRAHRSVLAACSSYFHSRIVGQADGELNITLPEEVTVKGFEPLIQFAYTAKLILSKENVDEVCKCVEFLSVHNIEESCFQFLKFKFLDSTADQQXCPR

SEQ ID NO: 1232 - protein, 153 aa, Homo sapiens
  SITE (104): Xaa equals any of the naturally occurring L-amino acids
  SITE (106): Xaa equals any of the naturally occurring L-amino acids
  SITE (122): Xaa equals any of the naturally occurring L-amino acids
  SITE (137): Xaa equals any of the naturally occurring L-amino acids
  SITE (140): Xaa equals any of the naturally occurring L-amino acids
  SITE (144): Xaa equals any of the naturally occurring L-amino acids
KMDLANHGLILLQQLNAQREFGFLCDCTVAIGDVYFKAHKSVLASFSNYFKMLFVHQTSECVRLKPTDIQPDIFSYLLHLMYTGKMAPQLIDPVRLEQGIKFLXAXPLIQEASLASQGAFSXPDQVFPLASSLYGIXIAXHQLXQATKIASAP

SEQ ID NO: 1233 - protein, 153 aa, Homo sapiens
  SITE (43): Xaa equals any of the naturally occurring L-amino acids
RRGRVGGKDNRAGTRGVRVTAASREQTSVGTVRRNGAAGQELXWAAFIPRGVYPQALLLFPILVTFEEAMETPTPLPPVPASPTCNPAPRTIQIEFPQHSSSLLESLNRHRLEGKFCDVSLLVQGRELRAHKAVLAVPLLTSMTSCFWGMRLV

SEQ ID NO: 1234 - protein, 136 aa, Homo sapiens
PLPRRRLSVPRSASFGHTVTSGGGSRRPGMAAWSPAAAAPLLRGIRGLPLHHRMFATQTEGELRVTQILKEKFPRATAIKVTDISGGCGAMYEIKIESEEFKEKRTVQQHQMVNQALKEEIKEMHGLRIFTSVPKR

SEQ ID NO: 1235 - protein, 494 aa, Homo sapiens
  SITE (14): Xaa equals any of the naturally occurring L-amino acids
  SITE (488): Xaa equals any of the naturally occurring L-amino acids
  SITE (493): Xaa equals any of the naturally occurring L-amino acids
  SITE (494): Xaa equals any of the naturally occurring L-amino acids
SHWGLIQQRRHTWXMAAGSEPESVEASPVVVEKSNSYPHQLYTSSSHHSHSYIGLPYADHNYGARPPPTPPASPPPSVLISKNEVGIFTTPNFDETSSATTISTSEDGSYGTDVTRCICGFTHDDGYMICCDKCSVWQHIDCMGIDRQHIPDTYLCERCQPRNLDKERAVLLQRRKRENMSDGDTSATESGDEVPVELYTAFQHTPTSITLTASRVSKVNDKRRKKSGEKEQHISKCKKAFREGSRKSSRVKGSAPEIDPSSDGSNFGWETKIKAWMDRYEEANNNQYSEGVQREAQRIALRLGNGNDKKEMNKSDLNTNNLLFKPPVESHIQKNKKILKSAKDLPPDALIIEYRGKFMLREQFEANGYFFKRPYPFVLFYSKFHGLEMCVDARTFGNEARFIRRSCTPNAEVRHEIQDGTIHLYIYSIHSIPKGTEITIAFDFDYGNCKYKVDCACLKENPECPVLKRSSESMENINSGYETRRKKXKKRGXX

SEQ ID NO: 1236 - protein, 75 aa, Homo sapiens
  SITE (5): Xaa equals any of the naturally occurring L-amino acids
WQQPXLLPVPAGPQAKLTFEDVAVLLSQDEWDRLCPAQRGLYRNVMMETYGNVDSLDNLKYDHTTAWHNKTVYLG

SEQ ID NO: 1237 - protein, 105 aa, Homo sapiens
  SITE (17): Xaa equals any of the naturally occurring L-amino acids
SRLGVMEEIRRQGKLCXVTLKIGDHKFSAHRIVLAASIPYFHAMFTNDMMECKQDEIVMQGMDPSALEALINFAYNGNLAIDQQNVQSLLMGASFLQLQSIKDAC

SEQ ID NO: 1238 - protein, 154 aa, Homo sapiens
  SITE (40): Xaa equals any of the naturally occurring L-amino acids
  SITE (140): Xaa equals any of the naturally occurring L-amino acids
  SITE (145): Xaa equals any of the naturally occurring L-amino acids
GHEIEGSVQLSCSVKEEPNVDGQEVAPSSPPLAAQSPEGXHGHQEPASTSFHPPRIQEEWGLLDRSQKELYWDAMLEKYGTVVSLGLPPHQPEAQAQSELGMLLTGTGVCRSLRSGNESEGPPGCPEASRPRPGPAAWRXCLGCXLPHCGPGQR

SEQ ID NO: 1239 - protein, 105 aa, Homo sapiens
  SITE (36): Xaa equals any of the naturally occurring L-amino acids
  SITE (43): Xaa equals any of the naturally occurring L-amino acids
DFSKISYLHHQVDTFPSTQNYLQSFLKQIKPASRTXSLDEFPXGVEPVILDSVTFDDLAVDFTPEEWTLLDPTQRNLYRDVMLENYKNLATVGYQLFKPSLISWL

SEQ ID NO: 1240 - protein, 378 aa, Homo sapiens
  SITE (51): Xaa equals any of the naturally occurring L-amino acids
  SITE (76): Xaa equals any of the naturally occurring L-amino acids
  SITE (358): Xaa equals any of the naturally occurring L-amino acids
GGGPGGRVAAHSGPSGGSAMRRVTLFLNGSPKNGKVVAVYGTLSDLLSVAXSKLGIKATSVYNGKGGLIDDIALIXDDDVLFVCEGEPFIDPQTDSKPPEGLLGFHTDWLTLNVGGRYFTTTRSTLVNKEPDSMLAHMFKDKGVWGNKQDHRGAFLIDRSPEYFEPILNYLRHGQLIVNDGINLLGVLEEARFFGIDSLIEHLEVAIKNSQPPEDHSPISRKEFVRFLLATPTKSELRCQGLNFSGADLSRLDLRYINFKMANLSRCNLAHANLCCANLERADLSGSVLDCANLQGVKMLCSNAEGASLKLCNFEDPSGLKANLEGVDMEGSQMTGINLRVATLKNAKLKNCNLRGAXLAGTDLENCDLLGVIFKKPT

SEQ ID NO: 1241 - protein, 141 aa, Homo sapiens
  SITE (50): Xaa equals any of the naturally occurring L-amino acids
  SITE (68): Xaa equals any of the naturally occurring L-amino acids
  SITE (69): Xaa equals any of the naturally occurring L-amino acids
VKPPVADSLANPLQLTPMNSLATSVFSIAILFDGDEDSASGGGVVAIDNXIEQAMDLVKSHLMYAVRXXVEVLKEQIKELVERNSLLERENALLKSLSSNDQLSQLPTQQANPGSTSQQQAVIAQPPQPTQPPQQPNVSSA

SEQ ID NO: 1242 - protein, 120 aa, Homo sapiens
LLRTECCPQECHQVINCASGGGVVAIDNKIEQAMDLVKSHLMYAVREEVEVLKEQIKELVERNSLLERENALLKSLSSNDQLSQLPTQQANPGSTSQQQAVIAQPPQPTQPPQQPNVSSA

SEQ ID NO: 1243 - protein, 224 aa, Homo sapiens
  SITE (15): Xaa equals any of the naturally occurring L-amino acids
  SITE (94): Xaa equals any of the naturally occurring L-amino acids
  SITE (185): Xaa equals any of the naturally occurring L-amino acids
  SITE (212): Xaa equals any of the naturally occurring L-amino acids
LLYPACISVQEESFXMKVSLGNGEMGVSAHLQPCKAGTTRFFTSNTHSSVVLQGFDQLRIEGLLCDVTLVPGDGDEIFPVHRAMMASASDYFKXMFTGGMKEQDLMCIKLHGVNKVGLKKIIDFIYTAKLSLNMDNLQDTLEAASFLQILPVLDFCKVFLISGVSLDNCVEVGRIANTYNLIEVXKYVNNFILKNFPALLSTGEFLKLPFEXLAFVLSSNSLST

SEQ ID NO: 1244 - protein, 404 aa, Homo sapiens
  SITE (16): Xaa equals any of the naturally occurring L-amino acids
GPGREVALDACAYPPXTLKPETQPPEKRRRTIEDFNKFCSFVLAYAGYIPPSKEESDWPASGSSSPLRGESAADSDGWDSAPSDLRTIQTFVKKAKSSKRRAAQAGPTQPGPPRSTFSRLQAPDSATLLEKMKLKDSLFDLDGPKVASPLSPTSLTHTSRPPAALTPVPLSQGDLSHPPRKKDRKNRKLGPGAGAGFGVLRRPRPTPGDGEKRSRIKKSKKRKLKKAERGDRLPPPGPPQAPPSDTDSEEEEEEEEEEEEEEMATVVGGEAPVPVLPTPPEAPRPPATVHPEGVPPADSESKEVGSTETSQDGDASSSEGEMRVMDEDIMVESGDDSWDLITCYCRKPFAGRPMIECSLCGTWIHLSCAKIKKTNVPDFFYCQKCKELRPEARRLGGPPKSGEP

SEQ ID NO: 1245 - protein, 564 aa, Homo sapiens
KMANAEVSVPVGDVVVVPTEGNEGENPEDTKTQVILQLQPVQQGIYEAGSENNTAVVAVETHTIHKIEEGIDTGTIEANEDMEIAYPITCGESKAILLWKKFVCPGINVKCVKFNDQLISPKHFVHLAGKSTLKDWKRAIRLGGIMLRKMMDSGQIDFYQHDKVCSNTCRSTKFDLLISSARAPVPGQQTSVVQTPTSADGSITQIAISEESMEEAGLEWNSALTAAVTMATEEGVKKDSEEISEDTLMFWKGIADVGLMEEVVCNIQKEIEELLRGVQQRLIQAPFQVTDAAVLNNVAHTFGLMDTVKKVLDNRRNQVEQGEEQFLYTLTDLERQLEEQKKQGQDHRLKSQTVQNVVLMPVSTPKPPKRPRLQRPASTTVLSPSPPVQQPQFTVISPITITPVGQSFSMGNIPVATLSQGSSPVTVHTLPSGPQLFRYATVVSSAKSSSPDTVTIHPSSSLALLSSTAMQDGSTLGNMTTMVSPVELVAMESGLTSAIQAVESTSEDGQTIIEIDPAPDPEAEDTEGKAVILETELRTEEKVVAEMEEHQHQVHNVEIVVLED

SEQ ID NO: 1246 - protein, 149 aa, Homo sapiens
  SITE (3): Xaa equals any of the naturally occurring L-amino acids
  SITE (67): Xaa equals any of the naturally occurring L-amino acids
  SITE (113): Xaa equals any of the naturally occurring L-amino acids
CAXRERLKNPNAPMLPPPKNKEDFEKTLSQAIVKVVIPTERNLLALIHRMIEFVVREGPMFEAMIMXREINNPMFRFLFENQTPAHVYYRWKLYSILQGDSPTKWRTEDFRMXKNGSFWRPPPLNPYLHGMSEEQETEAFVEEPVKGST

SEQ ID NO: 1247 - protein, 107 aa, Homo sapiens
  SITE (34): Xaa equals any of the naturally occurring L-amino acids
  SITE (35): Xaa equals any of the naturally occurring L-amino acids
SSPTAMEAEETMECLQEFPEHHKMILDRLNEQRXXDRFTDITLIVDGHHFKAHKAVLAACSKFFYKFFQEFTQEPLVEIEGVSKMAFRHLIEFTYTAKLMIQGEEEA

SEQ ID NO: 1248 - protein, 112 aa, Homo sapiens
  SITE (55): Xaa equals any of the naturally occurring L-amino acids
  SITE (68): Xaa equals any of the naturally occurring L-amino acids
  SITE (90): Xaa equals any of the naturally occurring L-amino acids
MFPVLEPHQVGLIRSYNSKTMTCNWGRPLKFCPTKYMKFQELVTFRDVAIDFSRXEWEYLDPNQRDLXRDVMLENYRNLVSLGGHSISKXVVVDLLERGKEPWMILRGRNTV

SEQ ID NO: 1249 - protein, 151 aa, Homo sapiens
  SITE (31): Xaa equals any of the naturally occurring L-amino acids
  SITE (121): Xaa equals any of the naturally occurring L-amino acids
  SITE (132): Xaa equals any of the naturally occurring L-amino acids
  SITE (134): Xaa equals any of the naturally occurring L-amino acids
  SITE (143): Xaa equals any of the naturally occurring L-amino acids
GDLGIKEGMHIITPSASENGSHLFVPWEPIXPFEEKTKVERMVEDYLASGYQDSVTFDDVAVDFTPEEWALLDTTEKYLYRDVMLENYMNLASVEWEIQPRTKRSSLQQGFLKNQIFSGIXMTRGYSGWKLXDXKNCGEVFRXTVFALRPT

SEQ ID NO: 1250 - protein, 538 aa, Homo sapiens
  SITE (263): Xaa equals any of the naturally occurring L-amino acids
  SITE (273): Xaa equals any of the naturally occurring L-amino acids
  SITE (332): Xaa equals any of the naturally occurring L-amino acids
  SITE (346): Xaa equals any of the naturally occurring L-amino acids
  SITE (347): Xaa equals any of the naturally occurring L-amino acids
  SITE (351): Xaa equals any of the naturally occurring L-amino acids
  SITE (394): Xaa equals any of the naturally occurring L-amino acids
KLAAAGARPGTAPEPPEPPGLGGASAPPEPPASPAPHSIPTGWGRARCGCVGSGAELQNPRTHFVLSPHCFMGGIMAPKDIMTNTHAKSILNSMNSLRKSNTLCDVTLRVEQKDFPAHRIVLAACSDYFCAMFTSELSEKGKPYVDIQGLTASTMEILLDFVYTETVHVTVENVQELLPAACLLQLKGVKQACCEFLESQLDPSNCLGIRDFAETHNCVDLMQAAEVFSQKHFPEVVQHEEFILLSQGEVEKLIKCDEIQVDXEEPVFEAVIXWVKHAKKEREESLPNLLQYVRMPLLTPRYITDVIDAEPFIRCSLQCRDLVDEAKKFHLXPELRSQMQGPRTRXXLDMXYVSGGFDGSRRHTSMERYDPNIDQWSMLGDMQTAREGAGLVVXSGVIYCLGGYDGLNILNSVEKYDPHTGHWTNVTPMATKRSGAGVALLNDHIYVVGGFDGTAHLSSVEAYNIRTDSWTTVTSMTTPRCYVGATVLRGRLYAIAGYDGNSLLSSIECYDPIIDSWEVVTSMGTQRCDAGVCVLREK

SEQ ID NO: 1251 - protein, 252 aa, Homo sapiens
RPRPHGRTLGRAAAGRAQRLRHRCAWWPDSKWDRRTRSLACQGKLMENRALDPGTRDSYGATSHLPNKGALAKVKNNFKDLMSKLTEGQYVLCRWTDGLYYLGKIKRVSSSKQSCLVTFEDNSKYWVLWKDIQHAGVPGEEPKCNICLGKTSGPLNEILICGKCGLGYHQQCHIPIAGSADQPLLTPWFCRRCIFALAVRVSLPSSPVPASPASSSGADQRLPSQSLSSKQKGHTWALETDSASATVLGQDL

SEQ ID NO: 1252 - protein, 190 aa, Homo sapiens
  SITE (41): Xaa equals any of the naturally occurring L-amino acids
  SITE (101): Xaa equals any of the naturally occurring L-amino acids
  SITE (160): Xaa equals any of the naturally occurring L-amino acids
  SITE (176): Xaa equals any of the naturally occurring L-amino acids
  SITE (185): Xaa equals any of the naturally occurring L-amino acids
DFALLQEEHSGDQENGHRAPESQKRGVRGIQGCGCVLHPGXVEVVEPCSEGPWHREVMLETYNHLVSLEIPSSKPKLIAQLERGEAPWREERKCPLDLCPXSKPEIQLSPSCPLIFSSQQALSQHVWLSHLSQLFSSLWAGNPLHLGKTLSRKIRNQQQXPFCFNGQADGFQEGEXPDPVWGGKXNGLSK

SEQ ID NO: 1253 - protein, 264 aa, Homo sapiens
  SITE (35): Xaa equals any of the naturally occurring L-amino acids
  SITE (222): Xaa equals any of the naturally occurring L-amino acids
  SITE (255): Xaa equals any of the naturally occurring L-amino acids
  SITE (259): Xaa equals any of the naturally occurring L-amino acids
  SITE (261): Xaa equals any of the naturally occurring L-amino acids
  SITE (263): Xaa equals any of the naturally occurring L-amino acids
RGLQRKDWSSLSYLKTMAQGSVSFNDVTVDFTQEXWQHLDHAQKTLYMDVMLENYAHLISVGCHMTKPDVILKLEREKEPWTSCAGHTCLEENWKAEDFLVKFKEHQEKYSRSVVSINHKKLVKEKSKIYEKTFTLGKNPVNSKNLPPEYDTHGRILKNVSELIISNLNPARKRLSEYNGYGKSLLSTKQETTHPEVKSHNQSARAFSHNEVLMQYQKTETXAQSFGYNDCEKSFLQRGGLITHSRPYKGENPQXFPFXGXKXL

SEQ ID NO: 1254 - protein, 549 aa, Homo sapiens
  SITE (21): Xaa equals any of the naturally occurring L-amino acids
  SITE (290): Xaa equals any of the naturally occurring L-amino acids
  SITE (297): Xaa equals any of the naturally occurring L-amino acids
  SITE (464): Xaa equals any of the naturally occurring L-amino acids
GKSLLQQLENVTKERQIKLLXQQNDITGLSRQVKHVMNFTNWAIASGSSTALLYSKRLITFQLRHILKARCDPVPAANGAIRFHCDPTFWAKNVVNLGNLVIESKPAPGYTPNVVVGQVPPGTNHISKTPGQINLAQLRLQHMQQQVYAQKHQQLQQMRMQQPPAPVPTTTTTTQQHPRQAAPQMLQQQPPRLISVQTMQRGNMNCGAFQAHQMRLAQNAARIPGIPRHSGPQYSMMQPHLQRQHSNPGHAGPFPVVSVHNTTINPTSPTTATMANANRGPTSPSVTAIXLIPSVTXPENLPSLPDIPPIQLEDAGSSSLDNLLSRYISGSHLPPQPTSTMNPSPGPSALSPGSSGLSNSHTPVRPPSTSSTGSRGSCGSSGRTAEKTSLSFKSDQVKVKQEPGTEDEICSFSGGVKQEKTEDGRRSACMLSSPESSLTPPLSTNLHLESELDALASLENHVKXEPADMNESCKQSGLSSLVNGKSPIRSLMHRSARIGGDGNNKDDDPNEDWCAVCQNGGDLLCCEKCPKVFHLTCHVPTLLSFPRYQ

SEQ ID NO: 1255 - protein, 189 aa, Homo sapiens
  SITE (67): Xaa equals any of the naturally occurring L-amino acids
WSLSSRAVMEEIPAQEAAGSPRVQFQSLETQSECLSPEPQFVQDTDMEQGLTGAPPVPQVPALPREXSPGDQAAALLTARYQEFVTFEDVAVHLTREEWGYLDPVQRDLYREVMLENYGNVVSLGILLRLPTTRIHSVNSCPALSHTQASAFSGETLAVLTAGISKRWPKYRLPIDIARPCSETPFPRL

SEQ ID NO: 1256 - protein, 82 aa, Homo sapiens
  SITE (15): Xaa equals any of the naturally occurring L-amino acids
  SITE (18): Xaa equals any of the naturally occurring L-amino acids
  SITE (59): Xaa equals any of the naturally occurring L-amino acids
NASTLTINIFNKIFXCLXHHDSCGIIPFDSFFSIIQGSFPSSNNMITYGLVTERPAYRXNIELFKLWSSIMRGHHKRDHRNG

SEQ ID NO: 1257 - protein, 188 aa, Homo sapiens
GTRALPRRCGSSSLLPSSAPSVGRSLLPASPPRLALWDRAPDPPAPPEDPETAPAMEEDQELERKISGLKTSMAEGERKTALEMVQAAGTDRHCVTFVLHEEDHTLGNSLRYMIMKNPEVEFCGYTTTHPSESKINLRIQTRGTLPAVEPFQRGLNELMNVCQHVLDKFEASIKDYKDQKASRNESTF

SEQ ID NO: 1258 - protein, 268 aa, Homo sapiens
  SITE (162): Xaa equals any of the naturally occurring L-amino acids
  SITE (209): Xaa equals any of the naturally occurring L-amino acids
  SITE (264): Xaa equals any of the naturally occurring L-amino acids
  SITE (265): Xaa equals any of the naturally occurring L-amino acids
  SITE (268): Xaa equals any of the naturally occurring L-amino acids
LEAEVVVGAFATAWDAAEWSVQVRGSLAGVVRECAGSGDMEGDGSDPEPPDAGEDSKSENGENAPIYCICRKPDINCFMIGCDNCNEWFHGDCIRITEKMAKAIREWYCRECREKDPKLEIRYRHKKSRERDGNERDSSEPRDEGGGRKRPVPDPDLQRRAXSGTGVGAMLARGSASPHKSSPQPLVATPSQHHQQQQQQIKRSARMCXECEACRRTEDCGHCDFCRDMKKFGGPNKIRQKCRLRQCQLRPGNRTSTFLPRSYXXRPX

SEQ ID NO: 1259 - protein, 164 aa, Homo sapiens
  SITE (102): Xaa equals any of the naturally occurring L-amino acids
  SITE (107): Xaa equals any of the naturally occurring L-amino acids
  SITE (151): Xaa equals any of the naturally occurring L-amino acids
PRMATQRKHLVKDFNPYITCYICKGYLIKPTTVTECLHTFCKTCIVQHFEDSNDCPRCGNQVHETNPLEMLRLDNTLEEIIFKLVPGLREQELERESEFWKXNKPQXNGQDDTSKADKPKVDEEGDENEDDKDYPQEVTHKLAICLGCFTXLMGPFGGHVGKGF

SEQ ID NO: 1260 - protein, 205 aa, Homo sapiens
  SITE (73): Xaa equals any of the naturally occurring L-amino acids
QRRAAAGRGAPFRALPDGRRGHGAAQRSVSSVAGMGMDPSTAGGVPFGLYTPASRGTGDSERAPGGGGSASDXTYAHGNGYQETGGGHHRDGMLYLGSRASLADALPLHIAPRWFSSHSGFKCPICSKSVASDEMEMHFIMCLSKPRLSYNDDVLTKDAGECVICLEELLQGDTIARLPCLCIYHKSCIDSWFEVNRSCPEHPAD

SEQ ID NO: 1261 - protein, 292 aa, Homo sapiens
  SITE (9): Xaa equals any of the naturally occurring L-amino acids
QVGSRERRXSLHANSKLFRIKNGSCGGTCKNKVTVSKPVWDFLSKETPARLARLREEHRVSILIDGETSDIYVLQLSPQGPPPAPPNGLYLARKALKGLLKEAEKELKKAQRQGELMGCLALGGGGEHPEMHRAGPPPLRAAPLLPPGASGLPPPPPPLPPPLPPRLREEAEEQESTCPICLGEIQNAKTLEKCRHSFCEGCITRALQVKKACPMCGRFYGQLVGNQPQNGRMLVSKDATLLLPSYEKYGTIVIQYVFPPGVQGVRRPWPALTLWLSPSSDLGKPGEGECAC

SEQ ID NO: 1262 - protein, 174 aa, Homo sapiens
  SITE (117): Xaa equals any of the naturally occurring L-amino acids
PKGIQETEEMLKVGATLTGVGELVLDNNSVRLQPPKQGMQYYLSSQDFDSLLQRQESSVRLWKVLALVFGFATCATLFFILRKQYLQRQERLRLKQMQEEFQEHEAQLLSRAKPEDXESLKSACVVCLSSFKSCVFLECGHVCSCTECYRALPEPKKCPICRQAITRVIPLYNS

SEQ ID NO: 1263 - protein, 617 aa, Homo sapiens
GTRECPLCLVRLPPERAPRLLSCPHRSCRDCLRHYLRLEISESRVPISCPECSERLNPHDIRLLLADPPLMHKYEEFMLRRYLASDPDCRWCPAPDCGYAVIAYGCASCPKLTCEREGCQTEFCYHCKQIWHPNQTCDMARQQRAQTLRVRTKHTSGLSYGQESGPDDIKPCPRCSAYIIKMNDGSCNHMTCAVCGCEFCWLCMKEISDLHYLSPSGCTFWGKKPWSRKKKILWQLGTLIGAPVGISLIAGIAIPAMVIGIPVYVGRKIHSRYEGRKTSKHKRNLAITGGVTLSVIASPVIAAVSVGIGVPIMLAYVYGVVPISLCRGGGCGVSTANGKGVKIEFDEDDGPITVADAWRALKNPSIGESSIEGLTSVLSTSGSPTDGLSVMQGPYSETASFAALSGGTLSGGILSSGKGKYSRLEVQADVQKEIFPKDTASLGAISDNASTRAMAGSIISSYNPQDRECNNMEIQVDIEAKPSHYQLVSGSSTEDSLHVHAQMAENEEEGSGGGGSEEDPPCRHQSCEQKDCLASKPWDISLAQPESIRSDLESSDAQSDDVPDITSDECGSPRSHTAACPSTPRAQGAPSPSAHMNLSALAEGQTVLKPEGGEARV

SEQ ID NO: 1264 - protein, 124 aa, Homo sapiens
CYQDMKSAVITPCSHFFHAGCLKKWLYVQETCPLCHCHLKNSSQLPGLGTEPVLQPHAGAEQNVMFQEGTEPPGQEHTPGTRIQEGSRDNNEYIARRPDNQEGAFDPKEYPHSAKDEAHPVESA

SEQ ID NO: 1265 - protein, 323 aa, Homo sapiens
  SITE (279): Xaa equals any of the naturally occurring L-amino acids
  SITE (299): Xaa equals any of the naturally occurring L-amino acids
  SITE (321): Xaa equals any of the naturally occurring L-amino acids
RRVSDNSAECVVCLSDVRDTLILPCRHLCLCNTCADTLRYQANNCPICRLPFRALLQIRAMRKKLGPLSPTSFNPIISSQTSDSEEHPSSENIPPGYEVVSLLEALNGPLTPSPAVPPLHVLGDGHLSGMLPSYGSDGHLPPVRTISPLDRLSDSSSQGLKLKKSLSKSTSQNSSVLHEEEDEHSCSESETQLSQRPSVQHLGEECGVTPESENLTLSSSGAIDQSSCTGTPLSSTISSPEGPASSSLAQSVMSMASSQISTDTVSSMSGSYIAPGTEXEGEALSSPQPASRAPSEEGXGLPAESPDSNFAGLPAGRAGCXGK

SEQ ID NO: 1266 - protein, 225 aa, Homo sapiens
  SITE (37): Xaa equals any of the naturally occurring L-amino acids
  SITE (65): Xaa equals any of the naturally occurring L-amino acids
  SITE (166): Xaa equals any of the naturally occurring L-amino acids
HPEKFPELPAASCFPPAPRPTPTLAPKRAWPSDTEIXVNQACGGDMPALEGAPHTPPLPRRPRKXSSELGFPRVAPEDEVIVNQYVIRPGPSASAASSAAAGEPLECPTCGHSYNVTQRRPRVLSCLHSVCEQCLQILYESCPKYKFISCPTCRRETVLFTDYGLXALAVNTSILSRLPPEALTAPSGGQWGAEPEGSCYQTFRQYCGAACTCHVRNPLSACSIM

SEQ ID NO: 1267 - protein, 165 aa, Homo sapiens
  SITE (118): Xaa equals any of the naturally occurring L-amino acids
CGVDSGFEAPRLGEQGGDFGYGGYLFPGYGVGKQDVYYGVAETSPPLWAGQENATPTSVLFSSASSSSSSSAKARAGPPGAHRSPATSAGPELAGLPRRPPGEPLQGFSKLGGGGLRXPGGGRDCMVCFESEVTAALVPCGHNLFCMECAVRICERTDPECPSAT

SEQ ID NO: 1268 - protein, 374 aa, Homo sapiens
PTGSTVSGAWRSCCTTWASCGLSWPAQPCQGTPLSATLSLVMSQCCRKIKDTVQKLASDHKDIHSSVSRVGKAIDRNFDSEICGVVSDAVWDAREQQQQILQMAIVEHLYQQGMLSVAEELCQESTLNVDLDFKQPFLELNRILEALHEQDLGPALEWAVSHRQRLLELNSSLEFKLHRLHFIRLLAGGPAKQLEALSYARHFQPFARLHQREIQVMMGSLVYLRLGLEKSPYCHLLDSSHWAEICETFTRDACSLLGLSVESPLSVSFASGCVALPVLMNIKAVIEQRQCTGVWNHKDELPIEIELGMKCWYHSVFACPILRQQTSDSNPPIKLICGHVISRDALNKLINGGKLKCPYCPMEQNPADGKRIIF

SEQ ID NO: 1269 - protein, 122 aa, Homo sapiens
  SITE (94): Xaa equals any of the naturally occurring L-amino acids
  SITE (107): Xaa equals any of the naturally occurring L-amino acids
RRQLGVALIPSHRMDYKSSLIQDGNPMENLEKQLICPICLEMFTKPVVILPCQHNLCRKCANDIFQAANPYWTSRGSSVSMSGSRFRCPTCRHXVIMDRHGVYGLAXRTAGWKTSSTSTNKE

SEQ ID NO: 1270 - protein, 230 aa, Homo sapiens
  SITE (4): Xaa equals any of the naturally occurring L-amino acids
  SITE (189): Xaa equals any of the naturally occurring L-amino acids
  SITE (192): Xaa equals any of the naturally occurring L-amino acids
  SITE (193): Xaa equals any of the naturally occurring L-amino acids
  SITE (194): Xaa equals any of the naturally occurring L-amino acids
  SITE (213): Xaa equals any of the naturally occurring L-amino acids
  SITE (223): Xaa equals any of the naturally occurring L-amino acids
  SITE (229): Xaa equals any of the naturally occurring L-amino acids
  SITE (230): Xaa equals any of the naturally occurring L-amino acids
DGAXPCMHTFCAACYSGWMERSSLCPTCRCPVERICKNHILNNLVEAYLIQHPDKSRSEEDVQSMDARNKITQDMLQPKVRRSFSDEEGSSEDLLELSDVDSESSDISQPYVVCRQCPEYRRQAAQPPHCPAPEGEPGAPQALGDAPSTSVSLTTVRITCALCKEATPCAPAASAHARPESGREQDPRXALXXXPPVLGLHPDRLLRLLAPFXTQLGDSVWTXADNTAXX

SEQ ID NO: 1271 - protein, 348 aa, Homo sapiens
  SITE (335): Xaa equals any of the naturally occurring L-amino acids
TSSGRENTVSWLTAGEENALFLWQASVGSVIEMMAGCGEIDHSINMLPTNRKANESCSNTAPSLTVPECAICLQTCVHPVSLPCKHVFCYLCVKGASWLGKRCALCRQEIPEDFLDKPTLLSPEELKAASRGNGEYAWYYEGRNGWWQYDERTSRELEDAFSKGKKNTEMLIAGFLYVADLENMVQYRRNEHGRRRKIKRDIIDIPKKGVAGLRLDCDANTVNLARESSADGADSVSAQSGASVQPLVSSVRPLTSVDGQLTSPATPSPDASTSLEDSFAHLQLSGDNTAERSHRGEGEEDHESPSSGRVPAPDTSIEETESDASSDSEDVSAVXCTALLDPTETFGF

SEQ ID NO: 1272 - protein, 147 aa, Homo sapiens
TIGTRNLQKYVSRTSVVFVSISFIVLMIISLAWLVFYYIQRFRYANARDRNQRRLGDAAKKAISKLQIRTIKKGDKETESDFDNCAVCIEGYKPNDVVRILPCRHLFHKSCVDPWLLDHRTCPMCKMNILKSPRDSAQCRLHGRLAH

SEQ ID NO: 1273 - protein, 94 aa, Homo sapiens
NGLGAQLPGLQPSDTSGSSSSSSSSSSSSSSSSGLRRKGSRDCSVCFESEVIAALVPCGHNLFCMECANRICEKSEPECPVCHTAVTQAIRIFS

SEQ ID NO: 1274 - protein, 105 aa, Homo sapiens
  SITE (89): Xaa equals any of the naturally occurring L-amino acids
  SITE (90): Xaa equals any of the naturally occurring L-amino acids
  SITE (94): Xaa equals any of the naturally occurring L-amino acids
  SITE (96): Xaa equals any of the naturally occurring L-amino acids
  SITE (98): Xaa equals any of the naturally occurring L-amino acids
GSAAMKVKIKCWNGVATWLWVANDENCGICRMAFNGCCPDCKVPGDDCPLVWGQCSHCFHMHCILKWLHAQQVQQHCPMCRQEWKFKEXXPTWXLXGXASETPHV

SEQ ID NO: 1275 - protein, 121 aa, Homo sapiens
  SITE (99): Xaa equals any of the naturally occurring L-amino acids
  SITE (104): Xaa equals any of the naturally occurring L-amino acids
  SITE (114): Xaa equals any of the naturally occurring L-amino acids
  SITE (117): Xaa equals any of the naturally occurring L-amino acids
  SITE (118): Xaa equals any of the naturally occurring L-amino acids
TLICRMAGCGEIDHSINMLPTNRKANESCSNTAPSLTVPECAICLQTCVHPVSLPCKHVFCYLCVKGASWLGKRCALCRQEIPEDFLDKPTLLAPEELXAAKYXEMANMHGIYXRKXXGGG

SEQ ID NO: 1276 - protein, 104 aa, Homo sapiens
QFERSPGGGPAAPVSSSCSSSASSSASSSSSSSSSSSSSSSSSGLRRKGSRDCSVCFESEVIAALVPCGHNLFCMECANRICEKSEPECPVCHTAVTQAIRIFS

SEQ ID NO: 1277 - protein, 563 aa, Homo sapiens
  SITE (6): Xaa equals any of the naturally occurring L-amino acids
  SITE (10): Xaa equals any of the naturally occurring L-amino acids
  SITE (40): Xaa equals any of the naturally occurring L-amino acids
  SITE (42): Xaa equals any of the naturally occurring L-amino acids
  SITE (43): Xaa equals any of the naturally occurring L-amino acids
  SITE (54): Xaa equals any of the naturally occurring L-amino acids
  SITE (145): Xaa equals any of the naturally occurring L-amino acids
  SITE (146): Xaa equals any of the naturally occurring L-amino acids
RDRPAXAALXPPSPLQTSEPASSSTTWPRSGFRASATAGXRXXGELLHQGRYRXALAAACEALRAEPSDLIVKIYRAESYAGLQEFKAAIEDLNAVLFQLPDWPEVYFRKGKVLCDAGFLGDALQLFLQCLALDEDFAPAKLQVXXILCDLLLPENLKEGLKESSWSSLPCTKNRPFDFHSVMEESQSLNEPSPKQSEEIPEVTSEPVKGSLNRAQSAQSINSTEMPAREDCLKRVSSEPVLSVQEKGVLLKRKLSLLEQDVIVNEDGRNKLKKQGETPNEVCMFSLAYGDIPEELIDVSDFECSLCMRLFFEPVTTPCGHSFCKNCLERCLDHAPYCPLCKESLKEYLADRRYCVTQLLEELIVKYLPDELSERKKIYDEETAELSHLTKNVPIFVCTMAYPTVPCPLHVFEPRYRLMIRRSIQTGTKQFGMCVSDTQNSFADYGCMLQIRNVHFLPDGRSVVDTVGGKRFRVLKRGMKDGYCTADIEYLEDVKVENEDEIKNLRELHDLVYSQACSWFQNLRDRFRSQILQHFGSMPERRKTFRQPLMDLHGVGGFLQFSL

SEQ ID NO: 1278 - protein, 465 aa, Homo sapiens
  SITE (2): Xaa equals any of the naturally occurring L-amino acids
  SITE (4): Xaa equals any of the naturally occurring L-amino acids
  SITE (206): Xaa equals any of the naturally occurring L-amino acids
  SITE (446): Xaa equals any of the naturally occurring L-amino acids
  SITE (448): Xaa equals any of the naturally occurring L-amino acids
  SITE (449): Xaa equals any of the naturally occurring L-amino acids
  SITE (454): Xaa equals any of the naturally occurring L-amino acids
PXRXRLREAAARRRSLSPATMSTKQITCRYFMHGVCREGSQCLFSHDLANSKPSTICKYYQKGYCAYGTRCRYDHTRPSAAAGGAVGTMAHSVPSPAFHSPHPPSEVTASIVKTNSHEPGKREKRTLVLRDRNLSGMAERKTQPSMVSNPGSCSDPQPSPEMKPHSYLDAIRSGLDDVEASSSYSNEQQLCPYAAAGECRFGDACXYLHGEVCEICRLQVLHPFDPEQRKAHEKICMLTFEHEMEKAFAFQASQDKVCSICMEVILEKASASERRFGILSNCNHTYCLSCIRQWRCAKQFENPIIKSCPECRVISEFVIPSVYWVEDQNKKNELIEAFKQGMGKKACKYFEQGKGTCPFGSKCLYRHAYPDGRLAEPEKPRKQLSSQGTVRFFNSVRLWDFIENRESRHVPNNEDVDMTELGDLFHAPFWSGIIRTLKSRWLPCIXGXXRAETXPKPGVCGLFPC

SEQ ID NO: 1279 - protein, 121 aa, Homo sapiens
  SITE (18): Xaa equals any of the naturally occurring L-amino acids
EQLLQSYSEDPEPLLLAXGLCVPQAQAVPVRPDHCPVCVSPLGCDDDLPSLCCMHYCCKSCWNEYLTTRIEQNLVLNCTCPIADCPAQPTGAFIRAIVSSPESSPSMRRRSCVAMWRAAPT

SEQ ID NO: 1280 - protein, 184 aa, Homo sapiens
  SITE (35): Xaa equals any of the naturally occurring L-amino acids
RTLDHTIPGIISRKHLLEPLAAPFPGSTLGDSEEXSASLNYKSFSKEQQTMDNLEKQLICPICLEMFTKPVVILPCQHNLCRKCASDIFQASNPYLPTRGGTTMASGGRFRCPSCRHEVVLDRHGVYGLQRNLLVENIIDIYKQESTRPEKKSDQPMCEEHEEERINIYCLNCEYPPALCARCL

SEQ ID NO: 1281 - protein, 92 aa, Homo sapiens
GQRHLSVYKHSRTPGPGLKTFPLLPSGFLRDCSAMTTARYRPTWDLALDPLVSCKLCLGEYPVEQMTTIAQCQCIFCTLCLKQYVELLIKKD

SEQ ID NO: 1282 - protein, 600 aa, Homo sapiens
  SITE (6): Xaa equals any of the naturally occurring L-amino acids
STHASXDAWVARQLAKPDNTLFVNRTLFDQVLEFLCSPDDDSRHSERQQVLLELLQAGGIVQFEESRLIRMAEKAEFYQICEFMYEREHQYDKIIDCYLRDPLREEEVFNYIHNILSIPGHSAEEKQSVWQKAMDHIEELVSLKPCKAAELVATHFSGHIETVIKKLQNQVLLFKFLRSLLDPREGIHVNQELLQISPCITEQFIELLCQFNPTQVIETLQVLECYRLEETIQITQKYQLHEVTAYLLEKKGDIHGAFLIMLERLQSKLQEVTHQGENTKEDPSLKDVEDTMVETIALCQRNSHNLNQQQREALWFPLLEAMMAPQKLSSSAIPHLHSEALKSLTMQVLNSMAAFIALPSILQRILQDPVYGKGKLGEIQGLILGMLDTFNYEQTLLETTTSLLNQDLHWSLCNLRASVTRGLNPKQDYCSICLQQYKRRQEMADEIIVFSCGHLYHSFCLQNKECTVEFEGQTRWTCYKCSSSNKVGKLSENSSEIKKGRITPSQVKMSPSYHQSKGDPTAKKGTSEPVLDPQQIQAFDQLCRLYRGSSRLALLTELSQNRSSESYRPFSGSQSAPAFNSIFQNENFQLQLIPPPVTED

SEQ ID NO: 1283 - protein, 82 aa, Homo sapiens
VDDDLVCHICLQPLLQPLDTPCGHTFCYKCLRNFLQEKDFCPLDRKRLHFKLCKKSSILVHKLLDKLLVLCPFSSVCKDVMQ

SEQ ID NO: 1284 - protein, 124 aa, Homo sapiens
FAPGATKFRREEGVGPRLWSFLYLPARTPALPTEGRASAAMKVKIKCWNGVATWLWVANDENCGICRMAFNGCCPDCKVPGDDCPLVWGQCSHCFHMHCILKWLHAQQVQQHCPMCRQEWKFKE

SEQ ID NO: 1285 - protein, 131 aa, Homo sapiens
  SITE (11): Xaa equals any of the naturally occurring L-amino acids
HYSRYACRYRXRNSRGAAMADVEDGEETCALASHSGSSGSKSGGDKMFSLKKWNAVAMWSWDVECDTCAICRVQVMDACLRCQAENKQEDCVVVWGECNHSFHNCCMSLWVKQNNRCPLCQQDWVVQRIGK

SEQ ID NO: 1286 - protein, 88 aa, Homo sapiens
  SITE (72): Xaa equals any of the naturally occurring L-amino acids
IRPRAEVVWPPRGRSQLAGLSRASRRTPSPRQGSSMEAEDIQEELTCPICLDYFQDPVSIECGHNFCRGCLXRNWAPGGGRSPAPNVC

SEQ ID NO: 1287 - protein, 125 aa, Homo sapiens
  SITE (121): Xaa equals any of the naturally occurring L-amino acids
TLICRMAGCGEIDHSINMLPTNRKANESCSNTAPSLTVPECAICLQTCVHPVSLPCKHVFCYLCVKGASWLGKRCALCRQEIPEDFLDKPTLLSPEELKAASRGNGEYAWYYEGRNGWWQXDGAH

SEQ ID NO: 1288 - protein, 461 aa, Homo sapiens
  SITE (83): Xaa equals any of the naturally occurring L-amino acids
  SITE (250): Xaa equals any of the naturally occurring L-amino acids
TQSLQQDAQLAELSFLPQSSVASQSSSEGKLATKGDSSERERREQNLPARPSRAPVSICGGGENTSKSAEEPVVRPKIRNLAXPNCVKPKIFFDTDDDDDMPHSTSRWRDTANDNEGHSDGLARRGRGESSSGYPEPKYPEDKREARSDQVKPEKVPRRRRTMADPDFWTHSDDYYKYCDEDSDSDKEWIAALRRKYRSREQTLSSSGESWETLPGKEEREPPQAKVSASTGTSPGPGASASAGAGAGAXAGSNGSNYLEEVREPSLQEEQASLEEGEIPWLQYHENDSSSEGDNDSGHELMQPGVFMLDGNNNLEDDSSVSEDLEVDWSLFDGFADGLGVAEAISYVDPQFLTYMALEERLAQAMETALAHLESLAVDVEVANPPASKESIDALPEILVTEDHGAVGQEMCCPICCSEYVKGEVATELPCHHYFHKPCVSIWLQKSGTCPVCRCMFPPPL

SEQ ID NO: 1289 - protein, 147 aa, Homo sapiens
  SITE (95): Xaa equals any of the naturally occurring L-amino acids
  SITE (128): Xaa equals any of the naturally occurring L-amino acids
  SITE (147): Xaa equals any of the naturally occurring L-amino acids
GKVRQPVICINNHVFCSICIDLWLKNNSQCPACRVPITPENPCKEIIGGTSESEPMLSHTVRKHLRKTRLELLHKEYEDEIDCLQKEVEELKSRXLSLESQIKTILDPLTLVQGNQNEDKHLVTDNPXKKKKKKKKKKKKKKKKKKX

SEQ ID NO: 1290 - protein, 171 aa, Homo sapiens
GISSGVGAPEASGWLTPSILESDHGLPGRVSVASGLAVMKTIDDLLRCGICFEYFNIAMIIPQCSHNYCSLCIRKFLSYKTQCPTCCVTVTEPDLKNNRILDELVKSLNFARNHLLQFALESPAKSPASSSSENLAVKVYTPVASRQSLKQGSRLMDNFLIREMSGSTSEL

SEQ ID NO: 1291 - protein, 199 aa, Homo sapiens
  SITE (187): Xaa equals any of the naturally occurring L-amino acids
SEPTGSVSNRNMERAESRSGRGGSGGGSSSGSSSSSSSSSSSSSSSSSSSSPSSSSGGESSETSSDLFEGSNEGSSSSGSSGARREGRHRAPVTFDESGSLPFLSLAQFFLLNEDDDDQPRGLTKEQIDNLAMRSFGENDALKTCSVCITEYTEGNKLRKLPCSHEYHVHCIDRWLSENSTCPICRXAVLASGNRESVV

SEQ ID NO: 1292 - protein, 231 aa, Homo sapiens
AREMAAQQRDCGGAAQLAGPAAEADPLGRFTCPVCLEVYEKPVQVPCGHVFCSACLQECLKPKKPVCGVCRSALAPGVRAVELERQIESTETSCHGCRKNFFLSKIRSHVATCSKYQNYIMEGVKATIKDASLQPRNVPNRYTFPCPYCPEKNFDQEGLVEHCKLFHSTDTKSVVCPICASMPWGDPNYRSANFREHIQRRHRFSYDTFVDYDVDEEDMMNQVLQRSIIDQ

SEQ ID NO: 1293 - protein, 291 aa, Homo sapiens
  SITE (273): Xaa equals any of the naturally occurring L-amino acids
  SITE (283): Xaa equals any of the naturally occurring L-amino acids
VAAAMAEASPHPGRYFCHCCSVEIVPRLPDYICPRCESGFIEELPEETRSTENGSAPSTAPTDQSRPPLEHVDQHLFTLPQGYGQFAFGIFDDSFEIPTFPPGAQADDGRDPESRRERDHPSRHRYGARQPRARLTTRRATGRHEGVPTLEGIIQQLVNGIITPATIPSLGPWGVLHSNPMDYAWGANGLDAIITQLLNQFENTGPPPADKEKIQALPTVPVTEEHVGSGLECPVCKDDYALGERVRQLPCNHLFHDGCIVPWLEQHDSCPSXEKASRDRTRXRNPLASMG

SEQ ID NO: 1294 - protein, 121 aa, Homo sapiens; identical to SEQ ID NO: 839
  SITE (48): Xaa equals any of the naturally occurring L-amino acids
  SITE (101): Xaa equals any of the naturally occurring L-amino acids
  SITE (106): Xaa equals any of the naturally occurring L-amino acids

SEQ ID NO: 1295 - protein, 171 aa, Homo sapiens
  SITE (6): Xaa equals any of the naturally occurring L-amino acids
  SITE (7): Xaa equals any of the naturally occurring L-amino acids
GTSAIXXGPRAVSEGWAAMASYFDEHDCEPSDPEQETRTNMLLELARSLFNRMDFEDLGLVVDWDHHLPPPAAKTVVENLPRTVIRGSQAELKCPVCLLEFEEEETAIEMPCHHLFHSSCILPWLSKTNSCPLCRYELPTDDDTYEEHRRDKARKQQQQHRLENLHGAMYT

SEQ ID NO: 1296 - protein, 285 aa, Homo sapiens
  SITE (79): Xaa equals any of the naturally occurring L-amino acids
  SITE (92): Xaa equals any of the naturally occurring L-amino acids
  SITE (147): Xaa equals any of the naturally occurring L-amino acids
RKSSSVHNAASGLLGSRAPGRHRHLGRCRCRHRLVSPSPAMAEDLSAATSYTEDDFYCPVCQEVLKTPVRTTACQHVFXRKCFLTAMRESGXHCPLCRGNVTRRERACPERALDLENIMRKFSGSCRCCAKQIKFYRMRHHYKSCKXYQDEYGVSSIIPNFQISQDSVGNSNRSETSTSDNTETYQENTSSSGHPTFKCPLCQESNFTRQRLLDHCNSNHLFQIVPVTCPICVSLPWGDPSQITRNFVSHLNQRHQFDYGEFVNLQLDEETQYQTAVEESFQVNI

SEQ ID NO: 1297 - protein, 422 aa, Homo sapiens
  SITE (245): Xaa equals any of the naturally occurring L-amino acids
  SITE (272): Xaa equals any of the naturally occurring L-amino acids
RHEQLSPSTACHPKGCKIKALRAKTNTYIKTPVRGEEPIFVVTGRKEDVAMAKREILSAAEHFSMIRASRNKNGPALGGLSCSPNLPGQTTVQVRVPYRVVGLVVGPKGATIKRIQQQTHTYIVTPSRDKEPVFEVTGMPENVDRAREEIEMHIAMRTGNYIELNEENDFHYNGTDVSFEGGTLGSAWLSSNPVPPSRARMISNYRNDSSSSLGSGSTDSYFGSNRLADFSPTSPFSTGNFWFGXTLPSVGSEDLAVDSPAFDSLPTSAQTXWTPFEPVNPLSGFGSDPSGNMKTQRRGSQPSTPRLSPTFPESIEHPLARRVRSDPPSTGNHVGLPIYIPAFSNGTNSYSSSNGGSTSSSPPESRRKHDCVICFENEVIAALVPCGHNLFCMECANKICEKRTPSCPVCQTAVTQAIQIHS

SEQ ID NO: 1298 - protein, 102 aa, Homo sapiens
  SITE (27): Xaa equals any of the naturally occurring L-amino acids
  SITE (53): Xaa equals any of the naturally occurring L-amino acids
VWMAWQVSLLELEDWLQCPICLEVFKXSLMLQCGHSYCKGCLVSLVLPPGHQXALAPCAWQGGGPAATSLPNVSLGLGDRKPLRLPWGPRSPKVCVHPPGTR

SEQ ID NO: 1299 - protein, 203 aa, Homo sapiens; identical to SEQ ID NO: 844
  SITE (198): Xaa equals any of the naturally occurring L-amino acids

SEQ ID NO: 1300 - protein, 218 aa, Homo sapiens
  SITE (133): Xaa equals any of the naturally occurring L-amino acids
  SITE (202): Xaa equals any of the naturally occurring L-amino acids
  SITE (208): Xaa equals any of the naturally occurring L-amino acids
  SITE (216): Xaa equals any of the naturally occurring L-amino acids
HIEMALPKDAIPSLSECQCGICMEILVEPVTLPCNHTLCKPCFQSTVEKASLCCPFCRRRVSSWTRYHTRRNSLVNVELWTIIQKHYPRECKLRASGQESEEVADDYQPVRLLSKPGELRREYEEEISKVAAXRRASEEEENKASEEYIQRLLAEEEEEEKRQAEKRRRAMEEQLKSDEELARKLSIDINNFCEGSISASPXEFQKNXVPVTPKSXKR

SEQ ID NO: 1301 - protein, 133 aa, Homo sapiens
  SITE (93): Xaa equals any of the naturally occurring L-amino acids
LVPLVPKKTKVEPYSLTAQQSSLIREDKSNAKLWNEVLASLKDRPASGSPFQLFLSKVEETFQCICCQELVFRPITTVCQHNVCKDCLDRSFXAQVFSCPACRYDLGRSYAMQVNQPLQTVLNQLFPGYGNGR

SEQ ID NO: 1302 - protein, 270 aa, Homo sapiens
  SITE (102): Xaa equals any of the naturally occurring L-amino acids
  SITE (257): Xaa equals any of the naturally occurring L-amino acids
  SITE (260): Xaa equals any of the naturally occurring L-amino acids
  SITE (263): Xaa equals any of the naturally occurring L-amino acids
  SITE (265): Xaa equals any of the naturally occurring L-amino acids
QELLQCYLKDFILLTMRVSTEEELKFLQMALWSCTRKLKAASEAPEEEVSLPWVHLAYQRFRSRLQNFSRILTIYPQVLHSLMEARWNHELAGCEMTLDAFXAMACTEMLTRNTLKPSPQAWLQLVKNLSMPLELICSDEHMQGSGSLAQAVIREVRAQWSRIFSTALFVEHVLLGTESRVPELQGLVTEHVFLLDKCLRENSDVKTHGPFEAVMRTLCECKETASKTLSRFGIQPCSICLGDAKDPVCLPCDHVHXLRXLKXWXAQKLL

SEQ ID NO: 1303 - protein, 178 aa, Homo sapiens
ICIVLSLLPPHQYPAGYPSDKEGKKPKGQSKKQPSGTTKRPISDDDCPSASKVYKASDSAEAIEAFQLTPQQQHLIREDCQNQKLWDEVLSHLVEGPNFLKKLEQSFMCVCCQELVYQPVTTECFHNVCKDCLQRSFKAQVFSCPACRHDLGQNYIMIPNEILQTLLDLFFPGYSKGR

SEQ ID NO: 1304 - protein, 158 aa, Homo sapiens
PDLTEFGQAEPQQRIHVSEEQLQLYWAMDSTFELCKICAESNKDVKIEPCGHLLCSCCLAAWQHSDSQTCPFCRCEIKGWEAVSIYQFHGQATAEDSGNSSDQEGRELELGQVPLSAPPLPPRPDLPPRKPRNAQPKVRLLKGNSPPAALGPQDPAPA

SEQ ID NO: 1305 - protein, 301 aa, Homo sapiens
  SITE (160): Xaa equals any of the naturally occurring L-amino acids
  SITE (195): Xaa equals any of the naturally occurring L-amino acids
  SITE (269): Xaa equals any of the naturally occurring L-amino acids
  SITE (282): Xaa equals any of the naturally occurring L-amino acids
  SITE (297): Xaa equals any of the naturally occurring L-amino acids
FDVFTRLFQPWPTLLKNWQLLAVNHPGYMAFLTYDEVQERLQACRDKPGSYIFRPSCTRLGQWAIGYVSSDGSILQTIPANKPLSQVLLEGQKDGFYLYPDGKTHNPDLTELGQAEPQQRIHVSEEQLQLYWAMDSTFELCKICAESNKDVKIEPCGHLXCSCCLAAWQHSDSQTCPFCRCEIKGWEAVSIYQFXGQATAEDSGNSSDQEGRELELGQVPLSAPPLPPRPDLPPRKPRNAQPKVALLALPRLRAPLLLPRIKGCGLTAXEATFSPQVVWDFXRLLKGNFPSAALGPXDPGP

SEQ ID NO: 1306 - protein, 165 aa, Homo sapiens
  SITE (6): Xaa equals any of the naturally occurring L-amino acids
NKETRXIGPDGDSCAVCIELYKPNDLVRILTCNHIFHKTCVDPWLLEHRTCPMCKCDILKALGIEVDVEDGSVSLQVPVSNEISNSASSHEEDNRSETASSGYASVQGTDEPPLEEHVQSTNESLQLVNHEANSVAVDVIPHVDNPTFEEDETPNQETAVREIKS

SEQ ID NO: 1307 - protein, 251 aa, Homo sapiens; identical to SEQ ID NO: 852

SEQ ID NO: 1308 - protein, 103 aa, Homo sapiens
RGEVCFHCRKPGHGIADCPAALENQDMGTGICYRCGSTEHEITKCKAKVDPALGEFPFAKCFVCGEMGHLSRSCPDNPKGLYADGKYCYPHIAEMVSHRAVVI

SEQ ID NO: 1309 - protein, 105 aa, Homo sapiens
  SITE (50): Xaa equals any of the naturally occurring L-amino acids
  SITE (95): Xaa equals any of the naturally occurring L-amino acids
MATPMHRLIARRQAFDTELQPVKTFWILIQPSIVISEANKQHVRCQKCLXFGHWTYECTGKRKYLHRPSRTAELKKALKEKENRLLLQQSIGRNXCRKKGQEKKV

SEQ ID NO: 1310 - protein, 77 aa, Homo sapiens
  SITE (67): Xaa equals any of the naturally occurring L-amino acids
  SITE (77): Xaa equals any of the naturally occurring L-amino acids
CRAIGEDGINWSISDKDIEAQIANNRTPGRWTQRYYSANKNIICRNCDKRGHLSKNCPFTTKIRRWXPVAPGEGHLX

SEQ ID NO: 1311 - protein, 56 aa, Homo sapiens
KHISRQCRVVLFEYKIGESVGFFKAVIFLFVFLRFHSILDQSFSLSSLLWKIVTLT

SEQ ID NO: 1312 - protein, 101 aa, Homo sapiens
  SITE (97): Xaa equals any of the naturally occurring L-amino acids
GPPGPRWACSLEDRIAAMSSKDFFACGHSGHWARGCPRGGAGGRRGGGHGRGSQCGSTTLSYTCYCCGESGRNAKNCVLLGNICYNCGRSGHIAKGXKDPK

SEQ ID NO: 1313 - protein, 259 aa, Homo sapiens
  SITE (251): Xaa equals any of the naturally occurring L-amino acids
  SITE (255): Xaa equals any of the naturally occurring L-amino acids
  SITE (259): Xaa equals any of the naturally occurring L-amino acids
TLVLALIEEKWRSHRILRMNSGRPETMENLPALYTIFQGEVAMVTDYGAFIKIPGCRKQGLVHRTHMSSCRVDKPSEIVDVGDKVWVKLIGREMKNDRIKVSLSMKVVNQGTGKDLDPNNVIIEQEERRRRSFQDYTGQKITLEAVLNTTCKKCGCKGHFAKDCFMQPGGTKYSLIPDEEEEKEEAKSAEFEKPDPTRNPSRKRKKEKKKKKHRDRKSSDSDSSDSESDTGKRARHTSKDSKAAKKKKKKXKHKXKHKX

SEQ ID NO: 1314 - protein, 497 aa, Homo sapiens
  SITE (105): Xaa equals any of the naturally occurring L-amino acids
VSLEGQEIQVKAKRPKPHCFNCGSEEHQMKDCPMPRNAARISEKRKEYMDACGEANNQNFQQRYHAEEVEERFGRFKPGVISEELQDALGVTDKSLPPFIYRMRXLGYPPGWLKEAELENSGLALYDGKDGTDGETEVGEIQQNKSVTYDLSKLVNYPGFNISTPRGIPDEWRIFGSIPMQACQQKDVFANYLTSNFQAPGVKSGNKRSSSHSSPGSPKKQKNESNSAGSPADMELDSDMEVPHGSQSSESFQFQPPLPPDTPPLPRGTPPPVFTPPLPKGTPPLTPSDSPQTRTASGAVDEDALTLEELEEQQRRIWAALEQAESVNSDSDVPVDTPLTGNSVASSPCPNELDLPVPEGKTSEKQTLDEPEVPEIFTKKSEAGHASSPDSEVTSLCQKEKAELAPVNTEGALLDNGSVVPNCDISNGGSQKLFPADTSPSTATKIHSPIPDMSKFATGITPFEFENMAESTGMYLRIRSLLKNSPRNQQKNKKASE

SEQ ID NO: 1315 - protein, 172 aa, Homo sapiens
  SITE (151): Xaa equals any of the naturally occurring L-amino acids
  SITE (165): Xaa equals any of the naturally occurring L-amino acids
GTTDEIMTRWARVSTTYNKRPLPATSWEDMKKGSFEGTSQNLPKRKQLEANRLSLKNDAPQAKHKKNKKKKEYLNEDVNGFMEYLRQNSQMVHNGQIIATDSEEVREEIAVALKKDSRREGRRLKRQAAKKNAMVCFHCRKPGHGIADCPXALKIKTWALGYGTXVGPQSTK

SEQ ID NO: 1316 - protein, 375 aa, Homo sapiens
  SITE (346): Xaa equals any of the naturally occurring L-amino acids
  SITE (355): Xaa equals any of the naturally occurring L-amino acids
PTRPPTRPVVHASTLDRVLKTAQQPALVVETSTAATGTPSTVLHAARPPIKLLLSSSVPADSAISGQTSCPNNVQISVPPAIINPRTALYTANTKVAFSAMSSMPVGPLQGGFCANSNTASPSSHPSTSFANMATLPSCPAPSSSPALSSVPESSFYSSSGGGGSTGNIPASNPNHHHHHHHQQPPAPPQPAPPPPGCIVCTSCGCSGSCGSSGLTVSYANYFQHPFSGPSVFTFPFLPFSPMCSSGYVSAQQYGGGSTFPVVHAPYSSSGTPDPVLSGQSTFAVPPMQNFMAGTAGVYQTQGLVGSSNGSSHKKSGNLSCYNCGATGHRAQDCKQPSMDFNRPGXERAMAAPTXSRRTSAHKCLVFMKSKLLSL

SEQ ID NO: 1317 - protein, 112 aa, Homo sapiens
  SITE (51): Xaa equals any of the naturally occurring L-amino acids
  SITE (83): Xaa equals any of the naturally occurring L-amino acids
  SITE (95): Xaa equals any of the naturally occurring L-amino acids
  SITE (105): Xaa equals any of the naturally occurring L-amino acids
  SITE (109): Xaa equals any of the naturally occurring L-amino acids
KMNSSTSTMSEEPDALSVVNQLRDLAADPLNRRAIVQDQGCLPGLILFMDXPNPPVVHSALLALRYLAECRANREKMKGELGXMLSLQNVIQKTXTSGETKTFWXFETXTFF

SEQ ID NO: 1318 - protein, 107 aa, Homo sapiens
  SITE (78): Xaa equals any of the naturally occurring L-amino acids
LCLANMSAEYTSKVQIFEHGGLEPLIRLLSSPDPDVKKNSMECIYNLVQDFQCRAKLQELNAIPPILDLLKSEYPVIXLLALKTLGVIANDKESRTMLKRQSRIGPS

SEQ ID NO: 1319 - protein, 156 aa, Homo sapiens
  SITE (92): Xaa equals any of the naturally occurring L-amino acids
  SITE (110): Xaa equals any of the naturally occurring L-amino acids
  SITE (146): Xaa equals any of the naturally occurring L-amino acids
WIPRASGIRHEHLRSHTQEKVVACPTCGGMFANNTKFLDHIRRQTSLDQQHFQCSHCSKRFATERLLRDHMRNHVNHYKCPLCDMTCPLPSXLRNHMRFRHSEDRPFKCXCCDYSCKNLIDLQKHLDTHSEEPAYRCDFENCTSVXDPLLYQVPLP

SEQ ID NO: 1320 - protein, 103 aa, Homo sapiens
CNQCQKAFITNSGLVYHQKTHHREGKVCTCSKCGEVFPWKSELILCQRNHSGERPFICKVCDKGFVVRTHLTVHQRAHTGEKPYACSDCEKAFSKKALFMIHQ

SEQ ID NO: 1321 - protein, 154 aa, Homo sapiens
  SITE (103): Xaa equals any of the naturally occurring L-amino acids
  SITE (112): Xaa equals any of the naturally occurring L-amino acids
GGRAFSQGGHLRIHQRVHTGEKPYKCKECGKTFSRRSNLVEHGQFHTDEKPYICEKCGKAFRRGHQLTVHQRVHTGKKPYECKECGRAIPLPHTFFYIREFIXVENPMNVRXVRKPLLCIEILLGIRIFILVRNFLNASNVGRPILLVQNSFNI

SEQ ID NO: 1322 - protein, 52 aa, Homo sapiens
  SITE (27): Xaa equals any of the naturally occurring L-amino acids
KLQSSSIHTVSICIPECLRKKSVLYFXYIGASVASICFEYKIQFSLHIRSHM

SEQ ID NO: 1323 - protein, 290 aa, Homo sapiens
  SITE (242): Xaa equals any of the naturally occurring L-amino acids
  SITE (245): Xaa equals any of the naturally occurring L-amino acids
  SITE (251): Xaa equals any of the naturally occurring L-amino acids
KQSRSSPLKMPLRDKYCQTDHHHHGCCEPVYILEPGDPPLLQQPLQTSKSGIQQIIECFRSGTKQLKHILLKDVDTIFECKLCRSLFRGLPNLITHKKFYCPPSLQMDDNLPDVNDKQSQAINDLLEAIYPSVDKREYIIKLEPIETNQNAVFQYISRTDNPIEVTESSSTPEQTEVQIQETSTEQSKTVPVTDTEVETVEPPPVEIVTDEVAPTSDEQPQESQADLETSDNSDFGHQLICXLCXKEFNSXRGVRRHIRKVHKKKMEELKKYIETRKIQTNPLKDAVRMF

SEQ ID NO: 1324 - protein, 104 aa, Homo sapiens
AMAQMQGEESLDLKRRRIHQCDFAGCSKVYTKSSHLKAHRRIHTGEKPYKCTWDGCSWKFARSDELTRHFRKHTGIKPFRCTDCNRSFSRSDHLSLHRRRHDTM

SEQ ID NO: 1325 - protein, 157 aa, Homo sapiens
  SITE (2): Xaa equals any of the naturally occurring L-amino acids
  SITE (147): Xaa equals any of the naturally occurring L-amino acids
AXCSTTPPRTAAATAAAAAAAAAAARGSLEEQRAARPRTPPRAKPPSPATPRAPMDTWRPSSAGRRSKIKFTTGTCSDSVVHSCDLCGKGFRLQRMLNRHLKCHNQVKRHLCTFCGKGFNDTFDLKRHVRTHTGIRPTNATSAIKPXPALLSGVPPE

SEQ ID NO: 1326 - protein, 175 aa, Homo sapiens; identical to SEQ ID NO: 875

SEQ ID NO: 1327 - protein, 145 aa, Homo sapiens
  SITE (121): Xaa equals any of the naturally occurring L-amino acids
  SITE (123): Xaa equals any of the naturally occurring L-amino acids
  SITE (125): Xaa equals any of the naturally occurring L-amino acids
  SITE (129): Xaa equals any of the naturally occurring L-amino acids
  SITE (136): Xaa equals any of the naturally occurring L-amino acids
  SITE (141): Xaa equals any of the naturally occurring L-amino acids
TDLIDTAFPLCLWLYVSFILLCLSPALDPFCRSWLVSGNGSHPMDSHSGEPALLPCGTCDMVFRSSALLATHTQRFCIGHPTQEMTFGAQASVATEPQRAAVVPQEHQGVPQEPQGLPDQXAXRXALKXLTEEYSXLPSPXAQNG

SEQ ID NO: 1328 - protein, 168 aa, Homo sapiens
  SITE (130): Xaa equals any of the naturally occurring L-amino acids
SRCSLCGYVCSHPPSLKSHMWKHASDQNYNYEQVNKAINDAISQSGRVLGKSPGKTQLKSSEESADPVTGSSENAVSSSELMSQTPSEVLGTNENEKLSPTSNTSYSLEKISSLAPPSMEYCVLLFCCCXCGFESTSKENLLDHMKEHEGEIVNIILNKDHNTALNTN

SEQ ID NO: 1329 - protein, 214 aa, Homo sapiens
PRHSANINLHRKLLTKELDDMGLDSSQPSLSKDLRDEFLVKIYGAQHPWGSMSGKTPPLPQTEDSHLNGYGRGMAEDYMVLDLSTTSSLQSSSSIHSSRESDAGSDEGILLDDIDGASDSGESAHKAEAPALPGSLGAEVSGSLMFSSLSGSNGGIMCNICHKMYSNKGTLRVHYKTVHLREMHKCKVPGCNMMFSSVEAEIGTVRTLISTKTF

SEQ ID NO: 1330 - protein, 104 aa, Homo sapiens
  SITE (65): Xaa equals any of the naturally occurring L-amino acids
  SITE (77): Xaa equals any of the naturally occurring L-amino acids
  SITE (102): Xaa equals any of the naturally occurring L-amino acids
LVKCPKGEFSFHSNKDRFAHSLKQNVAMNIQPLHTYKDVRMIPPTKHTHSHTRTHTHMHTRACTXDTCTHTRTRKHXAHMHTRAHIAHTHTLVTGPGLFQAXSW

SEQ ID NO: 1331 - protein, 302 aa, Homo sapiens
  SITE (122): Xaa equals any of the naturally occurring L-amino acids
EEETSQFSLTASPTPPGPEPLPPKGLQYLVLLSHAHSRECSLVPGLRGPGGQDGGLVWECSAGHTFSWGPSLSPTPSEAPKPASLPHTTRRSWCSEATSGQELADLESEHDERTQEARLPRXVGPPPETFPPPGEEEGEEEEDNDEDEEEMLSDASLWTYSSSPDDSEPDAPRLLPSPVTCTPKEGETPPAPAALSSPLAVPALSASSLSSRAPPPAEVRVQPQLSRTPQAAQQTEALASTGSQAQSAPTPAWDEDTAQIGPKRIRKAAKRELMPCDFPGCGRIFSNRQSQPVGSLSTLRNT

SEQ ID NO: 1332 - protein, 66 aa, Homo sapiens
TLVDPKNSAQYYLRNVLLQWFYLNRIQISFTPCFFFLYISLKSLFFHNPFSFKNATYMLKKLGRLS

SEQ ID NO: 1333 - protein, 132 aa, Homo sapiens
RKIELQEQPYQCDICGKAFGYSSDLIQHYRTHTAEKPYQCDICRENVGQCSHTKQHQKIYSSTKSHQCHECGRGFTLKSHLNQHQRIHTGEKPFQCKECGMNFSWSCSLFKHLRSHERTDPINTLSVEGSLL

SEQ ID NO: 1334 - protein, 278 aa, Homo sapiens
  SITE (145): Xaa equals any of the naturally occurring L-amino acids
PLPQPLLSSPHPASLPPSPARRSQNRHQGGSGCSTMTGIAAASFFSNTCRFGGCGLHFPTLADLIEHIEDNHIDTDPRVLEKQELQQPTYVALSYINRFMTDAARREQESLKKKIQPKLSLTLSSSVSRGNVSTPPRHSSGSLTXPVTPPITPSSSFRSSTPTGSEYDEEEVDYEESDSDESWTTESAISSEAILSSMCMNGGEEKPFACPVPGCKKRYKNVNGIKYHAKNGHRTQIRVRKPFKCRCGKSYKTAQGLRHHTINFHPPVSAEIIRKMQQ

SEQ ID NO: 1335 - protein, 130 aa, Homo sapiens
  SITE (88): Xaa equals any of the naturally occurring L-amino acids
  SITE (97): Xaa equals any of the naturally occurring L-amino acids
  SITE (98): Xaa equals any of the naturally occurring L-amino acids
  SITE (100): Xaa equals any of the naturally occurring L-amino acids
  SITE (102): Xaa equals any of the naturally occurring L-amino acids
  SITE (108): Xaa equals any of the naturally occurring L-amino acids
  SITE (116): Xaa equals any of the naturally occurring L-amino acids
  SITE (119): Xaa equals any of the naturally occurring L-amino acids
  SITE (124): Xaa equals any of the naturally occurring L-amino acids
RKGPSTMEDPNPEENMKQQDSPKERSPQSPGGNICHLGAPKCTRCLITFADSKFQERHMKREHPADFVAQKLQGVLFICFTCARSFPXPKPNHHQRXXVXPXSHLAGXTTMPATSXLMXKTLAXVLERTR

SEQ ID NO: 1336 - protein, 112 aa, Homo sapiens
  SITE (4): Xaa equals any of the naturally occurring L-amino acids
  SITE (71): Xaa equals any of the naturally occurring L-amino acids
FRCXCAARALHSLGFSRATCVDKASFDHACPVCGRCFKEPWFLKNHMKVHASKLGPLRAPGPASGPARAPXPPDLGLLAYDRWAQRSSWPRLPPGPNAVSPEPLGLLEPCNL

SEQ ID NO: 1337 - protein, 202 aa, Homo sapiens
  SITE (15): Xaa equals any of the naturally occurring L-amino acids
  SITE (84): Xaa equals any of the naturally occurring L-amino acids
  SITE (122): Xaa equals any of the naturally occurring L-amino acids
FIRSYKHRRTHTGEXPYECKECGKAFANSSHLTVHMRTHTGEKPYQCKECGKAFINSSSFKSHMQTHPGVKPYDCQQCGKAFIXSSFLIRHLRSHSAERPFECEECGKAFRYSSHLSQHKRXHTGERPYKCQKCGQAFSISSGLTVHMRTHTGERPFECQECGKAFTRSTYLIRHLRSHSVEKPYKECGQTFSNSSCLTECV

SEQ ID NO: 1338 - protein, 219 aa, Homo sapiens; identical to SEQ ID NO: 888

SEQ ID NO: 1339 - protein, 342 aa, Homo sapiens; identical to SEQ ID NO: 890
  SITE (25): Xaa equals any of the naturally occurring L-amino acids
  SITE (43): Xaa equals any of the naturally occurring L-amino acids
  SITE (212): Xaa equals any of the naturally occurring L-amino acids

SEQ ID NO: 1340 - protein, 103 aa, Homo sapiens
  SITE (93): Xaa equals any of the naturally occurring L-amino acids
  SITE (95): Xaa equals any of the naturally occurring L-amino acids
PTVLTSRRDSSSHEETPGSHPLYGHGECKWPGCETLCEDLGQFIKHLNTEHALDDRSTAQCRVQMQVVQQLEIQLAKESERLQAMMAHLHMRXLXSPSPSASH

SEQ ID NO: 1341 - protein, 242 aa, Homo sapiens
  SITE (36): Xaa equals any of the naturally occurring L-amino acids
  SITE (124): Xaa equals any of the naturally occurring L-amino acids
  SITE (128): Xaa equals any of the naturally occurring L-amino acids
  SITE (188): Xaa equals any of the naturally occurring L-amino acids
AACAVANSSQWPGSCCVTPSGTTDCPSTRQNQRPRXPRSWAWPRWLQPCRQWWGQQLRPRAPVQVAAASPGGPTCPVCKKTLSSFSNLKVHMRSHTGERPYACDQCPYACAQSSKLNRHKKTHXQVPXQSPLMADTSQEQASACPPEPAVHAAAPTSTLPCSGGEGLEPPPQQVSRNPGLLAVGLKPXLVETLGEPSPRNKELTLQTARRHHPKRCPSQGARAAGPGAAVSSAGSILPTAAT

SEQ ID NO: 1342 - protein, 52 aa, Homo sapiens
  SITE (49): Xaa equals any of the naturally occurring L-amino acids
FKEKSTVIIHYRTHTGEKPYECNDCGKAFTQKSNLIVHQKTHTGEKTYXCTK

SEQ ID NO: 1343 - protein, 223 aa, Homo sapiens
  SITE (66): Xaa equals any of the naturally occurring L-amino acids
NSAYWEGLASVIRPGEVLDAAHALVCQRGPKGKPSGVSVAAAGLWAGCASNHPKNSAQNLTKDSTXKHEGFYSENLTESRKFLKSREKQSSLTEIKGSVYETTYSPPECPFCGKIEEHSEDMETHVKTKHANLLDIPLEDCDQPLYDCPMCGLICTNYHILQEHVDLHLEENSFQQGMDRVQCSGDLQLAHQLQQEEDRKRRSEESRQEIEEFQKLQRQYGLG

SEQ ID NO: 1344 - protein, 451 aa, Homo sapiens
  SITE (54): Xaa equals any of the naturally occurring L-amino acids
  SITE (371): Xaa equals any of the naturally occurring L-amino acids
CRGRDGSTRRRGGGSRELEMHTISSKVFGDILDFAYTSRIVVRLESFPELMTAXKFLLMRSVIEICQEVIKQSNVQILVPPARADIMLFRPPGTSDLGFPLDMTNGAALAANSNGIAGSMQPEEEAARAAGAAIAGQASLPVLPGVDRLPMVAGPLSPQLLTSPFPSVASSAPPLTGKRGRGRPRKANLLDSMFGSPGGLREAGILPCGLCGKVFTDANRLRQHEAQHGVTSLQLGYIDLPPPRLGENGLPISEDPDGPRKRSRTRKQVACEICGKIFRDVYHLNRHKLSHSGEKPYSCPVCGLRFKRKDRMSYHVRSHDGSVGKPYICQSCGKGFSRPDHLNGHIKQVHTSERPHKCQVWVGSSSGLPPXEPLPSDLPSWDFAQPALWRSSHSVPDTAFSLSLKKSFPALENLGPAHSSNTLFCPAPPGYLRQGWTTPEGSRAFTQWPVG

SEQ ID NO: 1345 - protein, 125 aa, Homo sapiens
  SITE (23): Xaa equals any of the naturally occurring L-amino acids
  SITE (44): Xaa equals any of the naturally occurring L-amino acids
SRPPGPAPPPAGSVDEGVSEGLXTLQSTSSTNAPPDDDDRLENXQYPYQLYIAPSTSSTERPSPNGPDRPFQCPTCGVRFTRIQNLKQHMLIHSGIKPFQCDRCGKKFTRAYSLKMHRLKHEVIS

SEQ ID NO: 1346 - protein, 411 aa, Homo sapiens
  SITE (117): Xaa equals any of the naturally occurring L-amino acids
  SITE (396): Xaa equals any of the naturally occurring L-amino acids
LSGCPGALLRQTDCHSLRMAALSPTFATSTQDSTCLQDSEFPVSSKDHSCPQNLDLFVCSGLEPHTPSVGSQESVTFQDVAVDFTEKEWPLLDSSQRKLYKDVMLENYSNLTSLGYXVGKPSLISHLEQEEEPRTEERGAHQGACADWETPSKTKWSLLMEDIFGKETPSGVTMERAGLGEKSTEYAHLFEVFGMDPHLTQPMGRHAGKRPYHRRDYGVAFKGRPHLTQHMSMYDGRKMHECHQCQKAFTTSASLTRHRRIHTGEKPYECSDCGKAFNDPSALRSHARTHLKEKPFDCSQCGNAFRTLSALKIHMRVHTGERPYKCDQCGKAYGRSCHLIAHKRTHTGERPYECHDCGKAFQHPSHLKEHVRNHTGEKPYACTQWTKAFRWKSNFXLHKKNHMVGEDLTIV

SEQ ID NO: 1347 - protein, 524 aa, Homo sapiens; identical to SEQ ID NO: 900

SEQ ID NO: 1348 - protein, 100 aa, Homo sapiens
RIHSGEKPYECSKCGKVFSRMSNLTVHYRSHSGEKPYECNECGKVFSQKSYLTVHYRTHSGEKPYECNECGKKFHHRSAFNSHQRIHRRGNMNVLDVENL

SEQ ID NO: 1349 - protein, 118 aa, Homo sapiens
  SITE (107): Xaa equals any of the naturally occurring L-amino acids
  SITE (108): Xaa equals any of the naturally occurring L-amino acids
SSYPTECFLCPSGSLSRAGPLPLLRQPPIMQPPLDLKQILPFPLEPAPTLGLFSNYSTMDPVQKAVLSHTFGGPLLKTKRPVISCNICQIRFNSQSQGEAHYKSKSXXPNEVKRNLRL

SEQ ID NO: 1350 - protein, 188 aa, Homo sapiens
  SITE (4): Xaa equals any of the naturally occurring L-amino acids
  SITE (11): Xaa equals any of the naturally occurring L-amino acids
  SITE (28): Xaa equals any of the naturally occurring L-amino acids
  SITE (32): Xaa equals any of the naturally occurring L-amino acids
  SITE (55): Xaa equals any of the naturally occurring L-amino acids
  SITE (188): Xaa equals any of the naturally occurring L-amino acids
VWPXAKAQFQXLAQAFTPNYPKVHPGPXVPPXFVPSSSPFPFSRHTFLPKQPPEXLLPRKAEPQESEETKQKVERVDVNVQIDDSYYVDVGGSQKRWQCPTCEKSYTSKYNLVTHILGHSGIKPHACTHCGKLFKQLSHLHTHMLTHQGTRPHKCQVCHKAFTQTSHLKRHMMQHSEVKPHNCRVCGX

SEQ ID NO: 1351 - protein, 148 aa, Homo sapiens
  SITE (80): Xaa equals any of the naturally occurring L-amino acids
SFSAMHQCILKRHMRSHTGERPYPCEICGKKFTRREHMKRHTLVHSKDKKYVCKVCSRVFMSAASVGIRHGSRRHGVCTXCAGRGMAGPLDHGGGGGEGSPEALFPGDGPYLEDPEDPRGEAEELGEDDEGLAPEDALLADDKDEEDS

SEQ ID NO: 1352 - protein, 129 aa, Homo sapiens
  SITE (121): Xaa equals any of the naturally occurring L-amino acids
KEGEREGERQREQGSGKGVGLLQPFRPQELGVKEHKCGICGREFTLLANMKRHVLIHTNIRAYQCHLCYKSFVQKQTLKAHMIVHSDVKPFKCKLCGKEFNRMHNLMGHMHLHSDSKPFNXSIAQANSP

SEQ ID NO: 1353 - protein, 123 aa, Homo sapiens
  SITE (77): Xaa equals any of the naturally occurring L-amino acids
  SITE (122): Xaa equals any of the naturally occurring L-amino acids
GGKPYTCSQCGKAFIKKCRLIYHQRTHTGEKPHGCSVCGKAFSTKFSLTTHQKTHTGEKPYICSECGKGFIEKRRLXAHHRTHTGEKPFICNKCGKGFTLEEQSYHTSANSYRRGNYIHVVXV

SEQ ID NO: 1354 - protein, 182 aa, Homo sapiens
  SITE (64): Xaa equals any of the naturally occurring L-amino acids
  SITE (164): Xaa equals any of the naturally occurring L-amino acids
VSFTSEETDTVSSSLSEFVFFSGNPEKTDQFFSSKTMAQGLVTFADVAIDFSQEEWACLNSAQXDLYWDVMLENYSNLVSLDLESAYENKSLPTEKNIHEIRASKRNSDRRSKSLGRNWICEGTLERPQRSRGRYVNQMIINYVIRPATREGTPPRTHQRHHKXNSFECKDCGKAFSRGLST

SEQ ID NO: 1355 - protein, 175 aa, Homo sapiens
  SITE (4): Xaa equals any of the naturally occurring L-amino acids
  SITE (136): Xaa equals any of the naturally occurring L-amino acids
  SITE (166): Xaa equals any of the naturally occurring L-amino acids
FYQXLYNNNTRQQTEARDDLHCPWCTLNCRKLYSLLKHLKLCHSRFIFNYVYHPKGARIDVSINECYDGSYAGNPQDIHRQPGFAFSRNGPVKRTPITHILVCRPKRTKASMSEFLESEDGEVEQQRTYSSGHNRXYFHSDTCLPLRPQEMEVDSEDEKDPEWLRXKPLHKLKSF

SEQ ID NO: 1356 - protein, 154 aa, Homo sapiens
PKQKLSKKQKKKKQKPAQNYDDNFNVNGPGEGVKVDPEDTNLNQDSAKELEDSPQENVSVTEIIKPCDDPKSEAKSVPKPKGKKTKDMKKPVRVPAEPQTMSVLISCTTCHSEFPSRNKLFDHLKATGHARAPSSSSLNSATSSQSKKEKRKNR

SEQ ID NO: 1357 - protein, 175 aa, Homo sapiens
KQIWMRMDIKGQESSSDQEQVDVESIDFSKENKMDMTSPEQSRNVLQFTEEKEAFISEEEIAKYMKRGKGKYYCKICCCRAMKKGAVLHHLVNKHNVHSPYKCTICGKAFLLESLLKNHVAAHGKSLLKCPRCNFESNFPRGFKKHLTHCQSRHNEEANKKLMEALEPPLEEQQI

SEQ ID NO: 1358 - protein, 191 aa, Homo sapiens
  SITE (172): Xaa equals any of the naturally occurring L-amino acids
  SITE (181): Xaa equals any of the naturally occurring L-amino acids
  SITE (189): Xaa equals any of the naturally occurring L-amino acids
FSRSSSLIQHERIHTGEKPHKCNQCGKAFSQSSSLFLHHRVHTGEKPYVCNECGRAFGFNSHLTEHVRIHTGEKPYVCNECGKAFRRSSTLVQHRRVHTGEKPYQCVECGKAFSQSSQLTLHQRVHTGEKPYDCGDCGKAFSRRSTLIQHQKVHSGETCKCRKTWSRLWFMXSGLQARWTXSHWREARXSL

SEQ ID NO: 1359 - protein, 72 aa, Homo sapiens; identical to SEQ ID NO: 916

SEQ ID NO: 1360 - protein, 154 aa, Homo sapiens
  SITE (120): Xaa equals any of the naturally occurring L-amino acids
  SITE (141): Xaa equals any of the naturally occurring L-amino acids
  SITE (144): Xaa equals any of the naturally occurring L-amino acids
  SITE (147): Xaa equals any of the naturally occurring L-amino acids
  SITE (150): Xaa equals any of the naturally occurring L-amino acids
  SITE (152): Xaa equals any of the naturally occurring L-amino acids
VRPRVRPRVRRTHTGEKPYICNECGKGFTMKSTLSIHQQTHTGEKPYKCNECDKTFRKKTCLIQHQRFHTGKTSFACTECGKFSLRKNDLITHQRIHTGEKPYKCSDCGKAFTTKSGLNXHQRKHTGERPYGCSDCGKAFXHLXILXKHXRXYR

SEQ ID NO: 1361 - protein, 187 aa, Homo sapiens
  SITE (4): Xaa equals any of the naturally occurring L-amino acids
  SITE (6): Xaa equals any of the naturally occurring L-amino acids
  SITE (8): Xaa equals any of the naturally occurring L-amino acids
  SITE (12): Xaa equals any of the naturally occurring L-amino acids
  SITE (183): Xaa equals any of the naturally occurring L-amino acids
  SITE (184): Xaa equals any of the naturally occurring L-amino acids
SSSXTXRXERHXTQCNQLKTHVRTHTGEKPYKCELCDKGFAQKCQLVFHSRMHHGEEKPYKCDVCNLQFATSSNLKIHARKHSGEKPYVCDRCGQRFAQASTLTYHVRRHTGEKPYVCDTCGKAFAVSSSLITHSRKHTGEKPYICGICGKVYFLRRAQQTLRPIQEKDHYLRICGILTQILXXKEA

SEQ ID NO: 1362 - protein, 500 aa, Homo sapiens
  SITE (154): Xaa equals any of the naturally occurring L-amino acids
  SITE (167): Xaa equals any of the naturally occurring L-amino acids
  SITE (198): Xaa equals any of the naturally occurring L-amino acids
  SITE (203): Xaa equals any of the naturally occurring L-amino acids
GSCGATALITRCLAWSVLISRLAMATYTCITCRVAFRDADMQRAHYKTDWHRYNLRRKVASMAPVTAEGFQERVRAQRAVAEEESKGSATYCTVCSKKFASFNAYENHLKSRRHVELEKKAVQAVNRKVEMMNEKNLEKGLGVDSVDKDAMNAXIQQAIKAQPSMSXKKAPPAPAKEARNVVAVGTGGRGTHDRDPSXKPPRXQWFEQQAKKLAKQQEEDSEEEEEDLDGDDWEDIDSDEELECEDTEAMDDVVEQDAEEEEAEEGPPLGAIPITDCLFCSHHSSSLMKNVAHMTKDHSFFIPDIEYLSDIKGLIKYLGEKVGVGKICLWCNEKGKSFYSTEAVQAHMNDKSHCKLFTDGDAALEFADFYDFRSSYPDHKEGEDPNKAEELPSEKNLEYDDETMELILPSGARVGHRSLMRYYKQRFGLSRAVAVAKNRKAVGRVLQQYRALGWTGSTGAALMRERDMQYVQRMKSKWMLKTGMKNNATKQMHFRVQVRF

SEQ ID NO: 1363 - protein, 131 aa, Homo sapiens
  SITE (86): Xaa equals any of the naturally occurring L-amino acids
  SITE (102): Xaa equals any of the naturally occurring L-amino acids
ANVKYQLRRTGGTKFLKNLDTGHPVFFCNDCASQIRTPSTYISHLESHLGFRLRDLSKLSTEQINSQIAQTKSPSEKMVTSSPEEXLGTSYQCKLCNRTFAXKHAVKLHLSKTHGKSPEDHLLYVSELEKQ

SEQ ID NO: 1364 - protein, 153 aa, Homo sapiens
  SITE (136): Xaa equals any of the naturally occurring L-amino acids
  SITE (142): Xaa equals any of the naturally occurring L-amino acids
  SITE (145): Xaa equals any of the naturally occurring L-amino acids
ETMYPFIVTLEGNALQGPILQKDYVQLENQWETPPEDLQTDLAKLVDQQNPTLGETPENSNLEEPLNPKPHKKKSPGEKPHRCPQCGKCFARKSQLTGHQRIHSGEEPHKCPECGKRFLRSSDLYRHQRLSYRGEXPMNALXVKXDSLGGHIL

SEQ ID NO: 1365 - protein, 249 aa, Homo sapiens
  SITE (235): Xaa equals any of the naturally occurring L-amino acids
STPLLSSMESVINPNITSQDKNEQGGMLCSQMENLPSTALPAQMEDLTKTVLPLNIDSGSDPFLPLPAESSSMSLFPSPADSGTNSVFSQLENNTNHYSSQIEGNTNSSFLKGGNGENAVFPSQVNVANNFSSTNAQQSAPEKVKKDRGRGPNGKERKPKHNKRAKWPAIIRDGKFICSRCYRAFTNPRSLGGHLSKRSYCKPLDGAEIAQELLQSNGQPSLLASMILSTNAVNXAAATTIYLQSRSMF

SEQ ID NO: 1366 - protein, 309 aa, Homo sapiens
GFHSCSSPSSRGGDQSGKHLPPMSSLRSLTIAHVKPSIMKRNGSFPKYYACHLCGRRFTLRSSLREHLQIHTGVPFTSSQQGESRVPLTLCSNAADLGKDAMEVPEAGMISDSELQHISDSPIIDGQQQSETPPPSDIADIDNLEQADQEREVKRRKYECTICGRKFIQKSHWREHMYIHTGKPFKCSTCDKSFCRANQAARHVCLNQSIDTYTMVDKQTLELCTFEEGSQMDNMLVQTNKPYKCNLCDKTFSTPNEVVKHSCQNQNSDVFALDEGRSILLGSGDSEVTEPDHPVLASIKKEQETVLLD

SEQ ID NO: 1367 - protein, 162 aa, Homo sapiens
AFSRVMIGSPRGGASNFPYYRRIAPKMPVVTSVRSSQIPENSTSSQLMMNGATSSFENGHPSQPGPPQLTRASADVLSKCKKALSEHNVLVVEGARKYACKICCKTFLTLTDCKKHIRVHTGEKPYACLKCGKRFSQSSHLYKHSKTTCLRWQSSNLPSTLL

SEQ ID NO: 1368 - protein, 404 aa, Homo sapiens
  SITE (7): Xaa equals any of the naturally occurring L-amino acids
  SITE (378): Xaa equals any of the naturally occurring L-amino acids
  SITE (379): Xaa equals any of the naturally occurring L-amino acids
  SITE (382): Xaa equals any of the naturally occurring L-amino acids
  SITE (383): Xaa equals any of the naturally occurring L-amino acids
  SITE (395): Xaa equals any of the naturally occurring L-amino acids
LDSGPAXGMAEPTSDFETPIGWHASPELTPTLGPLSDTAPPRDRWMFWAMLPPPPPPLTSSLPAAGSKPSSESQPPMEAQSLPGAPPPFDAQILPGAQPPFDAQSPLDSQPQPSGQPWNFHASTSWYWRQSSDRFPRHQKSFNPAVKNSYYPRKYDAKFTDFSLPPSRKQKKKKRKEPVFHFFCDTCDRGFKNQEKYDKHMSEHTKCPELDCSFTAHEKIVQFHWRNMHAPGMKKIKLDTPEEIARWREERRKNYPTLANIERKKKLKLEKEKRGAVLTTTQYGKMKGMSRHSQMAKIRSPGKNHKWKNDNSRQRAVTGSGSHLCDLKLEGPPEANADPLGVLINSDSESDKEEKPQHSVIPKEVTPALCSLMSSYGXXFRXXELARGNFPSRLXPDVFARKPV

SEQ ID NO: 1369 - protein, 292 aa, Homo sapiens
  SITE (9): Xaa equals any of the naturally occurring L-amino acids
  SITE (16): Xaa equals any of the naturally occurring L-amino acids
  SITE (18): Xaa equals any of the naturally occurring L-amino acids
  SITE (31): Xaa equals any of the naturally occurring L-amino acids
  SITE (46): Xaa equals any of the naturally occurring L-amino acids
  SITE (121): Xaa equals any of the naturally occurring L-amino acids
  SITE (283): Xaa equals any of the naturally occurring L-amino acids
KKDVSCPIXQVPTGKXQXPLNPDLNQTKPGXFPSLAVSSNEFEPSXSHMVKSYSLLFRVTRPGRREFNGMINGETNENIDVNEELPARRKRNREDGEKTFVAQMTVFDKNRRLQLLDGEYXVAMQEMEECPISKKRATWETILDGKRLPPFETFSQGPTLQFTLRWTGETNDKSTAPIAKPLATRNSESLHQENKPGSVKPTQTIAVKESLTTDLQTRKEKDTPNENRQKLRIFYQFLYNNNTRQQTEARDDLHCPWCTLNCRKLYSLLKHLKLCHSRFIFNXVLSSQKVLG

SEQ ID NO: 1370 - protein, 218 aa, Homo sapiens
  SITE (58): Xaa equals any of the naturally occurring L-amino acids
  SITE (184): Xaa equals any of the naturally occurring L-amino acids
  SITE (216): Xaa equals any of the naturally occurring L-amino acids
LVPFECTECGKSFSWSSHLIAHMRMHTGEKPFKCDECEKAFRDYSALSKHERTHSGAXPYKCTECGKSFSWSSHLIAHHRTHTGEKPYNCQECGKAFRERSALTKHEIIHSGIKPYECNKCGKSCSQMAHLVRHQRTHTGEKPYECNKCGKSFSQSCTLMLIGEFTLVRNPINVISVKDPLTVXLTSLHTGELILERNHTGVMNVGKHLMRVHPLXYT

SEQ ID NO: 1371 - protein, 86 aa, Homo sapiens
KYHRIQCPNQGCETVYSSVSGLKAHLGSCTLGNFVAGKYKCLLCQKEFVSESGVKYHINSVHAEDWFVVNPTTTKSFEKLMKIKQR

SEQ ID NO: 1372 - protein, 114 aa, Homo sapiens
ECGKSFRQSSSLFRHQRVHSGERPYQCCECGKSFRQIFNLIRHRRVHTGEMPYQSSDCGNLLAANRNSFNTREFTVEKDLMNAENVGNPLDNSLTSFDTAAFTLVIGLMSASGM

SEQ ID NO: 1373 - protein, 162 aa, Homo sapiens
  SITE (136): Xaa equals any of the naturally occurring L-amino acids
  SITE (141): Xaa equals any of the naturally occurring L-amino acids
  SITE (147): Xaa equals any of the naturally occurring L-amino acids
QKSPLIIHQRIHTGEKPYECRECGKAFSQKSQLIIHHRAHTGEKPYECTECGKAFCEKSHLIIHKRIHTGEKPYKCAQCEEAFSRKTELITHQLVHTGEKPYECTECGKTFSRKSQAHHTSREHILEKNPINVVNXGKSLXAEVTSXWTSENSHRRKTLYMD

SEQ ID NO: 1374 - protein, 154 aa, Homo sapiens
GPQAQILKCMECGSSHDTLQQLTAHMMVTGHFLKVTTSASKKGKQLVLDPVVEEKIQSIPLPPTTHTRLPASSIKKQPDSPAGSTTSEEKKEPEKEKPPVAGDAEKIKEESEDSLEKFEPSTLYPYLREEDLDDSPKGGLDILKSLENTVSTRA

SEQ ID NO: 1375 - protein, 147 aa, Homo sapiens
  SITE (93): Xaa equals any of the naturally occurring L-amino acids
ATPPSLAGHPLYPYGFMLPNDPLPHICNWVSANGPCDKRFATSEELLSHLRTHTAFPGTDKLLSGYPSSSSLASAAAAAMACHMHIPTSGAPXSPGTLALRTPTTRWDSAAATTPTPRARFPRLAPPCRCPPPPDRTTPPTPSTDRD

SEQ ID NO: 1376 - protein, 67 aa, Homo sapiens
VSVVQPLLQVLASPPAQQQDGLEAHQVRLSAHNCGNENCNTSFIQNYHLTFLAETHLVPLFIHMHIF

SEQ ID NO: 1377 - protein, 204 aa, Homo sapiens
  SITE (8): Xaa equals any of the naturally occurring L-amino acids
  SITE (67): Xaa equals any of the naturally occurring L-amino acids
  SITE (138): Xaa equals any of the naturally occurring L-amino acids
  SITE (172): Xaa equals any of the naturally occurring L-amino acids
  SITE (186): Xaa equals any of the naturally occurring L-amino acids
  SITE (200): Xaa equals any of the naturally occurring L-amino acids
YRVVMLEXYSNLVSVGYQAGKPDALTKLEQGEPLWTLEDEIHSPAHPEIEKADDHLQQPLQNQKILXRTGQRYEHGRTLKSYLGLTNQSRRYNRKEPAEFNGDGAFLHDNHEQMPTEIEFPESRKPISTKSQFLKHQXTHNIEKAHECTDCGKAFLKKSQLTEHKRIHTGKXPHVCSLCGKAFYKXYRLTEHERAHRGEXPHGC

SEQ ID NO: 1378 - protein, 212 aa, Homo sapiens
  SITE (207): Xaa equals any of the naturally occurring L-amino acids
ECGKTFRLSFYLTEHRRTHAGKKPYECKECGKSFNVRGQLNRHKTIHTGIKPFACKVCEKAFSYSGDLRVHSRIHTGEKPYECKECGKAFMLRSVLTEHQRLHTGVKPYECKECGKTFRVRSQISLHKKIHTDVKPYKCVRCGKTFRFGFYLTEHQRIHTGEKPYKCKECGKAFIRRGNLKEHLKIHSGLKPYDCKECGKSFSRRGXFTEHP

SEQ ID NO: 1379 - protein, 140 aa, Homo sapiens
  SITE (127): Xaa equals any of the naturally occurring L-amino acids
HSGEMPFSCECGKGFVKHSKLIEHIRTHTGEKPFQCPKCDKSFRLKAQLLSHQGLHTGERPFHCPECDKNFRERGHMLRHQRIHRPERPFACGDCGKGFIYKSKLAEHIRVHTKSCPAPNELDIKKXLSQLFAMIEADWS

SEQ ID NO: 1380 - protein, 87 aa, Homo sapiens
LKSHQRTHTGERPFSCDWLDCDKKFTRSDELARHYRTHTGEKRFSCPLCPKQFSRSDHLTKHARRHSPARWKAPPPAPVPARRPAST

SEQ ID NO: 1381 - protein, 124 aa, Homo sapiens
ETLTSNLRMPLTLTSNTQVIGTAGNTYLPALFTTQPAGSGPKPFLFSLPQPLAGQQTQFVTVSQPGLSTFTAQLPAPQPLASSAGHSTASGQGEKKPYECTLCNKTFTAKQNYVKHMFVHKGEK

SEQ ID NO: 1382 - protein, 104 aa, Homo sapiens
  SITE (55): Xaa equals any of the naturally occurring L-amino acids
SHTSLIITELTQERNHMNVMNVVNHSVKRQISIYIREFIQGRNPMFVMNVGSPFXRKQPSLYIRKYIPARNPMNVLSVGKAFSRKSYLIHHQRTHTGEKPYKCS

SEQ ID NO: 1383 - protein, 201 aa, Homo sapiens
  SITE (19): Xaa equals any of the naturally occurring L-amino acids
  SITE (61): Xaa equals any of the naturally occurring L-amino acids
DRGRKGKTASLLFAMQGCXQLCLAAGGHNSGTKHKTMLEARNGSGTIKAFPRAGVKGKGPXNKGNTGLQNKTFHCEICDVHVNSETQLKQHISSRRHKDRAAGKPPKPKYSPYNKLQKTAHPLGVKLVFSKEPSKPLAPRILPNPLAAAAAAAAVAVSSPFSLRTAPAATLFQTSALPPALLRPAPGPIRTAHTPVLFAPY

SEQ ID NO: 1384 - protein, 49 aa, Homo sapiens
  SITE (32): Xaa equals any of the naturally occurring L-amino acids
  SITE (35): Xaa equals any of the naturally occurring L-amino acids
  SITE (41): Xaa equals any of the naturally occurring L-amino acids
  SITE (45): Xaa equals any of the naturally occurring L-amino acids
FLHHFSFETGEKPHRCHLCPFASAYEPHLETXMRXHTGIKXIQMXIYVL

SEQ ID NO: 1385 - protein, 147 aa, Homo sapiens
GRGFAYPSELKAHEVKHESGRCHVCVECGLDFSTLTQLKRHLASHQGPTLYQCLECDKSFHYRSQLQNHMLKHQNVRPFVCTECGMEFSQIHHLKQHSLTHKGVKEFKCEVCGREFTLQANMKRHMLIHTSVRPYQCHICFKTFVQN

SEQ ID NO: 1386 - protein, 135 aa, Homo sapiens
  SITE (28): Xaa equals any of the naturally occurring L-amino acids
  SITE (56): Xaa equals any of the naturally occurring L-amino acids
  SITE (84): Xaa equals any of the naturally occurring L-amino acids
  SITE (104): Xaa equals any of the naturally occurring L-amino acids
CKVCRKTFTFYRNLTLHQSIHTDEKPFXCKECGKTFRRSSHLTAHQSIHADKKPYXCKECGKAFKMYGYLTQHQKIHTGGKPYXCKECGKAFSRASNLVQHEEXSILVRNPMCVKQCGKTFQIWFQPLKALQGNS

SEQ ID NO: 1387 - protein, 182 aa, Homo sapiens
  SITE (87): Xaa equals any of the naturally occurring L-amino acids
  SITE (90): Xaa equals any of the naturally occurring L-amino acids
  SITE (155): Xaa equals any of the naturally occurring L-amino acids
  SITE (171): Xaa equals any of the naturally occurring L-amino acids
  SITE (180): Xaa equals any of the naturally occurring L-amino acids
  SITE (181): Xaa equals any of the naturally occurring L-amino acids
STNVISVLKSSAQNLPLHGTGLIHTGERPYGCSECGKSYSSRSYLAVHKRIHNGEKPYECNDCGKTFSSRSYLTVHKRIHNGEKPYXCSXCGKTFSNSSYLRPHLRIHTGEKPYKCNQCFREFRTQSIFTRHKRVHTGEGHYVCNQCGKAFGTRXSLSSHYSIHTGEYPYXCHDCGRTFXXR

SEQ ID NO: 1388 - protein, 108 aa, Homo sapiens
HGRRTLKPAADDGDNFFSFSKFKPLQCPDCDMTFPCFSELISHQNIHTEERPHKCKTCEESFALDSELACHQKSHMLAEPFKCTVCGKTFKSNLHLITHKRTHIKNTT

SEQ ID NO: 1389 - protein, 80 aa, Homo sapiens
  SITE (79): Xaa equals any of the naturally occurring L-amino acids
CPECGKSFIRKHHLLEHRRIHTGERPYHCAECGKRFTQKHHLLEHQRAHTGERPYPCTHCAKCFRYKQSLKYHLRTHTXE

SEQ ID NO: 1390 - protein, 247 aa, Homo sapiens
  SITE (130): Xaa equals any of the naturally occurring L-amino acids
  SITE (221): Xaa equals any of the naturally occurring L-amino acids
PRRFGRRQGGGCGKIKGKVLAPCRSASPTLASRPAGDLPVCGHEREQRGRDFAGSVQIPGGTTVLVELTPDIHICGICKQQFNNLDAFVAHKQSGCQLTGTSAAAPSTVQFVSEETVPATQTQTTTRTIXSETQTITVSAPEFVFEHGYQTYLPTESNENQTATVISLPAKSRTKKPTTPPAQKRLNCCYPGCQFKTAYGMKDMERHLKIHTGDKPHKCEXCGKCFSPERQAENSHAVPHGREALQV

SEQ ID NO: 1391 - protein, 182 aa, Homo sapiens
  SITE (5): Xaa equals any of the naturally occurring L-amino acids
EFTLXKNYYPVHTVSKSFSQISDLIKHQRIHTGEKPYKCSECRKAFSQCSALTLHQRIHTGKKPNPCDECGKSFSRRSDLINHQKIHTGEKPYKCDACGKAFSTCTDLIEHQKTHAEEKPYQCVQCSRSCSQLSELTIHEEVHCGEDSQNVMNVRKPLVCTPTLFSTRDTVPEKNLMNAVDY

SEQ ID NO: 1392 - protein, 324 aa, Homo sapiens
  SITE (3): Xaa equals any of the naturally occurring L-amino acids
  SITE (185): Xaa equals any of the naturally occurring L-amino acids
  SITE (261): Xaa equals any of the naturally occurring L-amino acids
QRXLLLAHRRAHTPNPLHSCPCGKTFVNLTKFLYHRRTHGVGGVPLPTTPVPPEEPVIGFPEPAPAETGEPEAPEPPVSEETSAGPAAPGTYRCLLCTVNLGKALQLTRHQRFVHRLERRHKCSICGKMFKKKSHVRNHLRTHTGERPFPCPDCSKPFNSPANLARHRLTHTGERPYRCGDCGKXFTQSSTLRQHRLVHAQHFPYRCQECGVRFHRPYRLLMHRYHHTGEYPYKCRECPRSFLLRRLLEVHQLVVHAGRHXPLPILWGCLPLLTAAPGAPLCSRCCQAPRRFECGTCGKKVGSAARLQAHEAAHAAAGLGEVLG

SEQ ID NO: 1393 - protein, 184 aa, Homo sapiens
  SITE (174): Xaa equals any of the naturally occurring L-amino acids
  SITE (182): Xaa equals any of the naturally occurring L-amino acids
  SITE (183): Xaa equals any of the naturally occurring L-amino acids
  SITE (184): Xaa equals any of the naturally occurring L-amino acids
HYVCESCDKQFSSVDDLQKHLLDMHTFVLYHCTLCQEVFDSKVSIQVHLAVKHSNEKKMYRCTACNWDFRKEADLQVHVKHSHLGNPARLTSASSVGRPSAPRWSCSATSPHTARSITVSSAARPSTPSSCWRSTCGRSTVCLMLRPTTARPMGYPQWPPRKLSLLTCRACCLXTLRHLTAXXX

SEQ ID NO: 1394 - protein, 194 aa, Homo sapiens
  SITE (14): Xaa equals any of the naturally occurring L-amino acids
  SITE (109): Xaa equals any of the naturally occurring L-amino acids
PIEERGDLFGKALXLNTDFVSLRQVPYKYDLYEKTLKYNSDLLNSNRSYAGKQTDECNEFGKALLYLKQEKTHSGVEYSEYNKSGKALSHKAAIFKHQKIKNLVQPFIXTYCDKAFSFKSLLISHKRIHTGEKPYECNVCKKTFSHKANLIKHQRIHTGEKPFECPECGKAFTHQSNLIVHPESTYGEESPMSA

SEQ ID NO: 1395 - protein, 134 aa, Homo sapiens
HSHVPRITEINKALQRKSRGVYWHSELQKGLESEPTSRRQCRNSPGESEEKTPSQEKMSHQSFCARDKACTHILCGKNCSQSVHSPHKPALKLEKVSQCPECGKTFSRSSYLVRHQRIHTGEKPHKCSECGKGL

SEQ ID NO: 1396 - protein, 363 aa, Homo sapiens
  SITE (193): Xaa equals any of the naturally occurring L-amino acids
  SITE (198): Xaa equals any of the naturally occurring L-amino acids
  SITE (210): Xaa equals any of the naturally occurring L-amino acids
  SITE (273): Xaa equals any of the naturally occurring L-amino acids
  SITE (284): Xaa equals any of the naturally occurring L-amino acids
  SITE (312): Xaa equals any of the naturally occurring L-amino acids
  SITE (319): Xaa equals any of the naturally occurring L-amino acids
ALLIGSQRTSGPESSMKVTSSIPVFDLQDGGRKICPRCNAQFRVTEALRGHMCYCCPEMVEYQKKGKSLDSEPSVPSAAKPPSPEKTAPVASTPSSTPIPALSPPTKVPEPNENVGDAVQTKLIMLVDDFYYGRDGGKVAQLTNFPKVATSFRCPHCTKRLKNNIRFMNHMKHHVELDQQNGEVDGHTICQHXYRQFXTPFQLQCHLENXHSPYESTTKCKICEWAFESEPLFLQHMKDTHKPGEMPYVCQVCQYRSSLYSEVDVHFRMIHEXTRHLLCPYCLXVFKNGNAFQQHYMRHQKRNVYHCNKCRXQFLFAKXQNCNTSFNTIKPSVNPSSWRACKPGTKECHGPADMPGSAAFEIP

SEQ ID NO: 1397 - protein, 72 aa, Homo sapiens
  SITE (64): Xaa equals any of the naturally occurring L-amino acids
KPYKCNECGKAFSDGSSFARHQRCHTGKKPYECIECGKAFIQNTSLIRHWRYYHTGENPLIASXVGKPSVTT

SEQ ID NO: 1398 - protein, 146 aa, Homo sapiens
  SITE (104): Xaa equals any of the naturally occurring L-amino acids
  SITE (132): Xaa equals any of the naturally occurring L-amino acids
  SITE (135): Xaa equals any of the naturally occurring L-amino acids
  SITE (144): Xaa equals any of the naturally occurring L-amino acids
IRGRTHNGEKPYACKECGKPFGSAQNLRIHERTQTHIMHSVERPYKCKICGRGFYSAKSFQIHEKSYTGEKPYECKQCGKAFVSFTSFRYHERTHTGENPYECXQFGKAFRSVKNLRFHKRTHTGEKPCECXKCXKAFHNFSSXQI

SEQ ID NO: 1399 - protein, 115 aa, Homo sapiens
VSITMWIKCQTSFYSKILLFSFCTYIFISTLIFLSFFFSPRKNLTPTWTTEQDSISKKKKKKKKTWPCGEGRASVNSWTCFCLTYSLKTKIFPKMYRHCLPESTLVKTYKFVYAL

SEQ ID NO: 1400 - protein, 110 aa, Homo sapiens
  SITE (44): Xaa equals any of the naturally occurring L-amino acids
  SITE (81): Xaa equals any of the naturally occurring L-amino acids
  SITE (103): Xaa equals any of the naturally occurring L-amino acids
NQTLNIIIEFISEKNLTNVKNVTKFSISIHALKYIGEFILERNXRNVRFVTRHSGVIHTWHNILEFTLERNRASVMSVTRXFSGQSTLIHHQAIHVHRENFTXVMIGHKS

SEQ ID NO: 1401 - protein, 70 aa, Homo sapiens
  SITE (15): Xaa equals any of the naturally occurring L-amino acids
NKCGKFFKYSANFMXHQTVHTSERTYECRECGKSFMYNYRLMRHKRVHTGERPYECNTCGKFFRYSSTFV

SEQ ID NO: 1402 - protein, 106 aa, Homo sapiens
  SITE (85): Xaa equals any of the naturally occurring L-amino acids
  SITE (96): Xaa equals any of the naturally occurring L-amino acids
  SITE (98): Xaa equals any of the naturally occurring L-amino acids
  SITE (106): Xaa equals any of the naturally occurring L-amino acids
RGSMEGSRPRAPSGHLAPSPPAFDGELDLQRYSNGPAVSAGSLGMGAVSWSESRAGERRFPCPVCGKRFRFNSILALHLRAHPGXQAFQCPHCGHXGXNGASCLPX

SEQ ID NO: 1403 - protein, 209 aa, Homo sapiens
  SITE (208): Xaa equals any of the naturally occurring L-amino acids
LAFFTVYRNQNYLVPSPVLRILDHTAFSTEKSADIVICDEECDSPESVNQQTQEESPIEVHTAEDVPIAVEVHAISEDYDIETENNSSESLQDQTDEEPPAKLCKILDKSQALNVTAQQKWPLLRANSSGLYKCELCEFNSKYFSDLKQHMILKHKRTDSNVCRVCKESFSTNMLLIEHAKLHEEDPYICKYCDYKTVIFFWKKTLPXP

SEQ ID NO: 1404 - protein, 112 aa, Homo sapiens
QCNLCGKRFMQLISLQFHQRTHTGERPYTCDVCQKQFTQKSYLKCHKRSHTGEKPFECKDCKKVFTYRGSLKEHQRIHSGEKPYKCSKCPRAFSRLKLLRRHQKTHPEATSQ

SEQ ID NO: 1405 - protein, 132 aa, Homo sapiens
  SITE (104): Xaa equals any of the naturally occurring L-amino acids
  SITE (121): Xaa equals any of the naturally occurring L-amino acids
  SITE (123): Xaa equals any of the naturally occurring L-amino acids
FGRGKIHTGEKPYKCNQCGKVFNQASYLTRHQIIHTGERPYRCSKCGKAFRGCSGLTAHLAIHTEKKSHECKECGKIFTQKSSLTNHHRIHIGEKPYKCTLCSXGLQCTILTLHSFRGFHXEXPYKLCMAKP

SEQ ID NO: 1406 - protein, 119 aa, Homo sapiens
  SITE (19): Xaa equals any of the naturally occurring L-amino acids
  SITE (110): Xaa equals any of the naturally occurring L-amino acids
  SITE (116): Xaa equals any of the naturally occurring L-amino acids
VVVVEQNGSFQVKIPKNFXCEHCFGAFRSSYHLKRHILIHTGEKPFECDICDMRFIQKYHLERHKRVHSGEKPYQCERCHQVRLIPATIPHTHFSFPKNQGHPPLLPDKXATSVTXHNS

SEQ ID NO: 1407 - protein, 357 aa, Homo sapiens
  SITE (35): Xaa equals any of the naturally occurring L-amino acids
  SITE (59): Xaa equals any of the naturally occurring L-amino acids
GVLHLGHLVFQSLSLSTLLLLPAESHPSWGGVGQXRAARDRTIAELHRSRLEVAEVNGXLAELGLHLKEEKCQWSKERAGLLQSVEAEKDKILKLSAEILRLEKAVQEERTQNQVFKTELAREKDSSLVQLSESKRELTELRSALRVLQKEKEQLQEEKQELLEYMRKLEARLEKVADEKWNEDATTEDEEAAVGLSCPAALTDSEDESPEDMRLPPYGLCERGDPGSSPAGPREASPLVVISQPAPISPHLSGPAEDSSSDSEAEDEKSVLMAAVQSGGEEANLLLPELGSAFYDMASGFTVGTLSETSTGGPATPTWKECPICKERFPAESDKDALEDHMDGHFFFSTQDPFTFE

SEQ ID NO: 1408 - protein, 210 aa, Homo sapiens
  SITE (109): Xaa equals any of the naturally occurring L-amino acids
  SITE (136): Xaa equals any of the naturally occurring L-amino acids
  SITE (155): Xaa equals any of the naturally occurring L-amino acids
VHEEEKFYKQDECREGFRQSPDCSQPQGAPAVEKTFLCQQCGKTFTRKKTLVDHQRIHTGEKPYQCSDCGKDFAYRSAFIVHKKKHAMKRKPEGGPSFSQDTVFQVPQXSHSKEEPYKCSQCGKAFRITHSSSSIXEFTLERSHISAGSVGKPSXGVPISTDIRGFTLFKNSMIAMKVKRLQMWSQKSSLVRNVFGVKNVGKPLHVKEPF

SEQ ID NO: 1409 - protein, 461 aa, Homo sapiens
  SITE (1): Xaa equals any of the naturally occurring L-amino acids
  SITE (3): Xaa equals any of the naturally occurring L-amino acids
  SITE (4): Xaa equals any of the naturally occurring L-amino acids
XGXXFLGRPTRPAASKTQGAVARMQEDRDGSCSTVGGVGYGDSKDCILEPLSLPESPGGTTTLEGSPSVPCIFCEEHFPVAEQDKLLKHMIIEHKIVIADVKLVADFQRYILYWRKRFTEQPITDFCSVIRINSTAPFEEQENYFLLCDVLPEDRILREELQKQRLREILEQQQQERNDTNFHGVCMFCNEEFLGNRSVILNHMAREHAFNIGLPDNIVNCNEFLCTLQKKLDNLQCLYCEKTFRDKNTLKDHMRKKQHRKINPKNREYDRFYVINYLELGKSWEEVQLEDDRELLDHQEDDWSDWEEHPASAVCLFCEKQAETIEKLYVHMEDAHEFDLLKIKSELGLNFYQQVKLVNFIRRQVHQCRCYGCHVKFKSKADLRTHMEETKHTSLLPDRKTWDQLEYYFPTYENDTLLCTLSDSESDLTAQEQNENVPIISEDTSKLYALKQSSILNQLLL

SEQ ID NO: 1410 - protein, 159 aa, Homo sapiens
  SITE (9): Xaa equals any of the naturally occurring L-amino acids
  SITE (109): Xaa equals any of the naturally occurring L-amino acids
  SITE (143): Xaa equals any of the naturally occurring L-amino acids
HTVETNLSXCVVGGCNASFASQGGLARHVPTHFSQQNSSKVSSQPKAKEESPSKAGMNKRRKLKNKRRRSLPRPHDFFDAQTLDAIRHRAICFNLSAHIESLGKGHSVXFHSTVIAKRKEDSGKIKLLLHWMPEDITMPQKRXKRTLIRKVFNLYLSKQ

SEQ ID NO: 1411 - protein, 184 aa, Homo sapiens
EKSHIREHHRVHIGVKPFEYGKSFNRNSTLPVHQRTHATDKYSDYHPCTETFSYQSTFSVHQKVHIRAKPYEYNECGKSCSMNSHLIWPQKSHTGEKPYECPECGKAFSEKSRLRKHQRTHTGEKPYKCDGCDKAFSAKSGLRIHQRTHTGEKPFECHECGKSFNYKSILIVHQRTHTGEKPFE

SEQ ID NO: 1412 - protein, 383 aa, Homo sapiens
HYRRYACRYRSGIPGSTHASEGFYTVYRNVFEMIAKEELESVLEEEVDDFPTFGDSQSDYDTVVHPFYAYWQSFCTQKNFAWKEEYDTRQASNRWEKRAMEKENKKIRDKARKEKNELVRQLVAFIRKRDKRVQAHRKLVEEQNAEKARKAEEMRRQQKLKQAKLVEQYREQSWMTMANLEKELQEMEARYEKEFGDGSDENEMEEHELKDEEDGKDSDEAEDAELYDDLYCPACDKSFKTEKAMKNHEKSKKHREMVALLKQQLEEEEENFSRPQIDENPLDDNSEEEMEDAPKQKLSKKQKKKKQKPAQDVPGKDSYLPAAHFQMAWGKKCVLGERRDGESEHKCAKMLLENRQVRLGYVCQASFFYNACLLLPLFVTVEE

SEQ ID NO: 1413 - protein, 344 aa, Homo sapiens
  SITE (150): Xaa equals any of the naturally occurring L-amino acids
  SITE (161): Xaa equals any of the naturally occurring L-amino acids
NQLTCGCRESYICKVNRKEDYSRCLQIMLDKGKLWFRCSLCSATAQNLTDMNTHIHQVHKEKSDEEEQQYVIKCGTCTKAFHDPESAQQHFHRKHCFLQKPSVAHFGSEKSNLYKFTASASHTERKLKQAINYSKSLDMEKGVENDLSYXNIEEEIVELPXLDYLRTMTHIVFVDFDNWSNFFGHLPGHLNQGTFIWGFQGGNTNWKPPLNCKIYNYLNRIGCFFLHPRCSKRKDAADFAICMHAGRLDEQLPKQIPFTILSGDQGFLELENQFKKTQRPAHILNPHHLEGDMMCALLNSISDTTKECDSDDNMGAKNTSIGEEFISTEDVELEEAIRRSLEEM

SEQ ID NO: 1414 - protein, 120 aa, Homo sapiens
  SITE (106): Xaa equals any of the naturally occurring L-amino acids
  SITE (111): Xaa equals any of the naturally occurring L-amino acids
  SITE (119): Xaa equals any of the naturally occurring L-amino acids
CSFVSAFRHNLDRHMQTHHGHHKPFRCKLCSFKSSYNSRLKTHILKAHAGEHAYKCSWCSFSTMTISQLKEHSLKVHGKALTLPRPRIVSLLSSHSHHSSQKATRXKSGRXHDSSYSEXP

SEQ ID NO: 1415 - protein, 235 aa, Homo sapiens
MPTPALIRLTIGKAGTPAGTGPEFPGRPTRPVSSEVSTLHKRKGRQSNWNPQHLLILQAQFASSLFQTSEGKYLLSDLGPQERMQISKFTGLSMTTISHWLANVKYQLRKTGGTKFLKNMDKGHPIFYCSDCASQFRTPSTYISHLESHLGFQMKDMTRLSVDQQSKVEQEISRVSSAQRSPETIAAEEDTDSKFKCKLCCRTFVSKHAVKLHLSKTHSKSPEHHSQFVTDVDEE

SEQ ID NO: 1416 - protein, 362 aa, Homo sapiens
  SITE (11): Xaa equals any of the naturally occurring L-amino acids
PRVRLVPRARXAWRLRWTTRPVVEMSGRSKRESRGSTRGKRESESRGSSGRVKRERDREREPEAASSRGSPVRVKREFEPASAREAPASVVPFVRVKREREVDEDSEPEREVRAKNGRVDSEDRRSRHCPYLDTINRSVLDFDFEKLCSISLSHINAYACLVCGKYFQGRGLKSHAYIHSVQFSHHVFLNLHTLKFYCLPDNYEIIDSSLEDITYVLKPTFTKQQIANLDKQAKLSRAYDGTTYLPGIVGLNNIKANDYANAVLQALSNVPPLRNYFLEEDNYKNIKRPPGDIMFLLVQRFGELMRKLWNPRNFKAHVSPHEMLQAVVLCSKKTFQITKQGDGVDFLSWFLNALHSALGGTK

SEQ ID NO: 1417 - protein, 158 aa, Homo sapiens
  SITE (62): Xaa equals any of the naturally occurring L-amino acids
  SITE (107): Xaa equals any of the naturally occurring L-amino acids
GTPAPASLPGGSKEEEEKAKRLLYCALCKVAVNSLSQLEAHNKGTKHKTILEARSGLGPIKXYPRLGPPTPGEPEAPAQDRTFHCEICNVKVNSEVQLKQHISSRRXRDGVAGKPNPLLSRHKKSRGAGELAGTLTFSKELPKSLAGGCSPAPWRWLQ

SEQ ID NO: 1418 - protein, 134 aa, Homo sapiens
  SITE (45): Xaa equals any of the naturally occurring L-amino acids
  SITE (105): Xaa equals any of the naturally occurring L-amino acids
HEKAFSTRSSLTGHNSIHTGEKPYECHDCGKTFRKSSYLTQHVRXHTGEKPYECNECGKSFSSSFSLTVHKRIHTGEKPYECSDCGKAFNNLSAVKKHLRTHTGXKPYECNHCGKSFTSNSYLSVHKRIHNRWI

SEQ ID NO: 1419 - protein, 125 aa, Homo sapiens
  SITE (76): Xaa equals any of the naturally occurring L-amino acids
  SITE (96): Xaa equals any of the naturally occurring L-amino acids
  SITE (115): Xaa equals any of the naturally occurring L-amino acids
  SITE (117): Xaa equals any of the naturally occurring L-amino acids
  SITE (122): Xaa equals any of the naturally occurring L-amino acids
DFLSDSGTAFPTMAEVVAEVAEMPTQMSPGAVEMSTPMSAEMMEMSTEVTEMTPGEALASSLFFQHHQFMCSECGXLYNTLEEVLSHQEQHMLAVXEEEALTTQNVGLEPELVPXAXGPFQXGEC

SEQ ID NO: 1420 - protein, 119 aa, Homo sapiens
  SITE (107): Xaa equals any of the naturally occurring L-amino acids
  SITE (116): Xaa equals any of the naturally occurring L-amino acids
HGCLFCAFTTSSMELMALHLQANHLGKAKRKDNTIGVTVNCKDQAREASKMALLPSLQSNKDLGLSNMISSLDSASEKMAQGQLKETLGEQKSGAWDRPRGTLHFCXLSHQTFYKXFGV

SEQ ID NO: 1421 - protein, 273 aa, Homo sapiens
RRPSLRLHRKTHQVPAAPAPCPCPVCGRPLANQGSLRNHMRLHTGEKPFLCPHCGRAFRQRGNLRGHLRLHTGERPYRCPHCADAFPQLPELRRHLISHTGEAHLCPVCGKALRDPHTLRAHERLHSGERPFPCPQCGRAYTLATKLRRHLKSHLEDKPYRCPTCGMGYTLPQSLRRHQLSHRPEAPCSPPSVPSAASEPTVVLLQAEPQLLDTHREEEVSPARDVVEVTISESQEKCFVVPEEPDAAPSLVLIHKDMGLGAWAEVVEVEMGT

SEQ ID NO: 1422 - protein, 83 aa, Homo sapiens
  SITE (67): Xaa equals any of the naturally occurring L-amino acids
  SITE (72): Xaa equals any of the naturally occurring L-amino acids
EFTLEKNPMNVTSVFTFSAPVVTSKATRGFTRGRITMECNQCGKAFSTRSSLHWGTISIPLQGEKPXWNVHXCGGKPFREELP

SEQ ID NO: 1423 - protein, 187 aa, Homo sapiens
  SITE (4): Xaa equals any of the naturally occurring L-amino acids
  SITE (113): Xaa equals any of the naturally occurring L-amino acids
DAWXPGASNDFKYGLLPESWPKQETWENGESSLIMNKLKCPHCSYVAKYRRTLKRHLLIHTGVRSFSCDICGKLFTRREHVKRHSLVHKKDKKYKCMVCKKIFMLAASVGIRXGSRRYGVCVDCADKSQPGGQEGVDQGQDTEFPRDEEYEENEVGEADEELVDDGEDQNDPSRWDESGEVCMSLDD

SEQ ID NO: 1424 - protein, 188 aa, Homo sapiens
  SITE (171): Xaa equals any of the naturally occurring L-amino acids
SRERPYECSKCGIFFTYAADLTQHQKVHNRGKPYECCECGKFFSQHSSLVKHRRVHTGESPHVCGDCGKFFSRSSNLIQHKRVHTGEKPYECSDCGKFFSQRSNLIHHKRVHTGRSAHECSECGKSFNCNSSLIKHWRVHTGERPYKCNECGEILQPHCQPHSTSDSSHWXSGLTGVVSVGKPSAEAL

SEQ ID NO: 1425 - protein, 134 aa, Homo sapiens
  SITE (63): Xaa equals any of the naturally occurring L-amino acids
  SITE (114): Xaa equals any of the naturally occurring L-amino acids
  SITE (126): Xaa equals any of the naturally occurring L-amino acids
  SITE (127): Xaa equals any of the naturally occurring L-amino acids
FAVVASSPWCKVCPLTFFTKSEMQIHSKSHTEAKPHKCPHCSKSFANASYLAQHLRIHLGVKXTTAPTVISPSGSSPTSSSTPESTQATDPTSAHILAARRLSLSSPTPVSPAXDNKDKPYKCPNXXGLFGFGF

SEQ ID NO: 1426 - protein, 217 aa, Homo sapiens
  SITE (11): Xaa equals any of the naturally occurring L-amino acids
  SITE (93): Xaa equals any of the naturally occurring L-amino acids
  SITE (117): Xaa equals any of the naturally occurring L-amino acids
LLQRCLLAAFXALSPWRRTLVLEMAATLLMAGSQAPVTFEDMAMYLTREEWRPLDAAQRDLYRDVMQENYGNVVSLDFEIRSENEVNPKQEIXEDVQFGTTSERPAENAEENPESEXGFESGDRSERQWGDLTAEEWVSYPLQPVTDLLVHKEVHTGIRYHICSHCGKAFSQISDLNRHQKTHTGDRPYKCYECGKGFSRSSHLIQASKNTYWGEAL

SEQ ID NO: 1427 - protein, 113 aa, Homo sapiens
GHEDYWFETKMSALKQSTSEASVLGERTKSVMMEKGLDWEGRSSTEKNYKCKECGKVFKYNSSFISHQRNHTSEKPHKCKECGIAFMNSSSLLNHHKVHAGKQPYRCIECGKF

SEQ ID NO: 1428 - protein, 257 aa, Homo sapiens
  SITE (49): Xaa equals any of the naturally occurring L-amino acids
  SITE (100): Xaa equals any of the naturally occurring L-amino acids
  SITE (107): Xaa equals any of the naturally occurring L-amino acids
RVRLYKWGEQGKAISSASLIKLQSFHTKEHPFKCNECGKTFSHSAHLSXHQLIHAGENPFKCSKCDRVFTQRNYLVQHERTHARKKPLVCNECGKTFRQXSCLSKHXRIHSGEKPYVCDYCGKAFGLSAELVRHQRIHTGEKPYVCQECGKAFTQSSCLSIHRRVHTGEKPYRCGECGKAFAQKANLTQHQRIHTGEKPYSCNVCGKAFVLSAHLNQHLRVHTQETLYQCQRCQKAFRCHSSLSRHQRVHNKQQYCL

SEQ ID NO: 1429 - protein, 169 aa, Homo sapiens
PAWSEPEPEAGLEPEREPGPAGSGEPGLRQRVRRGRSRADLESPQRKHKCHYAGCEKVYGKSSHLKAHLRTHTGERPFACSWQDCNKKFARSDELARHYRTHTGEKKFSCPICEKRFMRSDHLTKHARRHANFHPGMLQRRGGGSRTGSLSDYSRSDASSPTISPASSP

SEQ ID NO: 1430 - protein, 101 aa, Homo sapiens
  SITE (99): Xaa equals any of the naturally occurring L-amino acids
VAMGKRYFCDYCDRSFQDNLHNRKKHLNGLQHLKAKKVWYDMFRDAAAILLDEQNKRPCRKFLLTGQCDFGSNCRFSHMSERDLQELSIQWRRRGEPGXGY

SEQ ID NO: 1431 - protein, 25 aa, Homo sapiens
IGSFVFSGSFAIHYIIHKQISLLLQ

SEQ ID NO: 1432 - protein, 83 aa, Homo sapiens
  SITE (40): Xaa equals any of the naturally occurring L-amino acids
  SITE (55): Xaa equals any of the naturally occurring L-amino acids
  SITE (58): Xaa equals any of the naturally occurring L-amino acids
HEQLQQHLRSHREGVFKCPLCSRVFPSPSSLDQHLGDHSXESHFLCVDCGLAFGXEAXLLAQRRAPHPESSAFMSMWEELCQP

SEQ ID NO: 1433 - protein, 270 aa, Homo sapiens
PGSPDVNRAVVRPPPPPPPPPPAPQPTMSRRKQGKPQHLSKREFSPEPLEAILTDDEPDHGPLGAPEGDHDLLTCGQCQMNFPLGDILIFIEHKRKQCNGSLCLEKAVDKPPSPSPIEMKKASNPVEVGIQVTPEDDDCLSTSSRGICPKQEHIADKLLHWRGLSSPRSAHGALIPTPGMSAEYAPQGICKDEPSSYTCTTCKQPFTSAWFLLQHAQNTHGLRIYLESEHGSPLTPRVLHTPPFGVVPRELKMCGSFRMEAREPLSSEKI

SEQ ID NO: 1434 - protein, 290 aa, Homo sapiens
  SITE (76): Xaa equals any of the naturally occurring L-amino acids
  SITE (98): Xaa equals any of the naturally occurring L-amino acids
  SITE (176): Xaa equals any of the naturally occurring L-amino acids
  SITE (178): Xaa equals any of the naturally occurring L-amino acids
  SITE (189): Xaa equals any of the naturally occurring L-amino acids
  SITE (217): Xaa equals any of the naturally occurring L-amino acids
KGLIGKRAMKCPYCDFYFMKNGSDLQRHIWAHEGVKPFKCSLCEYATRSKSNLKAHMNRHSTEKTHLCDMCGKKFXSKGTLKSHKLLHTADGKQFKCXVCDYTAAQKPQLLRHMEQHVSFKPFRCAHCHYSCNISGSLKRHYNRKHPNEEYANVGTGELAAEVLIQQGGLKCPVCXFXYGTKWEFNRHXKNKHGLKVVEIDGDPKWETATEAPEEPXTQYLHITEAEEDVQGTQAAVAALQDLRYTSESGDRLDPTAVNILQQIIELGAETHDATALLGGCHGTRDGDCG

SEQ ID NO: 1435 - protein, 313 aa, Homo sapiens
KGTPAGTGPEFPGRPARPEVFDDASDQDSTDKPWRPYYNYKPKKKSRQLKKMRKVNWRKEHGNRSPSHKCKYPAELDCAVGKAPQDKPFEEEETKEMPKLQCELCDGDKAVGAGNQGRPHRHLTSRPYACELCAKQFQSPSTLKMHMRCHTGEKPYQCKTCGRCFSVQGNLQKHERIHLGLKEFVCQYCNKAFTLNETLKIHERIHTGEKRYHCQFCFQRFLYLSTKRNHEQRHIREHNGKGYACFQCPKICKTAAALGMHQKKHLFKSPSQQEKIGDVCHENSNPLENQHFIGSEDNDQKDNIQTGVENVVL

SEQ ID NO: 1436 - protein, 178 aa, Homo sapiens
SRAAERKRIIIKMEPEDIPTDELKDFNIIKVTDKDCNESTDNDELEDEPEEPFYRYYVEEDVSIKKSGRKTLKPRMSVSADERGGLENMRPPNNSSPVQEDAENASCELCGLTITEEDLSSHYLAKHIENICACGKCGQILVKGRQLQEHAQRCGEPQDLTMNGLGNTEEKMDLGRES

SEQ ID NO: 1437 - protein, 229 aa, Homo sapiens
  SITE (29): Xaa equals any of the naturally occurring L-amino acids
  SITE (170): Xaa equals any of the naturally occurring L-amino acids
  SITE (174): Xaa equals any of the naturally occurring L-amino acids
  SITE (175): Xaa equals any of the naturally occurring L-amino acids
  SITE (180): Xaa equals any of the naturally occurring L-amino acids
  SITE (219): Xaa equals any of the naturally occurring L-amino acids
STGGHPPRGRAGGGAAAESQLGPPDLPQXTLAPGPFGGTGYSVITAPPMEEGTSAPGTPYSEEPAGEAAQAVVVSDTLKEAGTHYIMATDGTQLHHIELTADGSISFPSPDALASGAKWPLLQCGGLPRDGPEPPSPAKTHCVGDSQSSASSPPATSKALGLAVPPSPPXAATXXSKKFXCKICAEAFPGRAEMESHKRAHAGPGASSAPTAPSVPGSXRVGGTWKDSS

SEQ ID NO: 1438 - protein, 177 aa, Homo sapiens
  SITE (13): Xaa equals any of the naturally occurring L-amino acids
AWPAEPADRPVPXRCPECSVKFESAEDLESHMQVDHRDLTPETSGPRKGTQTSPVPRKKTYQCIKCQMTFENEREIQIHVANHMIEEGINHECKLCNQMFDSPAKLLCHLIEHSFEGMGGTFKCPVCFTVFVQANKLQQHIFAVHGQEDKIYDCSQCPQKFFFQTELQNHTMSQHAQ

SEQ ID NO: 1439 - protein, 227 aa, Homo sapiens
  SITE (28): Xaa equals any of the naturally occurring L-amino acids
RLAQFTIEYLLHSQEFLTSQLHTLEESXRLSHCDGEQSKKLLTKQAGEIKTLKEECKRRKKMISTQQLMIEAKANYYQCHFCDKAFMNQAFLQSHIQRRHTEENSHFEYQKNAQIEKLRSEIVVLKEELQLTRSELEAAHHASAVRFSKEYEMQKTKEEDFLKLFDRWKEEEKEKLVDEMEKVKEMFMKEFKELTSKNSALEYQLSEIQKSNMQIKSNIGTLKDAHE

SEQ ID NO: 1440 - protein, 163 aa, Homo sapiens
  SITE (144): Xaa equals any of the naturally occurring L-amino acids
  SITE (156): Xaa equals any of the naturally occurring L-amino acids
  SITE (157): Xaa equals any of the naturally occurring L-amino acids
  SITE (160): Xaa equals any of the naturally occurring L-amino acids
  SITE (163): Xaa equals any of the naturally occurring L-amino acids
MWKNICPEVNPQGTSKNSHRRKTPMNVVNVGKLLFRSPPSEIITEFTQGRNPFNAINVEKHLARSQTSEYIRELTLGRKLTSVMNVKNPSGEKIISFNIRKLTRERNHSNVTNVGKLLPGHPTLRVHQRIHTGEKPFKCNECGXKFVRKAILSDHXXIPXGEX

SEQ ID NO: 1441 - protein, 206 aa, Homo sapiens; identical to SEQ ID NO: 1012

SEQ ID NO: 1442 - protein, 60 aa, Homo sapiens
PYKCKECGKAFHRYSILSTHKKIHTGEKPHKCGECGKAFNWSSTLITHKIIHSGGKTLQI

SEQ ID NO: 1443 - protein, 235 aa, Homo sapiens
  SITE (199): Xaa equals any of the naturally occurring L-amino acids
  SITE (214): Xaa equals any of the naturally occurring L-amino acids
  SITE (216): Xaa equals any of the naturally occurring L-amino acids
STKFSGDGKSFLHGNYEELYSAAKFSVSTKANSTKSQVSKHQRTHEIEKNHVCSECGKAFVKKSQLTDHERVHTGEKPYGCTLCAKVFSRKSRLNEHQRIHKREKSFICSECGKVFTMKSRLIEHQRTHTGEKPYICNECGKGFPGKRNLIVHQRNHTGEKSYICSECGKGFTGKSMLIIHQRTHTGEKPYICSECGKXFTTKHYVIIHQRNHXGXKPYICNECGKGFTMKSRMI

SEQ ID NO: 1444 - protein, 57 aa, Homo sapiens
YLTSVYLGERPYLCDYPDCGKAFVQSGQLKTHQRLHTGEKPFVCSENGTVLEVKFME

SEQ ID NO: 1445 - protein, 249 aa, Homo sapiens
INPMYALSVGRLSSRSLASSIIREFTLGEKPHGCSICGKAFSRKSGLTEHQRNHTGEKPYVCNECGKGFSQKTCLISHQRFHTGKTPFVCTECGKSCSHKSGLINHQRIHTGEKPYTCSDCGKAFRDKSCLNRHRRTHTGERPYGCSDCGKAFSHLSCLVYHKGMLHAREKCVGSVKLENPCSESHSLSHTRDLIQDKDSVNMVTLQMPSVAAQTSLTNSAFQAESKVAIVSQPVARSSVSADSRICTE

SEQ ID NO: 1446 - protein, 117 aa, Homo sapiens
  SITE (117): Xaa equals any of the naturally occurring L-amino acids
LHRAGLSYEARHVVSPEQIATSDKMQHFKRTGTGTPVKRVRKAIEKSETTSEHTCQLCGGWFDTKIGLSNHVRGHLKRLGKTKWDAHKSPICVLNEMMQNEEKYEKILKALNSRRIX

SEQ ID NO: 1447 - protein, 140 aa, Homo sapiens
HEDKSLHLEGDPNPSAAPTSTCAPRKMPKRISISKQLASVKALRKCSDLEKAIATTALIFRNSSDSDGKLEKAIAKDLLQTQFRNFAEGQETKPKYREILSELDEHTENKLDFEDFMILLLSITVMSDLLQNIRNVKIMK

SEQ ID NO: 1448 - protein, 103 aa, Homo sapiens
MLPRCAYILDCFVLFWFGFFSGTESVTVTQAGVQWRDLRSLQPLPPRFKQFSCLSLWPPPHLANFFFFFFFFCIFSRDRVSSCRIRYQAYRYRRPRGGARYPI

SEQ ID NO: 1449 - protein, 156 aa, Homo sapiens
  SITE (34): Xaa equals any of the naturally occurring L-amino acids
QRVKKLFSTETSLQVHRRIHTGERPYPCPDCGKXFRQSTHLKDHRRLHTGERPFACEVCGKAFAISMRLAEHRRIHTGERPYSCPDCGKSYRSFSNLWKHRKTHQQQHQAAVRQQLAEAEAAVGLAVMETAVEALPLVEAIEIYPLAEAEGVQISG

SEQ ID NO: 1450 - protein, 112 aa, Homo sapiens
  SITE (100): Xaa equals any of the naturally occurring L-amino acids
  SITE (101): Xaa equals any of the naturally occurring L-amino acids
SKPPPALPWSLLIGLPASILVLSREIFNKKQVKITSEKMTTYKRHNFLTEYQIVHNGEKVYECKECRKTFIRAQHLVNTLRIHTGEKPYKCKECGRPLDXXHILFDITNFTP

SEQ ID NO: 1451 - protein, 216 aa, Homo sapiens
GTPLLIQGMRQMRSPLYVPSVGKTFNNTSNLRTHQRIHTGEKPYKCSECGKSFSRSSNRIRHERIHLEEKHYKCPKCQESFRRRSDLTTHQQDHLGKRPYRCDICGKSFSQSATLAVHHRTHLEPAPYICCECGKSFSNSSSFGVHHRTHTGERPYECTECGRTFSDISNFGAHQRTHRGEKPYRCTVCGKHFSRSSNLIRHQKTHLGEQAGKDSS

SEQ ID NO: 1452 - protein, 56 aa, Homo sapiens
  SITE (53): Xaa equals any of the naturally occurring L-amino acids
TREKPYKCEASDKSCDASDKSCSQSSDITPHKRIHTRAKSYKCSNCERVSSRXVHL

SEQ ID NO: 1453 - protein, 158 aa, Homo sapiens; identical to SEQ ID NO: 1024

SEQ ID NO: 1454 - protein, 149 aa, Homo sapiens
  SITE (60): Xaa equals any of the naturally occurring L-amino acids
  SITE (130): Xaa equals any of the naturally occurring L-amino acids
  SITE (144): Xaa equals any of the naturally occurring L-amino acids
YSDCGLTFVKHQGIHLREKPYTCNECGKDFRLNSHLIQHQRIHTGEKPHECNECGKAFGXTSCLIQHHKIHGREKSYECNEYDESFNHGSDLVLQQEVLTREKAFDCDVWEKNLGQRAHLVQHQRIHTKXKPYECDERGETFSXIQASF

SEQ ID NO: 1455 - protein, 244 aa, Homo sapiens
SLRKRQRTLAWETHRKRKRSGNSDSIERDAAQEAEAGTGLEPGSNSGQCSVPLKKGKDAPIKKESLGHWSQGLKISMQDPKMQVYKDEQVVVIKDKYPKARYHWLVLPWTSISSLKAVAREHLELLKHMHTVGEKVIVDFAGSSKLRFRLGYHAIPSMSHVHLHVISQDFDSPCLKNKKHWNSFNTEYFLESQAVIEMVQEAGRVTVRDGMPELLKLPLRCHECQQLLPSIPQLKEHLRKHWTQ

SEQ ID NO: 1456 - protein, 194 aa, Homo sapiens
QKGLPDAHLGLPPGLAKKSSSLKEVVAGAPRPGLLSLAKPLDAPAVNKAIKSPPGFSAKGLGHPPSSPLLKKTPLALAGSPTPKNPEDKSPQLSLSPRPASPKAQWPQSEDEGPLNLTLDSDGGRELDCQLCGAWFETRKGLSSHARAHLRHLGVSDPDAKGSPIDVLHGLIRRDGVQIRLPPRRGALAHPGRP

SEQ ID NO: 1457 - protein, 257 aa, Homo sapiens
  SITE (35): Xaa equals any of the naturally occurring L-amino acids
  SITE (126): Xaa equals any of the naturally occurring L-amino acids
  SITE (150): Xaa equals any of the naturally occurring L-amino acids
PPPRRPSTRFTCPHCAKVCKTAAALSDHGQRHAAXRPGGTPTPVIAYSKGSAGTRPGDVKEEAPQEMQVSSSSGEAGGGSTAAEEASETASLQDPIISGGEEPPVVASGGSYVYPPVQEFPLALIXGGREPGGGRGKSGSEGPVGAGEGXEEGIGAAKVTFYPEPYPLVYGPQLLAAYPYNFSNLAALPVALNMVLPDEKGAGALPFLPGVFGYAVNPQAAPPAPPTPPPPTLPPPIPPKGEGERAGVERTQKGDVG

SEQ ID NO: 1458 - protein, 240 aa, Homo sapiens; identical to SEQ ID NO: 1030
  SITE (185): Xaa equals any of the naturally occurring L-amino acids
  SITE (186): Xaa equals any of the naturally occurring L-amino acids

SEQ ID NO: 1459 - protein, 85 aa, Homo sapiens
  SITE (6): Xaa equals any of the naturally occurring L-amino acids
  SITE (8): Xaa equals any of the naturally occurring L-amino acids
  SITE (10): Xaa equals any of the naturally occurring L-amino acids
RTPVRXHXSXRETCQGPECPGLHTFLLWSHSGFNCLLCAEMLGRKEDLLHHWKHQHNCEDPSKLWAILNTVSNQGVIELSSEAEK

SEQ ID NO: 1460 - protein, 82 aa, Homo sapiens
  SITE (59): Xaa equals any of the naturally occurring L-amino acids
KAFIRSSSLTQHQRMHTGGNPISVTDVGRLFTSGQTSVNIQDFLLRKDFLNVTTEENLXQEEASYMASDRTYQRETPQVSSL

SEQ ID NO: 1461 - protein, 165 aa, Homo sapiens
PQRGCSGLSGPEPGSGERESPERKLLQGPMDISEKLFCSTCDQTFQNHQEQREHYKLDWHRFNLKQRLKDKPLLSALDFEKQSSTGDLSSISGSEDSDSASEEDLQTLDRERATFEKLSRPPGFYPHRVLFQNAQGQFLYAYRCVLGPHQDPPEEAELLLTEPAK

SEQ ID NO: 1462 - protein, 56 aa, Homo sapiens
  SITE (40): Xaa equals any of the naturally occurring L-amino acids
  SITE (45): Xaa equals any of the naturally occurring L-amino acids
  SITE (53): Xaa equals any of the naturally occurring L-amino acids
TLIKPNSKNISLCHLYKILSSVTGFRSPPSLEDHQLIHRXCFPRXLISLPGLXAFT

SEQ ID NO: 1463 - protein, 131 aa, Homo sapiens
  SITE (25): Xaa equals any of the naturally occurring L-amino acids
  SITE (28): Xaa equals any of the naturally occurring L-amino acids
LPNPTICSSMRGPTRTRGLSRVTSXTSXPEQDHLRDHRYIHSKEKPFKCQECGKGFCQSRTLAVHKTLHMQESPHKCPTCGRTFNQRSNLKTHLLTHTDIKPYSCEQCGKVFRRNCDLRRHSLTHTPRQDF

SEQ ID NO: 1464 - protein, 121 aa, Homo sapiens
  SITE (20): Xaa equals any of the naturally occurring L-amino acids
  SITE (27): Xaa equals any of the naturally occurring L-amino acids
  SITE (34): Xaa equals any of the naturally occurring L-amino acids
  SITE (37): Xaa equals any of the naturally occurring L-amino acids
  SITE (107): Xaa equals any of the naturally occurring L-amino acids
  SITE (112): Xaa equals any of the naturally occurring L-amino acids
  SITE (114): Xaa equals any of the naturally occurring L-amino acids
QVPPPEIPGSTHASAFPCPXCDKAYGXQRDLKEXQVXHSGARPFACDQCGQGLCPPALPAAASQDPPGASCPAPCPCPVCGRPLANQGSLRNHMRSYRRKASGRLGXLQGTXHXVNGGYVQ

SEQ ID NO: 1465 - protein, 224 aa, Homo sapiens
  SITE (124): Xaa equals any of the naturally occurring L-amino acids
PRALGSLGLCENQEARESPGGSPRGPVTSEKTGGQSGLESDVPPNAGPGAEGGGSWKGRPFPCGACGRSFKCSSDAAKHRSIHSGEKPYECSDCGKAFIHSSHVVRHQRAHSGERPYACAECGXVRPELQPPPAPARAHGREALRVRRLRQGLRPEVGRRQAPPHPHRGEAVRVRRVREALPAQLERGPAPADPPRGEPVRVPGVRPGLQPELQPPPAPARAHG

SEQ ID NO: 1466 - protein, 241 aa, Homo sapiens
PAWSSGQRLQRGRRLGGERPFMCETCGKSFASKEYLKHHNRIHTGSKPFKCEVCFRTFAQRNSLYQHIKVHTGERPYCCDQCGKQFTQLNALQRHRRIHTGERPFMCNACGRTFTDKSTLRRHTSIHDKNTPWKSFLVIVDGSPKNDDGHKTEQPDEEYVSSKLSDKLLSFAENGHFHNLAAVQDTVPTMQENSSADTACKADDSVVSQDTLLATTISELSELTPQTDSMPTQLHSLSNME

SEQ ID NO: 1467 - protein, 264 aa, Homo sapiens; identical to SEQ ID NO: 1039

SEQ ID NO: 1468 - protein, 71 aa, Homo sapiens
PQPVSKQNGAGEDNQQENKPSHEDESPDGAVSDRKCKVCAKTFETEAALNTHMRTHGMAFIKSKRMSSAEK

SEQ ID NO: 1469 - protein, 97 aa, Homo sapiens
GTVGGTRGVFFRLENVQYPYQLYIAPSTSSTERPSPNRPDRPFQCPTCGVRFTRIQNLKQHMLIHSGIKPFQCDRCGKKFTRAYSLKMHRLKHEVIS

SEQ ID NO: 1470 - protein, 357 aa, Homo sapiens
PIEVHTAEDVPIAVEVHAISEDYDIETENNSSESLQDQTDEEPPAKLCKILDKSQALNVTAQQKWPLLRANSSGLYKCELCEFNSKYFSDLKQHMILKHKRTDSNVCRVCKESFSTNMLLIEHAKLHEEDPYICKYCDYKTVIFENLSQHIADTHFSDHLYWCEQCDVQFSSSSELYLHFQEHSCDEQYLCQFCEHETNDPEDLHSHVVNEHACKLIELSDKYNNGEHGQYSLLSKITFDKCKNFFVCQVCGFRSRLHTNVNRHVAIEHTKIFPHVCDDCGKGFSSMLEYCKHLNSHLSEGIYLCQYCEYSTGQIEDLKIHLDFKHSADLPHKCSDCLMRFGNERELISHLPVHETT

SEQ ID NO: 1471 - protein, 128 aa, Homo sapiens
  SITE (99): Xaa equals any of the naturally occurring L-amino acids
  SITE (110): Xaa equals any of the naturally occurring L-amino acids
  SITE (127): Xaa equals any of the naturally occurring L-amino acids
FGTSGDGGGSKMAQAIFEALEGMDNQTVLAVQSLLDGQGAVPDPTGQSVNAPPAIQPLDDEDVFLCGKCKKQFNSLPAFMTHKRETVPGECPRPGQSLXGHQQHLPTFGXQPKRVPAGPQILPNRQXF

SEQ ID NO: 1472 - protein, 166 aa, Homo sapiens
  SITE (139): Xaa equals any of the naturally occurring L-amino acids
  SITE (145): Xaa equals any of the naturally occurring L-amino acids
  SITE (146): Xaa equals any of the naturally occurring L-amino acids
  SITE (155): Xaa equals any of the naturally occurring L-amino acids
NSVGVNGDGKSFLHAKHEQFHNEMNFPEGGNSVNTNSQFIKHQRTQNIDKPHVCTECGKAFLKKSRLIYHQRVHTGEKPHGCSICGKAFSRKSGLTEHQRNHTGEKPYECTECDKAFRWKSQLNAHQKIHTGEKSYICXDCGKGXXKKSRLINHXRVHTGEKPHGC

SEQ ID NO: 1473 - protein, 192 aa, Homo sapiens
  SITE (72): Xaa equals any of the naturally occurring L-amino acids
RKHQKVHTGIKPFKCSDCGKTFNRKDALVLHQRIHTGERPYECSKCGKTFSVLSTLIRHRKVHIGERPYECXECGKFFKYNNSFILHQRVHTGERPFECKQCGKGYVTRSGLYQHWKVHTGERPYECSLCGKTFTTRSYRNRHQQFHTEERSYECTECGKAFKHSSTLLQHKKVHTPERRQEDRAHGKVVSC

SEQ ID NO: 1474 - protein, 85 aa, Homo sapiens
  SITE (40): Xaa equals any of the naturally occurring L-amino acids
GTSNSSQFSAHRRIHTGESPYKCAVCGKIFNNSSHFSAHXKTHTGEKPYRCSHCERGFTKNSALTRHQTVHMKAVLSSQEGRDAL

SEQ ID NO: 1475 - protein, 194 aa, Homo sapiens
  SITE (13): Xaa equals any of the naturally occurring L-amino acids
  SITE (14): Xaa equals any of the naturally occurring L-amino acids
  SITE (15): Xaa equals any of the naturally occurring L-amino acids
  SITE (163): Xaa equals any of the naturally occurring L-amino acids
GPPGGPAQPSPRXXXCENCLLRFRTHRSLFKHLHVCAEHAQSPAPPPPPALDREPPAPERPPEVDPASAPGLPFPLLEPFTTPAPAPTGPFLPYLNPAPFGLSPPRLRPFLAAAPGPPASSAAVWKKSQGAAAAPEDPRAAPTRPQVRAGDHQGGVEGLSFLXLRGPVDTRRQQCSSPSQGAQMPPSRNTGFLP

SEQ ID NO: 1476 - protein, 74 aa, Homo sapiens
SWLTCLLRHERIHTGKKSYECQQCGKAFTRSRFLRGHEKTHTGEKMHECKECGKALSSLSSLHRHKRTHWRDTL

SEQ ID NO: 1477 - protein, 279 aa, Homo sapiens
  SITE (7): Xaa equals any of the naturally occurring L-amino acids
  SITE (58): Xaa equals any of the naturally occurring L-amino acids
  SITE (178): Xaa equals any of the naturally occurring L-amino acids
  SITE (209): Xaa equals any of the naturally occurring L-amino acids
  SITE (210): Xaa equals any of the naturally occurring L-amino acids
  SITE (251): Xaa equals any of the naturally occurring L-amino acids
  SITE (256): Xaa equals any of the naturally occurring L-amino acids
  SITE (266): Xaa equals any of the naturally occurring L-amino acids
PELPEWXRDLPREVCLCTSTVPGLAYASARRRGSSKAPGLDLSKACFCPQRRCRQARXEHAASLGVNVPSTVMEAMCRQDALQPFNKSSKLAPTTQQRSVVFPQTPCSRNFSLLDKSGPIESGFNQINVKNQRVLASPTSTSQLHSEFSDWHLWKCGQCFKTFTQRILLQMHVCTQNXDRPYQCGHCSQSFSQPSELRNHVVTHSSDRXXKCGYCGRAFAGATTLNNHIRTHTGEKPFKCERCERSFTQAXQLSRXQRMPNECKPXTEKPRINRSGING

SEQ ID NO: 1478 - protein, 106 aa, Homo sapiens
  SITE (78): Xaa equals any of the naturally occurring L-amino acids
VHSGEKPFKCEFCNVRCTMKGNLKSHIRIKHSGNNFKCPHCDFLGDSKATLRKHSRVHQSEHPEKCSECSYSCSSKAXLRIHERIHCTDRLSSATTAASTPNSPAT

SEQ ID NO: 1479 - protein, 118 aa, Homo sapiens
  SITE (10): Xaa equals any of the naturally occurring L-amino acids
  SITE (21): Xaa equals any of the naturally occurring L-amino acids
  SITE (22): Xaa equals any of the naturally occurring L-amino acids
VTSVVTWGPXPLAVMCVERSXXGIRPGEAPAGHTGEKPYLCPECGKGFADSSARVKHLRTHSGERPHACPECDRTFSLSSTLLRHRLTHMEPQDFSFPGYPLPALIPSPPPPPLGHQP

SEQ ID NO: 1480 - protein, 221 aa, Homo sapiens
  SITE (13): Xaa equals any of the naturally occurring L-amino acids
VVPIPLLSGAALXPALTGAAKGSPLLKGPSTMEDPNPEENMKQQDSPKERSPQSPGGNICHLGAPKCTRCLITFADSKFQERHMKREHPADFVAQKLQGVLFICFTCARSFPSSKALITHQRSHGPAAKPTLPVATTTAQPTFPCPDCGKTFGQAVSLRRTARCMRSVPLLAPSPAQSAVRTLLRKQGCINTTFGMPGGSSECSLSLSTVTGGSVAGRTHP

SEQ ID NO: 1481 - protein, 57 aa, Homo sapiens
  SITE (49): Xaa equals any of the naturally occurring L-amino acids
  SITE (51): Xaa equals any of the naturally occurring L-amino acids
  SITE (52): Xaa equals any of the naturally occurring L-amino acids
KCEGCGKAVIQSSTPTKHNIIHTGEKLTTVKNVAKLLTSPTNLFEQNNXYXXETLQM

SEQ ID NO: 1482 - protein, 329 aa, Homo sapiens
RGGRARGGQGPRLNICGICGKSFGRGSTLIQHQRIHTGEKPYKCEVCSKAFSQSSDLIKHQRTHTGERPYKCPRCGKAFADSSYLLRHQRTHSGQKPYKCPHCGKAFGDSSYLLRHQRTHSHERPYSCTECGKCYSQNSSLRSIRGCTPVRGPSAVASAARASPSGRPLSPMPAATPGRSPSSALSAASALARARCWPSTPAPTCQAAPTAAPTAARPSIAPPLSSSTSAPTRASGPTGAPCAARASAAPPRFCSITGSTVASGLTSAMTAERPSPRAPTSSATSGPTRRAGADLGPQQGWEVWQKIRGQGARGTFREDSGEAAGEWRS

SEQ ID NO: 1483 - protein, 109 aa, Homo sapiens
  SITE (100): Xaa equals any of the naturally occurring L-amino acids
AQKQLRSLAGMKYHVMANHNSLPILKAGDEIDEPSERERLRTVLKRLGKLRCMRESCSSSFTSIMGYLYHVRKCGKGAAELEKMTLKCHHCGKPYRSKAXTCISPEVRA

SEQ ID NO: 1484 - protein, 221 aa, Homo sapiens
  SITE (120): Xaa equals any of the naturally occurring L-amino acids
  SITE (192): Xaa equals any of the naturally occurring L-amino acids
ACQEIPTEERPHPYDMGGQSFQHSVDLTGHEGVPTAESPLICNECGKTFQGNPDLIQRQIVHTGEASFMCDDCGKTFSQNSVLKNRHRSHMSEKAYQCSECGKAFRGHSDFSRHQSHHSXERPYMCNECGKAFSQNSSLKKHQKSHMSEKPYECNECGKAFRRSSNLIQHQRIHSGEKPYVCSECGKAFRRXQTSSNTTGLTQERSLLSVASVGKPSARVH

SEQ ID NO: 1485 - protein, 119 aa, Homo sapiens
ERTFNCCYPGCHFKTVHGMKDLDRHLRIHTGDKPHKCEFCDKCFSRKDNLTMHMRCHTSVKPHKCHLCDYAAVDSSSLKKHLRIHSDERPYKCQLCPYASRNSSQLTVHLRSHTGPGPG

SEQ ID NO: 1486 - protein, 165 aa, Homo sapiens
  SITE (58): Xaa equals any of the naturally occurring L-amino acids
ADAWVKVFSSLSFLVQHQSIHTEEKPFECQKCRKSFNQLESLNMHLRNHIRLKPYECXICGKAFSHRSSLLQHHRIHTGEKPYECIKCGKTFSCSSNLTVHQRIHTGEKPYKCNECGKAFSKGSNLTAHQRVHNGEKPNSVVSVEKPLDYMNHYTCEKSYRRETV

SEQ ID NO: 1487 - protein, 168 aa, Homo sapiens
  SITE (7): Xaa equals any of the naturally occurring L-amino acids
WIPRAAXEHVRTHTGIKPYECKECGQAFAQYSGLSIHIRSHSGKKPYQCKECGKAFTTSTSLIQHTRIHTGEKPYECVECGKTFITSSRRSKHLKTHSGEKPFVCKICGKAFLYSSRLNVHLRTHTGEKPFVCKECGKAFAVSSRLSRHERIHTGEKPYECKDMSVTI

SEQ ID NO: 1488 - protein, 88 aa, Homo sapiens
IHTGEKPYECNECWRSFGERSDLIKHQRTHTGEKPYECVQCGKGFTQSSNLITHQRVHTGEKPYECTECEKSFSRSSALIKHKRVHTD

SEQ ID NO: 1489 - protein, 141 aa, Homo sapiens
  SITE (18): Xaa equals any of the naturally occurring L-amino acids
  SITE (27): Xaa equals any of the naturally occurring L-amino acids
  SITE (107): Xaa equals any of the naturally occurring L-amino acids
  SITE (129): Xaa equals any of the naturally occurring L-amino acids
  SITE (134): Xaa equals any of the naturally occurring L-amino acids
  SITE (140): Xaa equals any of the naturally occurring L-amino acids
ASCPGPCGPTSCAPCAAXARSCPTAPXFNMHLVKSHRLQDGIVNPTIRKDLKTGPKFYCCPIEGCPRGPERPFSQFSLVKQHFMKMHAEKKHKCSKCSNSYGTEWDXKRHAEDCGKTFPVHMRAGPYAXRTSTXSLHIYXT

SEQ ID NO: 1490 - protein, 187 aa, Homo sapiens
  SITE (22): Xaa equals any of the naturally occurring L-amino acids
LTRWPVNISFIQFSHIHLFPTXHTRHTEKLKKSLKVKTRSGRVSRPPKYKAKDYKFIKTEDLADGHLSDSDDYSELCVEEDEDQRERHALFDLSSCSLRPKSFKCQTCEKSYIGKGGLARHFKLNPGHGQLDPEMVLSEKASGSTLRGCTEERTLSLTSLGLSMPADPCEGGARSCLVTESARGGLQ

SEQ ID NO: 1491 - protein, 113 aa, Homo sapiens
RHQRIHSEEKPFDCVDCGKAFSAQEQLKRHLRIHTQESSYVCDECGKALTSKRNLHQHQRIHTGEKPYECSKYEKAFGTSSQLGHLEHVYSGEKPVLDICRFGLPEFFTPFYW

SEQ ID NO: 1492 - protein, 196 aa, Homo sapiens
  SITE (99): Xaa equals any of the naturally occurring L-amino acids
  SITE (102): Xaa equals any of the naturally occurring L-amino acids
  SITE (106): Xaa equals any of the naturally occurring L-amino acids
VQRCGKTFRQRSNLRQHLKVHKPDRPYECSECGKAFNQRPTLIRHQKIHIRERSMENVLLPCSQHTPEISSENRPYQGAVNYKLKLVHPSYPPWGGSLXMLXVLEXFWRQVTFSYCRFYQRFFTAGVVIEAMSAPHTAALQRVCPPLHCAQGRQTSPLSFQSLKGIRSSLKPWEDVIPALYGWFSHGHDQLLAVKT

SEQ ID NO: 1493 - protein, 235 aa, Homo sapiens
  SITE (5): Xaa equals any of the naturally occurring L-amino acids
  SITE (9): Xaa equals any of the naturally occurring L-amino acids
  SITE (193): Xaa equals any of the naturally occurring L-amino acids
  SITE (200): Xaa equals any of the naturally occurring L-amino acids
  SITE (209): Xaa equals any of the naturally occurring L-amino acids
  SITE (217): Xaa equals any of the naturally occurring L-amino acids
  SITE (225): Xaa equals any of the naturally occurring L-amino acids
FPTLXKGTXAGAPPRWRPALELVDPPGCRNSARVRYSIKCLECHKQMRDYMVLAAHFQRTTEETEGLTCQVCQMLLPNQCSFCAHQRIHAHKSPYCCPECGVLCRSAYFQTHVKENCLHYARKVGYRCIHCGVVHLTLALLKSHIQERHCQVFHKCAFCPMAFKTASSTADHSATQHPTQPHRPFQLIYKCSXEMASQEXAIQHILPEXHQDQVGVXMPECHFVXQNRVSHVRHH

SEQ ID NO: 1494 - protein, 63 aa, Homo sapiens
ACGKTFRYRSNLLEHQELHLGERAYRCEHCGKGFFYLSSVLRHQRAHEPPRPELRCPACLKAF

SEQ ID NO: 1495 - protein, 199 aa, Homo sapiens
  SITE (31): Xaa equals any of the naturally occurring L-amino acids
  SITE (37): Xaa equals any of the naturally occurring L-amino acids
PPALPYPLKKKNGKILYECNICGKSFGQLSXLKVHLXVHSGERPFQCALCQKSFTQLAHLQKHHLVHTGERPHKCSVCHKRFSSSSNLKTHLRLHSGARPFQCSVCRSRFTQHIHLKLHHRLHAPQPCGLVHTQLPLASLACLAQWHQGALDLMAVASEKHMGYDIDEVKVSSTSQGKARAVSLSSAGTPLVMGQDQNN

SEQ ID NO: 1496 - protein, 402 aa, Homo sapiens
  SITE (390): Xaa equals any of the naturally occurring L-amino acids
VKWSSTRRGTFSSIFTRMSARRRWGVFKCPECPLLFVQKPELMQHVKSTHGVPRNVDELSNLQSSADTSSSRPGSRVPTEPPATSVAARSSSLPSGRWGRPEAHRRVEARPRLRNTGWTCQECQEWVPDRESYVSHMKKSHGRTLKRYPCRQCEQSFHTPNSLRKHIRNNHDTVKKFYTCGYCTEDSPSFPRPSLLESHISLMHGIRNPDLSQTSKVKPPGGHSPQVNHLKRPVSGVGDAPGTSNGATVSSTKRHKSLFQCAKCSFATDSGLEFQSHIPQHQVDSSTAQCLLCGLCYTSASSLSRHLFIVHKVRDQEEEEEEEAAAAEMAVEVAEPEEGSGEEVPMETRENGLEECAGEPLSADPEARRLLGPAPEDDGGHNDHSQPQAXQDQDSHTLSPQV

SEQ ID NO: 1497 - protein, 334 aa, Homo sapiens
  SITE (22): Xaa equals any of the naturally occurring L-amino acids
  SITE (305): Xaa equals any of the naturally occurring L-amino acids
  SITE (311): Xaa equals any of the naturally occurring L-amino acids
  SITE (315): Xaa equals any of the naturally occurring L-amino acids
  SITE (316): Xaa equals any of the naturally occurring L-amino acids
  SITE (317): Xaa equals any of the naturally occurring L-amino acids
  SITE (322): Xaa equals any of the naturally occurring L-amino acids
  SITE (329): Xaa equals any of the naturally occurring L-amino acids
REGRWVAGSGGLGNHSGGWVPXFLTRSEEPEDSVHRSPCHAGDCQLNGPTLSHMDSWDNRDNSSQLQPGSHSSCSQCGKTYCQSGSLLNHNTNKTDRHYCLLCSKEFLNPVATKSHSHNHIDAQTFACPDCGKAFESHQELASHLQAHARGHSQVPAQMEEARDPKAGTGEDQVVLPGQGKAQEAPSETPRGPGESVERARGGQAVTSMAAEDKERPFRCTQCGRSYRHAGSLLNHQKAHTTGLYPCSLCPKLLPNLLSLKNHSRTHTDPKRHCCSICGKAFRTAAAGGHGRVHAPREGPFTAPXSRTFGXESVXXXTEHQXSDVAGSXPVDSD

SEQ ID NO: 1498 - protein, 141 aa, Homo sapiens
  SITE (89): Xaa equals any of the naturally occurring L-amino acids
  SITE (110): Xaa equals any of the naturally occurring L-amino acids
  SITE (128): Xaa equals any of the naturally occurring L-amino acids
NLTNVMYVTNPSGMVPPLLYIKGFIPEKNHMNVMFAEKPSAIMHHSLNIKEYILEKSLLSKECGKAFRQNIHLASHLRIHTGEKPFECXECGKSFSISSQLATHQRIHTXEKPYECKVCSKAFTQKVXLHSSENPTGEETL

SEQ ID NO: 1499 - protein, 122 aa, Homo sapiens
DNPYKCSECGKVFSCSSKLVNTSRNGILERSLTNVMNVASSSVGNSNLSQHQRIHTGEKPYKCHECDKVFRGSSKLATTSRNFILERSLTNVMNVTRSSIKLHTLYDIKKFILERNLTVVIS

SEQ ID NO: 1500 - protein, 67 aa, Homo sapiens
  SITE (43): Xaa equals any of the naturally occurring L-amino acids
KNLIKHIRDAHDPQDKKVKEALDELCLMTREGKRHCSMTATSXSAIQERAGPRPPYAGPRRQVAFCL

SEQ ID NO: 1501 - protein, 136 aa, Homo sapiens
SSNKKSKVNTALRNLRYRRGIHKCIECCSEIKDFANHFPTYVHCSFCRYNTSCSKAYVNHMMSFHSNRPSKRFCIFKKHSENLRGITLVCLNCDFLSDVSGLDNMATHLSQHKTHTCQVVMQKVSVCIPTSEHLLN

SEQ ID NO: 1502 - protein, 111 aa, Homo sapiens
  SITE (50): Xaa equals any of the naturally occurring L-amino acids
  SITE (77): Xaa equals any of the naturally occurring L-amino acids
  SITE (86): Xaa equals any of the naturally occurring L-amino acids
  SITE (88): Xaa equals any of the naturally occurring L-amino acids
  SITE (100): Xaa equals any of the naturally occurring L-amino acids
  SITE (105): Xaa equals any of the naturally occurring L-amino acids
IHTGEKPYKCLECGKNFSDRSNLNTHQRIHTGEKPYKCLECGKSFSDHSXSHHSPENSHGGKALLNVENVGKASTRXSNLLETSEXSXWEGNPDHVSEPXGKLLXQRPIFL

SEQ ID NO: 1503 - protein, 231 aa, Homo sapiens
  SITE (142): Xaa equals any of the naturally occurring L-amino acids
  SITE (157): Xaa equals any of the naturally occurring L-amino acids
  SITE (169): Xaa equals any of the naturally occurring L-amino acids
  SITE (185): Xaa equals any of the naturally occurring L-amino acids
  SITE (200): Xaa equals any of the naturally occurring L-amino acids
  SITE (212): Xaa equals any of the naturally occurring L-amino acids
  SITE (213): Xaa equals any of the naturally occurring L-amino acids
  SITE (214): Xaa equals any of the naturally occurring L-amino acids
VDGADRDEKDFRNPGQEVRKLDLPVLFPNRLGFEFKNEIKKENLKWDDSEEVEINKALQRKSRGVYWHSELQKGLESEPTSRRQCRNSPGESEEKTPSQEKMSHQSFCARDKACTHILCGKNCSQSVHSPHKPALKLEKVSXCPECGKTFSRSSYLXRHQRIHTGEKPXSAVSAGKGFSEPLQLXATYELTQGRGPIMWXNVGKALTRVPAXXXQRTLPGKSLPGIAWERD

SEQ ID NO: 1504 - protein, 83 aa, Homo sapiens
  SITE (8): Xaa equals any of the naturally occurring L-amino acids
RNVERPFXNVWPTLPQHPENSYWWKNLMNVKNVGRPFSRASNLVQHERIHTGEKPYVCKQCGKTFRYGSALKAHQRIHRSIKV

SEQ ID NO: 1505 - protein, 152 aa, Homo sapiens
  SITE (121): Xaa equals any of the naturally occurring L-amino acids
KAFSTKQKLIVHQRTHTGERPYGCNECGKAFAYMSCLVKHKRIHTREKQEAAKVENPPAERHSSLHTSDVMQEKNSANGATTQVPSVAPQTSLNISGLLANRNVVLVGQPVVRCAASGDNXGFAQDRNLVNAVNVVVPSVINYVLFYVTENP

SEQ ID NO: 1506 - protein, 241 aa, Homo sapiens
AAAAGAAETRGRAVSKMEEKPSGPIPDMLATAEPSSSETDKEVLSPAVPAAAPSSSMSEEPGPEQAATPPVWERGGAGGMQQGSSPAPDSCQPGPGPSPGLTSIVSGTSEDLRPPRRRPPPGKQIPCSSPGCCLSFPSVRDLAQHLRTHCPPTQSLEGKLFRCSALSCTETFPSMQELVAHSKLHYKPNRYFKCENCLLASASTARSSSTCMFARSMRRAQPRRHPRPWTESRPAGAPPGG

SEQ ID NO: 1507 - protein, 79 aa, Homo sapiens
  SITE (30): Xaa equals any of the naturally occurring L-amino acids
  SITE (68): Xaa equals any of the naturally occurring L-amino acids
HKNVRVCDKAFRHNSHLAQHPRIHIGEKAXKYNECDRSLVGSQHLFTIRQSMVLGKLYLCYDCPKSSXHYHHCESLENP

SEQ ID NO: 1508 - protein, 172 aa, Homo sapiens; identical to SEQ ID NO: 1087

SEQ ID NO: 1509 - protein, 259 aa, Homo sapiens
PTRSAAISVVLDHHVKGHGGTRLYKCTDCAYSTKNRQKITWHSRIHTGEKPYHCHLCPYACADPSRLKYHMRIHKEERKYLCPECGYKCKWVNQLKYHMTKHTGLKPYQCPECEYCTNRADALRVHQETRHREARAFMCEQCGKAFKTRFLLRTHLRKHSEAKPYVCNVCHRAFRWAAGLRHHALTHTDRHPFFCRLCNYKAKQKFQVVKHVRRHHPDQADPNQGVGKDPTTPTVHLHDVQLEDPSPPAPAAPHTGPEG

SEQ ID NO: 1510 - protein, 138 aa, Homo sapiens
AALRVHSRVHCKDRPFKCDFCSFDTKRPSSLAKHVDKVHRDEAKTENRAPLGKEGLREGSSQHVAKIVTQRAFRCETCGASFVRDDSLRCHKKQHSDQSENKNSDLVTFPPESGASGQLSTLVSVGQLEAPLEPSQDL

SEQ ID NO: 1511 - protein, 129 aa, Homo sapiens; identical to SEQ ID NO: 1090
  SITE (27): Xaa equals any of the naturally occurring L-amino acids
  SITE (80): Xaa equals any of the naturally occurring L-amino acids
  SITE (84): Xaa equals any of the naturally occurring L-amino acids
  SITE (112): Xaa equals any of the naturally occurring L-amino acids

SEQ ID NO: 1512 - protein, 125 aa, Homo sapiens
  SITE (22): Xaa equals any of the naturally occurring L-amino acids
  SITE (23): Xaa equals any of the naturally occurring L-amino acids
  SITE (47): Xaa equals any of the naturally occurring L-amino acids
  SITE (52): Xaa equals any of the naturally occurring L-amino acids
  SITE (116): Xaa equals any of the naturally occurring L-amino acids
ETKTIVKSEDTLRQVSRPAKYXXKAEFIKRDDLADGHLPDSDDDSEXSVEEXQRERQALFDLSSCSLRPKSFKCQTCKKSYIGKWGLAQHFKLNPGHGSWTLRWCYLRKPMGAPSXGAQRKGRSA

SEQ ID NO: 1513 - protein, 363 aa, Homo sapiens
  SITE (11): Xaa equals any of the naturally occurring L-amino acids
  SITE (35): Xaa equals any of the naturally occurring L-amino acids
TPLPRPPPPLXLPPPHPQGSSVGGGFAGLEFARPXESEPRASDLGAPRTWTGAAAGPRTPSAHIPVPAQRATPGKARLDEVMAAAALTSLSTSPLLLGAPVAAFSPEPGLEPWKEALVRPPGSYSSSSNSGDWGWDLASDQSSPSTPSPPLPPEAAHFLFGEPTLRKRKSPAQVMFQCLWKSCGKVLSTASAMQRHIRLVHLGRQAEPDQSDGEEDFYYTELDVGVDTLTDGLSSLTPVSPTASMPPAFPRLELPELLEPPALPSPLRPPAPPLPPPPVLSTVANPQSCHSDRVYQGCLTPARLEPQPTEVGACPPALSSRIGVTLRKPRGDAKKCRKVYGMERRDLWCTACRWKKACQRFLD

SEQ ID NO: 1514 - protein, 195 aa, Homo sapiens
  SITE (3): Xaa equals any of the naturally occurring L-amino acids
  SITE (189): Xaa equals any of the naturally occurring L-amino acids
LVXLQVPVRNSRVDPRVRRSLSPGAASSSSGDGDGKEGLEEPKGPRGSQGGGGGGSSSSSVVSSGGDEGYGTGGGGSSATSGGRRGSLEMSSDGEPLSRMDSEDSISSTIMDVDSTISSGRSTPAMMNGQGSTTSSSKNIAYNCCWDQCQACFNSSPDLADHIRSIHVDGQRGGVFVCLWKGCKVYNTXSTSQSW

SEQ ID NO: 1515 - protein, 294 aa, Homo sapiens
  SITE (84): Xaa equals any of the naturally occurring L-amino acids
EAHMRSHTGEKPYKCELCSFRCSDRSNLSHHRRRKHKMVPIKGTRSSLSSKKMWGVLQKKTSNLGYSRRALINLSPPSMVVQKXDYLNDFTHEIPNIQTDSYESMAKTTPTGGLPRDPQELMVDNPLNQLSTLAGQLSSLPPENQNPASPDVVPCPDEKPFMIQQPSTQAVVSAVSASIPQSSSPTSPEPRPSHSQRNYSPVAGPSSEPSAHTSTPSIGNSQPSTPAPALPVQDPQLLHHCQHCDMYFADNILYTIHMGCHGYENPFQCNICGCKCKNKYDFACHFARGQHNQH

SEQ ID NO: 1516 - protein, 250 aa, Homo sapiens
  SITE (75): Xaa equals any of the naturally occurring L-amino acids
  SITE (129): Xaa equals any of the naturally occurring L-amino acids
EAVKGGVTASSRTSVFSTSMSSSNQPSTTVTYYSAAVAGLMTTMALRSQSRTLMSKRQKGQSQNLRGIKAKRKPXASSKPSLVGDGEGAILSPSQKPHICDHCSAAFRSSYHLRRHVLIHTGERPFQCXQCSMGFIQKYLLQRHEKIHSREKPFGCDQCSMKFIQKYHMERHKRTHSGEKPYKCDTCQQYFSRTDRLLKHRRTCGEVIVKGATSAEPGSSNHTNMGNLAVLSQGNTSSSRRKNKVKKHSY

SEQ ID NO: 1517 - protein, 183 aa, Homo sapiens
  SITE (129): Xaa equals any of the naturally occurring L-amino acids
  SITE (133): Xaa equals any of the naturally occurring L-amino acids
  SITE (157): Xaa equals any of the naturally occurring L-amino acids
GLQGRSLSVLAQGHPLPLHARELRLQVLRAHAHVQARAHHDRVDNLVLDDFKRFKASLSCHFADCPFSGTSTHFHCLRCRFRCTDSTKVTAHRKHHGKQDVISARLLPVQLQRRLRRARLQVTSSSARXSTAXSRCRTRWWACRRWTRTSASTRSRXPRAAAEARARASHQSGRLPVAGRRAG

SEQ ID NO: 1518 - protein, 142 aa, Homo sapiens
  SITE (92): Xaa equals any of the naturally occurring L-amino acids
  SITE (125): Xaa equals any of the naturally occurring L-amino acids
TGEKPYECKECGKAFSRGYHLTQHQKIHTGEKPFKCKECGKAFSWGSSLVKHERVHTNEKSYECKDCGKAFGSGYQLSVHQRFHTGEKLYQXKEFGKTFTCGSKLVHERTHSNDKPYKYNECGEXFLWTTYSNEKIDTDETL

SEQ ID NO: 1519 - protein, 211 aa, Homo sapiens; identical to SEQ ID NO: 1099
  SITE (184): Xaa equals any of the naturally occurring L-amino acids
  SITE (202): Xaa equals any of the naturally occurring L-amino acids
  SITE (211): Xaa equals any of the naturally occurring L-amino acids

SEQ ID NO: 1520 - protein, 183 aa, Homo sapiens
  SITE (161): Xaa equals any of the naturally occurring L-amino acids
TRMSRHEGVSCDACLKGNFRGRRYKCLICYDYDLCASCYESGATTTRHTTDHPMQCILTRVDFDLYYGGEAFSVEQPQSFTCPYCGKMGYTETSLQEHVTSEHAETSTEVICPICAALPGGDPNHVTDDFAAHLTLEHRAPRDLDESSGVRHVRRNVSPWXGIREVLVLVGQTCTFTSSSTGG

SEQ ID NO: 1521 - protein, 111 aa, Homo sapiens; identical to SEQ ID NO: 1101

SEQ ID NO: 1522 - protein, 299 aa, Homo sapiens
LEEFPDRLSLRGVHADSDLHLGTQNPWDVPHAKDREWVCSSDHRAGQHVQKLYKCASCLKEFRSKQDLVKLDINGLPYGLCAGCVNLSKSASPGINVPPGTNRPGLGQNENLSAIEGKGKVGGLKTRCSSCNVKFESESELQNHIQTIHRELVPDSNSTQLKTPQVSPMPRISPSQSDEKKTYQCIKCQMVFYNEWDIQVHVANHMIDEGLNHECKLCSQTFDSPAKLQCHLIEHSFEGMGGTFKCPVCFTVFVQANKLQQHIFSAHGQEDKIYDCTQCPQKFFFQTELQNHTMTQHSS

SEQ ID NO: 1523 - protein, 132 aa, Homo sapiens
  SITE (78): Xaa equals any of the naturally occurring L-amino acids
  SITE (98): Xaa equals any of the naturally occurring L-amino acids
  SITE (114): Xaa equals any of the naturally occurring L-amino acids
AAPEREPRGLEPAAAEPARRAPFTCMECGKSFRLKINLIIHQRNHIKEGPYECAECEISFRHKQQLTLHQRIHRVREXWRLHPNAGPRSTPSTRFKPXSQVHPALVSGRRWALXPYKLPRVADKAFQPQVPA

SEQ ID NO: 1524 - protein, 252 aa, Homo sapiens; identical to SEQ ID NO: 1104

SEQ ID NO: 1525 - protein, 140 aa, Homo sapiens; identical to SEQ ID NO: 1105

SEQ ID NO: 1526 - protein, 236 aa, Homo sapiens
VRAHAHILPRAGTVAPVPCTTLLPCQTLFLTDEEKRLLGQEGVSLPSHLPLTKAEERVLKKVRRKIRNKQSAQDSRRRKKEYIDGLESRVAACSAQNQELQKKVQELERHNISLVAQLRQLQTLIAQTSNKAAQTSTCVLILLFSLALIILPSFSPFQSRPEAGSEDYQPHRVTSRNILTHKDVTENLETQVVESRLREPPGAKDANGSTRTLLEKMGGKPRPSGRIRSVLHADEM

SEQ ID NO: 1527 - protein, 252 aa, Homo sapiens
  SITE (188): Xaa equals any of the naturally occurring L-amino acids
KVRLQVPVRNSRVDPRVRAHAHILPRAGTVAPVPCTTLLPCQTLFLTDEEKRLLGQEGVSLPSHLPLTKAEERVLKKVRRKIRNKQSAQDSRRRKKEYIDGLESRVAACSAQNQELQKKVQELERHNISLVAQLRQLQTLIAQTSNKAAQTSTCVLILLFSLALIILPSFSPFQSRPEAGSEDYQPHXVTSRNILTHKDVTENLETQVVESRLREPPGAKDANGSTRTLLEKMGGKPRPSGRIRSVLHADEM

SEQ ID NO: 1528 - protein, 165 aa, Homo sapiens
  SITE (10): Xaa equals any of the naturally occurring L-amino acids
  SITE (97): Xaa equals any of the naturally occurring L-amino acids
VSGVGSSAWXNNKEKEVPAKEKPSFELSGALLEDTNTFRGVVIKYSEPPEARIPKKRWRLYPFKNDEVLPVMYIHRQSAYLLGRHRRIADIPIDHPXCSKQHAVFQYRLVEYTRADGTVGRRVKPYIIDLGSGNGTFLNNKRIEPQRYYELKEKDVLKFGFSSRG

SEQ ID NO: 1529 - protein, 99 aa, Homo sapiens; identical to SEQ ID NO: 1110
  SITE (17): Xaa equals any of the naturally occurring L-amino acids
  SITE (96): Xaa equals any of the naturally occurring L-amino acids

SEQ ID NO: 1530 - protein, 190 aa, Homo sapiens; identical to SEQ ID NO: 1112

SEQ ID NO: 1531 - protein, 321 aa, Homo sapiens
  SITE (4): Xaa equals any of the naturally occurring L-amino acids
  SITE (34): Xaa equals any of the naturally occurring L-amino acids
  SITE (100): Xaa equals any of the naturally occurring L-amino acids
  SITE (104): Xaa equals any of the naturally occurring L-amino acids
GPLXCSCKWWKCLQASSDPAPCHPCQSVWLTDWXGWHQDQGDPRDYGCPGTGGRGPLPNSTERAVTVSGVPDAIILCVRQICAVILESPPKGATIPYHPXLSLXTVLLSANQGFSVQGQYGAVTPAEVTKLQQLSSHAVPFATPSVVPGLDPGTQTSSQEFLVPNDLIGCVIGRQGSKISEIRQMSGAHIKIGNQAEGAGERHVTITGSPVSIALAQYLITACLETAKSTSGGTPSSAPADLPAPFSPPLTALPTAPPGLLGTPYAISLSNFIGLKPMPFLALPPASPGPPPGLAPTLPRWQQLMGARRLSGRNSPPTEAS

SEQ ID NO: 1532 - protein, 250 aa, Homo sapiens
  SITE (127): Xaa equals any of the naturally occurring L-amino acids
  SITE (134): Xaa equals any of the naturally occurring L-amino acids
TVKGAIENCCRAEQEIMKKVREAYENDVAAMSLQSHLIPGLNLAAVGLFPASSSAVPPPPSSVTGAAPYSSFMQAPEQEMVQVFIPAQAVGAIIGKKGQHIKQLSRFASASIKIAPPETPDSKVRMXIITGPPXAQFKAQGRIYGKLKEENFFGPKEEVKLETHIRVPASAAGRVIGKGGKTVNELQNLTAAEVVVPRDQTPDENDQVIVKIIGHFYASQMAQRKIRDILAQVKQQHQKGQSNQAQARRK

SEQ ID NO: 1533 - protein, 85 aa, Homo sapiens
  SITE (1): Xaa equals any of the naturally occurring L-amino acids
  SITE (6): Xaa equals any of the naturally occurring L-amino acids
  SITE (10): Xaa equals any of the naturally occurring L-amino acids
  SITE (73): Xaa equals any of the naturally occurring L-amino acids
XWHVLXSCMXLNCLYICLYYVPETVQVPLSKRAKFVGPGGYNLKKLQAETGVTISQVDEETVSGFAPTPSAIXEARDFITGICKD

SEQ ID NO: 1534 - protein, 47 aa, Homo sapiens
  SITE (24): Xaa equals any of the naturally occurring L-amino acids
IDFPLRILVPTQFVGAIIGKKGLXIKNITKQTQSRVDIHRKGTLELQ

SEQ ID NO: 1535 - protein, 325 aa, Homo sapiens
  SITE (309): Xaa equals any of the naturally occurring L-amino acids
  SITE (322): Xaa equals any of the naturally occurring L-amino acids
KFPIARLLQQSPVSPPTFSIFLVPAGIIGISFGESVMEVLRPQLIRIDGRNYRKNPVQEQTYQHEEDEEDFYQGSMECADEPCDAYEVEQTPQGFRSTLRAPSLLYKHIVGKRGDTRKKIEMETKTSISIPKPGQDGEIVITGQHRNGVISARTRIDVLLDTFRRKQPFTHFLAFFLNEVEVQEGFLRFQEEVLAKCSMDHGVDSSIFQNPKKLHLTIGMLVLLSEEEIQQTCEMLQQCKEEFINDISGGKPLEVEMAGIEYMNDDPGMVDVLYAKVHMKDGSNRYISGMLLCFNQEVPKKHPQKFGFXLDFLSLSSYCKEXVNY

SEQ ID NO: 1536 - protein, 171 aa, Homo sapiens
  SITE (55): Xaa equals any of the naturally occurring L-amino acids
  SITE (170): Xaa equals any of the naturally occurring L-amino acids
PRVRPRVRPRVRRHHREEGGTHQTAGEIRGSLYQDCPCGRPRRQRKDGHHHRATXAQFKAQGRIFGKLKEENFFNPKEEVKLEPIIRVPSSTAGRVIGKGGKTVNELQNLTSAEVIVPRDQTPDENEEVIVRIIGHFFASQTAQRKIREIVTTGEAAGAEIPSGSRLTAXK

SEQ ID NO: 1537 - protein, 154 aa, Homo sapiens
  SITE (142): Xaa equals any of the naturally occurring L-amino acids
EYRRGYKFSTYATWWIRQAITRSIADQARTIRIPVHMIETINKLNRISRQMLQEMGREPTPEELAERMLMPEDKIRKVLKIAKEPISMETPIGDDEDSHLGDFIEDTTLELPLDSATTESLRAATHDVLAGLDRALKQNSCXCFSKGGGPGTQF

SEQ ID NO: 1538 - protein, 177 aa, Homo sapiens
AEHRLNDSYSCLGWFSPGQVFVLDEYCARNGVRGCHRHLCYLRDLLERAENGAMIDPTLLHYSFAFCASHVHGNRPDGIGTVTVEEKERFEEIKERLRVLLENQITHFRYCFPFGRPEGALKATLSLLERVLMKDIVTPVPQEEVKTVIRKCLEQLALVNYSRLSEYAKIEENCRPV

SEQ ID NO: 1539 - protein, 561 aa, Homo sapiens
GVGKRPKRKCLQWHPLLAKKLLDFSEEEEEEDEEEDIDKVQLLGADGLEQDVGETEDDESPEQRARRPMNAFLLFCKRHRSLVRQEHPRLDNRGATKILADWWAVLDPKEKQKYTDMAKEYKDAFMKANPGYKWCPTTNKPVKSPTPTVNPRKKLWAFPSDSSRDLPSPKKAKTEEMPQLNFGMADPTQMGGLSMLLLAGEHALGTPEVSSGTCRPDVSESPELRQKSPLFQFAEISSSTSHSDASTKQCQTSALFQFAEISSNTSQLGGAEPVKRCGKSALFQLAEMCLASEGMKMEESKLIKAKESDGGRIKELEKGKEEKEIKMEKTDETRLQKEAEFEKSAKENLRDSKELRNFEALQIDDIMAIKMEDPKEIRKEELEEDHKCSHFPDFSYSASSKIIISDVPSRKDHMCHPHGIMIIEDPAALNKPEKLKKKKKKSKMDRHGNDKSTPKKTCKKRQSSESDIESVIYTIEAVAKGDWGIEKLGDTPRKKVRTSSSGKGSILDAKPPKKKVKSREKKMSKEKSSDTTKESRPPDFISISASKNISGETPEGIKADH

SEQ ID NO: 1540 - protein, 87 aa, Homo sapiens
  SITE (87): Xaa equals any of the naturally occurring L-amino acids
KEKKKKKEKEKEKKEKEREKEKREREKREKEKEKHKHEKIKVEPVALAPSPVIPRLTLRVGAGQDKIVISKWSLPPRPSRRPRRTSX

SEQ ID NO: 1541 - protein, 157 aa, Homo sapiens
  SITE (98): Xaa equals any of the naturally occurring L-amino acids
  SITE (120): Xaa equals any of the naturally occurring L-amino acids
  SITE (156): Xaa equals any of the naturally occurring L-amino acids
LFQDLNGQSLFHQTSEGDLDDLAQDLKDLYHTPSFLNFYPLGEDIDIIFNLKSTFTEPVLWRKDQHHHRVEQLTLNGLLQALQSPCIIEGESGKGKSXLLQRIAMLWGSGKCKALTKFQXRLLSSCSAGPRVGLFETLCDQFRVYRDIQEADIQAXC

SEQ ID NO: 1542 - protein, 123 aa, Homo sapiens
WKKKSWLTCGPVSVSMKNYGIVNVLKFNDLKEQERRHREEKERRKKQQWEIMHKHNETSQKIAARAFAQRYLADLLPSVFGSLRDSGYFYDPIERDIEIGFLPWLMNEVEKTMEYSMVGKNSA

SEQ ID NO: 1543 - protein, 311 aa, Homo sapiens
  SITE (12): Xaa equals any of the naturally occurring L-amino acids
  SITE (16): Xaa equals any of the naturally occurring L-amino acids
  SITE (22): Xaa equals any of the naturally occurring L-amino acids
  SITE (192): Xaa equals any of the naturally occurring L-amino acids
  SITE (270): Xaa equals any of the naturally occurring L-amino acids
YENQHKPDPGKXLDFXFTIKWXIPGIFVASVEAGSPAEFSQLQVDDEIIAINNTKFSYNDSKEWEEAMAKAQETGHLVMDVRRYGKAGSPETKWIDATSGIYNSEKSSNLSVTTDFSESLQSSNIESKEINGIHDESNAFESKASESISLKNLKRRSQFFEQGSSDSVVPDLPVPTISAPSRWVWDQEEERXRQERWQKEQDRLLQEKYQREQEKLREEWQRAKQEAERENSKYLDEELMVLKLKQHVSGPHGSPLLPPGEATWELKGSXSFRQRREPEQEKRRGDSHKRNCFLRTKERSRRFSCYLRERG

SEQ ID NO: 1544 - protein, 132 aa, Homo sapiens
  SITE (7): Xaa equals any of the naturally occurring L-amino acids
  SITE (24): Xaa equals any of the naturally occurring L-amino acids
  SITE (41): Xaa equals any of the naturally occurring L-amino acids
  SITE (45): Xaa equals any of the naturally occurring L-amino acids
ASCTVRXVGGLGDRSWKMGCPSTXLCLYSPCAATRREEALXQHKXLSQELVNLRGELVTASTTCEKLEKARNELQTVYEAFVQQHQAEKTERENRLKEFYTREYEKLRDTYIEEAEKYKMQLQEQFDNLNCA

SEQ ID NO: 1545 - protein, 89 aa, Homo sapiens
  SITE (5): Xaa equals any of the naturally occurring L-amino acids
  SITE (6): Xaa equals any of the naturally occurring L-amino acids
  SITE (47): Xaa equals any of the naturally occurring L-amino acids
RPPRXXQKEMTEREQRELKTLLDRAADCHGRVLTNSETNSIKKDYIXKLMVEREAEAKKARQLKKKQAYKPDPEASFSWSANTSTRGRR

SEQ ID NO: 1546 - protein, 88 aa, Homo sapiens
  SITE (43): Xaa equals any of the naturally occurring L-amino acids
EEEAAGVQEAGQRMEEEAMNGDRTESDWQGLVSEYLVCKRKLXSKKEALLILSKELDTCQQERDQYKLMANQLRERHQSLKKKYRELI

SEQ ID NO: 1547 - protein, 183 aa, Homo sapiens
IAPGVWEQQSLLSTLLNPEKRNKFKEQQPNTYVGFKEFSRKCSEKWRSISKHEKAKYEALAKLDKARYQEEMMNYVGKRKKRRKRDPQAPRRPPSSFLLFCQDHYAQLKRENPNWSVVQVAKATGKMWSTATDLEKHPYEQRVALLRAKYFEELELYRKQCNARKKYRMSARNRCRGKRVRQS

SEQ ID NO: 1548 - protein, 136 aa, Homo sapiens
RCFVLSEARKFDRAAMPNRKASRNAYYFFVQEKIPELRRRGLPVARVADAIPYCSSDWALLREEEKEKYAEMAREWRAAQGKDPGPSEKQKPVFTPLRRPGMLVPKQNVSPPDMSALSLKGDQALLGGIFYFLEHF

SEQ ID NO: 1549 - protein, 60 aa, Homo sapiens
  SITE (33): Xaa equals any of the naturally occurring L-amino acids
SSSPRRIANLVQKRYELLEHKKRWASMSEEQRXEYLKKKREELKKKLKEKAKERRERERE

SEQ ID NO: 1550 - protein, 173 aa, Homo sapiens
ALPAPVVSREMENLMTSSTLPPLFADEDGSKESNDLATTGLNHPEVPYSSGATSSTNNPEFVEDLSQGQLLQSESSNAAEGNEQRHEDEQRSKRGGWSKGRKRKKPLRDSNAPKSPLTGYVRFMNERREQLRAKRPEVPFPEITRMLGNEWSKLPPEEKQRYLMKQTEIRSVT

SEQ ID NO: 1551 - protein, 423 aa, Homo sapiens
  SITE (422): Xaa equals any of the naturally occurring L-amino acids
PWYNLTRPQLVALCKLLELQSIGTNNFLRFQLTMRLRSIKADDKLIAEEGVDSLNVKELQAACRARGMRALGVTEDRLRGQLKQWLDLHLHQEIPTSLLILSRAMYLPDTLSPADQLKSTLQTLPEIVAKEAQVKVAEVEGEQVDNKAKLEATLQEEAAIQQEHREKELQKRSEVAKDFEPERVVAAPQRPGTEPQPEMPDTVLQSETLKDTAPVLEGLKEEEITKEEIDILSDACSKLQEQKKSLTKEKEELELLKEDVQDYSEDLQEIKKELSKTGEEKYVEESKASKRLTKRVQQMIGQIDGLISQLEMDQQAGKLAPANGMPTGENVISVAELINAMKQVKHIPESKLTSLAAALDENKDGKVNIDDLVKVIELVDKEDVHISTSQVAEIVATLEKEEKVEEKEKAKEKAEKEVAEVXS

SEQ ID NO: 1552 - protein, 150 aa, Homo sapiens
  SITE (19): Xaa equals any of the naturally occurring L-amino acids
  SITE (21): Xaa equals any of the naturally occurring L-amino acids
  SITE (67): Xaa equals any of the naturally occurring L-amino acids
PPDSNFRRPYTPSPLILAXNXDLPAMVNEGTFRADLLDRLAFDVVQLPPLRERESDIMLMAEYFAIXMCREIKLPLFPGFTERARETLLNYRWPGNIRELKNVVERSVYRHGTSDYPLDDIIIDPFKRVRLKTYRRFRNHLASNTAAGFT

SEQ ID NO: 1553 - protein, 68 aa, Homo sapiens
CELYGDAALAEEFIGGDRTDNENGRLSRLELAHGGTLFLEKIEYLAVELQSALLQVIKQGGPGTQFAL

SEQ ID NO: 1554 - protein, 122 aa, Homo sapiens
  SITE (67): Xaa equals any of the naturally occurring L-amino acids
  SITE (103): Xaa equals any of the naturally occurring L-amino acids
ARGGAAQVAPAMAAEEEAAAGGKVLREENQCIAPVVSSRVSPGTRPTAMGSFSSHMTEFPRKRKGSXSDPSQEAHSQTEKRRRDKMNNLIEELSAMIPQSNPXARKLDKLTVLRMAVQHFRS

SEQ ID NO: 1555 - protein, 56 aa, Homo sapiens
  SITE (25): Xaa equals any of the naturally occurring L-amino acids
  SITE (26): Xaa equals any of the naturally occurring L-amino acids
  SITE (49): Xaa equals any of the naturally occurring L-amino acids
PFWPRKGSGPKKERRRTESINSAFXXLRECIPNVPADTKLSKIKTLRLXTSLHRLT

SEQ ID NO: 1556 - protein, 150 aa, Homo sapiens
  SITE (12): Xaa equals any of the naturally occurring L-amino acids
  SITE (43): Xaa equals any of the naturally occurring L-amino acids
KRDDTKDTYKLXHRLIEKKRRDRINECIAQLKDLLPEHLKLTXLGHLEKAVVLELTLKHLKALTALTEQQHQKIIALQNGERSLKSPIQSDLDAFHSGFQTCAKEVLQYLSRFESWTPREPRCVQLINHLHAVATQFLPTPQLLTQQVPL

SEQ ID NO: 1557 - protein, 72 aa, Homo sapiens
TFAQNHLSTFIVYLFILLPHFKPGRRGQKPLLASWGRRKNIREEQRREGPCPPYQACSQPSLGKGRSLSEVY

SEQ ID NO: 1558 - protein, 94 aa, Homo sapiens
  SITE (61): Xaa equals any of the naturally occurring L-amino acids
SSFAQDHQLQNMDKEDALICFEEHIRALEREEEEERERARLRERRQQRKNREAFQTFLDEXHETGQLHSMSTWMELYPAVSTEVRFANMLGQPG

SEQ ID NO: 1559 - protein, 181 aa, Homo sapiens; identical to SEQ ID NO: 1144

SEQ ID NO: 1560 - protein, 107 aa, Homo sapiens
ASPRKRPGEATAASSEIKALQQTRRLLANARERTRVHTISAAFEALRKQVPCYSYGQKLSKLAILRIACNYILSLARLADLDYSADHSNLSFSECVQRCTRTLQAEG

SEQ ID NO: 1561 - protein, 201 aa, Homo sapiens
  SITE (176): Xaa equals any of the naturally occurring L-amino acids
  SITE (195): Xaa equals any of the naturally occurring L-amino acids
GMDSEHRQPVLHIGKVLREENQCIAPVVSSRVSPGTRPTAMGSFSSHMTEFPRKRKGSDSDPSQEAHSQTEKRRRDKMNNLIEELSAMIPQCNPMARKLDKLTVLRMAVQHLRSLKGLTNSYVGSNYRPSFLQDNELRHLILKTAEGFLFVVGCERGKILFVSKSVSKILNYDQAXLTGQSLFDFLHPKDVAKVXGTTFFF

SEQ ID NO: 1562 - protein, 166 aa, Homo sapiens
  SITE (157): Xaa equals any of the naturally occurring L-amino acids
SVCGTSSRERRGAAVVNSSLPAAPTLPRNPQGASMKRAHPEYSSSDSELDETIEVEKESADENGNLSSALGSMSPTTSSQILARKRRRGIIEKRRRDRINNSLSELRRLVPSAFEKQGSAKLEKAEILQMTVDHLKMLHTAGGKGYFDAHALAMDYXSLGFRECLA

SEQ ID NO: 1563 - protein, 163 aa, Homo sapiens
  SITE (13): Xaa equals any of the naturally occurring L-amino acids
  SITE (28): Xaa equals any of the naturally occurring L-amino acids
  SITE (55): Xaa equals any of the naturally occurring L-amino acids
GCSTLKTTGPTHXLQTPSCTHISADEKXAERSRKAPPIPLKLKPDYWSDKLQKEXEAFAYYRRTHTANERRRRGEMRDLFEKLKITLGLLHSSKVSKSLILTRAFSEIQGLTDQADKLIGQKNLLTRKRNILIRKVSSLSGKTEEVVLKKLEYIYAKQQALEA

SEQ ID NO: 1564 - protein, 198 aa, Homo sapiens
FLFSLTSPSIHFNDKDGDHDQSFYITDDPDDNADRSETSSIADPSSPNPFGSSNPFKSKSNDRPGHKRFRTQMSNLQLKVLKACFSDYRTPTMQECEMLGNEIGLPKRVVQVWFQNARAKEKKFKINIGKPFMINQGGTEGTKPECTLCGVKYSARLSIRDHIFSKQHISKVRRPLAVSSIGEDSCSDTFAVWKQTCR

SEQ ID NO: 1565 - protein, 101 aa, Homo sapiens
  SITE (18): Xaa equals any of the naturally occurring L-amino acids
  SITE (33): Xaa equals any of the naturally occurring L-amino acids
RERTTFTRAQLDVLEALXAKTRYPDIFMREEVXLKINLPESRVQVWFKNRRAKCRQQQQQQQNGGQNKVRPAKKKTSPAREVSSESGTSGQFTPPSSTSVP

SEQ ID NO: 1566 - protein, 146 aa, Homo sapiens
PAQPEAPKSLKGSTPEGRAGPDALGPGPFGRKRRKSRTAFTAQQVLELERRFVFQKYLAPSERDGLATRLGLANAQVVTWFQNRRAKLKRDVEEMRADVASLRALSPEVLCSLALPEGAPDPGLCLGPAGPDSRPHLSDEEIQVDD

SEQ ID NO: 1567 - protein, 273 aa, Homo sapiens
  SITE (56): Xaa equals any of the naturally occurring L-amino acids
  SITE (64): Xaa equals any of the naturally occurring L-amino acids
  SITE (131): Xaa equals any of the naturally occurring L-amino acids
  SITE (159): Xaa equals any of the naturally occurring L-amino acids
  SITE (259): Xaa equals any of the naturally occurring L-amino acids
  SITE (267): Xaa equals any of the naturally occurring L-amino acids
NSARATNQNGRENNERLSTSNGKMSPTRYHANSMGQRSYSFEASEEDLDVDDKVEXLMRRDSSXIKEEIKAFLANRRISQAVVAQVTGISQSRISHWLLQQGSDLSEQKKRAFYRWYQLEKTNPGATLSMXPAPIPIEDPEWRQTPPPVSATSGTFRLXRGSRFTWRKECLAVMESYFNENQYPDEAKREEIANACNAVIQKPGKKLSDLERVTSLKVYNWFANRRKEIKRRANIAILESHGIDVQSPGGHSNSDDVDXNDYSEQAXFTSFIG

SEQ ID NO: 1568 - protein, 194 aa, Homo sapiens
  SITE (16): Xaa equals any of the naturally occurring L-amino acids
  SITE (21): Xaa equals any of the naturally occurring L-amino acids
  SITE (22): Xaa equals any of the naturally occurring L-amino acids
  SITE (25): Xaa equals any of the naturally occurring L-amino acids
  SITE (157): Xaa equals any of the naturally occurring L-amino acids
AAAPTSGAPAMARSLXHDTVXXCLXVYQVKISPTPQLGAASSAEGHVGQGAPGLMGNMNPEGGVNHENGMNRDGGMIPEGGGGNQEPRQQPQPPPEEPAQAAMEGPQPENMQPRTRRTKFTLLQVEELESVFRHTQYPDVPTRRELAENLGVTEDKXRVWFKNKRARCRRHQRELMLANELRADPDDCVYIVVD

SEQ ID NO: 1569 - protein, 154 aa, Homo sapiens; identical to SEQ ID NO: 1156

SEQ ID NO: 1570 - protein, 81 aa, Homo sapiens
  SITE (81): Xaa equals any of the naturally occurring L-amino acids
DLSTIKQRLENRFYRRVSSLMWEVRYIEHNTRTFNEPGSPIVKSAKFVTDLLLHFIKDQTCYNIIPLYKSNEEGKFCPEFX

SEQ ID NO: 1571 - protein, 128 aa, Homo sapiens
  SITE (6): Xaa equals any of the naturally occurring L-amino acids
  SITE (8): Xaa equals any of the naturally occurring L-amino acids
  SITE (14): Xaa equals any of the naturally occurring L-amino acids
RIGETXWXPSGKEXSKEPRDPDQLYSTLKSILQQVKSHQSAWPFMEPVKRTEAPGYYEVIRFPMDLKTMSERLKNRYYVSKKLFMADLQRVFTNCKEYNPPESEYYKCANILEKFFFSKIKEAGLIDK

SEQ ID NO: 1572 - protein, 140 aa, Homo sapiens
SNPSKPGRKTNQLQYMQNVVVKTLWKHQFAWPFYQPVDAIKLNLPDYHKIIKNPMDMGTIKKRLENNYYWSASECMQDFNTMFTNCYIYNKPTDDIVLMAQALEKIFLQKVAQMPQEEVEIITPCSKGAKVGSRLREPRA

SEQ ID NO: 1573 - protein, 332 aa, Homo sapiens
  SITE (331): Xaa equals any of the naturally occurring L-amino acids
PAYLKEILEQLLEAIVVATNPSGRLISELFQKLPSKVQYPDYYAIIKEPIDLKTIAQRIQNGSYKSIHAMAKDIDLLAKNAKTYNEPGSQVFKDANSIKKIFYMKKAEIEHHEMAKSSLRMRTPSNLAAARLTGPSHSKGSLGEERNPTSKYYRNKRAVQGGRLSAITMALQYGSESEEDAALAAARYEEGESEAESITSFMDVSNPFYQLYDTVRSCRNNQGQLIAEPFYHLPSKKKYPDYYQQIKMPISLQQIRTKLKNQEYETLDHLECDLNLMFENAKRYNVPNSAIYKRVLKLQQVMQAKKKELARRDDIEDGDSMISSATSDTGXA

SEQ ID NO: 1574 - protein, 555 aa, Homo sapiens; identical to SEQ ID NO: 1161

SEQ ID NO: 1575 - protein, 225 aa, Homo sapiens
  SITE (102): Xaa equals any of the naturally occurring L-amino acids
NSQGTDAFQKPVPLEQHPDYAEYIFHPMDLCTLEKNAKKKMYGCTEAFLADAKWILHNCIIYNGGNHKLTQIAKVVIKICEHEMNEIEVCPECYLAACQKRXNWFCEPCSNPHPLVWAKLKGFPFWPAKALRDKDGQVDARFFGQHDRAWVPINNCYLMSKEIPFSVKKTKSIFNSAMQEMEVYVENIRRSLGFLITLHLGHPTHPTASIKCCSIPPTPAPALPR

SEQ ID NO: 1576 - protein, 184 aa, Homo sapiens
  SITE (4): Xaa equals any of the naturally occurring L-amino acids
  SITE (13): Xaa equals any of the naturally occurring L-amino acids
  SITE (22): Xaa equals any of the naturally occurring L-amino acids
AAAXSNSSSVRHXAGRRSVTAXGCRRRTAGKKLDSMGSKRRRATSPSSSVSGDFDDGHHSVSTPGPSRKRRRLSNLPTVDPIAVCHELYNTIRDYKDEQGRLLCELFIRAPKRRNQPDYYEVVSQPIDLMKIQQKLKMEEYDDVNLLTADFQLLFNNAKSYYKPDSPEYKAACKLWDLVPSNKK

SEQ ID NO: 1577 - protein, 90 aa, Homo sapiens
  SITE (33): Xaa equals any of the naturally occurring L-amino acids
VKRLEQQEEDTFRELRIFLRNVTHRLAIDKRFXVFTKPVDPDEVPDYVTVIKQPMDLSSVISKIDLHKYLTVKDYLRGIDLICSNALDTI

SEQ ID NO: 1578 - protein, 134 aa, Homo sapiens
  SITE (90): Xaa equals any of the naturally occurring L-amino acids
  SITE (102): Xaa equals any of the naturally occurring L-amino acids
  SITE (110): Xaa equals any of the naturally occurring L-amino acids
  SITE (116): Xaa equals any of the naturally occurring L-amino acids
  SITE (117): Xaa equals any of the naturally occurring L-amino acids
  SITE (118): Xaa equals any of the naturally occurring L-amino acids
  SITE (130): Xaa equals any of the naturally occurring L-amino acids
KRGNKDLKKRKMEENTSINLSKQESFTSVKKPKRDDSKDLALCSMILTEMETHEDAWPFLLPVNLKLVPGYKKVIKKPMDFSTIREKLSXGQYPNLETFALXVRLVFDTXETFMKXXXDIGRAGPQFWGXIFEN

SEQ ID NO: 1579 - protein, 718 aa, Homo sapiens
  SITE (52): Xaa equals any of the naturally occurring L-amino acids
  SITE (99): Xaa equals any of the naturally occurring L-amino acids
ESCSCSLSKLLLLNLSSSISLSFFLFSLLGLLKACTSASPESSLSLCQQPPXSPLCEVSVPSFCFRVFCKKHKKHKSDKHLYEEYVEKPLKLVLKVGGXEVTELSTGSSGHDSSLFEDKNDHDKHKDRKRKKRKKGEKQIPGEEKGRKRRRVKEDKKKRDRDRVENEAEKDLQCHAPVRLDLPPEKPLTSSLAKQEEVEQTPLQEALNQLMRQLQRKDPSAFFSFPVTDFIAPGYSMIIKHPMDFSTMKEKIKNNDYQSIEELKDNFKLMCTNAMIYNKPETIYYKAAKKLLHSGMKILSQERIQSLKQSIDFMADLQKTRKQKDGTDTSQSGEDGGCWQREREDSGDAEAHAFKSPSKENKKKDKDMLEDKFKSNNLEREQEQLDRIVKESGGKLTRRLVNSQCEFERRKPDGTTTLGLLHPVDPIVGEPGYCPVRLGMTTGRLQSGVNTLQGFKEDKRNKVTPVLYLNYGPYSSYAPHYDSTFANISKDDSDLIYSTYGEDSDLPSDFSIHEFLATCQDYPYVMADSLLDVLTKGGHSRTLQEMEMSLPEDEGHTRTLDTAKEMEITEVEPPGRLDSSTQDRLIALKAVTNFGVPVEVFDSEEAEIFQKKLDETTRLLRELQEAQNERLSTRPPPNMICLLGPSYREMHLAEQVTNNLKELAQQVTPGDIVSTYGVRKAMGISIPSPVMENNFVDLTEDTEEPKKTDVAECGPGGS

SEQ ID NO: 1580 - protein, 186 aa, Homo sapiens
  SITE (121): Xaa equals any of the naturally occurring L-amino acids
  SITE (185): Xaa equals any of the naturally occurring L-amino acids
EDQGEVYVSEMEDQPPSGECDDAFNIKETPLVDTLFSHATSSKLTDLSQDDPVQDHLLFKKTLLPVCKMIASHRFSSPFLKPVSERQAPGYKDVVKRPMDLTSLKRNLSKGRIRTMAQFLXDLMLMFQNAVMYNDSDHHVYHMAVEMRREVLEQIQVLNIWLDKRKGSSSLEGEPANPVDDGKPXF

SEQ ID NO: 1581 - protein, 137 aa, Homo sapiens
  SITE (82): Xaa equals any of the naturally occurring L-amino acids
  SITE (115): Xaa equals any of the naturally occurring L-amino acids
  SITE (125): Xaa equals any of the naturally occurring L-amino acids
  SITE (130): Xaa equals any of the naturally occurring L-amino acids
PKLKLSRKSGISPKKSKYMTPMQQKLNEVYEAVKNYTDKRGRRLSAIFLRLPSRSELPDYYLTIKKPMDMEKIRSHMMANKXQDIDSMVEDFVMMFNNACTYNEPESLIYKDALXLHKVLLETRXDLEGXEDSHVQM

SEQ ID NO: 1582 - protein, 211 aa, Homo sapiens
  SITE (75): Xaa equals any of the naturally occurring L-amino acids
QQHRAAPENGLRGPGGPHVSYVPPTNVLSHSWGRGHYGSLPKRHGSTQSEPAGSGRIQMGRRVSFGVWELHAETXAAGEMEGHLVAVFNRFLFSSQQNASLLSSGLIFLICYTAEESGPKLPPCKVPRARAALGSAVGSVGSENGSLQAAPPEKSLCHQEIAGGLRVQQENTAPVTHNRFCTKEKNTQKEMIQSHNKLPTERVKAEHHRSV

SEQ ID NO: 1583 - protein, 233 aa, Homo sapiens
  SITE (1): Xaa equals any of the naturally occurring L-amino acids
  SITE (2): Xaa equals any of the naturally occurring L-amino acids
  SITE (3): Xaa equals any of the naturally occurring L-amino acids
  SITE (4): Xaa equals any of the naturally occurring L-amino acids
  SITE (6): Xaa equals any of the naturally occurring L-amino acids
  SITE (205): Xaa equals any of the naturally occurring L-amino acids
  SITE (226): Xaa equals any of the naturally occurring L-amino acids
  SITE (228): Xaa equals any of the naturally occurring L-amino acids
XXXXLXAVSNRVTDHTCPSGGPLSPSLTTPLPPLDISVAEQQQLGYMPLRDDYEIEYDQDAETLISGLSVNYDDDDVEIELKRAHVDMYVRKLKERQRRKNIARDYNLVPAFLGKDKKEKEKALKRKITKEEKELRLKLRPLYQFMSCKEFDDLFENMHKEKMLRAKIRELQRYRRNGITKMEESAEYEAARHKREKRKENKNLXGSKRGKEDGKDSGFAAIKNLXGXPFCPP

SEQ ID NO: 1584 - protein, 191 aa, Homo sapiens
ELVDPPGCRNSARVCPECFSAGAEIGHHRRYHGYQLVDGGRFTLWGPEAEGGWTSREEQLLLDAIEQFGFGNWEDMAAHVGASRTPQEVMEHYVSMYIHGNLGKACIPDTIPNRVTDHTCPSGGPLSPSLTTPLPPLDISVAEQQQLGYMPLRDDYEIEYDQDAETLISGLSVNYDDDDVEIELKRAHVDM

SEQ ID NO: 1585 - DNA, 27 bp, Homo sapiens
gcggcaagctttttgcaaagcctaggc

SEQ ID NO: 1586 - DNA, 27 bp, Homo sapiens
gcggcaagctttttgcaaagcctaggc

SEQ ID NO: 1587 - DNA, 27 bp, Homo sapiens
gcggcaagctttttgcaaagcctaggc

SEQ ID NO: 1588 - DNA, 27 bp, Homo sapiens
gcggcaagctttttgcaaagcctaggc

SEQ ID NO: 1589 - DNA, 27 bp, Homo sapiens
gcggcaagctttttgcaaagcctaggc

SEQ ID NO: 1590 - DNA, 27 bp, Homo sapiens
gcggcaagctttttgcaaagcctaggc

SEQ ID NO: 1591 - DNA, 27 bp, Homo sapiens
gcggcaagctttttgcaaagcctaggc

SEQ ID NO: 1592 - DNA, 27 bp, Homo sapiens
gcggcaagctttttgcaaagcctaggc

SEQ ID NO: 1593 - DNA, 5470 bp, Homo sapiens
cagttctattctacaatggcatcaatactgcaatactttcatcaagttatataaagaaaaaccaagaacattggaataagaggaacaggagcttcccccatcttgtcatgttcaagtagtttgtgtctgctcccctagccaccaacagttttagctatgctatcccaagggcaagtgcaagcctgtcatccaagcgtgtaattcttgacccaggctggccatctcggttgtggcttgcaagtcccgctggcatgtgatttcccaaaggagccagtcttagtccgtaaccccttaccctgttcattgtggaagtccgggggcccaagggcagaaagggctgcagggatagcctcatcagagggcactcaggcaatggaagagatgtggctgtgtttctgctctctgcagaagagagtcctggaggagggccagcagctgccccgggtgctggggagacagcagaagagggtggacatcagcagggccagggcgatgatgaaggtgagcacccatcgtaagacacccgggtagatgaagggcccgatgaggataatgagcaaggccagcaggagtaggtgcgcggccaggcgccgggctgccacgtggtttgcacttacttcatcctgtccatcctctcccaccaagctggggtgtcctgctgccaagtcagcaggatccaccagcccctgaggacagagcgatacctctgtgcatggctgggccagctgccccaccaccgcctcatggtcgcgcaggctgcagatgaggcccccggggacggcggtgaccttgcggcacagcgggcaggtgatggaccaggtgttgtcctgcacgcacagcaggagcttcaggcagatggcgcagaaggcatgctggcaggccagcagcttgggcaaccggggacagctgtagggctcccggcacaccagacactccaggtcacattctgtggagccagaatgacccccagcaggggccacagcggtggtggttgtggtggctcctgcggagatgggctgggactgttgcagggtcttggtgcaggccattctgggcacagggaccggtgggacactgtcgctcagcacctgggcattggcagagagtgtcagctggcgccgctgggacttggatggaatctgcccctccttttcactctggccaggtgcctgttgacaacagctgtctgacactcctctcttccagagctgcccagcttgtttcttggcttacgtcgtcccttcagttatattatttattttctcaaaacctagggttaatcagtaacttgcgggtctggagactttgaattgcctgataggagggcaaagtgggcaagggtctagtgaatcaggactttcctgttggggccaggtacctggtgggtgcccacagaactgtggctcaagctttaggaggcagcagaatccaactctctcacccccacttcccaggtccctgaaccttttattaattttttttatttaacttttttttttttttttgagacggagtctcgttctctcaggttggagtgcagtggcccgatcttggctcactggcatctacaaatctgcacaataaacagacagccctatgagtcggacataggtggattggtggacactgctttctcagacacaaacttttggatgtcaggatgagtggaaaaaagtttgtttgcacttggagcacatttacaggcaggtggccttggaaagaggaggggagaggtaagaaaagtgagtggaaggaggacaaagcccaacccaacgcagaaaaacaaaaccacatacagcgcacaggtgtttggcacctgctactgtattcatttccttagagccacagctgttgtattcacagttacgggtgtatgaacttcccatcggtgccctgctgcacacttcacatgcctaatcacaggtgtcctgttttgtgctaggcatgctgcgtatccagtagtactaagaacagctgccatttatttgggcctactctaagccaagccctgtgcccggggtccccagcccccatttcccggaaccctgatacagccttgtagggaaggctgggaaacaagggcagggtgtggtcagggtaggctgctggctgcctgccaaggggccttccatggagcaggaccttgtggaatctaccagcgtccaaggtctggttgaatcaatttcattggttcatttggacacaactggccccagccgggtggcgtaggctaagaggactcatgtgagacaggcagatattagtaacacagcagttaggaaaacgtgatttccttactttgccctcaagggcaaatggcggggtggcatgtgcactccctcaaacaaatgtttcattcaggccactctgaactcagaagcccgtgtgaaggatcctttggtgctcatgtcacctgccaagggccacacagagtcctgtgcctctgattcagctctttcccttaccccagtagctggcactgcaggccaccctctgtgtcctggagtcaccagccccaaaggggctccctcccttgtgggatcggtaactcccacctccccactccccctgggccctctatctctgaaatccaatactctcaccatcccatcccatttcttctcaacctgtagctagaccatcagttacctctgtgaaaggaaaataaatcgtggggccccaaaatcactaagccacaagggaaagtcaagctggaaactgcttagggccagcctgcctcccattctattcaaagtcacctctctgctcactgagacaaatgcatatctgattgcctcctttggagatgctaatcagaaactcaaaagaatgtaaccattcttatccacctgtgacctggaagccccttccccacttcaggtcttcctgcctttgcttcaagttgctccaccttttcagatggaaccaatgttcattttacatatgttgattgatgtctcatgtccctctaaaacgtataaaaccaagctgtgctctgtccaccttgggcacatgtcatcaggacctcctgaggctgtgtcacggacatgtgtcctcaaccttggcaaaataaactttctaaattaactgagacctgtctcagatactaaggtatagatacacatctatatcacgttttcccccagatcaagctgaaggtggccttggatctaggcatgttttttcccccatgcctagcattctttccccttttttgggtaacagttctctgttttcactttgggcaaccactgcttcccaccgtcattctgtgctcacggagagggtgatgtctggctccagctctctggaagtggggccctgatacaattcaggacaggccagttagcatgctctgctctgctagctgcagccattggtttgagcgtaggcatataatcgaagccaagccaatgagattcaattctgagacttctgttggagcccttgagaagtttctctttgtgctgggtttctaagttagaggatggaaccctggggctgccaggaccacagtgtgcagagaacctgctcaagagtaaggtcagcacaaaagaaaaatgagaaaagaatcagacaaaggcctgatgatgttatttgaacacctgaagcaggacacctagcattggattttttcaaggatattaacctataaaatctaccctgatttttattcttaagtcagttcaaattgaacttctgtcccttgcaagtgaaagacctctatgtaacacagcaatggatgaagaaaagaagcctttacttgctctctgacaaagggtcaggcattgatgagacaaccagactttgtacacggacaagagtgaccgaatgcctgtgtgttaccatgctagaagagattctgtgttttctctgcttggacttgcattgcataatgttattttctgtttgtgagaccctaggatggattagggatgagaggagaaaaatgtgttgagccacattcatttataataagaatagaaaatcaggtgggccacacagtgatgttggcttggccagtgtccctctcacttttttttgagatagagtctcgctctgtcttgcccaggctggagtgcgacctctgcctcccgggctcaagcgattctcttgtctcagcctcctgagtagctgggactacaggcgtgtgccaccacacccggctaatattgtatttttagtggagatgggctttcactatgttggccagatcggtctcaaactcctgacctcaggtgattcacctgcctcagcctcccaaaatgctaggattacaggcatgagccgcttcacccagccggccagtgcctctctctctagccagcttaatgggaaatcaaattgtcagaaggtagctgagtgaggttgaaatcagaccaagggaagttatttggggttagagcctaaaaaataaccttttaacatcattgggcaaccaccgttaagaaaacatattggctggaacaacccaagtattacagaaataaagtagaatgtgaaagttcatcttactgcaacccctgagaaatgaccactgttaacagagcattccttcctgttgtcctcctcctaccatcttggcttaggaacaactttgtttctcaaaagtgccttgccttaactatcaccagcactgactatagctggaaatctggctcctgtcactttaccagctatgtgaccttgggcaagaattttaacttcactgcagttcagttttaaaatttgataaaatggaggccgggcacagtgactcaagcctgtaatcccagcactttgggaagcagaggtgggtggatcgcttgagctcaggagttcgagaccggcctgggcaatgaggtgcaaccctatctctactaaaaatacaaaaaatagctgggcctggtggtgcatacctgtagccccagctacttgggaggccgaggcaggaggatagcttgagcctgggaggtcgcagttgcgtgagccaagatcgtgccactgcactccagcctgggtgacagagtgacactctgtatttaaaaaaaagtaaataaaataaaataaaacaaaatggagacgttaacacttgaggaaattatggattatttaagccctccacccctgactacaacctgctcacaggaggcttagtaatttatgtactttgggttgtaactgacctaggtgaaattgatctcttccagggacatgagataagacactttggtgactgattcggccaatgcttcttgaagaggagtgaatatgggcagagtctgaggtggagcctgaagcagatctaccccaggggaattcaaaagtgtctccggagacttaaaatgttaaattcatctaggtttcacattcttctccatgttctatttgtgcttactgcaacattagaatcccgaagcatgcacgaatccttccaaatctccaaataaaacatatttgtttgttttaattgctgtacaaatatgaactc

SEQ ID NO: 1594 - DNA, 599 bp, Homo sapiens
tctgttctaatgtatcattaagctccttaaaatactggagaacagcttccttatcgccttggatcattttctcagaatgagatttttgttctttcagcttttcaataagatgggtaagatctgtccagtgtgtgtcagtcaactgttcaagcagtttttgaggagtgtccttttctttcaaataggcactttgaaggtcatctataggatgaccatgatgttgacctatggtaaggcaatgaccacaaactaattttttatctaatagacagtaaacatttaatggttgcctgtaatgttcagggcaggtgacaatatctggatggtcttcttgctggtacttttcaataatagcccttagtgcaaaattaacaggtaaagattcaatgccagttggagcaatttcagtaatacttctgcaattagggcacttgagtggaattcgtaaaggtctccatatataaaagttaccagatgcctgaagaatgttttccaaacaatttctacaaaatgtatgagagcatggcagtacacgaggatcttcaaaaatactataacatatgggacaagttaactcttcctcaaaattgtgcatttcc

SEQ ID NO: 1595 - DNA, 599 bp, Homo sapiens; identical to SEQ ID NO: 1594

SEQ ID NO: 1596 - DNA, 197 bp, Homo sapiens
actcattctcttttcttgtctgccgccatgtgagacgtgcctttcaccttctgccatgattgtgaggtctccccagccatgtggaactgtgagtccatttaatctctttttccttataaatacccagtctcaggtatgtctttatcagcagcatgaaaacagactaatacactacataataaagactaaaattcaaa

SEQ ID NO: 1597 - DNA, 198 bp, Homo sapiens
actcattctcttttcttgtctgccgccatgtgagacgtgcctttcaccttctgccatgattgtgaggtctccccagccatgtggaactgtgagtccattaaacctctttttccttataaattacccagtctcaggtatgtctttatcagcagcatgaaaacagactaatacactacataataaagactaaaattcaaa

SEQ ID NO: 1598 - DNA, 2089 bp, Homo sapiens
ctacaattagccacagtgctgctctgagaccttaatgcatttgtgcagttggtcccacttcccccaccaggaccaggtttccaaggcctctgtttgatgccatccagaagtctgaccagcaagatgttactgggaagctcctcgacacccgagccaacaagagtcctgcactcgggacatctgagttcatttcgagaacctacgatccccagcaaacatcgcttgcaaaacgtatgctggcaaggcaagaccttcgcagaagcatcaaggcgctctagacacaccggacactccaaaagatccaacaaggctgattcatccatctttatctactttactgagaaaaaatcttcagaaatgttcatagttgtgtgcatcccttaaaatgactcatgtaacatccatttcagactttgctctagagtcatggggaaaagggggaaaagagaacatgagtgttgttatctagggaaaaagttcaaaggagccaagaatcaaaaagtacccaaaagtacactattccctgtctgaatagtgtagctttgctttggaatgtgggttcctaaactccaaagtcaacaactgaaaacaaaacaggctttctaaacaacgcaaaattaacccctaaagatatctagggattcactgggcaaacacaaggcacagagtattacataattcccgcagaaggatttatgaagtgcaataaggaacataatttcttaagctctgaaagtggtatcagctgccttaataaagtcttcaactcataggagaagctgacagaggccattgaaagtttcctctacctgaaatttacttttatatccaactaaattcccttttttaagccactttagcgtttaagaaaccatgcctcatgtaatcgctcgtggtaaatgatcccaatattaaatacatatgtttcttcgctgttattaaaaatagaactgtttaattttgcccaaccaaaaagagctgaaggttgacaattctaaaagacacagatttgcttgaaagcagctaaaacagaaaagcgcccttcagggcagtagttgataaactctgaaacacatttctgaacggcctgtcctaatcccattcagaaaagctggcaaaattatcaccaaaagaattcgacaatggaaggttggactggaaactgtgggcatatgaaaatgaggccattcaggaaaaagcaagccacttactgcgccgctctccccccaccgccaaaataaatgtaaaagtgaatgcccaggagaacgggagtaaaaagatttggctgggagcattaacagctgttcttgacaaagccggagcggggggagccccagggctgcacccccgctcccacggcgccaagcacaggtactcccaagcccgcagggaggcgcggcggccgctcgccgcagacacaccccggggccaggtgtcggcggcacccggcaggagccggtcgcggcctggggctgcggcccggccggtcccggcgtggggatctcaccctacagcctccctcatctccgcctccctttagctcaggccggggacacaaatccctctacacgactgcgggaagttttcaaggacttaaaaataaatgcgcaggcttaagttgcgaaactcagccccacagagtgccacggggaagcagctttctagcccagccaagataaggcgacagtccccagagagaccgcgccatccgggaagcagggggtgctgggctgcgcccggggagaccgcggcacggagccctggcagcttcctgcccggagaaggcagaggccgcgggctgctccgcttccgcaggtcctgattcccggcccacggggacccgagggcgaggggagagagagaccgacccagggcggggatgggggaatgtcgagaccaccgccttctccgcggctaggggtccgccgacgctgggtccccgtcgaccccgcgccggccgcgcgccctacctcgcgcctcggctcctcctctttgttcgcggccccgcagcggctgcggcggctgatgcagatgcggccccaccgcgctcgccgctcgcagtgtctctgacgccgcggcggcaccggga

SEQ ID NO: 1599 - DNA, 1117 bp, Homo sapiens
catgaaagaattcacactggagagaaaccctatgaatgtaaggaatgtggcaaagccttcgcatttctcttttcctttcgaaaccatataagaattcatactggagagacaccctatgaatgtaaggaatgtgggaaggcattcagatatctcactgctcttcggcgccatgaaaaaaatcacactggagagaaaccctacaaatgtaaacagtgtggaaaagcctttatatattaccagccttttctaacccacgaaaggactcacactggagagaaaccttatgaatgtaagcaatgtgggaaagccttcagttgtcccacgtacttacggagtcatgagaaaactcatactggagagaaaccttttgtatgtagggaatgtgggagagccttcttttctcactcaagccttcgaaaacacgtgaaaacccacaccggagttcaaccttatacatgtaagaaatgtggggaagccttcaagtcatctagttcctgtgaagtgcacgaaagaactcattttggagaaaaaccctatgaatgtaaacaatgtggtaaagccttcaattcttcaagttaccttcagttgcacgaaagagttcacactggcgagaaaacttacgaatgtaaagaatgtggtaaagcctttctttattccactcactttcgaatccatgaaagaacccatactagagagaaaccctatgaatgcaaacagtgtggtcgggtcttcatttacttcagtcaccttcgaaggcacgaaagaagtcacactggagtgaaaccatgtgagtgtaagcagtgtggcaaagctttcacttgtttaaattccctgaaagtacacaaaagaattcatactggagaaagaccctttcagtgtagacaatgtggtaaagccttcagttactcaaagtctttgcacgtgcacgaaaggactcatagtagacagaagccctaagaaagtaaagtgtggtaatgctgtcagttgtattagttccttttggatgtatgagagtacttacgctggagagaaattcaaggaatgtaaacggtgtgattaagccttcagttgtcctaattccctttgaagacgtgactcatgcggcaatgaaatattt

SEQ ID NO: 1600 - DNA, 10195 bp, Homo sapiens
ataattttaaaatatttgtttaatgaaacaaattgactagtttcacagatccctctgcataatacaaagttctgaaagtttatggtcctggttttcaattaatcctccacactggcactggtctaaggaaactgaattgacacatatgtgtcccacattccaccattacagtattagccctttcccaccaactgccccttatgaagcttttcagtcactgcaacactcccgacaccaattatctcatctgttttaaaaattcacagtacttcatttcctccacttaaaagtacttgggcttcctttactcatttaattgacacagtcgagcaattgctgtgtatgtgcttaggttaacatcaaatttgcctgtgtatcacagcatacattttaataggatgagtttatcaggctatctcagccttatacatgttctctcagtgtatgcttttcggccacataatgaactacaaatttttgctcaacccttttccacatagatctgagttttcttcctatgggttttctgtaacataaaataagacataattgatcacggaaggcacaaccacattcactgcattcacaaggtttctgtcctgtgcaaatcctctgttatctcctgaggctgcacatctgaccactggctgtcccacaaggactacgttcctgtttgcgaggaggccgctgatgtttaatgatgtctgaggggccacagaaggcacttgtgtagtcgccccgttagcagagtttttctcctgcatgacatcactggtgtgtaatgagctgtgcctctctgcaggaggattttccaccttggctgcctcttgtttctcccttgtgtgtattctcttatgcttaaccagacacgacatatacgcaaacgctttcccacactcgttacagccatagggtctctctcctgtatgagtcctttgatggacaatgagcttttgctttgtgctaaaggctttcccacattcactacattcaaagggtttctctcctgtgtgaattctttgatgtttaatgagacctgatttctgagaacaggattttccacattcactgcacacaaagggcgtctttcctgtgtgaaatctctgatgtgctatgagacacgtcttctgaatgaagccttttccacattcattgcatatataaggtttctcacctgtatgaattcgctggtgtacaatgagatttcctttctggatgaagccttttccacattcactgcatatatagggtttctctccggtatgtgttttctgatgtatgttgagccgtgatttcttgagaaaggctttgccacattcagggcattcataaggtttttctcctgtatgagttcgctgatgttcagtaagcatgaactttctggagaaggctttctcacatagactacatctgtggggtttctctcctgtatgcattacctggtgatcagttagccaagacttcttgatgaaggctttcccacattcactgcacacatgatgcttctctaattttcgtgttttctgatgcttgggactgatgaattgggacttagtgctgatgagtttttgacttgcagggaatttaattgcagtatgaagtcgttcatggttagcatgaagaaaggagtccccatttccagtaaactcaacagagttctttatttcatagcctttgctctggttaactaaagttaaattggatttcaaactttttccacgtaagtcaaatatatcatgattttgccctaacagaaactgacttttgctgcaatgaacaatattttcaaatgcatcatgttcatgacatggtttccttctgttcaccaggctttcactctgcaagcgctccagcacatgatcaactttccatatgtctagaaagaaaagaacaaagatttctatcatttagatttggggtaaaagtttgttgtggtttttttgttttttttgtttttttttttaagatggagttttactccgttgtccaggctggagtgcaatgctgcgatctcagctcactgcaacctctgcttcccgggttcaagggattctcctgcctcagcctcccaagttgctgggattacaggtgcctgctaccatgcccggctaatttttgtagttttactacagacggggtctcaccatgttggccaggctggtctcgaactcctgacctcaggtgagccattgtgctcagccaaagtattttttgttttgttttgtttttgggagacggagtctcactctgtcgcccaggctggagtgcagtggtacaatcccggctcacagccaaagtattttttgttgttttttttttgttttttggggacggagtctcactctgtagcccaggctggagtgcagtgacatgatcccggctcactgcaacctccacctcctgagttcaagcgattctcctgcctcagcctcccgagtagctgggattacaggcatgcaccaccgcacccagctaattctgtatatttagtagagacggcgtttcaccatgttagccaggctgatctcgaactcccgacctcaggtgatctgcccgcttcagtctcccaaagttctgggattacaggtgtgagccgctgcacccggccccaaagtattcttttttttaatgccttgatgtgaggtgtctcttagtaataaccctatgacctgagtgtaaataaaactccatgtttaatgttccttgcacattggcaaaaagtaatagtataaacaaactaaaaggtgaaagcagttagcataaaacaaggttagatcactaataataaagacagatttggctgctttctaaatgtgccttgcaaaacagaccttaaaatacaagcaattcactgtgaccagcagaccagaggctggaggcccatttcgtccaaagaacagattcattcattccacatactcttactgaatgatcaccgtgtgccaggtatggtgctggtgttggggataggcacaagaatcgcttgaatccaggaggtggaggttgcggtgagccaagttcacaccattgcgctccagcctgggcacagagcaagactctgtcttaaaaaaaaaataaattaataaaaataaataataataatgaataatttttaagggaatgagtcagggaagtaatcatatgtgtggaacacaccaggcagggtttaggaaagaggatggaaatctctttgtgagcaagatggtattatatcacagagatcactgaaatgagaaatttgacaggtaacatggtttactgggacttggtgtcatcagaatacgatggggaaaaaaacgaaagcaaattattaaatacagaaaggaaccaaatggaagtaggcgggagttgagaatgtaggatgttaaaaaaatgacttttttacttagagatgcatcatgactagcagagacctttaaagaagagagctcttcaggcaggtaatacccagatggccaagattcaggatgtacaggaacaaacgaaaatccaaacttaatggttttcttggaggaaagatgattctagttccttgcagttactaggaactcaggggagagttgccatgaagtaaattacacagaactaaaatctgtgttagataacaacagggagatgtcagtttgggactctcctccagggagcggaaggagtttaaacttactagaatgaaggcaattttgaagagtgaagggcacagatgagaaaatggagaacgggacctttggagaacctaagaataaggaaaaagagaagcgaaggaagccaaggcacagcgaaagtccagtttaccctgaggaagccacatccatcacaggggaggtgttaggaggggaggtcagcattagccaaggggcacaaaggggtgggagtccgaaaacagtgaggacttcaaagtttcctctttggaaagaggcctggaaggtggaatttcgtaacaagagaggtggaacaacatgaagaagggaaatacttgaaacccgaggaagaagaaaattatgcaggcaaacaaacaatatgtagataaaataatcagatctctgaggagataaagagtttttgttttgttttgtttttttttaactctaaattcctacaaagaaaaactggtctcacactgggagacagatgagtagaggaactgtttacatatcctcaaacccccttcacagctgtgctgccttctctgactgtctagaatgtgacttccatagccttctgtcttgtgggttctctcacctgaacaggctccactgtggattccatcttcaattgtccacagttgttctccttgttccaacttgaagagtgcatccggtttgctggcttgataccctgttcatggaaaatgatagaggacttagacatatcaaattgggctggcaatgtcaagaaggaagaatgttacatttcaagaaacttgagtttcttaaaatacccaaaatttagtttcttatctgaaactatgaaagtttcgtttcatatctgtaacatcaaggtttttctcttacaagagggtagattacaccgtcttgtgtgggagcaagagaaggatctgagaatctaccacttcagagtactgcaggcattccaaagaggtaggcatctgagaaaggaaggccactgactaggcaccctctgagtgacacagggcagctgtcctcacccactgccaccaggttgctgtagttctccaacatcacatcccggtacaggtccttctgagcagcgcccaggagttgccactcctcccaagtgaagtccacagccacatcctccagtgttatggattcctgtaataacagtcctgtttaataaagtgatgtctttttgatgatgtggaagaaatgctaaagtttttctgctcatttccactctacaggctgtgtgcatataccaaatagttttttttttaatacaatgtggaagaagtaaagtcctaatataatattctgtaactgtatattcagtcatcctccattcacccaattggaagtttctataaagtgtagaagttaaatcttgctaacctaaaaacaatatatttatacattttatatatgtaaatatatatgaatatatgtacatatatttattttagatacatgcaaatgaaagacatatatacagccatcctttagtatctgtagggtattggttccaggacctcctgaggatactgaggtgtctgatataaaatggcacagtattggtcaggcacagtagatcacacctgtaatcccagcactttcggaggccaaggcaggagggtcactcgagcccaggagttcaagaccagcctgggcaacatgagaccccatctgtacaaaaaattaaaaaattagctaggcacagtggtgagtgcctgtggtcccagctacttgggaggctgaggcaggaggctcatttgagcctaggagttagagactacactgagttatgaccatgctactgcactgcagcctaagcaacagagcaagactgtctctaataaaataaaataaaatggaatagtacttgcagatttgcatgtaacccatgcacatcctcccatatacatttctgtttttttgaaatggagactcactctctttcccaggctggggtgcagtggcataatctcagctcactgcaacctccgcctcccaggagcaggcaattcttctgccccagcctcccaagtagctaggactacaggcatgtgacactacgcctggctaatttttttttttttttttttgagacggagttttgctcctctttcccaggctggagtgcaatggtacaatcttggctcactgcaacctccgcctcccaggttcaagcgattctcctgcctcagcctcccgagtagctaggattacaggtgcccgccaccacaaccagctaattttttgtatttttagtagagatggggtttcactatgttggccaggctgttctcaaactcctgaccttagacgatccacccacctcagcctcccaaagtgctggagttacaggagtgagccaccgtgcccagccccatatactttaaattatctttagattacttataatatctaatacaatgtaaatggtatgttaacagttgttatactatattgtttagggaatcatgacaataaaaaagtctgtatgtgctcagttcagatgcttaaaaaatatatattttcaatcctcagttggttgaatccatggatgtggaagccatggatatggagggccaaccatatatcacaaatccaggcctcctatttttctgatggactaattataaactgagggttcctatgacctccttgagtttgataatttctcaagaagaaggagaaaatcaagtaatggagaaacaatatccaaagatctaacactgaaaatttttcagaactgattaaacactccaaaattcaaactcaagaaatccaacaacttttcaagcaagaagtctacacgtaggcacaacagattgaaactaaattacaccagatacaaagggagactataaaaaaatccaaagaccaatgacaggttacctacaaaggagacaaaattttctgacagctgactgctccacagaaatcattatagccaataaatattggaacaataaatgtaaggtcctcagctcttggacaacacagcccaaccttgaagaccatttaggactgaaaggcatggctggcaaaggacctacagccctgtaatagtgacaattaagactacttatcaatgaattgtcaatctcttgtctcaggatgcaggatggctttaaaggatactgctggtgggaaattgagtcattgaagacccagggaacagcagaaggtacactctatactcattttattacagaggccagtgaacacacttggtagatgatacaagtacttaatcctggttggtttacccattctaaattatttatgtgagatagctatctatttggaaaaaagtaaagtgaaagtcttacctcaatccacactcaaaaatagtttactatatgacagatctatggcaggcagatttgatggctcaatgaactccaccctcccagtgttcacacctttatgtagttcccacttacagggagccaaaggtccgtgggacgtgaccaactcagcattccactggaggctatatgatcaaacagcaaactgtttatcatgaatgcaggatgtgagcaaactcaccattgctcctgccgacagaaggttttctggaggcaatcactccctggtgctgaggttatctactgcaacatttagagaatgtagtcttgcaagcctcctctggactgagcagctgacccctacttccactgcacccccccaactatctcttttgcctaataaatgcagagggctgtgtaaagctcagggcccttgtccactagaggcaaggtaccccctgaccccttcctccgaatatacttttgtctcttgtcttttattcctgtgttcaccccactgtgttcagtccccctaggtctgtgcgggttacaagtggcgcccaaacagggacagaattgggtgctctacaccctctccttgagcagggactggcctagtgacttacctctattcagaatatggcaaaggcgttggaatctcacctccttaattaagctatacatgtttaaaaaaattattcaatgagaattgttaaagcacagtaaggaagactttattcagggccattatgacaggtatatagacaaatgtaatgggattttgcagtggtagagggtgaatggacttaactccaaatatcagcataagcaagtgggaatttatagccaaggagcagagtatgggtcagtaatacaaaattaccaagagggccaggcacaatggcttatgcctgtaatcccagcactttgggaggcaggaggattgcttgagcccaggagttcaagagcagcctgggcaacatgacaagaccccatctcaattaaaaaaaaaaaaaaaaggaaaaaagaaaaaaagcagaaaagtaaaagtaaaaaataaactcatagtcaacccacccccgccacacacacacacacaaaacctttatgatcttttatcatttttcagattaaatacttgattctctcctaacccccaatggtgacaaatgcatttttttcaagtatagctataaactgatggaattttatataattaatgttcttcaatcatttgcaatcattggtctttggatgttcaaagtgtagcatcttcggccaatgaagagtcccttcaagttggctgctatgttctttgaaatatgattctatcatgtaaaatatatatatgtgtatatcataatgaatatatatatctacagatagattcatatatactcacacttttattaatacatatatagacatagatccacaaacagatacagtgacaggaagtaaatattaccaaccatttacagaagtggattaggaagaaaatatgtgaaaagaaaactttttctcttttcttcaattttactaaatatagacaaggtctcactagattgcccaggctagtctcaaactcctgggctcaaggaatcctcctgcctaagcctcccaaagtaggcataagccactgcactcagccagaaactttttttttttttttttttgagatggagtctctctgtcacccaggctggagtgcagtggcaccatttcggctcactgcaatttccgtctcctgggttcacgccattctcctgcctcagcctcccgagtagctgggactacaggcacctgccaccacacccgaccaattttttgtatttttagtagagacagggtttcacggtgtgagccaggatggtctcgatctccagacctcgtgatccacccacctcggtctcccaaagtgctggattacagccatgagccaccgcgcccagccgaaatttattttttgatatgtgtactttcttactttactgggacacaatcacagatgacctatgtggctgatcttaggtccacaccctcccagaagtcaggttttaactttagcctctagttctggaagtttctggcctatcatagatcacagatctatcatagttcgtatttttaggctgtccagtggccaaaggacccaagcaaacaaagacactaccattagcaagatattccagaagcccagagctcaccctccattagcttgaacacaaaggccaaaactccctttgttcaattatttactatacaataaggacttggcattttctacaaggtgaaagtctaaaggaaatctgtaaactccaatccaagtcctgttcagacaatatcactttcaactccctgtctccaaatctatattcaaacaccagttcagctatctgttcattgagaaccatttgaaagtcctggaatcctgccatattcccaggatgtctaggttttattccaagttaaatccagactgccacaaggctgaaattaacttgtgttggtccctgtgtttactgtttgcttagtctattccgtaacagtatataaggagtccttcaagaaacagccacaggaaacctgcatctgaatttatgagaaggctgctattctggacaccatccaccacatcaactctaggaagaaccactgaagaaatttcctgagaccaaagtgccatgaaataatggcaacccccaggaagtaatctgttttatcttcaaaaacaggacataccatgtaaattatgattttcttgtgacattggctgtcagagatattagatgcaagctgacagctaatataatccacaggatcctccagccatgcatggtgtcacaaaattcataatttagtgttaatgctatgaacattatattccttatcctactattttgcatgatattgagtttaaaaactaagcttacttctctccagatcctgctttttgaaatttatactttttatattagtgaaattgatgtttataggcttctacaaatctattatggaacaaaggaaagaataaaacaaaccaaaagtcagttacctgggcctggatcattttcttctgttcttggaagacagcattcaactgggatggtctgtctttgtatcttctggccttctcttcagaagtctcagttttcaatcaagtgtgccccaagaaatggtgaaccccaaatccacttcctccctcttcaggttatgttttttgctcctgaggagtcagaacct

SEQ ID NO: 1601 - DNA, 359 bp, Homo sapiens
aggcacctgtaatcccagctactcgggaggctaaggcaggagaatcgcttgatcccgggaggcaaagtttgcagtgagctgagttcgtgccactgcattccatcctgggcgacagagcaaggctccatctcaaaaaaaaggttacctagtaacccaggatttctgttgaattctgacctagccacaaggcaaatttccatttattttcctatgagcagcacttactgtaacttggacagtgtatccatatgggatgaaggttaaaaaaccagataaagaaggccaagagacctactcccagaaaagtgagaatgatgaagataaatcatgtctcaaaaaaaaaaaaaagaaaagaaaaa

SEQ ID NO: 1602 - DNA, 4977 bp, Homo sapiens
tccacctaggtccgtgcaggttacaaatggcaaccagaacagggactccaagcacgcccaactagcagcatccaaacatgggacttcaaggacgtgaatgaagaaggtctgctggagcagaggaactgaaattgacaaggcgaaaggggaccctgggaagagtctgccggcagcagatataaggtcagtgccctaaagaggtactgggagcagtgctttaaagaagtactgggaagttttctgactcagggtaacaagggaaagaatttgtctattgaagaaaaacattatgtgcagttgcttaaagttctgttgagacagtctgcagctcaggttaattcgcagacactaacctcctgcagaagccacaaaaggttattacacataacccatcgtttccacaggcaggcactcttgatgtggaaaattgggatacagcaggagaaggattaaaacaggctcatcaaaaaggtcttaaagtcgattcttctgttttctccacttggagtttagttcgtactgtacttctgccattatctcattattattctgcaggacagcaagctgaatctaaaaatctgaaagaatttgttgacccacccacagctccaattaaaaataaaaaacaggagagggaggataaaaattggcctatactgcctccttcagttgcagaaacatctgtactgcctccttcggtggcagaaatagaaaccctaatacaaagaatttaatgctctgctgccatagctggagagcccttaggacattgtgcttttcctatttccatcaggcctgatccaaaaaatccacagcaggttattcatgaacacaccccactagagtttaagttgttgaaggaattaaaagcaagagtggtaaatgatggcatacagagcccattcaccttaggattgctagaatctgtgtttggtgctatgcgttttttaccctttgatgtgagacacttggcgcgaacttgcttgtctgctagtgcatatctgacatggaatttaaattggcaagaaatgtgtgcagaccaggctaaacagaaccatgctgctggacacggagacattacagaggatatgctgttaggtcatggcccttattcagatgtagaacgtcaaatggcactcccagatgctgcttatcagcagtgtacacaggccgctaaatgcgcctgggccacaatcctgaagagggagtccctgtacaatcctttttacatatcatgcaagggttgcaggaaccctatgcacaatttcttgcaagattacatgaggcactgaagcgtcagattcctcatactgtggctgcagaaatgctaaccttaactttagcttttgagaatgcaaacgtgtactgtaaacgtgcactggcaccagtgaggtgtacaaaaaacttgggaaattttctcagagcttgtcaggatgtaggaactgagattcatcgatctgcaaagttagcataagcaatggctaatttagcagttgacaaatctaaaaggagccaagggtcaaaccctaaagtgggaaaatgttgtaattgtggaaaaactggacatctaaaaaaggaatgccgccagatctcaggacagaaaggatattacaatgcagttcactccctagcagaaaaaacagcaggactctgtactcgccataacaaaggaaatcactgggctacccagtgctgctcaaaatttcatcagaatggcaccccattggtaaatgagatgggggcctgcacccgggcccctcaaacaatgagggcattcccaatgcagaccacaaccccacttcagggatgggttcctggaggcacattgattccctcaacccaggaacaccaggaagtgcaggattagatctacccaccagagaaagaatcacattagttaggggagacaaacctatttgggtatttggggacctttaccgacaggatacacaggactaattttaggtaaaagctgccttaacttgcaaggcatcactgtagtcctaggaatgactgactccgattatgaaggagaaattcaagtagttttaatgtcacaaaatctttgggtttttgaactgggagaatatattgctcaattattgcttattccctgtgaattacacccttccccatgaaaagagaaatgaggaaataaagggtttgggagcacaactacatgggaaatctatctttcccaacccatagcctctaatagacctacctgtgtagtacacattaaaggaaagaaattttatgggcttatggacatgggagctgatgtgtcagtcatatctataggatgggcacatcaaacattacaacgcatgttgaaaaaacaaaaagggggtataggaggccaactaccacctcaatcaaaactacatttagccttatttactttaaattttctgactcccggtatggatggtaagactccagcagaaagacattggcaagtgttagaggaaaaaagcaaagtttatctgaaagtgttatggaaatccccagaaggacaacaatggaaaggcccggtagatttactgacctggggaagagggtatgcttgtgtgtttacaggagatgggacaagccatgtgggtgccctcaaggtgcatgcgaccatggaatgggagactggaggaacccagggtggccaaccatgggcccagtccctcctgtacgagctatgagtcagctgagcctgagtgcaaagatggagagaaggccaaccagagtcatgatgacatcaacccccataacctggggacaactcaagaaaaccacacaggaagctgagaaactactggagtgtcagggacaggcaaaacccctgattccatgctcttggccatgttagccataatgtcctgtgcactacgttttccctgtgcacaggcaaaaacatattgggcatatgttcccaatcccccagcagtatggcctatactttggagctcactcctcctgagatttatcacgatcagggagagtgggctccaggacccctaactccccgtgacatagaaaagttagactctcagaacaatgtcattaattataccactccactggaaggactccctttgtttatcaccacaaagacgtcgctcagccatagctgtcttgcaattcaagctcaaacatggttgagtcactatggaaaaattatgtacttattaggtcttggttctattaatgtaactggtgtgctaaccaatcattcccagtccagtcaccctaattgtgctgattatacagaatggattccattcaatagttcctaccccactctgtggacccagtgtcttgatccactggctagtaaacaatatatgtcaactgaagacactgtggattgggaacctaaaggtcaattagatggaaaaggtgaaagtcagaaatcatggcacaaacttcactggcattggcggcaagcttttaatgcttcttctttatacaacagcagaatccaatcccagtctgctgctcagattgcttggcatggagcaggctttagcccacctcttcctcagttgcattatctggggaggaaaggaccaattcaagaaactatatggaaggcagcactcccatttatgaatggcaacatctggattggaacactgtctaataatagcaatagtaagcaacacagtcttaatgttgcatttgtaaagaatatcaccactcagtttacagtttgtgtttttaatccttatgcctttttggcagctaagaagaaccagcttcaggtaaacaatacccaattgacctgtaaatcttgccagttatatcacactgcattaatcatagcacattacgaacacataatatctctactttgataatgttgggttgcatccctgggctatggattcttgttaatctgtctgagccttgggctgccacacctgctttgcatttttgtaacacttcttctaactcagcttactcactgtgtccatagagccttaggcataatttttgctattgtttccttggtcaaactaataacttctgttgtgatatcttctgtaactctgcataattctattcaaacatctcagtaggtggagaactggacacgcacagctgaccaagcgaggctacttcagaataaaattaacactgagttacaaactgaagtggcaatgttgaaatccatggttctgtggttaggagaacaggtacaaagcttgcagttgcagcagcaattgcgtcatcattttaatcacattcatatttgcgtaactaactcagaatataaccaaagtgagtatccgtgggaccttgtgaaagcccatttgcaaggagctttcacatccaacatcacctttgatattggtgaattacaaaacaaaattattgatttaaataggcaaactcaagaatttcagccttctttagaagactggaccgaattccaggaaggcctggagagcctcaacccttggacctatctaaggcaccacattaacatcttatatgtagttcttggaataatgttgttttgtctctgtcttcggtttatagtctgtaaaatcggatggaccaccaattggagaatgagagcctcccagcccagccttacattctttcaattaatacataaacagaaagggggatatgcagggagccaaaggcctgtgggacgtgaccaactcagcattctgctggaggctatatgatcaaacagcaaactgtttatcatgaatacaggatgtgagcaaactcaggactgctcctgccaacataaggtttgctggaggcaatcactccctggcaccgaggttatctactgcgacatctagagaatgcagtcttgcaagcctactctgaactgagcagccgaccccttcttccacccccccaccctcctatctcttttgcctaataaatacggagggctgtgtaaagctcagggcccttgtccactagaggtaaggtgctccctgaccccttctcccaaatata

SEQ ID NO: 1603 - DNA, 21724 bp, Homo sapiens
gagagccagcaatggcatgtcttcagatttgccaccgaagaagtccaaggacaaactagacaagaagaaagaggtagttaaacctccctaccctaaaatcaggagagctagtggaaggctggctgggaggaaggtctttgtggagatccctaaaaagaaatatacgagaagactccgagagcagcagaaaactgctgagggtgatgtgggggactacaggtgtccccaggaccaaagcccggacagggtgggcacggagatggagcaggtttccaaaaatgagggttgccaggcaggtgctgagttggaggaattgtcaaagaaagcagggccggaggaggaagaggaggaggaggaggaggacgaagaaggggagaagaagaagagcaactttaagtgcagcatttgcgagaaggcgtttctgtatgagaagagcttcctgaagcacagcaagcaccgccacggcgtggccaccgaggtggtgtaccgctgcgacacctgcggccagaccttcgccaaccgctgcaacctgaagagccaccagcgccacgtgcacagcagcgagcgccatttcccatgcgagctgtgcgggaagaagttcaagcgcaagaaggacgtgaagcggcacgtgctgcaggtgcatgagggcggcggcgagcggcaccgctgcggccagtgcggcaagggcctgagttccaagacagcgctgcggctgcacgagcgcacacacacgggagaccggccctacggctgcaccgagtgcggcgccaggttctcgcagccgtccgcgctcaagacgcacatgaggtacgcggggagccgtccggaggggtccctgcgcactggaagggtgtgtcaagcactgaggtcgtcctgggatttgatgtctcactgcttaatttctccgctccaaacctgggggcttatttcgagacagcgtttagttctctgtcaaggtacaggggctgcgagtgatggctctgctcccttgttctgagacccctggggcgcccctgctggccgggacgtccctctggtgggaccgcgacagcggccgcgggctcgccccaccgtgctggaggaagagttgggcctcgttacctttatttctcctttcctgactcttcgtttagatcttggggttctgtgaccatccgggtcccacagtctcagtagagacctcagtgagatgccatttcaggctttaggactcgtctctggtcttttggttctcaggcttggaaggagtgccatctaggcagtctgcactccagaatcaggacagacagtgctttctgtttcttaatatgtttctgagctgcaggtgtgtggtgatgtttttaaataagttttcttatagttcttagtatatttattcttgaaatcccaacaagcagttgttttctcttctcttctagatctgccctcaaacctaggtcagtcttgggttagcagcatggtgttcattttttactctatataataagttaaaaatacttggtttaggaagtgctcagtaaattatgtttgattgctacttcatactagttgtgacattaaaatgcttatgcattttaaaaatgccaccttcggcaatttgagaacagttctcctttctctactggtgatgtcatattaggaaatgagagtaacatttttgatcatgtgacacttaatcagcagtagttcctaaggtgtttgtggctgattattctgtatgagacagctttacaaatatcagattgtggtctttagtgtttaaaaaaatctgcaaaggcctggtctctacctgcacatgccttatagcatcagcagtagggcttgtgatcaggtgtagatgaacattccagtcagtgatttatggaaaatgtgtggatccattgaccttgtgcagaaactcagtttattttgggatggagattatgggctcttgacctgtcactacagtcattctcattaggtctcttggagtaaacgatttttgcaggatagagtggaaattgtattgcaaagtgagctttgaaatacatcctaagttatcatctgaatgttgtactttcagaattcatacaggggaaaaaccttttgtctgtgatgaatgtggtgcaagattcactcagaaccacatgctgatttatcataaaaggtgtcacacaggtaaatactcatgctgttgtgattgaatgtctttcctagatctagaaggaaatgcaattgattaattttgaagttggcatctaccaaggtggtgcaggttaaagccatgatatagcttttccatctagtaagtgagcaaaatgaataaacatacacccattgccttgttgctagtgtgcacatggctgtggcttttataccaccaggccataggatctggcatgcaggtcttaggtatcaagagatataaaatagttcttttgtaaccgaaatttttttttctaagactctgtcctaaagaaattgtccaacatatgggaagagctgtatgctattatcccccttcttgctatttttaactaagaatgggaaacagcctgattgtccaactacaaggaagtgctctagtcaactctggtaaatctataccctggcttatgacccggctattcagagtaagggctctgaatgacatgaaaaagtctgtgcttggatgttcaactttaaaatgcacaattaagcatacagttaacctcaattgtattgaaaacctgcacataaaagaccagaagaaaataagttgttatatgatacattaaggtagtaggattatctcatttctgttttccaaagtctttatgatttattaattatgtgacagataaaacttaagttggctttattctgcttcagcacagtaaccctgaggtttagaatcttgtggaagatacagaagcatacagcactgaagtgttccaattcttctcagtttcttctttgcttgcattttttattcttacctgtaaacactggcttacaagcctcaagttcaaatgcatgtgagacagagatgacatgtctctgactcattagacaccacatctgtgtgattagacaccagttctgctcattctgaagtcataattcatgtcattgaatgaaaatctcatttaatgtcatgaaattagcatttaatgacatgcattatgactacagaatgagtagaattgtttaaagaaagcttgggattggggacaaggtcaggttataatgaaggattaagttagaattggtcctttgataatattaacatggtaagattttattaaagtcactatttttattttgatgtctgtgaaatcgggcacagctaataatttggtaagtctgatttgtgggattaaactacaaaaagtgagatatttaaaactcttgtcctacaattcaatcaagttgattggagttgctactctagaatagtgatatatatccattgtcaacttcccctttattctgataaagatccatagaagtgttcctttgaaaataatccagcagttcctccaaacagaagttgtgaaattattttcttgtttggaatgagtaaatttctaaaatgtgagccagctgaacaaacaatacctctttgattctagtcaaatggaatttttcttgcaatttccaaggatattttacaccaactttcagtaagtagcaagcatcttacatgaatatatattttatgatagtttttactggaaaatgtaacatgctgcctaccaaggcacttttgagttcacgtgggttttaacagtggagacctactgttccatgtgtttttaatgcctgtattgtttatgactttatttcattttctcatgtaggtgaaagaccttttatgtgtgaaacatgtggcaagagttttgcttctaaggagtacttaaaacaccacaatagaatccatactggatccaaaccctttaaatgtgaagtatgtttcaggacttttgcccagcggaattcactgtaccagcatattaaagtccacacaggtatggttggaatgtcccagggaagggagtttagtttggccaaaaaaaaaattctaaagcttgtagatttaccagtaaattacttggaactaagcttttgaagaaaactggccaaactttgtatgtcataatagcatttctttagagattgtttctaactctgagaaactgaaaagtgggagcacttatgtgtgtaaacgggagaagactaagtccctttgctacatggagtttttactgaaaaggacagacagcttagtcatggtgtgaatgtaggaagtggatgtggatgtgtggacatagggataatgatctgtacatgttagtaaatgcacatgcacacatgcatattcagttgttaggggtcttgtaattttatactccattaccatggaaaacaggtgtcattcctatagttataatacctgctgcaggcacatgtcctggcccctttttggtgtaggccataaattcttggtattatagagatagtggatttgtagcccttaagttgttcccaacataaccttccttatgttggatgctgaggcttcccagtggtttgcaacagcatcattcactcaagtgtgtattcagaattaagcacagtaggccaaagggacccaccagcagtctcctctctccctgcctcaggggagcgtccctactgctgtgaccagtgcggcaagcagttcacccagctcaacgccctccagcgccaccgccgcatccacacaggggagaggccattcatgtgcaatgcgtgcggacggacattcaccgacaagtccactcttcggcggcacacctcagtaagcagtgggttggcttatttgagaaacaagctgctgcccttagatgcacggaaagagaaatacctaccaccattctccaaggtggttagaggtcgagacaacaggtactttctccttgggttgtctctgcagtggaacgctcacggaatgaatgaagtggaacaccaagccccaaggcccagggaaagcaccatccacgatgactactctgtaacagtgagggtggtggcaggcgggtacttattagtgaaagttgaaaattgaagttgtagagggactattgttttaaaagatgcacttgtccagagacacattcagtgacctttgttttgtgtttaacttatagatacacgataagaatactccatggaagtctttccttgtcattgtagatggctcgcccaagaacgatgacggacacaagactgaacagcctgacgaagagtatgtgtcatccaagctttcggataaattgctgtcttttgcagaaaatggccatttccacaacctggctgcagtccaagacactgtacctaccatgcaggagaacagttctgctgacacagcctgcaaggcagatgactccgtggtgtcccaggacaccctcctggccaccaccatcagtgagcttagcgagctgaccccacagacagactcgatgcccacacagcttcactctttgagcaacatggaataagagcttcaagcagttcccatcctgttagtctgcgtgtgtggtagctgaactcaagatgatgtggggctaagaaaaataattgtccatgtgcaaagatgtgggcaagaatggcctctgcagattttcctgaacttctgctaacttgcacggctttatcacagcatttttaaagctttccctcaaaaatcctgatctgcatgatctcagctactttattgacaaaaaggcagtgaacataacctcacttaattctggtgtagggtgtatgtgctaatcgttctaattcttgattacctagtttatagataactgctggtcttaattgcagagtacagagaactgaaccagctcctgatattgtagttagcagtcttcctggcttctcactctgccttatatttccatgtgggtttacttctctcataactactttcaaggtatttttcttccaagctgaaataaaactggggccacatattttcagtcatttcttccctgttgaattgaagcaaatcagattttctgtggggaccctcaaatgcaactgaagaaatagattgttgcattcattcctccccaccccccatttgtaggcagtaaacaaagtatgactgacagattgaacacctgcaaaactgctagcgtaatctcagcacatacgcagctaggaagtttgtcataaaatcaacttagaaatgagatgaggctgttcagtttgtcttaaaaaaatcagattaggtaaaagctgtcctaccaaagagtctagcaaaacaatatagtatttttttgcagaggcatgaaaaattaagacgctttagagtacttgaaagttgtgtagtcattttatttgcaaaatgaggtgactgtggcaaattatagaacacagagtattattacttttgccaggtttttctgacttgatttctgtaatttccagaaacccagacttctcatttccacacctagagatggaaacaggcaagtaactgacatgtctatttccttgggagcatgtgagaacatagcagtagggaccaaaagtctcagcacacttacctccgattatgccttaaagagttgattgtgaagaaccagtaactttgtcccaaatgcttctttggctgtttcatgcaggacttaattattgcttttaaaaattcacaatgaaaagacgattctgctgtatttgttaaacgttgacatttggttctagggccttgagtatgtgccacgtgcttgtgaaatgctatgattcacatgtaacatttaaacattaatttaaaaagggaaccttggagaattcttttgttcactagttccttttttctctacatttttaatttattaaacttgctgtgaaaacactttgattttctaagaggaaggtactttaagttccagaatgaacatgtagctgcactatgccagaaattaatgagggaagactttcttcctaagtgcttatgttttaacttatgttagtgaaaccactacaaggtgtttcaggcgctgataacatgcttcacacctgcccttggaggtcacagtactaatttacttcaaatttagttatgacagtgtcactgtatcctagttatgtttacagcacaaataaataatgactgtcatacatccagaggagaccgaacctgcccagctgatgtactgttttatggaataaagtcacttgatcagaaggaattgaaacaatagatcattttgttacctactggagggatttttgtcttgaatttgtttccttagaaattctacaaaaaaatgttgttaataaatgtctgctttgtaaaagcagttttgcaattttttaaagatctatttctgttataatttaggttctgcagaaatatgattcttaattgaaacatataatttgcttaattacgtgaataatgaaatgtaaaatccgggtccataagcctttatttcatacagtcctaggattaagctgtttaactgcttggatcccagttggtctctggcagtgggatcctggagaggagaaatcctggcctctgctcatgcgcaggccacaaccgggctggaagtgcggttgagctctctgccactttcttcaatgtaaaaagtaggcatcaaagatacgacttctactatatacatttctctgtccctgagaacagagaaacgtaaccctgtaggggactggttacagaggacctcctggagcatctgccccattcctccaagtccaagcacagccatgctgagtggaagcgaggccaccatctgagtggattggtcccaagtgtgtaatgaggaaagtggccaggtgccggcacagtgcctctcccagagcctcaagaagggccatttaggagcttgcttcaaccattttccaaccattttctgtgaaatgctgtcagcccaaactccaaagggatgtgcagcctttcgttttaccaaattctttgctgtcgtttggaaaaaatgggccatgtggtggagacctttatttaaggtgatttttacagaaatgtgattttgctgtaggtgattatccaaacaagtaaatttgagtgtataatttaatttttaacctgttaaataaaccttgtccctccaaggagttcatttttgggaaacaagatgggtacttgtcaatttaaccaaatgtcatgatattcatgtactcaggagtaacaatatttcatttgatgtgactgagaaaggcacacaggtcagaggatcatctagcacagcagtccccaacctttttggcaccagggaccacttttgtggaagacaattttcccacaggtggggggacagaatggtttcaggatgattcaagcgcattgcatttattgtgcactttctattattattgcattgtaatatacaatgaagtaattatacaatgcaccataatgtatagtgggagccctgagcttgttttcctgcaacttgacagtcccatctgggggtgatggaagacagcaacagatcattaggcattagattctcataaaaagcgtacaacctagatcccgtgcacgcgcagttcaatagggtttgcactcctatgagactctaatgacactgctgatctgacagggtgcacagctcaggtggtaatgtgagccacggggagtgactgcaaatacagatgaagcttcactgcctgcagctcacctcctgccgtaaggcccagtttctaacgggttggggacccctgatctatcacatcatgctaaatgagactcagaaaatcatctgcatacctttggcaatccgtacgtggactcttaactaaggctgacaaaactaagcttttaaactaccatggtggcatcttcattaggaaattgattctgagaagagccacttgatttaggctttgaatgatcaacaactcagaatgcctagatgaggacagcttgttctaccatttaaaacattttgctttgacttacctgaagtgttgtgaatatactttaggacctgaaatcaaggctctatgataggatggtaggatgagccggtctgcactacccgccatgggtcctcttcctcatcagaacttcaggccccagtggtcagtgggactgacccttccccaggggcatctcctctccctgtgcagatattttgcaaaattaaaataaatgcccacactgaccagatagttgagtggtactttcttggggtaggagagtgtcaggcttaggggtgcctcacctccccaccagtcttccagcaaccatgccttcctcaactttgcaagtaactgtagaccctaaaggattcaaggaagggatgagaatgtggggtctgcagggttatcatgtactttagtggactgcatcaacagaagttaccagggtttccttctaaaccctcagtctgcaaaaccattacggtgccctggaattcccaacaaatgaccggagcctagagagtattaacgtctgttgccttaatcttaacgggaacaacttgaaacaatggaagctacttttgacctatgccaatttagcaacaagactcatcaaaatattactgataatttccactttataggttaaaataaaacaagcatactttttctgctaaggtagatttattgttacacatggttagttttcataacgtaatcccctgccccagagcaactcaggactccatggagcaggaagcctgctcttggtcatagctcataccacagcaggcaggtcacgggggcatgctgtgctgccaagtcctccaaaggaagtcacaaaggtttgcatttggacatttaaatccacaaaatcaggagaaacaataaatgcacaagggctggtgcatatactttggttacagtgacgccaccacacacggtcacgactgtgcaaaaatactgctttcaaatcattaaataaaaaagaactcacacaagctataaaaatgttgccacaaaaagcaaaactttcctctaagaaatattaactgactttgactatgaactaactccagatttgctaaagtacaagaattgtaccataaataattatattttgttcataagtaacattctataaatcttgaagacctagctcacaggcatcttgaaacatggcactgtcctacatccatgggacatttaaaggaagtaagtttgcacaccactaactgggcttttctctcattcttttttttaatcttctggcaggtctcttctagccattacaattactttgattcttttcatgtgaaatattaaaaacaaaaattaattcttaaccccggaactggtcccagtgtttattgcaatacaaacaagtgaccctctaattgacacaacaaaatgttacaaacattattgttaaaaaaaaataccccttcagacgggtctgttggagtataatgatgaaagctaaacataattgcccgaaaataaatcatgtagtttttactttaagtggtcagaccagaagattctttaaacaagtagaaacaaactacttaaaaccagaggactcaagctgcagaaccactcctcacaccccattttcacaaaagtgcatttggctggttgtaggatatattattaggtggggaaacaaaaccccacttttctctctgatcattttttcataagagattctaagagggagtgaaaaagtaccaactggactccattccaggtcttacctctagaagacagccagctctcatttaagaatctcagaacttggaaggaaggaggaaatccacattaaattctagggcccaacagacagagtgtcttcattgccacccccagtagtggggactacagtgcacctgtagtcccagtagatgctctgacatcacagagcttgctgctctaccagcccacctcatgcatgtcaccaccataactatagcctgcaagtcctcgtggccacctgatgtggatcctctacagtctgtccttggctggcccttcccacttgctttcctgctactttctctttcttcctagactgacctactcatcatttctcaaacaacctgcagtcgacccttggcctggaaacactaccaattccagttgagagccaccaaaaatgaaaacatcattccaatactacttactactacctgacataacataggaagtttcgttacctgtcatcagtgaagctccgtgatgtcagagtgtctgctgggttaagtctggcaacacatttcaaatataaatcatttaactataaatattcagaggacattcaggagacaagcgtatgtctaaagtacaatatcagcatataaattaataggatcaagttcatgaatcaagatagcatacatatattatataaaccaattaaacacgacagagttcaaacacataagccaacatattccaccagctaagagaacaatcaagtcccctgagaaacaagttggggttcttgcccacttgggcatacaggacattcctgtaccacattcaccccacctaacccatcatgtacaataaacaggaaaattacatacattcattctcaagcttgacttagataatctatccagccctgaccaagatttctatagtcacagcacagaacacaccacctcaacgtgggaaagtgtataaacatgaaaataatgagcaggctatgccaattaaaatacttcaatgtaaatataaagggatttccactccaactaaaagtgaaaactatctccagaaaaagagaaaaattccatttctaacagatcttgtgatatgtgtgtgtgtgtaaacgcgtgtgtctaagtacaaatcaaattcactttgacactcatccatacatgaagcaagtacttccagaaagctcccttcctcacaatgtgatgcctacagaccctggctattctaaatttttgccatgcacatgttagcatacggaacaacacaaaaagcaaagaaactagtcactagcaccatcaaaataatcacaggataacaaaaatagaaatgatttctaatgaagttataaactcattcctagtaactgtcctaaactaaacacacatttaaagaacatattcagatgccaaagcacagagaaaatgcaaagcatctatgagaacaactgggctgagtactcaagtccaacaaaaaggacataaaaacacgtggcaacattaaacataggctccacaaataccaatgaaatatgaggaatgagattctgaagtacttctcagaaaacgctgggggttctgataagcatgaaacaacccatcattaccacaagatgaacaggagcctctccttcattcatttcacagcaacacagacttggcgagcttaaacaatacacaggccgtctggctcatatgcaacaaaattaagccattaaataggcatcccataaagatcacttgaccctaagacaaaactaaagaggagttagctgcatgccacaaagacaaaaacatttcattttaggtctccatctccttctccatccccttggatggactttttgatgcgaagcaacatggtggtcagccactgatccaagcgagatattgagtcaaattccttcacctagtataaggaaagaggaacaggaattaccccatgtaaatacattaaaaacacaaaataatagtaccccaagctgtttatacctttacagccataatctactaactttcttcatcatttgaaattaatcattccagtttataactttcttcattaaaaaattgtttattttttcattatcctgttactattttgatactagtgacaagttcctgggcttgacatttctctgttttcaaacgtgtaagaaaaaaattcattaacagtcataattattgtggcaaaagtaactggatattgtataaaaatttgaaaggaatatggaaaattaatactcactgaacatgggaaaacattaattacagagttagaatatgtatggaagcggaattaacacatttcaatgcattacccaaaaataaaattacaataggatgaaaatgatgtggtaggcaaaagtcagacaggaaaacattcctttcctctatcactcctgagctgtgatgaacatgttacaggaggctactgagaaatttgcttgaggctggatgtagtggctcatgcctgtaatccttgaagtctgggaggccaaggcaggtggatagcttaagcccaggagttaagagaccagcctgggcaacatggtgaaaccttgtctcaacaaaaaatgcaaaaaaaaaaaaaaaaattagctgggggtggtggtgtgcacctgtagtcccaggtacttaggagtctcaggtgggaggatcacctgaacccaggaggttgagggtgcagtgagccgtgatcacaccacagcactccagcctgagtgacagagtgaggatctgtttcaaaatatataaaaacatttttttttgcttgattctaaacatgagatggcaaaagatggaaaaacaaaaagtataaagaaaaaaaccctcatatttttaatatatatatatatttattatttatttatttatttttgagatggagtttcactcttgttgcccaggctggaatgcaatggcgtgatcttggctcactgcaacctccacctcctgggttcaagagattctcctgcctcagcctcccgagtagctggtattacaggcacactccaccatgcctggctaatttttgtatttttagtaaagatggtgttttgccatgttggccaagctggtctcaaactcctgatctcaggtgatccacccgccttggcctcccaaagtgctaggattataggtgtgagccaccgtgcctggccaccttccatttatttcatgccacaaatacagcaaattctcactacttagtttttatattttaaattatatttaattttttttttctttttttttttgagacagagtctcgctctgtcaccaggctggagtgcagtggtgcaatctcagctcactgcaacctctgcctcccgggttcaagcgattctcctgcctcagcctcccgagtagctgggactacaggcgtgtgccagcatgcctggctaatttttatatttttagtagagacggggtttcaccatgttggcgaggatggtctcaatttcctgactcatgatctgcctgcctcggcctccgaaagtgccaggattacaggtgtgagacgccgtgcctggccttaactaattttactttatacttatttatgggtcagattattttcaaaagaaaaaattaaaacagcaaattataagaatataaatggaatatttgctcctgaactagtctcacagctaaattagttttgagtgtaagtcgaatctcagcatggctaatggaactgtttaatttgtgtgatatataaaaaggtgacgtttggaaaattacaacttaaggtatgctggagtcatgttccaatcaatgttaagaattcacataatgaaaaggagacagaggttctttaacttaaatcttcaaataatgtaccatgtcctaaaagcataacttactgcttcagtgtaagcttcactgttctgttcttcatgagcttctaggagtttctggtagcataaaaatattttaaaaaacagttctgtaagatgaagtcccatttctaaatatatactttaagtataataccaatgttgccaaatattgcacaaaactgaggaaatactcatatacaagtcaagagccaagttagggatctagcttctgtagtaacatttctcaggtgcctatttcagaacacaactacatgtttctgaccttaattgcatttgaacacctataatacgaaagcaggaaagtaccagggcccctcagttagcagactttatagattaaaacttcacttcatacccaatcccacttaggtgttgtcacctaacagaacaaaagcatttttcttcaaagttctaatattacttactttcaataatttacattctcttgaatcagtaaatgctggaaacatttcctcatatttctcaagagcaagctgagagagaaaaaccactcatcaatttcagacttactaaacaaacaaagctttcaacattctatcagcttcaaataagatctacctatatcctattaagtgttgaaaaagtatgtagttaaactcaaaagcagaatcaacatagaaaatctttctattctgaattttccatttcaataaagaataatttctaaactacttttttctgagttaggctgctgctgagaagacattgtaaatgaaaatgaattcttaaacactcacagaccaggtatctgtatccatccattaaatggagacgttcttaatacagtccagattccaaataaattacatttagcttcctgctcgaagctgacagaaagaacagtttctcttactggctttagttctgctcttccaactccagacactggccatgccaaggctgcctgtctttttgcctcttggctcccagtgctcactgtgcttttcaacttcttcccagtcctcactccaacaccatttctgagcttgcctgttgttttggttgttttttaaatggatattatcctactcttattgtctcctcccttagttccttaatttctttcttttttttttttgagacggactcttactctgtcacccaggctggagtgcagtggtgcgatctcagctcactgcaacctctgcctcacaggttcaagtgattctcctgcctcagcctctcaagtagctggacttacaggcacccgccaccacacccagctaatttttttatatttttagtagaaacggggtttcaccattttgaccaggctggtctcaaactcctgacctcaggtgctccaccccacttggcctcccaaaatgctgggtttacagatgtgagccaccacgcctggcccccttaatttctttaaagcaaaactactgaaaaaaaaatggtggctaccagtgaacatatacatatatttaagcctatagcactaaatattcccaggcagtgccccccattcaagtaccaggctctacactgcttagcttctgagatcagacgagattgggtgtgttcagggtggtatggctataaactatcaggtaacttttgagaacagctttgacagctgttaaaagattacaactgggacacataccacagaataatacttatttttaatgtacccgtttattcttggtactaacatcaaaatgaaatgataccaagaacaagagagaatgtgtacgtattcttatgggtgaaatcagtcaatcaatgctgaagaactccttaccttggcattcaactcgtctactatgaagtggcagagggcagctttgaagaagtaatcctttgcactgtatttcaacaaaggattatccattgtgtttgccccaacctaggcacagaacgcagagttaaatttaaaagatttaccctcttatatcaggcaaagtcattctcatctgttgtcctttagaaaataattatgtatcttatgtttgtttagctatgaaatatattattttatccgaataccatatagtagaaattttactagacaagaccattaaatacatgaagtcttaaccagttaaaaatagctcagaagaattctgcttccaataagatggagtaaacatcctttcccctaatcctcccactaagcactactaaaagcccaggtcattttctaaaaaacaaacgtttcccaagggaaaacgtggtagtgggttccctcagttttcttttcccttcctatatccatggcatgaaactgaagaaccagcaacccagaaatgccagtatgcacagataaaaagagaagagacaaaagcctgctctctctggccaaaggactagaaaaggggcagcccagcaagagagaaaacacttagacaataactgctctactccagccaaatatcacagaaaaactgaggccctaactccatttacatcatcaaaggctgaagaaggagtcctaaagtccattcttgaaagactgtaagaagcaccccaatacctctgcttaggagcttcagagaaggccaaatagggagctgaggcttgatccccacccaaccccctgacactaaggcagtgcagaccacactgggagcctgcatcctgtctctgtcaagcaggaaagaggttccccttctttctccagctggtgtgctgtcagaagaggtctagtggagggtgaagactctcaccataccaagaacaaaccagcactgtgctggcagaaacagataaggagaggggatgccacttctgcccagggctgactaggcccctcaggtgtcaacagagacctggtggaaagctgacacttctacctccacctggcagtaatgaggtaacatccccaccttccccagccagaggaatgtcaaagaaggccaactgaaaagagaacgtttaaacaagacccagtctcataacctaatgtgcaaatgccctgttttcaatcagaaatgacttgtaataccaaaaacacaggaagatctcaagctaaatgaaaaaagaccattaacagatgatggttccagatgacggaaatgtccaaaatatcccacgaagattttaaagaagccctcataaaaatgctccaaaaagcaagtacaataacacctgaagctaatggaaaaatggaaagcatccacaaagaaaaaggaagccacaggaaaaaagatataaagtaaaaacaaataaaaatttcagaactgaaaaaaaaaaacagtaccatacataaaaagtgggtgggctcaacagcaggatgaaagggacagaggaaagaagcactaaatggaagacaacaacaggaacaacagagagaagacaaactgacaaaaaggaacagagcatcaaggacccatgggataataaaacagtctcacttttgtggcatctgtgttctagaaggggaggagaaagagaaaagggctggctgggcatggtggcttatccctgtaatcccagcactttgggaggccgaggccggtggatcacgaggtcaggagatcgagaccagcctggccaacatggagaaaccctgtctctactaaaaataccaaaattagctgggtgtggtggcatgcacctgtaatcccagctactcgggaggctgaggcaggagaatcgcttgaacctgggaggcaaaggttgcagtgagcagagatggcaccactgcattccagcctggcaacagagcgagactctgtctcaaaacaaacaaacaaacaaaaaaggaagctgaaaaagtacttgaagaaataactgctaaatgattctcaaatttgacaagaaacataaacctacagattctgtaagtttagggaaactcaaatagcttaaaaccaaatatatctatccaagccacattataattaaacttttgaaactaaaagaaaaaaattatgaaagtgtctagagaataacaccttttttataggggaaaacaagttgaatgacagcagacttcttatcaaaaacaatggaggccgactaggcgttgtggctcatgcctgtaatcccagcactttgggaggctgaggtgggtggatcacttgatgtcagaagtttgtaaaaccatggaagccataaagtgcacatttttgaaactaaaggaaaagaacaatcaacttagaattatactcccaggaaaactatgtttcagaaatgaaggcaaaatcaaaacgtttccagataggggaaaactaagaaaatttgttgtcagcagacctaccctaaaaaaatgacaaaaggaggttctctaaatagaaaggaaacaataatcttggaacatccagaagaaagaacatggtaagcaaaaatatgggtaaatataacaggctttctttcttgagttttctaaattatgtttgatggctgaaacaaaaattctaacattgactcatgtggttctaaatgtatgcagaggaaacattaagacaactatatattgaatagggggagtaaaagaacagaaagggaggtaagatttctatatttcaccagaacttataaaatgatgacaccaacctacagcatttaaccacaaaagctacacaaagatatataccattgattctccaacaacactggtttaaactgtgtgaatccacttatatacggatttttttcaaccaaatgtggattgaaaatacagtattcttaggaattcaacacccatataaatgaaaggcagacttttttatatgtgagttccacagggccgactgtgggacttgactatgcacagattttgatatatgagagaggtcctggaactaatcccctgtagacactgaggaataactgtacttagaaacactggaaaatcaagtaggctgggtgtggtggctcacacctataatcctggcactttgggggaccgaggtgggcagatgacttgagctcaggagctcaagaccagcctgggcaacatggcaaaaccccatcgctacaaaaagacttgagctcaggagttcaagaccagcctggacaacatggcaaaaccccatcgctacaaaaaatagccaggtgtggtggtgcatgtctgtagtctcagctattctggaggctaaggctgaggtgggaggactgcttgaggttgggaggtggaggctgcagtgagccagggtcgcaccatttccctccagcctgggtgacagagtgagacccagtctcaaaaaaaaagaaagaaagaaaaaaaagaaaagcaacccataaaaaggttggaaaaagaaaacagagaaacaaaaagcaaagaatagaaagcaaaaactaaaatggcagaaagcagaattaagccctaacatataaataactgcattaaatgtgaatgacctaaatacaccaattgaaaaacaaagattggcacagtggattaaaaaacaggatccaggctggctgtggtggatcatgcctgcaatcccagcactttgggaggccaaggcgggtgtatcaccgaggtcaggagtatgaaaccagcctggccaacatggtgaaatcctgtctctactaaaaatacaaaaattagccgggcatgctggcacgcacctgtaatctcagctactcgggaggctgaggcaggagaattacttgaatccaagaggtagaggttgcagtgagccaaaatcactccactgcgctccagtgtaggagacagagcaagactctgtctcaaaacaaacaaacaaaaaaaaacaagatccaactacaagaaactcacttcagttataatgatatagacaggctgaaagaaaaagaatggacaaacatatcatataaacattaatcaaaagaaaccaggcagggctataaagtggataaagtagacttgagccaagaaaattaccagagacagagaaggacattatgtaatgataaaagggtctctccagcaagaatagcaatccagagctgcaaagtatgtgacgcaaagactgacacaatgaaagaagagtcagacaaatccacaactaaagttggagattttaacacccaactctcaacaatggatagaattagaaagaaaatcaaaggccaatcgcagtggctcacacctgtaatcctggcactttgggaggacaaggcaggcagatcatttgaggccaggaattcgagaccagcctagccaacatggcacacacctgtaatcccagctactcgggaggctgaggcacgaaaatagtttgaacctgggaggtggagggttgcagtgagctgagatcaagtcactgcactccagcctgggtgacagagcaagactctgtctgaaagaagagaaagaagagaaagaagagaaagagagagagagaaagagagaaagagagagagagagagagagaaagagaaagaaagaaagatcagcaagtatattaaagaactcgacaatgccatcatccaacaggagctaatcaacatttataaacatcacccaataacagcataatcataaaacatatgccaagatagaccatatctaggccataaaacaaaacaaatttataagaattgaaatcacgcaaaaatatgttatctaaccacaaaggaattaaaaataagtcaacaatagaaagattacagaaaaatctctgctagacacttggaaattaaataaaacactactaaataatccatgggtcactgaagtctcaagggaaatcaataaatccaactaactgaataaaaataaaagtataatgatataataaaattgggaagtagccaaatgtatgaaagggtaactgataacactaaaaatgcatacacaacaaagatgaaaatcagcaagctaaacttccatgtcaagcacccagaaaaagagcaaaacaaatccaaagaaaacaaaatggaggaaataacaataaaaacagaaatcagtgaaaataaaaacaaaaaaagagaaataattgaattctaccaaacatttaaagaggaattcacaccaatcctttacaaactcttccaaaacacagaagaggaagaagacatcctaatgcattctgagaccagaattaccttgattccaaaaccagacaaagacaccacaagaaaactaacgatcaatatcctttatgaacatagacataaaatcctcaacaaaatgttagcaaaccaattctggcacttacaaaaagtaaagtcagccacaagggtggtcaacatctatgtcactggaccccaataaaaactcagaacaccacgttcaggggagcttccttggttggc

SEQ ID NO: 1604 - DNA, 21727 bp, Homo sapiens
gccaaccaaggaagctcccctgaacgtggtgttctgagtttttattggggtccagtgacatagatgttgaccacccttgtggctgactttactttttgtaagtgccagaattggtttgctaacattttgttgaggattttatgtctatgttcataaaggatattgatcgttagttttcttgtggtgtctttgtctggttttggaatcaaggtaattctggtctcagaatgcattaggatgtcttcttcctcttctgtgttttggaagagtttgtaaaggattggtgtgaattcctctttaaatgtttggtagaattcaattatttctctttttttgtttttattttcactgatttctgtttttattgttatttcctccattttgttttctttggatttgttttgctctttttctgggtgcttgacatggaagtttagcttgctgattttcatctttgttgtgtatgcatttttagtgttatcagttaccctttcatacatttggctacttcccaattttattatatcattatacttttatttttattcagttagttggatttattgatttcccttgagacttcagtgacccatggattatttagtagtgttttatttaatttccaagtgtctagcagagatttttctgtaatctttctattgttgacttatttttaattcctttgtggttagataacatatttttgcgtgatttcaattcttataaatttgttttgttttatggcctagatatggtctatcttggcatatgttttatgattatgctgttattgggtgatgtttataaatgttgattagctcctgttggatgatggcattgtcgagttctttaatatacttgctgatctttctttctttctctttctctctctctctctctctctttctctctttctctctctctctttctcttctttctcttctttctcttctttcagacagagtcttgctctgtcacccaggctggagtgcagtgacttgatctcagctcactgcaaccctccacctcccaggttcaaactattttcgtgcctcagcctcccgagtagctgggattacaggtgtgtgccatgttggctaggctggtctcgaattcctggcctcaaatgatctgcctgccttgtcctcccaaagtgccaggattacaggtgtgagccactgcgattggcctttgattttctttctaattctatccattgttgagagttgggtgttaaaatctccaactttagttgtggatttgtctgactcttctttcattgtgtcagtctttgcgtcacatactttgcagctctggattgctattcttgctggagagacccttttatcattacataatgtccttctctgtctctggtaattttcttggctcaagtctactttatccactttatagccctgcctggtttcttttgattaatgtttatatgatatgtttgtccattctttttctttcagcctgtctatatcattataactgaagtgagtttcttgtagttggatcttgtttttttttgtttgtttgttttgagacagagtcttgctctgtctcctacactggagcgcagtggagtgattttggctcactgcaacctctacctcttggattcaagtaattctcctgcctcagcctcccgagtagctgagattacaggtgcgtgccagcatgcccggctaatttttgtatttttagtagagacaggatttcaccatgttggccaggctggtttcatactcctgacctcggtgatacacccgccttggcctcccaaagtgctgggattgcaggcatgatccaccacagccagcctggatcctgttttttaatccactgtgccaatctttgtttttcaattggtgtatttaggtcattcacatttaatgcagttatttatatgttagggcttaattctgctttctgccattttagtttttgctttctattctttgctttttgtttctctgttttctttttccaacctttttatgggttgcttttcttttttttctttctttctttttttttgagactgggtctcactctgtcacccaggctggagggaaatggtgcgaccctggctcactgcagcctccacctcccaacctcaagcagtcctcccacctcagccttagcctccagaatagctgagactacagacatgcaccaccacacctggctattttttgtagcgatggggttttgccatgttgtccaggctggtcttgaactcctgagctcaagtctttttgtagcgatggggttttgccatgttgcccaggctggtcttgagctcctgagctcaagtcatctgcccacctcggtcccccaaagtgccaggattataggtgtgagccaccacacccagcctacttgattttccagtgtttctaagtacagttattcctcagtgtctacaggggattagttccaggacctctctcatatatcaaaatctgtgcatagtcaagtcccacagtcggccctgtggaactcacatataaaaaagtctgcctttcatttatatgggtgttgaattcctaagaatactgtattttcaatccacatttggttgaaaaaaatccgtatataagtggattcacacagtttaaaccagtgttgttggagaatcaatggtatatatctttgtgtagcttttgtggttaaatgctgtaggttggtgtcatcattttataagttctggtgaaatatagaaatcttacctccctttctgttcttttactccccctattcaatatatagttgtcttaatgtttcctctgcatacatttagaaccacatgagtcaatgttagaatttttgtttcagccatcaaacataatttagaaaactcaagaaagaaagcctgttatatttacccatatttttgcttaccatgttctttcttctggatgttccaagattattgtttcctttctatttagagaacctccttttgtcatttttttagggtaggtctgctgacaacaaattttcttagttttcccctatctggaaacgttttgattttgccttcatttctgaaacatagttttcctgggagtataattctaagttgattgttcttttcctttagtttcaaaaatgtgcactttatggcttccatggttttacaaacttctgacatcaagtgatccacccacctcagcctcccaaagtgctgggattacaggcatgagccacaacgcctagtcggcctccattgtttttgataagaagtctgctgtcattcaacttgttttcccctataaaaaaggtgttattctctagacactttcataatttttttcttttagtttcaaaagtttaattataatgtggcttggatagatatatttggttttaagctatttgagtttccctaaacttacagaatctgtaggtttatgtttcttgtcaaatttgagaatcatttagcagttatttcttcaagtactttttcagcttcctttttttttttttttttttttttgagaccgagtcttgctctgtcgcccaggcgtgccagtttaatggcgcaatcttgtctcactgcaacctttgcctcccaggttcaagcaattctcctgtctcagcctcccaagtagctgggactacaggtgcttgccaccacacctggctaatttttgtatttttagtacagacaaggtttcgccatgttgaccaggctggtcttgaactcttgacctcaagtggttcgcctgccttggcctcccacagtgctgggattacaggcgtgagccaccatgcccagccagcccttttctctttctcctccccttctagaacacagatgccacaaaagtgagactgttttattatcccatgggtccttgatgctctgttcctttttgtcagtttgtcttctctctgttgttcctgttgttgtcttccatttagtgcttctttcctctgtccctttcatcctgctgttgagcccacccactttttatgtatggtactgtttttttttttcagttctgaaatttttatttgtttttactttatatcttttttcctgtggcttcctttttctttgtggatgctttccatttttccattagcttcaggtgttattgtacttgctttttggagcatttttatgagggcttctttaaaatcttcgtgggatattttggacatttccgtcatctggaaccatcatctgttaatggtcttttttcatttagcttgagatcttcctgtgtttttggtattacaagtcatttctgattgaaaacagggcatttgcacattaggttatgagactgggtcttgtttaaacgttctcttttcagttggccttctttgacattcctctggctggggaaggtggggatgttacctcattactgccaggtggaggtagaagtgtcagctttccaccaggtctctgttgacacctgaggggcctagtcagccctgggcagaagtggcatcccctctccttatctgtttctgccagcacagtgctggtttgttcttggtatggtgagagtcttcaccctccactagacctcttctgacagcacaccagctggagaaagaaggggaacctctttcctgcttgacagagacaggatgcaggctcccagtgtggtctgcactgccttagtgtcagggggttgggtggggatcaagcctcagctccctatttggccttctctgaagctcctaagcagaggtattggggtgcttcttacagtctttcaagaatggactttaggactccttcttcagcctttgatgatgtaaatggagttagggcctcagtttttctgtgatatttggctggagtagagcagttattgtctaagtgttttctctcttgctgggctgccccttttctagtcctttggccagagagagcaggcttttgtctcttctctttttatctgtgcatactggcatttctgggttgctggttcttcagtttcatgccatggatataggaagggaaaagaaaactgagggaacccactaccacgttttcccttgggaaacgtttgttttttagaaaatgacctgggcttttagtagtgcttagtgggaggattaggggaaaggatgtttactccatcttattggaagcagaattcttctgagctatttttaactggttaagacttcatgtatttaatggtcttgtctagtaaaatttctactatatggtattcggataaaataatatatttcatagctaaacaaacataagatacataattattttctaaaggacaacagatgagaatgactttgcctgatataagagggtaaatcttttaaatttaactctgcgttctgtgcctaggttggggcaaacacaatggataatcctttgttgaaatacagtgcaaaggattacttcttcaaagctgccctctgccacttcatagtagacgagttgaatgccaaggtaaggagttcttcagcattgattgactgatttcacccataagaatacgtacacattctctcttgttcttggtatcatttcattttgatgttagtaccaagaataaacgggtacattaaaaataagtattattctgtggtatgtgtcccagttgtaatcttttaacagctgtcaaagctgttctcaaaagttacctgatagtttatagccataccaccctgaacacacccaatctcgtctgatctcagaagctaagcagtgtagagcctggtacttgaatggggggcactgcctgggaatatttagtgctataggcttaaatatatgtatatgttcactggtagccaccatttttttttcagtagttttgctttaaagaaattaagggggccaggcgtggtggctcacatctgtaaacccagcattttgggaggccaagtggggtggagcacctgaggtcaggagtttgagaccagcctggtcaaaatggtgaaaccccgtttctactaaaaatataaaaaaattagctgggtgtggtggcgggtgcctgtaagtccagctacttgagaggctgaggcaggagaatcacttgaacctgtgaggcagaggttgcagtgagctgagatcgcaccactgcactccagcctgggtgacagagtaagagtccgtctcaaaaaaaaaaaagaaagaaattaaggaactaagggaggagacaataagagtaggataatatccatttaaaaaacaaccaaaacaacaggcaagctcagaaatggtgttggagtgaggactgggaagaagttgaaaagcacagtgagcactgggagccaagaggcaaaaagacaggcagccttggcatggccagtgtctggagttggaagagcagaactaaagccagtaagagaaactgttctttctgtcagcttcgagcaggaagctaaatgtaatttatttggaatctggactgtattaagaacgtctccatttaatggatggatacagatacctggtctgtgagtgtttaagaattcattttcatttacaatgtcttctcagcagcagcctaactcagaaaaaagtagtttagaaattattctttattgaaatggaaaattcagaatagaaagattttctatgttgattctgcttttgagtttaactacatactttttcaacacttaataggatataggtagatcttatttgaagctgatagaatgttgaaagctttgtttgtttagtaagtctgaaattgatgagtggtttttctctctcagcttgctcttgagaaatatgaggaaatgtttccagcatttactgattcaagagaatgtaaattattgaaagtaagtaatattagaactttgaagaaaaatgcttttgttctgttaggtgacaacacctaagtgggattgggtatgaagtgaagttttaatctataaagtctgctaactgaggggccctggtactttcctgctttcgtattataggtgttcaaatgcaattaaggtcagaaacatgtagttgtgttctgaaataggcacctgagaaatgttactacagaagctagatccctaacttggctcttgacttgtatatgagtatttcctcagttttgtgcaatatttggcaacattggtattatacttaaagtatatatttagaaatgggacttcatcttacagaactgttttttaaaatatttttatgctaccagaaactcctagaagctcatgaagaacagaacagtgaagcttacactgaagcagtaagttatgcttttgggacatggtacattatttgaagatttaagttaaagaaacttcttttccttttcattatgtgaattctaaacatttatttgaacatgactccagcataccttaagttgtattttccaaacgtcaccttttatatatcacacaaattaaacagttccattagccatgctgagattcgacttacactcaaaactaatttagctgtgagactagttcaggagcaaatattccatttatattcttataatttgctgttttaattttttcttttgaaaataatctgacccataaataagtataaagtaaaattagttaaggccaggcacggcgtctcacacctgtaatcctggcactttcggaggccgaggcaggcagatcatgagtcaggaaattgagaccatcctcgccaacatggtgaaaccccgtctctactaaaaatataaaaattagccaggcatgctggcacacgcctgtagtcccagctactcgggaggctgaggcaggagaatcgcttgaacccgggaggcagaggttgcagtgagctgagattgcaccactgcactccagcctggtgacagagcgagactctgtctcaaaaaaaaaaagaaaaaaaaaattaaatataatttaaaatataaaaactaagtagtgagaatttgctgtatttgtggcatgaaataaatggaaggtggccaggcacggtggctcacacctataatcctagcactttgggaggccaaggcgggtggatcacctgagatcaggagtttgagaccagcttggccaacatggcaaaacaccatctttactaaaaatacaaaaattagccaggcatggtggagtgtgcctgtaataccagctactcgggaggctgaggcaggagaatctcttgaacccaggaggtggaggttgcagtgagccaagatcacgccattgcattccagcctgggcaacaagagtgaaactccatctcaaaaataaataaataaataataaatatatatatatattaaaaatatgagggtttttttctttatactttttgtttttccatcttttgccatctcatgtttagaatcaagcaaaaaaaaatgtttttatatattttgaaacagatcctcactctgtcactcaggctggagtgctgtggtgtgatcacggctcactgcaccctcaacctcctgggttcaggtgatcctcccacctgagactcctaagtacctgggactacaggtgcacaccaccacccccagctaatttttttttttttttttgcattttttgttgagacaaggtttcaccatgttgcccaggctggtctcttaactcctgggcttaagctatccacctgccttggcctcccagacttcaaggattacaggcatgagccactacatccagcctcaagcaaatttctcagtagcctcctgtaacatgttcatcacagctcaggagtgatagaggaaaggaatgttttcctgtctgacttttgcctaccacatcattttcatcctattgtaattttatttttgggtaatgcattgaaatgtgttaattccgcttccatacatattctaactctgtaattaatgttttcccatgttcagtgagtattaattttccatattcctttcaaatttttatacaatatccagttacttttgccacaataattatgactgttaatgaatttttttcttacacgtttgaaaacagagaaatgtcaagcccaggaacttgtcactagtatcaaaatagtaacaggataatgaaaaaataaacaattttttaatgaagaaagttataaactggaatgattaatttcaaatgatgaagaaagttagtagattatggctgtaaaggtataaacagcttggggtactattattttgtgtttttaatgtatttacatggggtaattcctgttcctctttccttatactaggtgaaggaatttgactcaatatctcgcttggatcagtggctgaccaccatgttgcttcgcatcaaaaagtccatccaaggggatggagaaggagatggagacctaaaatgaaatgtttttgtctttgtggcatgcagctaactcctctttagttttgtcttagggtcaagtgatctttatgggatgcctatttaatggcttaattttgttgcatatgagccagacggcctgtgtattgtttaagctcgccaagtctgtgttgctgtgaaatgaatgaaggagaggctcctgttcatcttgtggtaatgatgggttgtttcatgcttatcagaacccccagcgttttctgagaagtacttcagaatctcattcctcatatttcattggtatttgtggagcctatgtttaatgttgccacgtgtttttatgtcctttttgttggacttgagtactcagcccagttgttctcatagatgctttgcattttctctgtgctttggcatctgaatatgttctttaaatgtgtgtttagtttaggacagttactaggaatgagtttataacttcattagaaatcatttctatttttgttatcctgtgattattttgatggtgctagtgactagtttctttgctttttgtgttgttccgtatgctaacatgtgcatggcaaaaatttagaatagccagggtctgtaggcatcacattgtgaggaagggagctttctggaagtacttgcttcatgtatggatgagtgtcaaagtgaatttgatttgtacttagacacacgcgtttacacacacacacatatcacaagatctgttagaaatggaatttttctctttttctggagatagttttcacttttagttggagtggaaatccctttatatttacattgaagtattttaattggcatagcctgctcattattttcatgtttatacactttcccacgttgaggtggtgtgttctgtgctgtgactatagaaatcttggtcagggctggatagattatctaagtcaagcttgagaatgaatgtatgtaattttcctgtttattgtacatgatgggttaggtggggtgaatgtggtacaggaatgtcctgtatgcccaagtgggcaagaaccccaacttgtttctcaggggacttgattgttctcttagctggtggaatatgttggcttatgtgtttgaactctgtcgtgtttaattggtttatataatatatgtatgctatcttgattcatgaacttgatcctattaatttatatgctgatattgtactttagacatacgcttgtctcctgaatgtcctctgaatatttatagttaaatgatttatatttgaaatgtgttgccagacttaacccagcagacactctgacatcacggagcttcactgatgacaggtaacgaaacttcctatgttatgtcaggtagtagtaagtagtattggaatgatgttttcatttttggtggctctcaactggaattggtagtgtttccaggccaagggtcgactgcaggttgtttgagaaatgatgagtaggtcagtctaggaagaaagagaaagtagcaggaaaggaagtgggaagggccagccaaggacagactgtagaggatccacatcaggtggccacgaggacttgcaggctatagttatggtggtgacatgcatgaggtgggctggtagagcaggaagctctgtgatgtcagagcatctactgggactacaggtgcactgtagtccccactactgggggtggcaatgaagacactctgtctgttgggccctagaatttaatgtggatttcctccttccttccaagttctgagattcttaaatgagagctggctgtcttctagaggtaagacctggaatggagtccagttggtactttttcactccctcttagaatctcttatgaaaaaatgatcagagagaaaagtggggttttgtttccccacctaataatatatcctacaaccagccaaatgcacttttgtgaaaatggggtgtgaggagtggttctgcagcttgagtcctctggttttaagtagtttgtttctacttgtttaaagaatcttctggtctgaccacttaaagtaaaaactacatgatttattttcgggcaattatgtttagctttcatcattatactccaacagacccgtctgaaggggtatttttttttaacaataatgtttgtaacattttgttgtgtcaattagagggtcacttgtttgtattgcaataaacactgggaccagttccggggttaagaattaatttttgtttttaatatttcacatgaaaagaatcaaagtaattgtaatggctagaagagacctgccagaagattaaaaaaaagaatgagagaaaagcccagttagtggtgtgcaaacttacttcctttaaatgtcccatggatgtaggacagtgccatgtttcaagatgcctgtgagctaggtcttcaagatttatagaatgttacttatgaacaaaatataattatttatggtacaattcttgtactttagcaaatctggagttagttcatagtcaaagtcagttaatatttcttagaggaaagttttgctttttgtggcaacatttttatagcttgtgtgagttcttttttatttaatgatttgaaagcagtatttttgcacagtcgtgaccgtgtgtggtggcgtcactgtaaccaaagtatatgcaccagcccttgtgcatttattgtttctcctgattttgtggatttaaatgtccaaatgcaaacctttgtgacttcctttggaggacttggcagcacagcatgcccccgtgacctgcctgctgtggtatgagctatgaccaagagcaggcttcctgctccatggagtcctgagttgctctggggcaggggattacgttatgaaaactaaccatgtgtaacaataaatctaccttagcagaaaaagtatgcttgttttattttaacctataaagtggaaattatcagtaatattttgatgagtcttgttgctaaattggcataggtcaaaagtagcttccattgtttcaagttgttcccgttaagattaaggcaacagacgttaatactctctaggctccggtcatttgttgggaattccagggcaccgtaatggttttgcagactgagggtttagaaggaaaccctggtaacttctgttgatgcagtccactaaagtacatgataaccctgcagaccccacattctcatcccttccttgaatcctttagggtctacagttacttgcaaagttgaggaaggcatggttgctggaagactggtggggaggtgaggcacccctaagcctgacactctcctaccccaagaaagtaccactcaactatctggtcagtgtgggcatttattttaattttgcaaaatatctgcacagggagaggagatgcccctggggaagggtcagtcccactgaccactggggcctgaagttctgatgaggaagaggacccatggcgggtagtgcagaccggctcatcctaccatcctatcatagagccttgatttcaggtcctaaagtatattcacaacacttcaggtaagtcaaagcaaaatgttttaaatggtagaacaagctgtcctcatctaggcattctgagttgttgatcattcaaagcctaaatcaagtggctcttctcagaatcaatttcctaatgaagatgccaccatggtagtttaaaagcttagttttgtcagccttagttaagagtccacgtacggattgccaaaggtatgcagatgattttctgagtctcatttagcatgatgtgatagatcaggggtccccaacccgttagaaactgggccttacggcaggaggtgagctgcaggcagtgaagcttcatctgtatttgcagtcactccccgtggctcacattaccacctgagctgtgcaccctgtcagatcagcagtgtcattagagtctcataggagtgcaaaccctattgaactgcgcgtgcacgggatctaggttgtacgctttttatgagaatctaatgcctaatgatctgttgctgtcttccatcacccccagatgggactgtcaagttgcaggaaaacaagctcagggctcccactatacattatggtgcattgtataattacttcattgtatattacaatgcaataataatagaaagtgcacaataaatgcaatgcgcttgaatcatcctgaaaccattctgtccccccacctgtgggaaaattgtcttccacaaaagtggtccctggtgccaaaaaggttggggactgctgtgctagatgatcctctgacctgtgtgcctttctcagtcacatcaaatgaaatattgttactcctgagtacatgaatatcatgacatttggttaaattgacaagtacccatcttgtttcccaaaaatgaactccttggagggacaaggtttatttaacaggttaaaaattaaattatacactcaaatttacttgtttggataatcacctacagcaaaatcacatttctgtaaaaatcaccttaaataaaggtctccaccacatggcccattttttccaaacgacagcaaagaatttggtaaaacgaaaggctgcacatccctttggagtttgggctgacagcatttcacagaaaatggttggaaaatggttgaagcaagctcctaaatggcccttcttgaggctctgggagaggcactgtgccggcacctggccactttcctcattacacacttgggaccaatccactcagatggtggcctcgcttccactcagcatggctgtgcttggacttggaggaatggggcagatgctccaggaggtcctctgtaaccagtcccctacagggttacgtttctctgttctcagggacagagaaatgtatatagtagaagtcgtatctttgatgcctactttttacattgaagaaagtggcagagagctcaaccgcacttccagcccggttgtggcctgcgcatgagcagaggccaggatttctcctctccaggatcccactgccagagaccaactgggatccaagcagttaaacagcttaatcctaggactgtatgaaataaaggcttatggacccggattttacatttcattattcacgtaattaagcaaattatatgtttcaattaagaatcatatttctgcagaacctaaattataacagaaatagatctttaaaaaattgcaaaactgcttttacaaagcagacatttattaacaacatttttttgtagaatttctaaggaaacaaattcaagacaaaaatccctccagtaggtaacaaaatgatctattgtttcaattccttctgatcaagtgactttattccataaaacagtacatcagctgggcaggttcggtctcctctggatgtatgacagtcattatttatttgtgctgtaaacataactaggatacagtgacactgtcataactaaatttgaagtaaattagtactgtgacctccaagggcaggtgtgaagcatgttatcagcgcctgaaacaccttgtagtggtttcactaacataagttaaaacataagcacttaggaagaaagtcttccctcattaatttctggcatagtgcagctacatgttcattctggaacttaaagtaccttcctcttagaaaatcaaagtgttttcacagcaagtttaataaattaaaaatgtagagaaaaaaggaactagtgaacaaaagaattctccaaggttccctttttaaattaatgtttaaatgttacatgtgaatcatagcatttcacaagcacgtggcacatactcaaggccctagaaccaaatgtcaacgtttaacaaatacagcagaatcgtcttttcattgtgaatttttaaaagcaataattaagtcctgcatgaaacagccaaagaagcatttgggacaaagttactggttcttcacaatcaactctttaaggcataatcggaggtaagtgtgctgagacttttggtccctactgctatgttctcacatgctcccaaggaaatagacatgtcagttacttgcctgtttccatctctaggtgtggaaatgagaagtctgggtttctggaaattacagaaatcaagtcagaaaaacctggcaaaagtaataatactctgtgttctataatttgccacagtcacctcattttgcaaataaaatgactacacaactttcaagtactctaaagcgtcttaatttttcatgcctctgcaaaaaaatactatattgttttgctagactctttggtaggacagcttttacctaatctgatttttttaagacaaactgaacagcctcatctcatttctaagttgattttatgacaaacttcctagctgcgtatgtgctgagattacgctagcagttttgcaggtgttcaatctgtcagtcatactttgtttactgcctacaaatggggggtggggaggaatgaatgcaacaatctatttcttcagttgcatttgagggtccccacagaaaatctgatttgcttcaattcaacagggaagaaatgactgaaaatatgtggccccagttttatttcagcttggaagaaaaataccttgaaagtagttatgagagaagtaaacccacatggaaatataaggcagagtgagaagccaggaagactgctaactacaatatcaggagctggttcagttctctgtactctgcaattaagaccagcagttatctataaactaggtaatcaagaattagaacgattagcacatacaccctacaccagaattaagtgaggttatgttcactgcctttttgtcaataaagtagctgagatcatgcagatcaggatttttgagggaaagctttaaaaatgctgtgataaagccgtgcaagttagcagaagttcaggaaaatctgcagaggccattcttgcccacatctttgcacatggacaattatttttcttagccccacatcatcttgagttcagctaccacacacgcagactaacaggatgggaactgcttgaagctcttattccatgttgctcaaagagtgaagctgtgtgggcatcgagtctgtctgtggggtcagctcgctaagctcactgatggtggtggccaggagggtgtcctgggacaccacggagtcatctgccttgcaggctgtgtcagcagaactgttctcctgcatggtaggtacagtgtcttggactgcagccaggttgtggaaatggccattttctgcaaaagacagcaatttatccgaaagcttggatgacacatactcttcgtcaggctgttcagtcttgtgtccgtcatcgttcttgggcgagccatctacaatgacaaggaaagacttccatggagtattcttatcgtgtatctataagttaaacacaaaacaaaggtcactgaatgtgtctctggacaagtgcatcttttaaaacaatagtccctctacaacttcaattttcaactttcactaataagtacccgcctgccaccaccctcactgttacagagtagtcatcgtggatggtgctttccctgggccttggggcttggtgttccacttcattcattccgtgagcgttccactgcagagacaacccaaggagaaagtacctgttgtctcgacctctaaccaccttggagaatggtggtaggtatttctctttccgtgcatctaagggcagcagcttgtttctcaaataagccaacccactgcttactgaggtgtgccgccgaagagtggacttgtcggtgaatgtccgtccgcacgcattgcacatgaatggcctctcccctgtgtggatgcggcggtggcgctggagggcgttgagctgggtgaactgcttgccgcactggtcacagcagtagggacgctcccctgaggcagggagagaggagactgctggtgggtccctttggcctactgtgcttaattctgaatacacacttgagtgaatgatgctgttgcaaaccactgggaagcctcagcatccaacataaggaaggttatgttgggaacaacttaagggctacaaatccactatctctataataccaagaatttatggcctacaccaaaaaggggccaggacatgtgcctgcagcaggtattataactataggaatgacacctgttttccatggtaatggagtataaaattacaagacccctaacaactgaatatgcatgtgtgcatgtgcatttactaacatgtacagatcattatccctatgtccacacatccacatccacttcctacattcacaccatgactaagctgtctgtccttttcagtaaaaactccatgtagcaaagggacttagtcttctcccgtttacacacataagtgctcccacttttcagtttctcagagttagaaacaatctctaaagaaatgctattatgacatacaaagtttggccagttttcttcaaaagcttagttccaagtaatttactggtaaatctacaagctttagaattttttttttggccaaactaaactcccttccctgggacattccaaccatacctgtgtggactttaatatgctggtacagtgaattccgctgggcaaaagtcctgaaacatacttcacatttaaagggtttggatccagtatggattctattgtggtgttttaagtactccttagaagcaaaactcttgccacatgtttcacacataaaaggtctttcacctacatgagaaaatgaaataaagtcataaacaatacaggcattaaaaacacatggaacagtaggtctccactgttaaaacccacgtgaactcaaaagtgccttggtaggcagcatgttacattttccagtaaaaactatcataaaatatatattcatgtaagatgcttgctacttactgaaagttggtgtaaaatatccttggaaattgcaagaaaaattccatttgactagaatcaaagaggtattgtttgttcagctggctcacattttagaaatttactcattccaaacaagaaaataatttcacaacttctgtttggaggaactgctggattattttcaaaggaacacttctatggatctttatcagaataaaggggaagttgacaatggatatatatcactattctagagtagcaactccaatcaacttgattgaattgtaggacaagagttttaaatatctcactttttgtagtttaatcccacaaatcagacttaccaaattattagctgtgcccgatttcacagacatcaaaataaaaatagtgactttaataaaatcttaccatgttaatattatcaaaggaccaattctaacttaatccttcattataacctgaccttgtccccaatcccaagctttctttaaacaattctactcattctgtagtcataatgcatgtcattaaatgctaatttcatgacattaaatgagattttcattcaatgacatgaattatgacttcagaatgagcagaactggtgtctaatcacacagatgtggtgtctaatgagtcagagacatgtcatctctgtctcacatgcatttgaacttgaggcttgtaagccagtgtttacaggtaagaataaaaaatgcaagcaaagaagaaactgagaagaattggaacacttcagtgctgtatgcttctgtatcttccacaagattctaaacctcagggttactgtgctgaagcagaataaagccaacttaagttttatctgtcacataattaataaatcataaagactttggaaaacagaaatgagataatcctactaccttaatgtatcatataacaacttattttcttctggtcttttatgtgcaggttttcaatacaattgaggttaactgtatgcttaattgtgcattttaaagttgaacatccaagcacagactttttcatgtcattcagagcccttactctgaatagccgggtcataagccagggtatagatttaccagagttgactagagcacttccttgtagttggacaatcaggctgtttcccattcttagttaaaaatagcaagaagggggataatagcatacagctcttcccatatgttggacaatttctttaggacagagtcttagaaaaaaaaatttcggttacaaaagaactattttatatctcttgatacctaagacctgcatgccagatcctatggcctggtggtataaaagccacagccatgtgcacactagcaacaaggcaatgggtgtatgtttattcattttgctcacttactagatggaaaagctatatcatggctttaacctgcaccaccttggtagatgccaacttcaaaattaatcaattgcatttccttctagatctaggaaagacattcaatcacaacagcatgagtatttacctgtgtgacaccttttatgataaatcagcatgtggttctgagtgaatcttgcaccacattcatcacagacaaaaggtttttcccctgtatgaattctgaaagtacaacattcagatgataacttaggatgtatttcaaagctcactttgcaatacaatttccactctatcctgcaaaaatcgtttactccaagagacctaatgagaatgactgtagtgacaggtcaagagcccataatctccatcccaaaataaactgagtttctgcacaaggtcaatggatccacacattttccataaatcactgactggaatgttcatctacacctgatcacaagccctactgctgatgctataaggcatgtgcaggtagagaccaggcctttgcagatttttttaaacactaaagaccacaatctgatatttgtaaagctgtctcatacagaataatcagccacaaacaccttaggaactactgctgattaagtgtcacatgatcaaaaatgttactctcatttcctaatatgacatcaccagtagagaaaggagaactgttctcaaattgccgaaggtggcatttttaaaatgcataagcattttaatgtcacaactagtatgaagtagcaatcaaacataatttactgagcacttcctaaaccaagtatttttaacttattatatagagtaaaaaatgaacaccatgctgctaacccaagactgacctaggtttgagggcagatctagaagagaagagaaaacaactgcttgttgggatttcaagaataaatatactaagaactataagaaaacttatttaaaaacatcaccacacacctgcagctcagaaacatattaagaaacagaaagcactgtctgtcctgattctggagtgcagactgcctagatggcactccttccaagcctgagaaccaaaagaccagagacgagtcctaaagcctgaaatggcatctcactgaggtctctactgagactgtgggacccggatggtcacagaaccccaagatctaaacgaagagtcaggaaaggagaaataaaggtaacgaggcccaactcttcctccagcacggtggggcgagcccgcggccgctgtcgcggtcccaccagagggacgtcccggccagcaggggcgccccaggggtctcagaacaagggagcagagccatcactcgcagcccctgtaccttgacagagaactaaacgctgtctcgaaataagcccccaggtttggagcggagaaattaagcagtgagacatcaaatcccaggacgacctcagtgcttgacacacccttccagtgcgcagggacccctccggacggctccccgcgtacctcatgtgcgtcttgagcgcggacggctgcgagaacctggcgccgcactcggtgcagccgtagggccggtctcccgtgtgtgtgcgctcgtgcagccgcagcgctgtcttggaactcaggcccttgccgcactggccgcagcggtgccgctcgccgccgccctcatgcacctgcagcacgtgccgcttcacgtccttcttgcgcttgaacttcttcccgcacagctcgcatgggaaatggcgctcgctgctgtgcacgtggcgctggtggctcttcaggttgcagcggttggcgaaggtctggccgcaggtgtcgcagcggtacaccacctcggtggccacgccgtggcggtgcttgctgtgcttcaggaagctcttctcatacagaaacgccttctcgcaaatgctgcacttaaagttgctcttcttcttctccccttcttcgtcctcctcctcctcctcctcttcctcctccggccctgctttctttgacaattcctccaactcagcacctgcctggcaaccctcatttttggaaacctgctccatctccgtgcccaccctgtccgggctttggtcctggggacacctgtagtcccccacatcaccctcagcagttttctgctgctctcggagtcttctcgtatatttctttttagggatctccacaaagaccttcctcccagccagccttccactagctctcctgattttagggtagggaggtttaactacctctttcttcttgtctagtttgtccttggacttcttcggtggcaaatctgaagacatgccattgctggctctc

SEQ ID NO: 1605 - DNA, 268 bp, Homo sapiens
tgcagttctgctggaatccaaatcctccccatttaacctactgcatgagatgcatgagcttcgcctcctgggtcacctgtgtgacgtgacagtcagcgtggagtatcagggtgtccgcaaagacttcatggcccacaaggcagtgctggctgccaccagcaagttttttaaggaagtgttccttaatgagaagagtgtggatggtactaggactaatgtctacttaaatgaagtgcaggttgctgactttgcttcatttcttgagttt

SEQ ID NO: 1606 - DNA, 714 bp, Homo sapiens
gatcagcttgtcaatctctgcaaagtagccagcttggattttgatagggattgtatggaatgtgcataccaatttggagtggttttagggttttctagagaaacagaaccaataagaggtgtaggggtgtatgtgtgtgtgtttgtgtgtgtgtgagtgtgtatgtgtgtttagagagagaaattactggagggaattgattcgcttgattatataggctgagaaggcctaagatctgcattctgaagacccaggagagccaatggtatagctccagtccaaatccaaaggcctcagaaccaggagagttgatgatgtaatttctaatctgagtccaagtctgaatcaggagaataccagtgtcctggctctaagacaggcattgagaatgaattcttccttttaaccttttattttattcaggttttcagtagattggatgaggcccacccacattggggagggcaatctgcttattcatcctactgatgcaaacgttaatctcattcagaaacaccccacagacacactcagaataacaccaaatatctgggcaccctgtagcccactcaaggtgacacataaaatcagtcatcacagagagtattgccatcttaacaatactaagtctgacagtcgatgaatacaggttccttttatatttatttggatcttctttcattttgctcaacaatgttttgtagtttttggtgt

SEQ ID NO: 1607 - DNA, 714 bp, Homo sapiens
acaccaaaaactacaaaacattgttgagcaaaatgaaagaagatccaaataaatataaaaggaacctgtattcatcgactgtcagacttagtattgttaagatggcaatactctctgtgatgactgattttatgtgtcaccttgagtgggctacagggtgcccagatatttggtgttattctgagtgtgtctgtggggtgtttctgaatgagattaacgtttgcatcagtaggatgaataagcagattgccctccccaatgtgggtgggcctcatccaatctactgaaaacctgaataaaataaaaggttaaaaggaagaattcattctcaatgcctgtcttagagccaggacactggtattctcctgattcagacttggactcagattagaaattacatcatcaactctcctggttctgaggcctttggatttggactggagctataccattggctctcctgggtcttcagaatgcagatcttaggccttctcagcctatataatcaagcgaatcaattccctccagtaatttctctctctaaacacacatacacactcacacacacacaaacacacacacatacacccctacacctcttattggttctgtttctctagaaaaccctaaaaccactccaaattggtatgcacattccatacaatccctatcaaaatccaagctggctactttgcagagattgacaagctgatc

SEQ ID NO: 1608 - DNA, 268 bp, Homo sapiens
aaactcaagaaatgaagcaaagtcagcaacctgcacttcatttaagtagacattagtcctagtaccatccacactcttctcattaaggaacacttccttaaaaaacttgctggtggcagccagcactgccttgtgggccatgaagtctttgcggacaccctgatactccacgctgactgtcacgtcacacaggtgacccaggaggcgaagctcatgcatctcatgcagtaggttaaatggggaggatttggattccagcagaactgca

SEQ ID NO: 1609 - DNA, 2717 bp, Homo sapiens
gcaagctctgaggaagtagacagaatttccaagagggcagaaaccccagggtttggagcagtcacgtttggggagtgtgcactagcttttaaccagaagtcaaacctgttcagacagaaggcagtcacagcagaaaaatcttcagacaaaaggcagtcacaggtgtgcagggagtgtgggcgaggctttagcaggaagtcacagctcatcatacaccagaggacacacacaggagaaaagccttatgtctgcggagagtgtgggcgaggctttatagttgagtcagtcctccgcaaccacctgagtacacactccggggagaaaccttatgtgtgcagccattgtgggcgaggctttagctgcaagccatacctcatcagacatcagaggacacacacaagggagaaatcgtttatgtgcacagtgtgtgggcgaggctttcgtgaaaagtcagagctcattaagcaccagagaattcacacgggggataagccttatgtgtgcagagattgaggccgaggctttgtaaggagatcatgtctcaacacacaccagaggatacattcagatgagaagccttttgtttgcagagagtgtgggcgaggctttcgtgctaaatcaactctcctcctacaccagtggacacattcagaggtgaaacctcacgtgtgtgaggagtgtgggcatggatttagccagaagtcgtcgctcaaatcacatcggagaacacactcaggggagaagccttatgtgtgtggggaatgtgggcggggatttagccggaggatagtcctcaatggacactggaggacacacacgggagagaagccttacacgtgctttgagtgtgggcgaaactttagcctcaagtccgctcttagtgtacatcagaggatacactctggggagaagccttatgcatgcacggagtgtgggcaaggctttatcacgaaatcacagctcatcagacaccagaggacacacacaggagaaaagccttatgtctgcggagagtgtgggcgaggctttatagctcagtcaaccctccactaccaccggagtacacactccaaggaaaaaccttatgtgtgcagccagtgtgggcgaggcttttgtgataaatcaactctcctcgcacacgagcagacacattcaggggagaagccttatgtgtgtggggaatgtgggcggggatttggccggaagatactcctcaacagacactggaggacacacacaggagagaaaccttacgcatgcatcgagtgtgggcgaaactttagccacaagtccactctcagcttacatcagaggatacactcgggggagaagccttatgcatgcgtggagtgtgggcaaagctttaggagaaagtcacagctcatcatacaccagaagatacactcggggaaaagctttagaggtgcaaggagtgaggatgtgattttagcaacaagtcagccatcagccacaccagcggaaatgcttagggagaagccttgtttgtaaggtaatgtggacagagctgtacgtggacatcattacttgtcacgtgtcagaggacacactcgggagaaaccttcatggagtgagagtaaggtgttggctggaagtggccccttaagagatacttggagtcaaatctatccactgtacgcccaccccactcttgttctaagagctttggggacagtcttttgaccccttacattcctttagatgtgaagatgacagagatctaacttctgagagcagaggtgtcaagtgacggtccccttggaggaatggtctttgcatctgactacttccttctgcaactgtgttcttccattagcttccatgacactctcctgctttatttttttctacatctctagcctttgctgtttcctctcctaccccacctttagattttactcagagttcagtctccagccctacaatctgagggacacctttaccaggtccccttcctaaccctccagtcccaaatccaagattctttaaccacactctaaaagttcttcagactcaggacttaaacatagccacgccaccttggccttcaatgacagggatctagcaatgctgcatcatcagccttccaataccaggtttaagggtattttaaacacagctcctcttaaatcctccaatctcagtacccagtgttttagccatgctcgggtggctaaattacatccaggaatggtgccagggcctttagccatttgtctctcctcacactccagggcccatatggcccaggttctgacagtttgccttactcccttgggctggggctagccctacctgataccctgtgtcaatgagtgtaccttggagagctatccactcaggccccagtgcctctatttgctaagggactctgccacagaaaagaaggggagagatgttcatgtaacctcaaaatacttaggcttggttttgatgctagagaggaaaaaggacttggagagagagaaggaatggctggtccagaggcttttgtccactccctctcactggaagtggttgatctccagggaatccccaaggttagcctgcttaggggaagggctaggggtacctggaatgtaggatctcccccatgcctggcctaccaccctaatgtgtctggaattggtgggttcttggtcttgctgacttcaagaatgaagccgtggaccctcacggtgagtgttacaattcttaaa

SEQ ID NO: 1610 - DNA, 149 bp, Homo sapiens
gaatttttttttttttttgagacggagtctcactctgtcgccaggctggagtacagtggcatgatcttggctcactgcaacctctgcctcccgggttcaagtgattctcctgtctcagcctcccgagtagctgggactacaggcgcccg

SEQ ID NO: 1611 - DNA, 1727 bp, Homo sapiens
aaattttccaagtccccactagattagctagacacgcgtttacaaacctttagctagacacagtgctgattggtgcgtttacaatcctttagctagacacaagttctccaagtccccgctagattagctagacacagagcactgattggtgcgtttacaaaccttgagctagacacagagtgctgattggtgcatttacaatcctctagctagacataaaagttttccaagtccccaccaggttagttagatacagagtgctgattggtgcatccacaaaccccgagctagacagagagtgctgcttggtgcatatacaatcctccagctagacaaaagttctccaagaccccacccaactcaggagcccagctgacttcccctagtggatcccgcactggggctgtgggtggagctgcctgctagtcctgtgcctcacacctgcacacctcagcccttgggcggtcgatgggacgggcagccgcctgtcggggagtctcgggctgcatgcgagcccatggcggtcgggggtggcttgggcatggcaggccgcaggtcccaagccctgcctcatggggaggcggctgaggcccggtgagaattcaagtgcggcgtgggcaggctgtcagtgctgggggacccggtgcaccctctgcagctgctggcccgggtgctaagccccttaatgcctggggcctgtggtgccgccgccgctccgagtgtgggcccccgagcctgcgcccacccggaactcatgctgcctgcgagccccatgcgcagccctgttcccacctgcgcctctccctccacacctctctgccagccaagggagctgctccggcctcgaccaacccagagaggggctcccacagtgcagcggctggctaaagggctcctcaagcgtggccagagcggacgctgaggccggggaggcgctgagagtgagcgagggctgctaacacgttgtcacctctcactattgctgcccctttcccatggcctgagctaaaagccatagaaagtgtgtgtatgtgtgtgtgtttaggggttgctgggcaggggaagggtgggacaccatcattccacaagacctcgaagttactcctcccatagaaaaatgaaagtggaaaaattagtgatcatacatctactttaaacatgagagggagaaaaaagtgttcattttctattaaaatccatgtaggcactgtcgagataccacacagatctggtccggcaagaggactgtcaggtccaggcagtcataggaagagattgtaagctgcagtaaatctgagtctctcttcaaagggtttagcctgctaacttccttatccttgttctcaaattcaactttcttgttcttccttacccctagttactgtaaacagcctaccccattctcgtcagctttaatcaataattcacatctgttcccttggttacctgtacccattgttcccccgaaactgcacgcctcacactccacctctgtaactcatgtccccctccccttctatagttaggaaaatatgtacaagtggccaattgggtcagctcagattgtgcagtctgaccccagcccatgggggtagtgacacagagatagggactgtgttaaggataaaaatcccctggtctcctttgttctctgtgctcttgtgatcttgattgacacaagtggcaccgttccgcagaagtaaattaccttgctgagagaaattaaa

SEQ ID NO: 1612 - DNA, 1280 bp, Homo sapiens
aagctttgttgcacacgtgacaaataaatggtttcacagagcacagaagctcctggtgacgctccagctgcttatgcaccgtgaacatcttcccacacttctcgcagggccacaggctggcttctttgctaggacccgcttctttgggggctgtgctggcctcgggtgcctcttcttcagcctcctccacaggctcctctttgacttggattttcagttgcttggaaagactaaggtcttcgggaagacaagaggaatcttccgagtcgaagttaacttgttctgaagaatcactgaacacgttgtcgtcttttgtggtgacgatgtggtttactttgttgggctcaggctgggattggggccttgaagaaccagtcacatcaccattgtggtccaaaacgggcaaagaaaagttttcggtgggtgccatgttgttctgattatggacttcaacctggtgccgccagatgctgaaagaggacttgaaggtgcgcatgcactcgaggcaggtcagcttcttatactcacacttgctctcgtgttcttgcttcagctcgggcgagaaaaacctgaggctgcagtaagggcagacggccgcgttccggcacagccgctcgtggcttccttgctctaggagagaagagagcttagcattacagaggcggcactggtaaacctccttgttttctactggacttgcaagaggagcatgctcttttggtttagcaactttatttactccaaggggtttttctcctggatgcatttttatatgctgcttaaattgagagagaaagcggtacgcttttccgcagtaagtacaaatgtaagctcctttggctcgagatctcaagttcctcttgatgacttgctgtgcttgggagctactctgtccctgaaaaccaggcttgccgcgccttaacttaatgatcagggccttcttaatttctctctctctcactatgtcaatcagctttctttggaatttttcatccaaaacagcatgtgaactagaggctggtgatgggttcttcactatgccgtgttgggtctgacagtgtgtccacactttgaagttggtgtgaaacctcttgtgacagatgtcacaagcgtagggcttttctgggttatggtacatgttaacatgacggtgaagacctgctgttgatctaaagatcttaaggcaatgtttgcatttaaattttttgtttggtctcgtcccctccaactcaccaaattcgtctttattcaaatcagaatctggaaaatctgcatcaagg

SEQ ID NO: 1613 - DNA, 1961 bp, Homo sapiens
acctcaattaaatgattatactgacaccatggaatgaggaaccatgcacacaatcaagactaatccaatttcaacattaatgaaatcaaaccatcttgttcttgtaaggtccagaaccacaatattttaaaagctgtatttctaaagttaaggacattactaagtaattatcaatttgcctccaacttaatttcaagcgtaacaatctccaacctttattattcttgtttaaaaaatattttgtttcttatgacacatttcacaattcaggttgaaatctggggactgcctcccataggtaaaaagtgttggtctttcaattgtgtgtttgttcgtgactccaaagactaaatgcagtcttgaatgtcctgtggcaaagtttacacataaactgtcttttaaatgtgattgctgaaaggggtggggcatggtaaaaaagggtgtctgattcttggggcacaaacagtttttctgtggctggagttgggttttcggacaggcctgtggggctgtcaggctccagaggctggatcttgggcagtggtggtggcggtggcagaggtggtggagagggagagtttgtgggaacagggcacacctcagattccttatgtgccgattcctctgaagcctgagacatgtgcgattggaagtgactccagagtcgaaaattagtgcgaaaagctttgttgcacacgtgacaaataaatggtttcacagagcacagaagctcctggtgacgctccagctgcttatgcaccgtgaacatcttcccacacttctcgcagggccacaggctggcttctttgctaggacccgcttctttgggggctgtgctggcctcgggtgcctcttcttcagcctcctccacaggctcctctttgacttggattttcagttgcttggaaagactaaggtcttcgggaagacaagaggaatcttccgagtcgaagttaacttgttctgaagaatcactgaacacgttgtcgtcttttgtggtgacgatgtggtttactttgttgggctcaggctgggattggggccttgaagaaccagtcacatcaccattgtggtccaaaacgggcaaagaaaagttttcggtgggtgccatgttgttctgattatggacttcaacctggtgccgccagatgctgaaagaggacttgaaggtgcgcatgcactcgaggcaggtcagcttcttatactcacacttgctctcgtgttcttgcttcagctcgggcgagaaaaacctgaggctgcagtaagggcagacggccgcgttccggcacagccgctcgtggcttccttgctctaggagagaagagagcttagcattacagaggcggcactggtaaacctccttgttttctactggacttgcaagaggagcatgctcttttggtttagcaactttatttactccaaggggtttttctcctggatgcatttttatatgctgcttaaattgagagagaaagcggtacgcttttccgcagtaagtacaaatgtaagctcctttggctcgagatctcaagttcctcttgatgacttgctgtgcttgggagctactctgtccctgaaaaccaggcttgccgcgccttaacttaatgatcagggccttcttaatttctctctctctcactatgtcaatcagctttctttggaatttttcatccaaaacagcatgtgaactagaggctggtgatgggttcttcactatgccgtgttgggtctgacagtgtgtccacactttgaagttggtgtgaaacctcttgtgacagatgtcacaagcgtagggcttttctgggttatggtacatgttaacatgacggtgaagacctgctgttgatctaaagatcttaaggcaatgtttgcatttaaattttttgtttggtctcgtcccctccaactcaccaaattcgtctttattcaaatcagaatctggaaaatctgcatcaagg

SEQ ID NO: 1614 - DNA, 441 bp, Homo sapiens
tgggagtctgctcatgtctttttggtcatcttctgttttcagagacaggtctcttgtgaccgacgaagatgaggcagctgctgttgttgccgcatctcccacagtgacgcggatgatgtccgaggggtccgacagcgggctgctgggctcagtctttatgcgcacctcagtcacaggggaagctccctccctgtctgttgactgagaagcactaaaggacctgaggcgatgcggttgtagcacttgaggcctgtcatctagggctgttttttcactacaatcttttaaagatgacttctgagataaagcacacaacacattccctggtgcatcactggacaccgaagatgatccctgggaagatttcaaatctatggaaggtgaatagacaggaacctggctatccatcgacaatgaccgtctgaggagactcttaacaag

SEQ ID NO: 1615 - DNA, 3380 bp, Homo sapiens
tcgaagcaaaatacagtacaaatttattgactccaatcattcttagtcaacatttaagcaaactgtagacaatggaattgaatacaaataagcaatggattaacattagatagaaatcctattttaccatgaattttcagttcgaaaaagcttattcctaagtaaaatggaaaaatgacttactctgctaaggcatatgacaaaatacacagaattataaaaccattcgtttttcttttaaccataagcatatattcaatggaaaacttgaaatagccttggactaatgttctgaaaactagtattaactgagtataactgtgtgaaaaatctggacagcattaacaaatgaaagagcactgaattctgttattttaaagatttacagtaaaatactttggttcccaaaagactgtctctaaaaggaatttttaaaaacacctgacattgtaactcattttttctcctccagaatctaaacaccaattttgtcttctccccagtcacatgggaatgccacaagctggagtacccgctgagatacactgaaagagcatattaaaaattacaaaaaattaaacttcttaaagtgctaaaaccacaaaaagccataaatgaaaacctattttttaaaacttaaagtttagtagtcagtgttaaagaacacttttaaagagtacgtgtcagcattatttaaatcaataatgcatttcacaattattgcagaaacatcactgagacatcgtaaattgtcaaactgacttgtaatccagttagatacaatttatacagaaatctatttggaattatacctaattactttttactaagaaacttcaaataattttacttcctgaagttccagattacagttgtatacacacatgcatgcatgtgtgtacaaacccaatttgagacaacaaaggccaactttagatctgttaattcttccatctctccctcaccctgatcagagagttggccttgtaggtgcatccacaccgcacctccgtgaacagacacattttattcctgtttcacagcagctactctcattagcaccaatgggactacatatggattcaaacggtcactcattaagtgctggggcacatttttacaggcaaggctataaacgttccattccaaaccagaaaaccaagaacatcacacatctccccacaaatgcaaagaacatcactgttgaattgttagttgtatattctggtaaaattataaatgcatactaactagttttaaaggtgaatattctacaaatcttcaaatattactgttaaaatgcacaatatttgttacctccattgcttactttgagtgataaaaacatgttttatgttactccttccttctcccacataaacgattcagtatcaagttctcagattaacaaagaatatattaaaacattttacattctttccacaactgcataaaaaagcaggcatcctgcatacttacatggaataaagagctttctacattttcaaaattaattacaatcctaaaatatatttacatgaatatcttcactagctaatgagttgcaacaatttaagaccaacttgttttacaccaagtatttgcctactggctgagataaacattcttaaaaaactttactgaataaagtaattaacatatctttcattattttacttcttaacatttaaaatagttacatgagtggaagcatattttttttgaccaccaaaataaactctttcagcctaatgcttttaaagtacagtataaaaagtaatagaaaaaccagaacggcattataaatgtttttggttcaaaattttatttgaaatcttatattccttgcttagacaaaaatgtgaagacaaaacaccagtcatttttaaaatctaacagatatgcagaacctatgtttagatcaaaaatattttttttttttactgattaacaatattatttttaaaaaatcttcgaaaatgtagcataaaggtttaggtcctgggatactgaatttataatgccaagatactctgtatcatggaattatcaccgatagatactctaatggccatgtaggtgatgattactcagggaaactgtcttcttttgaagtgacagctaccaagatggacagagtaagaaataccacattatacgcggaatgaattcaatgtacaataatccatcctgatgtttcatgtaaacccatatgctttagttttatccttaaaatgcatagatttctttaagaaaacaaagatggcaagaatcaataactgcaatttattttcccttctccatcaaatttaagaaagaataggaagttaactactaaaatattgtggaattttggagttttttcaagtgaaagaatacaaggcaaaatttcatatataatatccataatgtacaaagtcaatcagtattttataaaaatgtctggttcaataaaaaaaatgagaatatctttcctaccactggtatggaatgttggcaataagattgatgggtacagagttattttctgctagagcacaaatctaaaattatttcttaatgacagtagttggcttttaaaaaaaatttgaaagaatacctcgtaacacaaactagagtctaaattggtattactttcttaaaaggattttgtagtttcgtttttttaatacatctaactcccacccccacaagtaaaagttttcccttttgaaacacattgaactttggatatcctactgaaaggctttcaattacaaattatacatagtattctttgaaaagcccaaaacccatggagcaaaataagtagctaaaactaattttggaccactgatagtgctctaatacctatttttgaaatattaagcaatgatgtagagaatggccttgcccatgattttaaccatcagacccccaacaaattctaacagaaattgtcacaagagagaggcaggaaaatgtatatgtcgtatatattgttcttggaaagcatgttgaaactgcagtgaggtgtttctcctctgctctatctggaagtaaatggtaatttagaattttacatcagctgtgctaattcttgagtgtctgggatctatgtaaatatatgtcccgaccttatttgttacactaatgttaaaatcaaaattagtgccatatggttagctttgttttttgtcctaactacactcagattttcaatttgtgacagcataaatcagaggaaatgaaatatgtgcagtccttcaaatgctggtctgaatttagactgtggtgcagtgtacatgtaacatggtacaagtttttataacaatgtctatcactactgaagcccttataaactgactgtaggggacttccataaattgttttcatttccc

SEQ ID NO: 1616 - DNA, 441 bp, Homo sapiens; identical to SEQ ID NO: 1614

SEQ ID NO: 1617 - DNA, 1396 bp, Homo sapiens
ttttcgtgatgtgatttctcccatttatttaacagagctgtggatgaagactcctccacattcctttgatctatagtttcattctctcacgttgtatatggtcagcctagagtctgaagtttgtgccataaacattaaatacatctggattctctctaccttgaattcatttaggttgagcaaagtggtaaatataaataaaggcttttccacactgattacagacataatattcctgtagtatgtttgtccttggtgtatttagtgttaacgctacagctgatgattcttacatattcattgcttttttagtgtgagttctctcatgttgtctaaggttaaaaaatttactaaaggctttcccacatagaggacatacatatggtttctctccagtgtgaactcttctatgaagtctaaagttgtaacttctattgaaggctttaccacatatattgcattcatatggtttctctccagtgtgagttctctcatgtcgtctaaggacagaagagtgattgaaggcttttccgcatagatggcattcatatggtttttctccagtgtgagttctctcatgtcgtctgaggtcagaagattcagtgaaggctttcccacatacatggcactcatatggtttctctccagtgtgaattctctcatgtcgtttaagcacagaagattcagtgaatgctttcccacatagatgacatccatgtggtttctctccattgtgacttcgctcatgttgtctaaggtgagaacaatgagagaaggcttttccacatagatgacattcatatggtttctctccattgtgagttctttcatgttgtctaaggtaagaacatttactgaaagccttcccacataggagacatccatatggtttatctcctaagtgagttctctcatgttttctaaggtcagagcaatgagtgaaggctttcccacatagatggcatatctgtgctttttctctagtgtgaatcatctcatgtcgtctaaggttagaacttttactgaaggctttcccacatagatgacatccatatggcttctctccagtgtgagttctctcatgttttcgaagatcagagcaatgagtaaaggctttcccacatagatgacatccgtgtggtttctctccagtgtgaatcatctcatgtcgcctaagattagaatttttgctaaaggttttcccacacacacgacattccaatgttatctctctagtgtgagtcacactgtgtggtctaagggcagagttttggataaaggcataatcaaatagatgacttccatatgatttacatttggtgtgaatttccttgtgttgattaaaggataaccagtcactgaagattttcccaaactttttgcttacaaagtgttt

SEQ ID NO: 1618 - DNA, 1396 bp, Homo sapiens
aaacactttgtaagcaaaaagtttgggaaaatcttcagtgactggttatcctttaatcaacacaaggaaattcacaccaaatgtaaatcatatggaagtcatctatttgattatgcctttatccaaaactctgcccttagaccacacagtgtgactcacactagagagataacattggaatgtcgtgtgtgtgggaaaacctttagcaaaaattctaatcttaggcgacatgagatgattcacactggagagaaaccacacggatgtcatctatgtgggaaagcctttactcattgctctgatcttcgaaaacatgagagaactcacactggagagaagccatatggatgtcatctatgtgggaaagccttcagtaaaagttctaaccttagacgacatgagatgattcacactagagaaaaagcacagatatgccatctatgtgggaaagccttcactcattgctctgaccttagaaaacatgagagaactcacttaggagataaaccatatggatgtctcctatgtgggaaggctttcagtaaatgttcttaccttagacaacatgaaagaactcacaatggagagaaaccatatgaatgtcatctatgtggaaaagccttctctcattgttctcaccttagacaacatgagcgaagtcacaatggagagaaaccacatggatgtcatctatgtgggaaagcattcactgaatcttctgtgcttaaacgacatgagagaattcacactggagagaaaccatatgagtgccatgtatgtgggaaagccttcactgaatcttctgacctcagacgacatgagagaactcacactggagaaaaaccatatgaatgccatctatgcggaaaagccttcaatcactcttctgtccttagacgacatgagagaactcacactggagagaaaccatatgaatgcaatatatgtggtaaagccttcaatagaagttacaactttagacttcatagaagagttcacactggagagaaaccatatgtatgtcctctatgtgggaaagcctttagtaaattttttaaccttagacaacatgagagaactcacactaaaaaagcaatgaatatgtaagaatcatcagctgtagcgttaacactaaatacaccaaggacaaacatactacaggaatattatgtctgtaatcagtgtggaaaagcctttatttatatttaccactttgctcaacctaaatgaattcaaggtagagagaatccagatgtatttaatgtttatggcacaaacttcagactctaggctgaccatatacaacgtgagagaatgaaactatagatcaaaggaatgtggaggagtcttcatccacagctctgttaaataaatgggagaaatcacatcacgaaaa

SEQ ID NO: 1619 - DNA, 576 bp, Homo sapiens
tttttgacagtactaatttaatcttattacttcttacataattctgcattcaatattcccaggttatttcagaattgtacatttcaacccacatattttaagtagaaagtctttattcaaaattataatttttttctcaagcacgtgcttgatggctttatgttttgtcccccagctatacatctcatcaatggctttttagagttttcatccctgtctcacttttttgacataaaagctgcctgaaggtttttccactatcctgtcaagatagttttctcactggaaaaatgctggtattgactaaggaatgagtaatttactgaggactaccctccattcatgtcattgagagttctacaccatgtgaattctgatctattatagaagtgctgctgtattaagaaaaggatttctcatgagttttcattgaataacttctccactatgaatgtctggaattgttcaagaggcctcatccacctaataaaaaatattttcacatatttcctgtttttatcagttaccttataatgaattttcttgcacacaccaaaattggtgcttagctgaatg

SEQ ID NO: 1620 - DNA, 576 bp, Homo sapiens
cattcagctaagcaccaattttggtgtgtgcaagaaaattcattataaggtaactgataaaaacaggaaatatgtgaaaatattttttattaggtggatgaggcctcttgaacaattccagacattcatagtggagaagttattcaatgaaaactcatgagaaatccttttcttaatacagcagcacttctataatagatcagaattcacatggtgtagaactctcaatgacatgaatggagggtagtcctcagtaaattactcattccttagtcaataccagcatttttccagtgagaaaactatcttgacaggatagtggaaaaaccttcaggcagcttttatgtcaaaaaagtgagacagggatgaaaactctaaaaagccattgatgagatgtatagctgggggacaaaacataaagccatcaagcacgtgcttgagaaaaaaattataattttgaataaagactttctacttaaaatatgtgggttgaaatgtacaattctgaaataacctgggaatattgaatgcagaattatgtaagaagtaataagattaaattagtactgtcaaaaa

SEQ ID NO: 1621 - DNA, 8036 bp, Homo sapiens
ttggcctctgtcctgtttgtccagcccgccagtttctgcagtggaggtcgcgactgagggacgggacagagaagtcgcgaaagtgggccagaggttctgcgacaccacctcgggtgagctgcgccaggcccgggatagggactgttgtgttcgaatgcccgccccggtcggccgccgctccccgcctagtccacggagctcaatggcggcagtcgcgctgagggactcggctcaggtgagttgtgcgtcctccgggtctcgcctacctcccccagcagaagccttaaggcccagtgagggatgcctgctcacagccctgcagcccaggccccagtaccctggacaagaaggcgcttgtggattggacccgtttgtgacgcccagtgtgtacggaaatgtgacgggcagttgactggcgcgtgcagaacttggagctgcgactaagctgggggggattcaggagcctggggtccgtctcgggtctgcaggaacatagagtgaggcagagttgcacctgacgaatttgacgattctgaggacactggcagccttcgagatttgtgaacagatagggacactgggctaggatttcctaaagctatccaaaagttgctcaggggaagaacaggctgaagagaggtaatagtagttaggcataggaagactgagttcttgtccaagctcacgcagctggtaaagtcagcactgagaactgaggtgcggagatagtgcagccagcccaggccacctggctccaaaactggaccagggtcattgggcgacctgagcctcgccactcgtctagccttgggccctgagactttgagcaaatacaaagcccagagtcttaagtccaggttagattatatgaagctgttggcagccgggggaaaggagatgtagaaggttgtccaaggcaaagttaccagtatatgctaagtttggagaggaggctaagatagttcaggaacctacaattattttcttttcatgagaacagggagcagtgtagtagaagtcagacccggaatggttccctgagaagttgagttgtctattcgttacttaatagtaacagtgggaggtttggagtggaagagggaggtgatctggttctggtcttattaggctccctgtggctgcagcatgggaagccaactgaaggatgaggtggggagacctgggaggagactactgggataggccaggtgaatgtgatagaatgtgataggccaaaatggtggctgtgaagatgcgagaagcagttggattctggattcattttttaagtagggctgcctgaatttttagttttgagaaagagagtggagtcagggatgactgaaaggttttattttggcagttagaagtgtggaagctccatcaactaagatggggaagtacatagtaggagtagttttcatttgggatatcagaagttttatttttgacctgctaagagtatgagagctttcagagaatggttcatgggctgctggaactgtaggtcaggaacagtgaggagagattcagaatggagacttttccaaaaggtagtggacaatctgtgggccggggtggagctgtggatcacatttagtagaggggaagcctgctcacaatgataataatagttgtcaaggaaggggaggggaaggtcaaggacaggtctcctgtgtgagcccctggttgtgtgaggtgttgcaacacaggtcttggacagaagtgttcacggtgagggtcgtacagagattatgatctagcatgtggccaaggcttctcaggggtgagtagacatgagatgaatgtagaggcataggagttagacaggatgatgctaggactggtgcgtattcacctctctgcagactgaccagggttttatattaactcttggtgggatctgggaagtttcagtcaggctgtcacgttatcttaggggcataattggccatctgtgggactcgatgggcccggggtagagagccactggggttggaccttgaattagtggtagttggagagaggaaggctgtgactggttgggggacagcaatcacagcccagaagtggaagaggccttggttatctgagatccacaggtgattcttgatgggtgaggttgaagcaaggaatagtcaggtagaaaggccttcatggtatgacttgaggctgcccctaactttaggtgcagttagagatctgggatagtactgaaccgtatttgaatttgccagccactctctgggccccatatgctgagtaaccagttgggaggccaaggagatgctcatggtatgaggcaggaagtaagctgtggctgtgggagtgacactgtgagagaagtgtggtagagtattgtgcacatggagacaagaatgtgaagtggtggctccttggtgttgaggacacaagggtgaagtatgaaccaagacccttggttgtgtttgggagccatggtctgttgtcttccaggagagtttccttacaagagagtatggttccttgcatggcaggctcagagcttagatacttgcccacctgcctgttgttgctgtgggagaacacaatgaccaatgggaccataaggagagagggggcattagtgtcaccaggccctgttgcattctttcaaatgagaagatggagaggaggatgaacaggggatagatgcagcagggatgaatttggggtcctaggagagatactcataatggaatgaactgtcccaatcatggaaaagctgtgtgacctttgaggttgtggctgtgggaatgcagctgtgtgagacaggtgtggttcaaagagtgatgtacatgagaagagagagaataaactgagggccatatgggtgaacgggagtcagaggggtaaagggtaagcccgtgttagttgtgtcttggaagatcaatcttggggacttcacgggtattgcctgacaagacaaacgtcagatcactcacaccctgtctatggccagttctctctctagctggtgtttgtgagtaacgagaggtatagcctacctgccatgcccagagcttagatagcatctatctgttcataggcctgttgttgctattcgaggactcagtatcagtggaactgtggggagagggtaggcatcggtggcactgtggctggttatctccgctgaggtgggcaatagggtgacctggggatggatgttgggggcaagaggataatgaactccgggtctgatcgtggattgaactattcctgctgtgacagggtatgacctttgaggatgtggccatttatttctcccaagaagagtgggagctccttgatgagtctcagaggttcctgtactgcgatgtgatgctggagaactttgcacatgtaacatccctgggtaaggccctagcatccctccgagtgtctgcttttctttttgaccccagagttacctctgtctcaggagtcttgctgtcagcctagtggatcttatttttcttgtcttccccctgtcaggatgactgtgtacagattcatggtaccttgtggcccagtttctgcccttttcctctagctgccatttccttatgtccacctatatcagaaattacaggcattgtcatagttactacttatgtgaactatggagctctttttacaagactctcctttgagtgttttttgtgagtgctggtcactcccttgtcctctctttccttaagacttacatcattcatgtgttatgtggtagcacaatgagggctgcagggagagccctagttgcttcacagagtgaacaaagcaagatggtctcagaggaggcctggccccagtgagtggcagctggggaagggcatgacatcatggttgtattagaatcatatccggaacctgtgatgtgtccagcagtattttggtgcaagtgccactggccataactcgtttctacttctacttccctatacaatactgtgctgaattgttgtttcatctgtcacttccagtgtttggctacctccaccctcgtggtctcagtgtgtcacttgttcgtctccacagctcacttcttttcagtgttgttcagtcttgactcactgtgttgtgaggtatgcacacagcctcaaatagtcctccttgatcaccagctatcaagtttcaattggattttcctaggactggacaacagcagtcttctgtacagcacatacatcactagcagacaaagtcctgctgagggctttggcagagagtgagttggagaccctccttctcctcctgtgctatacctcatccttgtatcctttgcgtgatgagatgacatctctaaaatcttaaaaaacccagtacttcaaaccagcctattcctccccagttccgttgttctcagaacagttccatgcactcagttcttgtgtctcacacatttttgtgatacatctttctccttccatgaaagtcagcatgcatttcatcagcatttctctgctttcaggttattgccatggaatggagaatgaggcgatagcttctgagcagagtgtatctatacaggtcaggacttctaagggcaatacacccacccagaaaactcacctcagtgagattaagatgtgtgtcccagtcttgaaagacattttgcctgcggctgagcaccaaaccacatcccctgtgcaaaagtcatacttgggtagcacaagcatgagaggcttctgcttcagtgctgaccttcaccagcatcaaaagcattacaatgaagaagagccctggaaaaggaaggtggatgaggctacatttgtgaccggctgcagattccatgtgttgaattatttcacctgtggggaggccttcccagcccccacggacctactccaacacgaagccactcccagtggtgaggagccacacagtagcagcagcaagcatatacaggcatttttcaatgcaaaaagttattacaagtggggtgaatacagaaaagcttcaagccacaaacacacacttgttcagcatcagagtgtctgttctgaaggagggctttatgagtgtagcaaatgtgagaaagccttcacttgcaagaacacacttgttcagcaccagcaaattcacactggacaaaagatgtttgagtgtagtgaatgtgaggaatcctttagcaaaaagtgccacctaatcttacacaagataattcacactggagaaaggccttatgaatgcagtgatcgtgagaaagcctttatccataaatctgaattcattcaccaccagagacgtcacactggaggagtgcgtcatgagtgtggtgaatgtaggaaaacctttagctacaaatctaacctcattgaacaccagagagttcacactggagaaaggccttatgaatgtggcgagtgcgggaaatcctttagacaaagctctagcctttttcgacaccagagagttcactctggagaaaggccttatcagtgctgtgagtgtgggaaatcctttagacaaatcttcaatctcattcgacatagaagagttcacactggagaaatgccttatcagtgcagtgattgtgggaaatcttttagctgcaaatcggaactcattcaacaccagagaattcacagtggagaaagaccttatgaatgcagagaatgtgggaaatcctttagacaattctctaacctcattcgacaccgcagcattcacactggtgataggccttatgagtgcagtgaatgtgagaaatcctttagccgcaaatttatcctgattcaacaccaaagagttcacactggagaaagaccttatgaatgcagtgaatgtggaaaatcctttacccgcaaatctgacctcattcaacaccggagaattcatactggcacaagaccttatgagtgcagtgaatgtggcaaatcttttagacagcgctctggcctcattcagcaccggagacttcatactggagaaaggccttatgaatgtagtgaatgtggaaagtcttttagccaaagtgctagcctcattcaacaccagagagttcacactggagaaaggccttatgaatgtagtgaatgtgggaaatcctttagccagagctctagcctcattcaacaccagagaggtcacactggagaaagaccttatgagtgcagtcaatgtgggaaaccctttacccacaaatcagaccttattcagcaccaaagagttcacactggagaaaggccttatgaatgcagtgaatgtgggaaatcctttagccgcaaatctaacctcattcgacatcggagagttcacactgaagaaaggccttaaatgtgaagggaatgtgctatttctttattcagtataatagcactggaggagactgtggtagccatcttcgtaaatttaaactttgagcacccacagtggggtattcttcataagtttcaggtatgtgggaagctctgaggaggttcattgtaatttctaatctgccgaggcctatagcctgatttatgtcactgccaatttctgaggctgaagccatttcacatttcacccctaccacctggcaggtgcacaccatgtgcatgagtcacttccccacagtgctcagagaagcaaacctctgtactctcccatttgcttggggaaattattaatagcccaagcatgtagggtcttcatgtcttttctctgactttagagtatacacctgacccagttgtggtccagagaatctgagttgtgctgtcagctttctaaggattacttttttaaggaacattgtcggtctcacatgatgcttgtaatgaatttttccacattctgattcaccagcctggaaactgcttggtgcacattgctttaatttataatgtttttataaaggttttaaaaaaatttacgcacctttaatcttgggtgttctattcattgcatagaatgacttgtaagcagaatagtgatgtcagcatgaaggggtgaatagattttgtggagatctcaaactttctgtactcagaagggacaatgtgatggcagaagacagctctttgttctgtattgctctaattggcctgctgcccaaggcctcaaagtaaagactgccaggctttgtgttcctgtattgtggcctggtgccatttttgtcaggtcagaggtcaccatgaaaaggaggcagttgtgacaatccccagtgcttctgtgaacgtgaattttgttcagttgtccacaggagatccacataattcctagcactggtgaggggaatctgttgcccaggtcctgcaaaggagccaggtgccatggcatataagtcagtgtagactggtgccatttgttgtcagactataggtgtggaggtgaaattacaggttcaacagtaattgggacagaaactccaggtaaatggggagtggagaagactgcagtaaattagatggaatgactcttctaaaagttcatctacaaattttccagtgaatatggttgtgtaggatcagtgcatacagaaattctcaggatcttctgtttactatcgctgagatcattatcagaaaatagtctggccgggcatggtgtaatcctaacactttgggaggccaaggcgggcggattgcctgagctcaggagttcaagaccagcctgggcaacatggtgaaatcccatgtctactaaaatacaaaaaattagccaggcgtggcagcatgcgcctatagtcccagccacttgggaggctgaggcaggagaatcgcttgaacccagaaggcggaagttgcagtgagctgagattgcaccactgcactccagcccaggcaacagagtgagactccgtctccaaaaaaaaaaaagaaaatagtctataaaggttttgtggctccttgtatcctgtctgggctgttcacctcaaggccattgctatgcaggtaggagaacaagaatagagagaaggatcattccgcggtccagggatgtggcttttgtgactcagccaacattcctattaattcaggtggcaacagccttcattgcttgccaaaatttgctgcccctgaggcaaggttgcctctctcagggcatgagga

SEQ ID NO: 1622 - DNA, 175 bp, Homo sapiens
tactggttttcttcatgctgtataattattttgagattcaaaaatgatgaatctttgtattgctgagtatcatgctgttctatggataagtcagtgtttatccatgtgtttagggacatttatattatttatagatttttgtatattacaaataaagctgctgtaaatacttgaa

SEQ ID NO: 1623 - DNA, 523 bp, Homo sapiens
gccaggactccacagacacagaaagcaaccacgaagatcgggttgcgggggtggtatccctccctcagggtcccccaccccagccacctcccaccattgtggtgggccggcacagtcctgcctacgccaaagaggaccccaagccacaggaggggttattgcggggcaccccaggcccctccaaggaagtgcttcgggtggtgggcgagagtggtgagcctgtgaaggccttcaagtgtgagcactgccgtatcctcttcctggaccacgtcatgttcactatccacatgggctgccatggcttcagagacccttttgagtgcaacatctgtggttatcacagccaggaccggtacgaattctcttcccacattgtccggggggagcataaggtgggctagcaacctctccctctctcctcagtccaccactccactgccctgactacaggcattgatccctgtccccaccatttcccaaggagttttgctttgtagccctcactactggccacctgacctca

SEQ ID NO: 1624 - DNA, 523 bp, Homo sapiens
tgaggtcaggtggccagtagtgagggctacaaagcaaaactccttgggaaatggtggggacagggatcaatgcctgtagtcagggcagtggagtggtggactgaggagagagggagaggttgctagcccaccttatgctccccccggacaatgtgggaagagaattcgtaccggtcctggctgtgataaccacagatgttgcactcaaaagggtctctgaagccatggcagcccatgtggatagtgaacatgacgtggtccaggaagaggatacggcagtgctcacacttgaaggccttcacaggctcaccactctcgcccaccacccgaagcacttccttggaggggcctggggtgccccgcaataacccctcctgtggcttggggtcctctttggcgtaggcaggactgtgccggcccaccacaatggtgggaggtggctggggtgggggaccctgagggagggataccacccccgcaacccgatcttcgtggttgctttctgtgtctgtggagtcctggc

SEQ ID NO: 1625 - DNA, 523 bp, Homo sapiens; identical to SEQ ID NO: 1624

SEQ ID NO: 1626 - DNA, 511 bp, Homo sapiens
gcattgtgatgaaacagatcttttgcttatgtttttcctttttatcttctctcatcccagcatactgagttatttattaattagttgatttatttttgcctttttaaattttaacttatatcagtcacttgccactcccccaccctcctgtccacaactcctttccactttaggccaatttttctctcttagatcttccagcagccccaggggtaggaagctcctcttagtactaagagacttcaagcttcttgctttaagtcctcaccctttacattatctaattcttcagttttgatgctgatacctgcccccggccctaccttagctctgtggcattatatctcctctctgggactcttcaacctggtactccatacctcttgtgccctctcactttaggcagcttgcactattcttgaatgaatgaagaattatttcctcatttggaagtaggagggactgaagaaattctccccaggcactgtgggactgagagtcctattcccct

SEQ ID NO: 1627 - DNA, 511 bp, Homo sapiens
aggggaataggactctcagtcccacagtgcctggggagaatttcttcagtccctcctacttccaaatgaggaaataattcttcattcattcaagaatagtgcaagctgcctaaagtgagagggcacaagaggtatggagtaccaggttgaagagtcccagagaggagatataatgccacagagctaaggtagggccgggggcaggtatcagcatcaaaactgaagaattagataatgtaaagggtgaggacttaaagcaagaagcttgaagtctcttagtactaagaggagcttcctacccctggggctgctggaagatctaagagagaaaaattggcctaaagtggaaaggagttgtggacaggagggtgggggagtggcaagtgactgatataagttaaaatttaaaaaggcaaaaataaatcaactaattaataaataactcagtatgctgggatgagagaagataaaaaggaaaaacataagcaaaagatctgtttcatcacaatgc

SEQ ID NO: 1628 - DNA, 511 bp, Homo sapiens; identical to SEQ ID NO: 1627

SEQ ID NO: 1629 - DNA, 243 bp, Homo sapiens
ccgggcgcggtggctcacgcctgtaatcccagcactttgggaggctgaggcgggcagatcatgaggtcaggagattaagaccatcctggctaacacggtgaaaccccgtctctactaaaaatacaaaaaaaattagccgggcatggtggcaggcgtctgtagtcccagctactcaggaggctgaggcaggagaatggcgtgaacctgggagacagaggttgcagtgagccgagatcgtgccac

SEQ ID NO: 1630 - DNA, 1996 bp, Homo sapiens
gagagaaacatacaaatgtaggtttgtgatacagctttcacgtgtaattcacagctggcacgacatagaagaattcacactggagagaaaacttacaagtgtaatgagtgtcgcaagaccttcagccgcaggtcatcccttctatgccatcgtagacttcatagtggtgaaaaaccttacaagtgtaatcagtgtggcaataccttccgtcaccgggcatcccttgtataccatcgtagacttcacactctagagaaatcttacaaatgtacggtttgtaacaaggttttcatgcgtaattcagtcctggctgtacatactagaattcacactgcaaagaaaccttacaagtgtaatgaatgtgggaaagcttttaatcaacaatcacatctttcacgtcatcgtagacttcatactggagagaaaccttacaaatgtgaagcatgtgacaaagtttttggtcagaaatcagctcttgagtcacataagagaattcatactggagagaaaccatacagatgtcaggtttgtgacacagctttcacgtggaattcacagctggcacgacatacaagaattcacactggagaaaaaacttacaagtgtaatgagtgtgggaagaccttcagttacaagtcatcacttgtatggcatcgtagacttcatggtggagagaaatcttacaaatgtaaggtttgtgacaaggctttcgtgtgtcgttcctatgtggcaaaacatactagaattcacagtggaatgaaaccttacaagtgtaatgagtgcagcaagaccttcagtaacaggtcatcccttgtatgccatcgtagaattcatagtggtgagaaaccttacaagtgtagtgagtgcagcaagacgttcagtcagaaggcaacccttctatgccatcgtagacttcatagtggtgagaaaccttacaagtgtaacgactgtggcaataccttccgtcactggtcatcccttgtataccatcgtagacttcatactggagagaaatcttacaaatgtacggtttgtgacaaggctttcgtgcgtaattcatacctggcaagacatattagaattcacactgcagagaaaccttacaagtgtaatgaatgtggaaaggcttttaatgaacaatcacacctttcacgtcatcatagaattcatactggagagaaaccttacaaatgtgaagcatgtgacaaagttttcagtcgcaaatcacaccttaaaagacataggataattcatactggagagaaaccttacaagtgtaatgagtgtggcaaagcctttagtgaccggtcaacacttattcaccatcaggcaattcatggtatagggaaatttgattaatataatgattgtcacaaagtcttcagtaacactacaacaattgcaaatcattggagaatccatgatgaagagaaatcttctgagtgtaataaatgtggcatgtttttcagacattgttcatacattgcagttcattggcaacctcatactggagagaaaccttacaaatgtcatgattgaggcaaggtcttcagtcaagcttcatcctatgcaaaacaggagaattcatacaggagagaaacctcacaagtgtgatgattgtggcaaagcctttacttcacattcacacctcgttggacatcagagaatccatactggacagaaatcttgcaaatgtcatcagtgtggcaaggtcttcagtccgaggtcactccttgcagaacatgagaaaattcatttttgagataactgttcccaatgcagtgagtatagcaaaccatcaagcattaattgacattggagtcaattcagcattgacttgagtttgtgttgacttaacattgagttcaagccttaattgacattcaagtgtttatgttaagaggatggggccaggtgtggtggctcaggcctgtaatcccagcacgttggaagaccaaggcacataggtcacttgaggtcagaagtttgaaaccac

SEQ ID NO: 1631 - DNA, 2126 bp, Homo sapiens
taatcatcaatcaagccttgcacgtcatcatatacttcatactggagagaaaccttacaaatgtgaagaatgtgacaaagttttcagtcagaaatcaacccttgagagacataagagaattcatactggagagaaaccatacaaatgtaaggtttgtgatacagctttcacgtgtaattcacagctggcacgacatagaagaattcacactggagagaaaacttacaagtgtaatgagtgtcgcaagaccttcagccgcaggtcatcccttctatgccatcgtagacttcatagtggtgaaaaaccttacaagtgtaatcagtgtggcaataccttccgtcaccgggcatcccttgtataccatcgtagacttcacactctagagaaatcttacaaatgtacggtttgtaacaaggttttcatgcgtaattcagtcctggctgtacatactagaattcacactgcaaagaaaccttacaagtgtaatgaatgtgggaaagcttttaatcaacaatcacatctttcacgtcatcgtagacttcatactggagagaaaccttacaaatgtgaagcatgtgacaaagtttttggtcagaaatcagctcttgagtcacataagagaattcatactggagagaaaccatacagatgtcaggtttgtgacacagctttcacgtggaattcacagctggcacgacatacaagaattcacactggagaaaaaacttacaagtgtaatgagtgtgggaagaccttcagttacaagtcatcacttgtatggcatcgtagacttcatggtggagagaaatcttacaaatgtaaggtttgtgacaaggctttcgtgtgtcgttcctatgtggcaaaacatactagaattcacagtggaatgaaaccttacaagtgtaatgagtgcagcaagaccttcagtaacaggtcatcccttgtatgccatcgtagaattcatagtggtgagaaaccttacaagtgtagtgagtgcagcaagacgttcagtcagaaggcaacccttctatgccatcgtagacttcatagtggtgagaaaccttacaagtgtaacgactgtggcaataccttccgtcactggtcatcccttgtataccatcgtagacttcatactggagagaaatcttacaaatgtacggtttgtgacaaggctttcgtgcgtaattcatacctggcaagacatattagaattcacactgcagagaaaccttacaagtgtaatgaatgtggaaaggcttttaatgaacaatcacacctttcacgtcatcatagaattcatactggagagaaaccttacaaatgtgaagcatgtgacaaagttttcagtcgcaaatcacaccttaaaagacataggataattcatactggagagaaaccttacaagtgtaatgagtgtggcaaagcctttagtgaccggtcaacacttattcaccatcaggcaattcatggtatagggaaatttgattaatataatgattgtcacaaagtcttcagtaacactacaacaattgcaaatcattggagaatccatgatgaagagaaatcttctgagtgtaataaatgtggcatgtttttcagacattgttcatacattgcagttcattggcaacctcatactggagagaaaccttacaaatgtcatgattgaggcaaggtcttcagtcaagcttcatcctatgcaaaacaggagaattcatacaggagagaaacctcacaagtgtgatgattgtggcaaagcctttacttcacattcacacctcgttggacatcagagaatccatactggacagaaatcttgcaaatgtcatcagtgtggcaaggtcttcagtccgaggtcactccttgcagaacatgagaaaattcatttttgagataactgttcccaatgcagtgagtatagcaaaccatcaagcattaattgacattggagtcaattcagcattgacttgagtttgtgttgacttaacattgagttcaagccttaattgacattcaagtgtttatgttaagaggatggggccaggtgtggtggctcaggcctgtaatcccagcacgttggaagaccaaggcacataggtcacttgaggtcagaagtttgaaaccac

SEQ ID NO: 1632 - DNA, 192 bp, Homo sapiens
tgggaaagcttttaatcaacaatcacatctttcacgtcatcgtagacttcatactggagagaaaccttacaaatgtgaagcatgtgacaaagtttttggtcagaaatcagctcttgagtcacataagagaattcatactggagagaaaccatacagatgtcaggtgtgtgacacagctatcacgtggaattc

SEQ ID NO: 1633 - DNA, 2126 bp, Homo sapiens; identical to SEQ ID NO: 1631

SEQ ID NO: 1634 - DNA, 483 bp, Homo sapiens
tcggccactttcgccatcctgttttttgtttcttattttcttatttatttatttatttattttgagatggagtgtcactcttgttgcccagcctagagtgcaatgatgtgatctcagctcaccacaacctccgcctcccgggttcaagcgattcctctgcctcagcctccctagttgctgggattacaggcatgtgccaccacacccggctaattttttgtatttgtagtagagacggggtttctccatattaggctggtcttgaactcccaacctcaggtgatctgcccaccttggcatcccaaagtcctgggattacaggcatgagccaccgtacccggtcttgtttcttattttctattttttatttttttgagaggcaggagaatggcgggtgaacccaggaggtggagcttgcagtaagcccagatagcaccattgcaactccagcctgggagacagagtgagactccgtctattaaa

SEQ ID NO: 1635 - DNA, 483 bp, Homo sapiens; identical to SEQ ID NO: 1634

SEQ ID NO: 1636 - DNA, 26013 bp, Homo sapiens
tttcacattttaattttctttaaacctttttttatttagagatttttctggtaaggagatataccataggaaagcaatttcactggcagtgaggtatgtatatactctaccaaaatactccttattttaactgtttttaactttatttacatacgaagcaaagaatcaatgcatatccttggttcaactatagtattagccatactacatgaaataaaatggtgcttgcatacaaaaacttgttgtttgtaaaggaatctgatttcagattaaaatacctaattgtttttggaaaaaatttttaaaaagaatcacaatttatcatgaccaagacacctgcaccatattttccattcctcacagcacatttatttcagtaattctgttatgtcggttcttagcatgagcatagtgttacacgattttcgtacatataatcacatccaaaacaagttctaaaatttaaattgtaaacattctcatatgtagaaatattttaattggtgtattaagttttgctaactgatcaaatttggaagataatataaatgagaacgtctattctaaactgtgtagtgagcattgtttattaattacatttctacaatgttaaataaagtaagaggcaaacctgtcctgtaagcatgtcaaattttaggtaaaacattaaaaagaaacaaacctgttaacaaaagaatgtcttgcaataaagaacattagatttttaaaatctattatgatacaaaaatgtaaagggtaaatagcatctttgttgacaaagtaggaggtagcatggatgcaccactttattgtctgagaaatgcaactggagtaaagaatatttccttaccacaaataatttccagaactatgtacatatttcttttagaaatacttgtttaaacaaatctccctccactttttagtataaaaaaaaccgttccatgtgattttaaaaaaaacacttacacatctagatagaatagtactctgccctatttgagtgaacagtctcaaactatgaagtacatgatatttaatgccctaatttgagtaaatttagtcagcggttcttggtattatacaaaacactaaatacatacaaacaaaatataatatcttatttttctatgcaagtcttgtggggaataaacagagccttgattctggtaacactgcaaaaaacataattgtccaataagtctgtctataagtatccatgtgcaacagtttattaatggctgcttacatgtactgctcttttactgagtgaacacagttaaccaacaaaacttcataaaccttaaaaacacatcttccaccctatataaaatatatagactacttactgttttaagtattcaatttgctctgatgtcactgtaattcactttccccccattttcctgctttagtatttataaacagataatttaatgtggcttaaaaaaaaagaatttcaaatttacatccaattcaaactggctatttaaaaggtttcctggttctatgaagctgcttcggccattagtagagaaaatgaagtttctgtaatggaggcaggctttttaagtagtgacgtgacttccaccatgccagctccagtccgtggaagattagcgtttacaatatgtcgttgtaagtgcttaatccagtcttcctgaacagacaagggtcctcgaaagactaggccacaaaacctacagaaagataacaattctcttaacatgaccaattctctttctttaaaactaattcacacaaaatcctaaaacataaggaataaactttatcatattttaaagacagcaattgataaagtttctaaagtcaaatgatttaataaaacatcaaaactcccaattcatatgtttattaacagctataataaactccagtaatctttgtataggtgggagcattattattttaaaattaacatctacacatcttaattcacttgaaacaacaactattactccaaaatatgtcattctttagaaaagacccttccccagtttagcattccttaaatggcattgtgtctatgtttcttcatgtgtgttgtgtgtgagtgtgagtacggaagaaggcgtgactatgaggggagagaaaatgtgttcccaataagcgagaactcaagacaacaaaacatcaaaccaaacaaaattaaaccatacaaaccaaataaacacaaggaaagccagtttttttttcttttttctgagacagagtcttgctctgtcgctcaggctggagtgcagtggcacgatctcggcccactgcaacctctgcctcctgggctcaagcaattctcctgcctcagcctcccaagtagctgggattacaggcacccgctacaaagcctggctaattttggtatttttagtagacacgaggtttcatcatgttggccaggctgctcttgaactcctggcctcaagtgatccacccatcttggccacccaaagtgctggaattacaggcatgagccaccacacctggccaagctactttaataaatcacagtataatagatttacattactattggctaatgtaaaaaacttgattcattagttgttgaagtacggatattgtgagctgaattaagattttaagcctatctccaaaagttcatttataacttgattgttgagaatgcactctgccacaaattaaaaatcccaaatgaaatagctaatatgtttcaaagcaaagtatgaagaaactgatcagatttggcaatataggcatatacctgcatcggagaatgtaaacctcgtcagcaccatgaggtaatgttagcattttcttcttgcttccagatcttgaccttgatttcttttgcttacaatctaaggctaaaaaggggaagagaaagacttaacattccttatatatttcaaaatatacatacacacatatttttctagagaggtcagacagaccatctaaatcagttagaaaaagtccgcattcatttccctattccctgaagcatgcattcaacttgctgattctgtaatagcagtaatattatctgtactgtacagcggtattatctgtactgaagaatactatctgtattcttcctatactgccttttcaaataatgctttaccacaccaaactagaactgagaaaatgtaactaaataacttgaaagtactaaattggtcaattattacaataatggtaatctttacttttataatcatacataattttaatatctggtttaatcttatttccagaaaagtagaaccttttatttgagatcattaaattaagtttgcatttgattactgctccattaagtaggtcttctatacttggaaaacttcgtaagggaatatggataatgtaattaaaagctcaaggaaaaatcaattttcatagtgattcaccatgaattttataataaatagctcttaaaattgtatgctggccctacatttgaaaggacaaaaaaagctcaactttcatttttgaacttaatttgtattgcatatacaataatcaattatgcaatcatataagttttattttactagaaaataaatataaatccatattatctcacgtaagtttacaattggatctgatgtttaatgctaactattctttacatatttttcattttacattttctccaactgcttattttaaaatgtgatttgaaaaggtaaaaaaaaaaattaaaatagaccaaaattttatgtgaactgttcttgaaatttttccattaattgacttttcctttatttattctaaaacaacctgattttaaaaagaaaaaaaggtattttttataggtagcaatagatagcacataacattttataggtctttgaatacagctacaccatttctttggacaaagggatgatagcaatccagggtgctgctggtcaattagcaggaagagaaggtaagaatttatctgtagggatccaaggggggagggatacaaatgtaacagaagagttacccaaatggcttttcttccattatcctgccatgtgaaaaattccctggaaaaattctaagtaagagagaaggaactggctgttcaatgactctgtgaaacgaattgttcaaagtccagattccaaaagaatagatgctactattacaaaaccagtaaacatagttccttagtcaaatggcaatgataacagaaatgtcatatagaaaattcaaaaccacaagaaacctaaatctcattgaagccactggtttcagcttcctgtcacctgcctattcaaaagtaaaatctaggacacagtctttttctgtttatccttagaagaagagtctaataagtaaagaactactagaagtcaagttaggtattaaagaatgggtaattcaaagctaaacaaccaaactctggaatagaaaaatcttataaggatcttattagttatctcagtcaagagcctcgcatgtagtaggaactcaacaaatacttctggagtaaaaataaagcaaaactcagtaatttaaccattgatatttagacagcctatgaatgaaaatgttttactcctatttaatacaggtaatattcctgtacaacattgtgcatcatttgtttaaatatgttgctgcagtcacacatacttcattatcctagatataaatcactgaccagccagcttatgtacagaaactaggttattcacaacaactacaagagtgaaataccttatgctttgtacccagtaggaaaaacctttttcctaatcgctttggtgagcaatctgaatttaagtgggttatgagtgattcatacactagaaatagagttcagggaactcaaagagtaagtgctactagatgtcagctattctttccatctgtaaagatggatccttgtctgtgttaggcagaatagagcaggcatttggtgtatcataagattacaggtagaatcttactttgatgagcttgctggttgtcaaaattgccacactgtattcaaactccttttaaaatgcaaataaattactgtaggatacaaatagaatacattataacaacccttaaaaatttgttcacagaatgttaatgttaggggtgtaaagcaaattgaggaagaagggcaggaggatggtagggaaatatgcaaaagaacattttatcagttacaaaagcatttaaatttacatgttgttaatattttaaaaatggaactggaaatgtttattctaaaatacagaaatatttttggctttttctttaatagggaaaaaagaattattttatggcttttgatgctttatggactgtggaaactcttaagtttaggctgttttatgaatgatcagatctaaacttgaaatgagaatgccatcatttttgtagcaatgagtatttgaaggtattataaccttggaaagcaggacaactctgccagcttatgactgatcaatcatctctagaacccagggctccaaagttaaggttacagaatctcatgcactgagaatccctagaaacttattcacaaagttaaaatattaaaaatctgggaactttggaaattgaaatctaaatgcctcagtgttttaatatcttcatcaattctagatttattatctcctgaaatgttatatttttgagcaggtgaaacatgaacatattttacaatagtttttctaatgccaatatccaaacccactcctgtgatactgcccatacctttgggaaaatctgtttaaaattgagtatttaacatattaaaactgcacaaaaaggggacatctatataggatcctctacataaaaggatgatttacacagaaaatttcaataaatgaaaaggatgaggtagaaacatgtctgttataccaatattctcacttaagagattttattatatctagagggaaaagtagttttgttctggactgtaccaggagccactagaacattaaatacagatcactaacacattcagttttaatataatgcagctcatcagtatctgtgataaacagccaaagctttaacagagttgtttatatgaataatctgccaaatagataactgttacacaaagcctttttttgtaataggattttatttgcacttgttagtgaccaaaaaactccaaggaacttaaaaacaaaaaacccacacactcttttctctttacaaagtattttaaatctaacattgtttctatactttaaatatattaaaaaattatttttagaaagtattaattttcttctcaagcataagcttctatagaaagaaacaaatccagtcatccaaaccttcctaagattactattcggtgggcagaaactgtttaagtgatcaatttcaaccaaaagactgttatctttcaagttacctgatttataaaagatctaaattgctactgagaatattttactcatacggagaataaattgagctgtaaggtcaaatgcaaaaaaaaaaaatagaatatacctttcagtaagatatttgtcttggtcaaatacaaatatgaaagagaaatacaataaactcatgagtcctcaaaaagaacaccacactgctatgctatgaatacgacgaccaatgaccatgacgacaacaacatgccaaagcactaaaccagattggtgcaaagcaaataaatagataacacaacacataaaaattcaagtctgttttctgagccattatttagttttatacaaagaagattaagaatttacttttgactttgacattaaaatcttttgctctttccacctttctgcccattttatacaataattgcttcaatgagtttcattttctttttccttcacgatataaatgacccaagagaatgagatttcataaaaacatctggaacttctttgataaagcacaccataactaaattaacattcgccaccgaagtatttttatttgtaatcattctcacctgcccaataacttaaaagtcttgtttaatccatttcttttctaattggttgctggtatctctaggacaaagtgaaacaactggggtatctatacccaaagtaagaggcacagtatacccctacgagagggaagaaaatttcttctctaagtggttggcctgtgttaagtttggtggacaatattagctatgagctcattcagaactacagtaggaataaacatgacacgaacaggtaaatcatcattctatcactattaaaaagttggtgctggaggtcgtgctggcagtggtgaggtgggaagaggatgcacacatgccaaaggatacacaagtgtaagaaaaataaactcaactcttttttttaaacctttattttaacttcaggggtacacgtgcaggtttgttatataggtaaattgtcacgggagttggtgtacagactatttcatcacccaggcaataagcacagtacctgataggtagttttttttattatctccctcctcctaccctccacccttaaggtaggccccagtctgttgctcccttctttgtgtccatgtgttctcgttgtttagcccctacttataagtgaaaacattcagtattggttttctgttcctgtgttagtaataaattcaattataactgttgtcactaatccttcaaggttcataagccccaagcatataaaaagactgcaaatataattttctttcctttggcctcaaatgaaaaagaatcagggcctttttttagaaaacaacaacaacaacaaaaacatgctagcttgtgtaaaacaggaatggggtagagaaagccaattgctgagaagccaaagtttcatttattcagcttttatctttctttctgtacaaagtgcctaggagaccagcttcatgggtgtccaacttacacagtcacatagggagagccccacactcagtttaatgctctactgttgcagccttgaaactattaatttttgaacgaggtctaccacataactcattttgcattggactttgcaaatagcagccctgggacctgagtatctactatcataaatgagaaaggctgcattcagttccacccctcaatctctcggcccattcaaaaaaggaaaaaaaaaggctgagaaaaattgttaaatccccactctacacagtattaaaattgaaaaggactcccctactcctatcaacatcagttctttgctcctagctataccacttcattattcccaagatgagtagtttacattataaaaagcaatgtttcccttacagtcaggcatgaagtataaagatacacatttggtcacctcaaaagtatttattttcatcaacattttcccttgatattttcactctaaaattgggtaattttttagtaccctaaataactttcattaatttttagagtttccactcccaatgactgaaaaaaagataagtaactcaatcacacagcaatcagtggcaaagttaactagttcctgcttgttttaataatttacctggaagaggatgaaatgcaaaatacctggaaagcagatttcctttgctttaagaattaggtttgtggttttacaattattagtccacaaggactggttgcttgagtttgtcctacaaagtaggaagttaaattaagtatagtcaacagccttatagttcagagaaagagttaaaggaaatggaagtagccttttatttaaacttgaatggattcagttaaagaaaaagtacaatttgtagaagactccactatttcaaagtagaggggatgattactaaagggtattttgagcaagtattctctatgtaaataaagggaaaagctggacataaatatgatacttcatcacacatttttataaacaggaattagaggcaggctagttttatcagcttacccaaagctaaaaaagctaacaatatcacaactacaagtggcttactggtcagctgagttgataggatagcaaacgtattacttctttgtggtgacaggtaagaaaataacatttaaaaatttcttttcaagtaagttggacttgtatgccgttttattaagcaaaataggcattagccatcaacatcaaccacttttgtaagacacatctgaaattagaataaacattaaagtacataatgacaatctgctttaagtcacttttgttgagaattacaaacaaaataatcacagtccctgccctctaaaatctccgtatttctgatatatcatttcagatgtagtaacaataattaaattgttcttgatcataaaattagctaagaaaaccaccaaactttaaaatttcctttaaattattttcaatacaatcatatttaccttaaattagataggactcacaacaatatattagtaaatctaaatggcacaaatccatggtcgcaatggatctgatttggctttttatagttctcaagagccttacacgtgtaattccagccaaaattcaaactataaccaaacatggtattgatcagatattttctgttttagccaacttccagctaagctacaattaaatacataaaccttggataacaagaattaacctcattcttcaaaccctaggcataccaaaaaaaaaagtaaattctacttttctacttttttctacttctgcagtaagtgaggaactacctaccaataagccatccttttgccctaacctccaatagagaaagtctgagtgttattttattatttccgtaaagtcaattaaaacattacctaaaatttagctctggccaaccacatgccttgttatattataagggctaattctatcttaatccagattacaaaccgcattcaagaaattcatgttagagagaaggaaagcagctcagcagtcagctatgcacagtatgcaagatttaccaggcccagaaagactggagtaggggacttcagtcacttgactctcatgccccccactggggggagggcaattgtttaaactaggcattcattatgttcctgacctgatgcctcacccattatttttatgttcctgaaatctgtgatacaaagaacaatgtatagccaatcgatagcttacgttatcttaatgtaaattcttggtaaataaacatagaaaccgctttttttcttaaaaattcacttgtaactgctgctaatcacagtgtatatccagggcaacttgaacctatgctcccaggtggccatcctcaagctttgggcttgaataaactctatacctaatgatattttctgaatctcattatttaaggcttagagaataaaaatcatagcaaacacaaacattataactgaagatataattagatatatttaagattcccaaacatatattaaaaaaaaaaaagcaaaacccagaaacttagtaaataattaaaccaatagtaatgctaggaaactagataagacttgcatgaaaaacaagatgtcagtcaaaatagatcaccttccttatgaaaccaatgagcagcaaaaaacaagcatcataaaatttaagtattttatgctacaatggtgtaactcttaggctatattctcctaaaaacaaacttactgattcaacaagtgtggttatttgcttttgagaaataaaaataaaattctaagttctacagcagactgaatggacaccctcctctttgccaaggtgaccccagagaaaccttaaaaattgagttcccagccatgatgggacaggaggtaaagcaagtctcgttaggtcccctccctcactaaccaccataaaactttccttcctaagagttaaaaagaaaccaaccctttcaaaagacttgctccccactgatatcaaccaattgcctaactcagaagccagactccactctgtttttgtggttttgaactgaccagcattccttactgataagagatcaccaactggttctagctggtccatgaaggctgcacataggatgcctatgaactctgtttcaccttttgacatgtaaaccttaattttactatgattaaatgttaggtctccaactcaaagtgaacatgggatgtatgtaacatggagtgtgcacactaagcttgtgtgcaccccctcatgaatattcatagctcctcctataatctgttgaatatgtatacttagccaacccattcaacataacttcctgtctcacccttcctcctttgaagggcttgcttttggtctctgtctgaggatacacttccaagcctgcaggcttcaagcttcctaagaaataaagctctcttttccaaatttgtagatctcctgcttttaaggtgatactttgttatagtggatagctggatgttgaagtgttgctagtaaatgacagagaagtaatgaagcctgcccttctaccagacagcatggtagcagattgattaactgtactggtataaccatcctcctcccactcagatttaaaatcttgagtcatctcttaactctaatctaccatatcctgcttattttatttccataatattacccatacatctagtacccctcctttacattcttaatgtcactgacctggtacaggactcttaaaatgatctaccctgcaatttttcctcctctctgccaaatcctttatttaaaaagcaatttcaaaagcattacacaaattctgcattcaaatagttccccactacaaagttaattccaacatcttagactagcgttctatgtcatctatctgactcactttaccagtccaactcaattcccttacctcctacttcctagtatttcctataaacttcccacattgttccaccttgctccctctttcaggcatttctcttccccaccccgacccccatttccatttcagttagctatacatcagggtccattcaaatgctaattccaaaagccttgggagttcctagtctagctgaaagtgtcttcctctttctctgaaattccacagtatttcacgcatacctctccaatggcacttaacaatttgtcttgtattacagttatgcatatatgtgcttctactgtattgtaagatccaatgtatctctgcatacttagcacagttggaggtgaaaaaagtgcttgttgaattagtgaaaaaatcagccgatcatttttttgtatggtggagaaatagcctaattcttgctggaataataaaacaattagtagagtatctataagggttacccaaaatactcgattaaattatatccaagctactcaaggcaaaaataagaacaacattttggagcaataaccaccaaaatggttaggaaaaatcaagttattaacagttaaaggactattcttcagtcacctagagaatttactcaactcagataattcgttaccttgctaatcacttataaatgatacgttactgtgcagataaatgtatacacatatatgctcttaatgaagaacaatactatagaaataagttatagctaagaaatataaagacccatcttttctctgtctcatgaaaggctttttaaaatataagtttaaccataccattcccttatttttcttctctctctctctgccctccctctcttcctccctccttcacttccttctttccttccttccttccttctttggagatggagtcttgctctgttgcccaggctggagtgcaacagcatgatctcagctcactgcaatctccacctctcaggtttaagcgattctcctgcctcagcctcctgagtagctgggattacaggcgcccaccaccacgcctggctactttttcgtattttttagtagagacggagtttcaccatgttggccaggctggtctcaaactcctgacctcaggtgatccgcctgcctcggcctcccaaagtgcttgggattacaggtgttagccacggcacctggcctattttccttttgtatttatttatgagacggagtctcactctgtcgcccaggctggagtgcagtggcgcaatcttggctcactgcaacctgcacctcccaggttcaagcaattctcctgcctcagcctcctgagtagctcagattacaggcgcgcaccaccacactgggctgattttttttttttttttttgaggagttttgctcttgttgcccaggctggaatgcaatggcacaatctcggctcactgcaacctccagcttctgggttcatgcaatcctcctgcctcagcctcctgaatagctgggattacaggcgcataccaccacgcctggctagttctttgtatttttttttagtagaggcagggtttcaccatgttgaccatgatggtctcacgctcctgacctcaggtgatgtgcctgcctcagcctcccaaagtaatgggattacaagtgtgagccaccacgcccggcctccttatttttaaaacatcctttaatgacttcctaattttttttaccaagcattcaaagcaccaaccccacctttctggcactacaattttaccaaacatctgtaaccaaatcttctgacacttgaactccaagttccactcctgacacttgaagtccaaatttcatccctttgtgtccacactatgttcttctctgcctgaaatattctacacttcatctcgtcttcctaaaactctactgcatccttcaacttcagggtctggctgaaaccatataaacccttctgtaatggcatacttgatcttttcccactgggttatattatgtttatgcagctggagtgcagtatctttactggctcagcgatgaacagtcttggtacaagaactcaaacttttgttgaatgaataaaattttgtatggctgctggttttgttgttctcttgcatttaaaaagtcacaagaagcataccagcatgaactacttttatttatttattttttctgttttttacaagctctaattcaatgagacaaacagtaagggcatcagaaaaaaaaggaatctcaattcccagctgccctcaaaaggaggcttagactaaaataatcaacctgaactcctacaacacttaaagccaatatgccatttagttgtatactatcttgcatagttttcaatttttgatagttttatgtatgttgtcaacaatcctttcctaatttctctgacagcagagacatgtctcatacttttcacataccctcctcagcccagtctggaagaattgtcaaggagtttgctttaagcagaagcaagtttgctcatttggagtttaatcttaataagaagatcaaaattttctacttacactctttcagtctgaatgaaccactatgaaaacatgcaatttttcaaacatgcaatactatattatttttaaaagacactacagtgacactcatgaatgaacaaataatttaatgcacattgggaagctttcacaatactattttttctatcacatcagaaagtgctcccatagcactttccacaacataagaatgacttttctagtggcttacaaacccattcagcacttgatactgtgctatatgttcattagtacttgttacagtcctgtgtggccaattatatcattaaagctgaaaacaggcaaaagaaacctactacgattacacttaaaagtaaatggtatgaaaaataaaacactgacttgattttttaaaaacgttaatatattgcactagtggtattgacctcatcagaaaagtcaaataattatgatggataagtcatttgttgtagaatagcaacaattgggctttacttccaaaacgtatcaagaaagtgttctgggctgggtgcagtggctcacgcctgtaatcccagcactttgggaagcccaggcgggtggatcacctaaagtcaggagttcgagaccagcctgaccaacatggagaaaccccatctctactaaaaatacaaaattagccgggcgtgatggcgtgtgcctgtaatcccagctactcaggaggctgagccaggagaatcacttgaacctgggaggcagaggttgcagtgagccgagactgcaccattgcactccagcctgggcaactagagtgaaactccgtctcacacacacacacacaaaattgttctgaagataatgaaatgaagcccctcccaaatataaaaatatttttcttgcattaattttaaatgagtaactagaaatttccaattactttaagtcccagaggttagcatttgatttacaaaagtgatctagagagaaaaatgtggatagaatgagtatagaaaattcacctgctgccacagaagagttatgacatctaagatactactaccattggtcagtaccaacccctaagagaaagaggcagttagggcagtgtcttcaatctatgatagtgacttcttaagtgggtagcaaatcaatttactggctcatgaccagcattaatttttcacaacaaagaatataataaaaaagaaaatattaaagtacatttaggtgagtacacaaggaattgtgtgtttgtattaatgtaagtttgtacatgtggtcaagatataaaataaagtctcaattaaaatgctgactgctaccatcattgtttcttctttacaaaagataacaacatgctatctaccatagaaaagcattgtggcattcatctgacagatctacttcctttaacaacattctctctactctgtatttccctttccctacctgttgaaattcactcttattttgacctcaaaatatattttttttcctgattgcagattaggttgatagaatatgctttaccttaattttaaatgctttagcaattttaataaccaggatgattaatttatcattcaatccaggacacttatgagagtaaaagaggcactagtacttaggtgtgacaacaaggtaaaccagtatgtatagtcactccattaataacttaatagaactatgttcttaatatggctagcataaaaatacatcatttaattaaaacattaggcacaaaaaaagctaatcagtaaaataaaaagtccagaagtaattaatataagctacattataaaatttcaatatttaatgaaaactatataatgttctcattaaactgtatggaaaattaaccagaaaaaaatctgtatgagcatgtaaaacattaaagagaacaaaatctcaaaaaaaaaaaaaacccctaccattactgcattccataaataactagaataaactcttgaataagaagtctgccttaaatttacaatataggatataaaataaaccctttgattctagtctattttgataaagattgatcggggaaaggaagtaaaacagcttcataaattatctacaagtgaagacacagaaaaattattaaacaatttatttgaacctacccaacagaagataaactgggacagttctgggcaaaactttaatctgtgaaattattcttttatgacaatttaactctcccaagtctgcccacctcttccaaatcttcaattctaaatctttcctatttcccccatcggttccttttacaaatattagggaagataatgaccccacaattagttttgctattatgcaattcttgcattttaagcatcttctgctcttaaaaaaaaaagaacttcttaaggcttctgattcctagttctgtttctactttccttttattctggcatctctcctttctcaatttgccatcagacaaattgatgatagccttcaggagatacgcaaagtctatacacacaaaaatttttatctgagaacaaataagtgcatgtttctgggatggggcccacagctttcatgaaattctcaaagatgtcggtgaccccagtaaagattgagaaccatcacattagaagtatttaagttaccagtaaacaggtattttgggaagaagagggatatccttttcagtgtattcaggatacttgaagagattataagttagaagaaatatttttcttccctcaaaaggtcaccagttcccacagaaaagaccaggagctgtggcttctaagaaggcttgaaagtttattctatcacaggtaaccaaaagcaggcctttaccatttagtctgagggtatctaagctttgtattcaagagtggaccacacaacttaaaatctacatgaattaagactgcttaaactagaaatacacatactggacatggttagggaggctttattcctatctactttccctttacattgttccaattttgtgatatactaaggtaagattttataaaaatgaatttgcattttattcattaaaagatcatgtgttcttgaaaaatgatgcctgttactcatatgaattaatgaatcacttataataaccaagtggaaccttctagggccataggtttttaggaacactgctttataacagtgatattgatatgggggataatcagtatgtggagtttgtaaatacaatacagaattctctatctggaaaacagaaaagttaataaagcttgaaaaaaaacttcttagttggcatgaataagcagcaaagacatctgtatagctctactgatcaagaagattttttttaatgagggaaaaaatgtttcagaatttccaagaaaaagaagcattagtttttaaagtttctcaaaagtggctactgggtgtggaaaataagaccctaggctttcttcagtttctcattttccttttctttgcctaggactgccaaacacacgctttctatttcctagtacttctaatattttggtagtacttaatcatatttttaaaataacaccctcttttattcttcaggacctaaacatattcccagtcatcctacattacttttctctctgataatgaagattttttagataatcttcataagtgcattcttggtaaatggagatttactaccagttatttataagtaattaatcctgtgttttgcagaattttcagatgaagtaaaagcatttttttaatggactaataaaatctggactggagatatcttgccttattggatatttgcataatctgcttgaataatcagaatggaacattaactcctctaaagtctaatttaggcctaagcacttcttggatctctgctctttttaattagactcttatttattcagtcttcaccagaatagtccccattttaaacccaccttcaggctgggtgcggtggctctcggctgtaatcccagcactttgggaggctaaggcgggcagactgcctgaggtcaggagttcgagaccagcctgtccaacatggtaaaaccccatctctactaaaaatacaaaaaaatttgccaggcatgatggcatgagtctgtaatcccagctactcgggaggctgaggcaggggaattgcttgaaccagggaggtggaggttgcagtgagccgagatcgcgccactgcactccaatctgggtgacagagcgagactccgtctcaaaataaataaataaataaatgaacaaacccaccttcattttagaattttccattgcttatttttatttcaatttcttattttaaaaataagaaattcaaaaatagaccgcctgtgtaaggtagagaatagtgattaaaaacaaagattaggtaagatagccctgatttgaattacaaccttgctacttattaactgtgtaagtttgagcaaattaagttctttaagtcctagtttcctataaaacgttaagagaattccagtacctacaacttgtatggctgttgtaaagattaaatgttatgcatgtaaattgcatagcatagtgcctgacacatagtaaatgttcaataaaagttagcaagtatggtaacaataatgatttcctacttgtatagtctcttatttttattgttccccacctctaatgtctgcaatcacttgccaagcctgataaaggtgagggtatataaaaattataatctcagagtaggaggcctaatccagtagactaaaactcaccccactcctctctttttaatataaattgtcaacattcatccctggtcatttgtatatcaagttaaggaagaatgcaaagaagcagaagaaagacactagtataaatataagtggttttttgaaagcaagaacatattggatctaagttctaggacatgaggaagaacaaaaaagctgggaaaacaactagaagaaagcaggaggcagtgatctaaaaaagagcaagagaaataaaatgattggaaagaattttaggcaaaagaatttatgtagatctatgtcaaaaagagggtatattttaagatgtgagggaaatgagatttgctgaagcagggtagcttaaaagactacaaatgaaagtgcaaagcattttgtaggttataagaagcgtattacatataagtaagctaataaaattttcacagatgagcagtattaagaggtatctgcaaggttgggctaaccaaccaaaaataacacagaaatgtgcatgttaacacttatgtgcatagctaaatttattaatccttaatatatttaagaagtattaaaagaaaaatctattcgcttgtcaacacaagccattattaaggctcaccccttcaaagatctaatctatagactaatgaaaattcattagtttgcttagtttcctaatcaagtctacattttgaaatttccctataatttccttttctaataaaggatttccccaagctagaactacaatatttttatgctatgttgcccaggctggagtgcagtgactattcacaggcacaatcatagcacattatagccgctaactcttgagctcaagtgatcctcctgccagcctcatgagtagctgggactataggggcacaccactgagcccgactagaactataaagagaggtgttttactggaatctaaaatcaatttaaaaatcaaaaatagtattctaaaaaataaatgggattaaggtagactcaaagttccacacctcttgggttaattttttttcccccaaattaagtcaataagagccaaaagaaaaagattaacttgcttagaattacatctaacagtttacaagttgctgaaattcaatgggtattcagactcaaatgcagcttaccaaagaaagctataaatatgatctgaattaacaccagtctggtggggaaaaaaaaagtgtattgtatcaaacagacttgctgtgatatctgttcaaacatacctgtaccagtcaaaagtccagcactcttctttcgtgcataagcgcgtaagtggttggacaggctaacagcacttgtaaacgtcgtattgcaatgcacacatgttctaagcttcacaggcatacctatcattcaaaagaaaactataatccagttctcacttcaaaaagtgaaattttcttagcttaaagagtgtagaaaagcaccacaataaagatggttttcaaaacgttcaatgaaataggttaacttaaaataaggaggggaaattaagttaactgttattagtttgtagttagtatttagagtcaactcatgctctttggaaaggtagacgaggagtgacttgaacctttgagctcctctggatatacacctattattactttcttgcagatttctgtgttacgcagattatttcttaaacctactacaatacaatcctgtgatttgaacaacacggttctgttgagaagtttcaaagcttacaacattaccaataaaaagaattaaaaagtctagttgacaaagtggtaattaaagtgttttacccacaaaaccgtaaaagtctcaatactaaattaggctttctgatgaaggctgggagaaaaggtggtaaaacacaccactgaacagctgttagacacaacattttatttagggtattttatgttcattactctgaatgcgcaatcaataatgaaagttaatgatttaaagttttttgctaaaatctttgtgctaaataaatgatcaacaagctaacatcttagtcatcacaggaaaaacatgttcaaacaataagaaactcctaacttctcagacaatcctcactcccccaacacatttcaactggtttcttcagcattactgtgatagccacaaatatgctttccatctctgaagtatactaccccttggtcaacacagctaacacatcttccctgcgttttacccttctgaaaaaatattgaaagctattgactttcagagactctttattcgaaagaaaaagccggattaaacagaagctcatacaagataaactgctttccagaccacttacaatacaaagttatctttccttaaatcaaaactgcattacaactattcgggatatcacaatgtctgccccaaagcaaataaacaacattactttacagtaatgttagtcgttattaatccattaactattacctctgacacattcaacttagagctctaatcatgagaccatttacataaaccttcaacattaaccttcaaaaagaaatctagaaaaaacacttaaaatttttctagtctaaaagtataaaccacacttggcaatactgaataaagtttggctactttatctgccacattatttgccaatacatacaaaatattcctttcaaaaggaaaaaactattggtgcaccagcactaagctaaatcatctgtcctgttccattagagcactatcttaaaacctaaaaccccaaacaaatatgttttatgttcacaactgttctccaaaaccaaactattccgcaatacaatgaggaattggagagggagatgtttctttgggttaatcacaacagacaccaatccattcagctttaagagtctgttttgttttacctaagcagtggaaaaaccaacagctaaatcttgaaaacatgatcaccttggagaactggcaaaaatatgacagaggtatgccttttcaataatgctatgcttttgaacatcaacctcccatccacaaccatcctccagccagagcaagttttatttttacagatcagctttttgtttgttgtttttattgtgtgtgtgtgtggttttcttctgcttttgttctcaccttacattcagaccaagaaaagaggcacagagaactcagtgctaatgagcatcaattgatgagttatacagaaatgacagtagaataaccaatctgtgctctgtaaaaaaaaaaagcagcttaaacaggaagattgtgagaaagtattttccacatagattccattaaagaaggcataattgaactgcatttaaactgtgtatagcatagtcataaacgtcctcttacctgagtgcatagtcaagtccattttttgtggctgatacatcaacggactatcctcatttaatggaagaacgcatttctgaacgaatctctttcttgctgtctgattatggatcttttgaggagaaatagcagaattcctttcttctcccatccttttatttttaagaagttctatgagtgtaagagactgattctttttcccactgggcagttctggttttgtttcatcatattcatttaagaaattcagcccttcttcttctgatgcagacactgacagagcttcagtctttaggccattacggtatgcttcaagaggtataacattttgagatataaagtcatcacttgatgcaagtttttgagctacaaatggtctgggaataatacgacgactgttcaatgcctttaagattttttcatatttttcttcattttgcatcatctcattcagaacacagattggagatttgtgagcatcccatttcgtctttccaagtcttttcaagtggcctctaacatgatttgataatccaattttagtatcaaaccaaccaccacagagctgacaagtgtgttcagaagtggtttcagacttctctatagctagaaaaaaatttttaagagtaatatcagactttcttatataaactgaccaccctaaaatgagttaattctgaaacataaaattatgattctaataaagactaaattcaaaaaaaacttttaaatcttcagaattagaacacagacctatcagcccaaatcatccccatggagaacttaccttttctaactcgtttaacaggtgttcctgtgccagttcttttgaaatgctgcattttgtcacttgtggctatttgttctggtgatacaacatgacgggcttcatagcttaatcctgctctgtgaagatgccccctgacatgatttgataacccaacacctgtttcaaatgttgctgggcagtaaggacacgatttcttctcaagagacaaatcagtccaatgaaaaacagaactatgctttgacaatgaagcatctgcagtttctaaatgctgaggatcatgtatctcatgcaaaaagttgttacttccagtatcttcatagtattcaaaataaaagccatcgttttggtcataactaagagtagcattttctccaggctcctgaccttccactttgctcttaaataaagggaataaatttacatgctcttgattaatatcactataggtttcatcttctatggcctgtgtagtgtagtctcctaactcaacattatcccaggaactttcatcttctgtttcataactatctttcttttcagcagaattaagtttttgcaaaacgacaacagtcattttatgcaaaaaatctggatagctatccaagtcttcccctccaacagaactttccttcttagattccttaattactctctttacagctacacgtctgtgatctttgaagctttcaggccttttggcgtcaggcttatgagggtctgaaataaaattgttgtgagaattacttgatgatgaaaacaggtgtaaagaatttaatgaactagcttcttcttttttgaaatgcacaggatatgattcacctgattttttgatcatcctatagttttcatatttgtgtctatacaaatagtggctatttgccttggcattagacttttcttttgctgcttgatggaaatacttaggtttttggtcaacgctgcttttaattgtaacattcttatgaggagagctgttttgattgcacatgtttacacctgattgggcaatgcttttccgagctttctgtattctgtgtggccgcttatgaatttttgaaaaactacttgattgtgaggttgatccaaatgttcgcttcacatcttgttttaaagcagagttctttggaaatgtggttgactgttgtttagttaatgttttagtgctatcactatctacaggttcttcaaggatgtcattttttcttttatcaagtccaagaggactaccaaatgaatcaacacatgatgatgaatgcaagtactccgtgtgcttttttaaaacacttttggctgaagtagtaaaaggacacatcttacatatgtaggtagctgattttttggatgatcctactacagagtctttcatgaaagtctttttttgtgtttttctctgggcaatatcagaagtgaccatagggcattttaccactgccccatgtgcaatgcctcgatggcattccaattcattttctgtcactgccatgaagttacactcttcacagcagtagtaccttttatctttttcatgggttttagcatgttgcacaaatgttttagggcaattggtaccaaacacacactgaggacactgtaatcgtgcacttcttccttcatcctgaagttctttcaattcacgaatttcctccatcaacttctgtcttctctcctggtgaataatcatatgttttagaagtgaattgcgatctcgaaatgtccgtccacattctctacaagcatatggccttgggacattaagatggcgaaagtgactattcccatctaaatgatacatcatatgcctgtggaggtgcttcttctccctaaaattcacattgcactttgtacaggggtagaatgatggctcttcggtactgaaagtagcaggtgactcagaatcactctcttcacatttcttttttaaggtatttgaaagaaaagtgctagtatgaacaggtgaactctcttctccacacttatctgggttataaattagatgttggaaggcatccacagattctaagtcttcatcagttgattcaggcttcacttttgataatgcatatttctgtgagtctactgcttgtagctcttcattttgttctagaaagtctacttcttgcatttttgatttattgggtacacaattagaatcactaaagcaatcctcggtataacgagttatcttgcttacatccatttttcgctttctttttttttctagacctattttagaatgaggtggagctttatctactgtttcctcattagtcataagaaattgaatgaactctttttggggatcccagtttgtatcattttctgacctaaatccatctgtacctgaggaaattcccgttactgtattgacacaatcatctttcaccaataaatcttcaccatcctcacccacctctacttgatttattaaagtgccatctgactttatattactccctactgaattctgaatgtcacaaccaactgaagcagaggtaggtagttttttattggaatgggtgggattcttagcatgtgctacatctgataacaaaaataaaacttggtgttgacttgctttctgtggtgtagacagctgaagatcagctgctaccttcaaagttgaacaagattctgttgttggctgatccacaggctgtccagtggttaatgaaacactgcctttattcatattggaagtcttagttaaggaggagtgtgaaactggtccattaacagcagctcctttaggcaagataaagttttcactagaaacagtaggagcaccagcatgtataaatagactagactggcctccacttaaggcgttttcagatttgtcctttgacagttcttcaggcagagtcaacgtattatttttctgaaatgatgtttgacaatcttttggcttatgaactccgctctctttgtctgagataaaattgttgtcatctaggagttcttctttagcaccagtaatatcggtgtttatcttcaaatcatccatattgttggcaagcccatttaacaca

SEQ ID NO: 1637 - DNA, 26018 bp, Homo sapiens
tctagactaaatgtgttaaatgggcttgccaacaatatggatgatttgaagataaacaccgatattactggtgctaaagaagaactcctagatgacaacaattttatctcagacaaagagagcggagttcataagccaaaagattgtcaaacatcatttcagaaaaataatacgttgactctgcctgaagaactgtcaaaggacaaatctgaaaacgccttaagtggaggccagtctagtctatttatacatgctggtgctcctactgtttctagtgaaaactttatcttgcctaaaggagctgctgttaatggaccagtttcacactcctccttaactaagacttccaatatgaataaaggcagtgtttcattaaccactggacagcctgtggatcagccaacaacagaatcttgttcaactttgaaggtagcagctgatcttcagctgtctacaccacagaaagcaagtcaacaccaagttttatttttgttatcagatgtagcacatgctaagaatcccacccattccaataaaaaactacctacctctgcttcagttggttgtgacattcagaattcagtagggagtaatataaagtcagatggcactttaataaatcaagtagaggtgggtgaggatggtgaagatttattggtgaaagatgattgtgtcaatacagtaacgggaatttcctcaggtacagatggatttaggtcagaaaatgatacaaactgggatccccaaaaagagttcattcaatttcttatgactaatgaggaaacagtagataaagctccacctcattctaaaataggtctagaaaaaaaaagaaagcgaaaaatggatgtaagcaagataactcgttataccgaggattgctttagtgattctaattgtgtacccaataaatcaaaaatgcaagaagtagactttctagaacaaaatgaagagctacaagcagtagactcacagaaatatgcattatcaaaagtgaagcctgaatcaactgatgaagacttagaatctgtggatgccttccaacatctaatttataacccagataagtgtggagaagagagttcacctgttcatactagcacttttctttcaaataccttaaaaaagaaatgtgaagagagtgattctgagtcacctgctactttcagtaccgaagagccatcattctacccctgtacaaagtgcaatgtgaattttagggagaagaagcacctccacaggcatatgatgtatcatttagatgggaatagtcactttcgccatcttaatgtcccaaggccatatgcttgtagagaatgtggacggacatttcgagatcgcaattcacttctaaaacatatgattattcaccaggagagaagacagaagttgatggaggaaattcgtgaattgaaagaacttcaggatgaaggaagaagtgcacgattacagtgtcctcagtgtgtgtttggtaccaattgccctaaaacatttgtgcaacatgctaaaacccatgaaaaagataaaaggtactactgctgtgaagagtgtaacttcatggcagtgacagaaaatgaattggaatgccatcgaggcattgcacatggggcagtggtaaaatgccctatggtcacttctgatattgcccagagaaaaacacaaaaaaagactttcatgaaagactctgtagtaggatcatccaaaaaatcagctacctacatatgtaagatgtgtccttttactacttcagccaaaagtgttttaaaaaagcacacggagtacttgcattcatcatcatgtgttgattcatttggtagtcctcttggacttgataaaagaaaaaatgacatccttgaagaacctgtagatagtgatagcactaaaacattaactaaacaacagtcaaccacatttccaaagaactctgctttaaaacaagatgtgaagcgaacatttggatcaacctcacaatcaagtagtttttcaaaaattcataagcggccacacagaatacagaaagctcggaaaagcattgcccaatcaggtgtaaacatgtgcaatcaaaacagctctcctcataagaatgttacaattaaaagcagcgttgaccaaaaacctaagtatttccatcaagcagcaaaagaaaagtctaatgccaaggcaaatagccactatttgtatagacacaaatatgaaaactataggatgatcaaaaaatcaggtgaatcatatcctgtgcatttcaaaaaagaagaagctagttcattaaattctttacacctgttttcatcatcaagtaattctcacaacaattttatttcagaccctcataagcctgacgccaaaaggcctgaaagcttcaaagatcacagacgtgtagctgtaaagagagtaattaaggaatctaagaaggaaagttctgttggaggggaagacttggatagctatccagattttttgcataaaatgactgttgtcgttttgcaaaaacttaattctgctgaaaagaaagatagttatgaaacagaagatgaaagttcctgggataatgttgagttaggagactacactacacaggccatagaagatgaaacctatagtgatattaatcaagagcatgtaaatttattccctttatttaagagcaaagtggaaggtcaggagcctggagaaaatgctactcttagttatgaccaaaacgatggcttttattttgaatactatgaagatactggaagtaacaactttttgcatgagatacatgatcctcagcatttagaaactgcagatgcttcattgtcaaagcatagttctgtttttcattggactgatttgtctcttgagaagaaatcgtgtccttactgcccagcaacatttgaaacaggtgttgggttatcaaatcatgtcagggggcatcttcacagagcaggattaagctatgaagcccgtcatgttgtatcaccagaacaaatagccacaagtgacaaaatgcagcatttcaaaagaactggcacaggaacacctgttaaacgagttagaaaaggtaagttctccatggggatgatttgggctgataggtctgtgttctaattctgaagatttaaaagttttttttgaatttagtctttattagaatcataattttatgtttcagaattaactcattttagggtggtcagtttatataagaaagtctgatattactcttaaaaatttttttctagctatagagaagtctgaaaccacttctgaacacacttgtcagctctgtggtggttggtttgatactaaaattggattatcaaatcatgttagaggccacttgaaaagacttggaaagacgaaatgggatgctcacaaatctccaatctgtgttctgaatgagatgatgcaaaatgaagaaaaatatgaaaaaatcttaaaggcattgaacagtcgtcgtattattcccagaccatttgtagctcaaaaacttgcatcaagtgatgactttatatctcaaaatgttatacctcttgaagcataccgtaatggcctaaagactgaagctctgtcagtgtctgcatcagaagaagaagggctgaatttcttaaatgaatatgatgaaacaaaaccagaactgcccagtgggaaaaagaatcagtctcttacactcatagaacttcttaaaaataaaaggatgggagaagaaaggaattctgctatttctcctcaaaagatccataatcagacagcaagaaagagattcgttcagaaatgcgttcttccattaaatgaggatagtccgttgatgtatcagccacaaaaaatggacttgactatgcactcaggtaagaggacgtttatgactatgctatacacagtttaaatgcagttcaattatgccttctttaatggaatctatgtggaaaatactttctcacaatcttcctgtttaagctgctttttttttttacagagcacagattggttattctactgtcatttctgtataactcatcaattgatgctcattagcactgagttctctgtgcctcttttcttggtctgaatgtaaggtgagaacaaaagcagaagaaaaccacacacacacacaataaaaacaacaaacaaaaagctgatctgtaaaaataaaacttgctctggctggaggatggttgtggatgggaggttgatgttcaaaagcatagcattattgaaaaggcatacctctgtcatatttttgccagttctccaaggtgatcatgttttcaagatttagctgttggtttttccactgcttaggtaaaacaaaacagactcttaaagctgaatggattggtgtctgttgtgattaacccaaagaaacatctccctctccaattcctcattgtattgcggaatagtttggttttggagaacagttgtgaacataaaacatatttgtttggggttttaggttttaagatagtgctctaatggaacaggacagatgatttagcttagtgctggtgcaccaatagttttttccttttgaaaggaatattttgtatgtattggcaaataatgtggcagataaagtagccaaactttattcagtattgccaagtgtggtttatacttttagactagaaaaattttaagtgttttttctagatttctttttgaaggttaatgttgaaggtttatgtaaatggtctcatgattagagctctaagttgaatgtgtcagaggtaatagttaatggattaataacgactaacattactgtaaagtaatgttgtttatttgctttggggcagacattgtgatatcccaaatagttgtaatgcagttttgatttaaggaaagataactttgtattgtaagtggtctggaaagcagtttatcttgtatgagcttctgtttaatccggctttttctttcgaataaagagtctctgaaagtcaatagctttcaatattttttcagaagggtaaaacgcagggaagatgtgttagctgtgttgaccaaggggtagtatacttcagagatggaaagcatatttgtggctatcacagtaatgctgaagaaaccagttgaaatgtgttgggggagtgaggattgtctgagaagttaggagtttcttattgtttgaacatgtttttcctgtgatgactaagatgttagcttgttgatcatttatttagcacaaagattttagcaaaaaactttaaatcattaactttcattattgattgcgcattcagagtaatgaacataaaataccctaaataaaatgttgtgtctaacagctgttcagtggtgtgttttaccaccttttctcccagccttcatcagaaagcctaatttagtattgagacttttacggttttgtgggtaaaacactttaattaccactttgtcaactagactttttaattctttttattggtaatgttgtaagctttgaaacttctcaacagaaccgtgttgttcaaatcacaggattgtattgtagtaggtttaagaaataatctgcgtaacacagaaatctgcaagaaagtaataataggtgtatatccagaggagctcaaaggttcaagtcactcctcgtctacctttccaaagagcatgagttgactctaaatactaactacaaactaataacagttaacttaatttcccctccttattttaagttaacctatttcattgaacgttttgaaaaccatctttattgtggtgcttttctacactctttaagctaagaaaatttcactttttgaagtgagaactggattatagttttcttttgaatgataggtatgcctgtgaagcttagaacatgtgtgcattgcaatacgacgtttacaagtgctgttagcctgtccaaccacttacgcgcttatgcacgaaagaagagtgctggacttttgactggtacaggtatgtttgaacagatatcacagcaagtctgtttgatacaatacactttttttttccccaccagactggtgttaattcagatcatatttatagctttctttggtaagctgcatttgagtctgaatacccattgaatttcagcaacttgtaaactgttagatgtaattctaagcaagttaatctttttcttttggctcttattgacttaatttgggggaaaaaaaattaacccaagaggtgtggaactttgagtctaccttaatcccatttattttttagaatactatttttgatttttaaattgattttagattccagtaaaacacctctctttatagttctagtcgggctcagtggtgtgcccctatagtcccagctactcatgaggctggcaggaggatcacttgagctcaagagttagcggctataatgtgctatgattgtgcctgtgaatagtcactgcactccagcctgggcaacatagcataaaaatattgtagttctagcttggggaaatcctttattagaaaaggaaattatagggaaatttcaaaatgtagacttgattaggaaactaagcaaactaatgaattttcattagtctatagattagatctttgaaggggtgagccttaataatggcttgtgttgacaagcgaatagatttttcttttaatacttcttaaatatattaaggattaataaatttagctatgcacataagtgttaacatgcacatttctgtgttatttttggttggttagcccaaccttgcagatacctcttaatactgctcatctgtgaaaattttattagcttacttatatgtaatacgcttcttataacctacaaaatgctttgcactttcatttgtagtcttttaagctaccctgcttcagcaaatctcatttccctcacatcttaaaatataccctctttttgacatagatctacataaattcttttgcctaaaattctttccaatcattttatttctcttgctcttttttagatcactgcctcctgctttcttctagttgttttcccagcttttttgttcttcctcatgtcctagaacttagatccaatatgttcttgctttcaaaaaaccacttatatttatactagtgtctttcttctgcttctttgcattcttccttaacttgatatacaaatgaccagggatgaatgttgacaatttatattaaaaagagaggagtggggtgagttttagtctactggattaggcctcctactctgagattataatttttatataccctcacctttatcaggcttggcaagtgattgcagacattagaggtggggaacaataaaaataagagactatacaagtaggaaatcattattgttaccatacttgctaacttttattgaacatttactatgtgtcaggcactatgctatgcaatttacatgcataacatttaatctttacaacagccatacaagttgtaggtactggaattctcttaacgttttataggaaactaggacttaaagaacttaatttgctcaaacttacacagttaataagtagcaaggttgtaattcaaatcagggctatcttacctaatctttgtttttaatcactattctctaccttacacaggcggtctatttttgaatttcttatttttaaaataagaaattgaaataaaaataagcaatggaaaattctaaaatgaaggtgggtttgtttatttatttatttattttgagacggagtctcgctctgtcacccagattggagtgcagtggcgcgatctcggctcactgcaacctccacctccctggttcaagcaattcccctgcctcagcctcccgagtagctgggattacagactcatgccatcatgcctggcaaatttttttgtatttttagtagagatggggttttaccatgttggacaggctggtctcgaactcctgacctcaggcagtctgcccgccttagcctcccaaagtgctgggattacagccgagagccaccgcacccagcctgaaggtgggtttaaaatggggactattctggtgaagactgaataaataagagtctaattaaaaagagcagagatccaagaagtgcttaggcctaaattagactttagaggagttaatgttccattctgattattcaagcagattatgcaaatatccaataaggcaagatatctccagtccagattttattagtccattaaaaaaatgcttttacttcatctgaaaattctgcaaaacacaggattaattacttataaataactggtagtaaatctccatttaccaagaatgcacttatgaagattatctaaaaaatcttcattatcagagagaaaagtaatgtaggatgactgggaatatgtttaggtcctgaagaataaaagagggtgttattttaaaaatatgattaagtactaccaaaatattagaagtactaggaaatagaaagcgtgtgtttggcagtcctaggcaaagaaaaggaaaatgagaaactgaagaaagcctagggtcttattttccacacccagtagccacttttgagaaactttaaaaactaatgcttctttttcttggaaattctgaaacattttttccctcattaaaaaaaatcttcttgatcagtagagctatacagatgtctttgctgcttattcatgccaactaagaagttttttttcaagctttattaacttttctgttttccagatagagaattctgtattgtatttacaaactccacatactgattatcccccatatcaatatcactgttataaagcagtgttcctaaaaacctatggccctagaaggttccacttggttattataagtgattcattaattcatatgagtaacaggcatcatttttcaagaacacatgatcttttaatgaataaaatgcaaattcatttttataaaatcttaccttagtatatcacaaaattggaacaatgtaaagggaaagtagataggaataaagcctccctaaccatgtccagtatgtgtatttctagtttaagcagtcttaattcatgtagattttaagttgtgtggtccactcttgaatacaaagcttagataccctcagactaaatggtaaaggcctgcttttggttacctgtgatagaataaactttcaagccttcttagaagccacagctcctggtcttttctgtgggaactggtgaccttttgagggaagaaaaatatttcttctaacttataatctcttcaagtatcctgaatacactgaaaaggatatccctcttcttcccaaaatacctgtttactggtaacttaaatacttctaatgtgatggttctcaatctttactggggtcaccgacatctttgagaatttcatgaaagctgtgggccccatcccagaaacatgcacttatttgttctcagataaaaatttttgtgtgtatagactttgcgtatctcctgaaggctatcatcaatttgtctgatggcaaattgagaaaggagagatgccagaataaaaggaaagtagaaacagaactaggaatcagaagccttaagaagttcttttttttttaagagcagaagatgcttaaaatgcaagaattgcataatagcaaaactaattgtggggtcattatcttccctaatatttgtaaaaggaaccgatgggggaaataggaaagatttagaattgaagatttggaagaggtgggcagacttgggagagttaaattgtcataaaagaataatttcacagattaaagttttgcccagaactgtcccagtttatcttctgttgggtaggttcaaataaattgtttaataatttttctgtgtcttcacttgtagataatttatgaagctgttttacttcctttccccgatcaatctttatcaaaatagactagaatcaaagggtttattttatatcctatattgtaaatttaaggcagacttcttattcaagagtttattctagttatttatggaatgcagtaatggtaggggtttttttttttttgagattttgttctctttaatgttttacatgctcatacagatttttttctggttaattttccatacagtttaatgagaacattatatagttttcattaaatattgaaattttataatgtagcttatattaattacttctggactttttattttactgattagctttttttgtgcctaatgttttaattaaatgatgtatttttatgctagccatattaagaacatagttctattaagttattaatggagtgactatacatactggtttaccttgttgtcacacctaagtactagtgcctcttttactctcataagtgtcctggattgaatgataaattaatcatcctggttattaaaattgctaaagcatttaaaattaaggtaaagcatattctatcaacctaatctgcaatcaggaaaaaaaatatattttgaggtcaaaataagagtgaatttcaacaggtagggaaagggaaatacagagtagagagaatgttgttaaaggaagtagatctgtcagatgaatgccacaatgcttttctatggtagatagcatgttgttatcttttgtaaagaagaaacaatgatggtagcagtcagcattttaattgagactttattttatatcttgaccacatgtacaaacttacattaatacaaacacacaattccttgtgtactcacctaaatgtactttaatattttcttttttattatattctttgttgtgaaaaattaatgctggtcatgagccagtaaattgatttgctacccacttaagaagtcactatcatagattgaagacactgccctaactgcctctttctcttaggggttggtactgaccaatggtagtagtatcttagatgtcataactcttctgtggcagcaggtgaattttctatactcattctatccacatttttctctctagatcacttttgtaaatcaaatgctaacctctgggacttaaagtaattggaaatttctagttactcatttaaaattaatgcaagaaaaatatttttatatttgggaggggcttcatttcattatcttcagaacaattttgtgtgtgtgtgtgtgagacggagtttcactctagttgcccaggctggagtgcaatggtgcagtctcggctcactgcaacctctgcctcccaggttcaagtgattctcctggctcagcctcctgagtagctgggattacaggcacacgccatcacgcccggctaattttgtatttttagtagagatggggtttctccatgttggtcaggctggtctcgaactcctgactttaggtgatccacccgcctgggcttcccaaagtgctgggattacaggcgtgagccactgcacccagcccagaacactttcttgatacgttttggaagtaaagcccaattgttgctattctacaacaaatgacttatccatcataattatttgacttttctgatgaggtcaataccactagtgcaatatattaacgtttttaaaaaatcaagtcagtgttttatttttcataccatctacttttaagtgtaatcgtagtaggtttcttttgcctgttttcagctttaatgatataattggccacacaggactgtaacaagtactaatgaacatatagcacagtatcaagtgctgaatgggtttgtaagccactagaaaagtcattcttatgttgtggaaagtgctatgggagcactttctgatgtgatagaaaaaatagtattgtgaaagcttcccaatgtgcattaaattatttgttcattcatgagtgtcactgtagtgtcttttaaaaataatatagtattgcatgtttgaaaaattgcatgttttcatagtggttcattcagactgaaagagtgtaagtagaaaattttgatcttcttattaagattaaactccaaatgagcaaacttgcttctgcttaaagcaaactccttgacaattcttccagactgggctgaggagggtatgtgaaaagtatgagacatgtctctgctgtcagagaaattaggaaaggattgttgacaacatacataaaactatcaaaaattgaaaactatgcaagatagtatacaactaaatggcatattggctttaagtgttgtaggagttcaggttgattattttagtctaagcctccttttgagggcagctgggaattgagattccttttttttctgatgcccttactgtttgtctcattgaattagagcttgtaaaaaacagaaaaaataaataaataaaagtagttcatgctggtatgcttcttgtgactttttaaatgcaagagaacaacaaaaccagcagccatacaaaattttattcattcaacaaaagtttgagttcttgtaccaagactgttcatcgctgagccagtaaagatactgcactccagctgcataaacataatataacccagtgggaaaagatcaagtatgccattacagaagggtttatatggtttcagccagaccctgaagttgaaggatgcagtagagttttaggaagacgagatgaagtgtagaatatttcaggcagagaagaacatagtgtggacacaaagggatgaaatttggacttcaagtgtcaggagtggaacttggagttcaagtgtcagaagatttggttacagatgtttggtaaaattgtagtgccagaaaggtggggttggtgctttgaatgcttggtaaaaaaaattaggaagtcattaaaggatgttttaaaaataaggaggccgggcgtggtggctcacacttgtaatcccattactttgggaggctgaggcaggcacatcacctgaggtcaggagcgtgagaccatcatggtcaacatggtgaaaccctgcctctactaaaaaaaaatacaaagaactagccaggcgtggtggtatgcgcctgtaatcccagctattcaggaggctgaggcaggaggattgcatgaacccagaagctggaggttgcagtgagccgagattgtgccattgcattccagcctgggcaacaagagcaaaactcctcaaaaaaaaaaaaaaaaatcagcccagtgtggtggtgcgcgcctgtaatctgagctactcaggaggctgaggcaggagaattgcttgaacctgggaggtgcaggttgcagtgagccaagattgcgccactgcactccagcctgggcgacagagtgagactccgtctcataaataaatacaaaaggaaaataggccaggtgccgtggctaacacctgtaatcccaagcactttgggaggccgaggcaggcggatcacctgaggtcaggagtttgagaccagcctggccaacatggtgaaactccgtctctactaaaaaatacgaaaaagtagccaggcgtggtggtgggcgcctgtaatcccagctactcaggaggctgaggcaggagaatcgcttaaacctgagaggtggagattgcagtgagctgagatcatgctgttgcactccagcctgggcaacagagcaagactccatctccaaagaaggaaggaaggaaggaaagaaggaagtgaaggagggaggaagagagggagggcagagagagagagaagaaaaataagggaatggtatggttaaacttatattttaaaaagcctttcatgagacagagaaaagatgggtctttatatttcttagctataacttatttctatagtattgttcttcattaagagcatatatgtgtatacatttatctgcacagtaacgtatcatttataagtgattagcaaggtaacgaattatctgagttgagtaaattctctaggtgactgaagaatagtcctttaactgttaataacttgatttttcctaaccattttggtggttattgctccaaaatgttgttcttatttttgccttgagtagcttggatataatttaatcgagtattttgggtaacccttatagatactctactaattgttttattattccagcaagaattaggctatttctccaccatacaaaaaaatgatcggctgattttttcactaattcaacaagcacttttttcacctccaactgtgctaagtatgcagagatacattggatcttacaatacagtagaagcacatatatgcataactgtaatacaagacaaattgttaagtgccattggagaggtatgcgtgaaatactgtggaatttcagagaaagaggaagacactttcagctagactaggaactcccaaggcttttggaattagcatttgaatggaccctgatgtatagctaactgaaatggaaatgggggtcggggtggggaagagaaatgcctgaaagagggagcaaggtggaacaatgtgggaagtttataggaaatactaggaagtaggaggtaagggaattgagttggactggtaaagtgagtcagatagatgacatagaacgctagtctaagatgttggaattaactttgtagtggggaactatttgaatgcagaatttgtgtaatgcttttgaaattgctttttaaataaaggatttggcagagaggaggaaaaattgcagggtagatcattttaagagtcctgtaccaggtcagtgacattaagaatgtaaaggaggggtactagatgtatgggtaatattatggaaataaaataagcaggatatggtagattagagttaagagatgactcaagattttaaatctgagtgggaggaggatggttataccagtacagttaatcaatctgctaccatgctgtctggtagaagggcaggcttcattacttctctgtcatttactagcaacacttcaacatccagctatccactataacaaagtatcaccttaaaagcaggagatctacaaatttggaaaagagagctttatttcttaggaagcttgaagcctgcaggcttggaagtgtatcctcagacagagaccaaaagcaagcccttcaaaggaggaagggtgagacaggaagttatgttgaatgggttggctaagtatacatattcaacagattataggaggagctatgaatattcatgagggggtgcacacaagcttagtgtgcacactccatgttacatacatcccatgttcactttgagttggagacctaacatttaatcatagtaaaattaaggtttacatgtcaaaaggtgaaacagagttcataggcatcctatgtgcagccttcatggaccagctagaaccagttggtgatctcttatcagtaaggaatgctggtcagttcaaaaccacaaaaacagagtggagtctggcttctgagttaggcaattggttgatatcagtggggagcaagtcttttgaaagggttggtttctttttaactcttaggaaggaaagttttatggtggttagtgagggaggggacctaacgagacttgctttacctcctgtcccatcatggctgggaactcaatttttaaggtttctctggggtcaccttggcaaagaggagggtgtccattcagtctgctgtagaacttagaattttatttttatttctcaaaagcaaataaccacacttgttgaatcagtaagtttgtttttaggagaatatagcctaagagttacaccattgtagcataaaatacttaaattttatgatgcttgttttttgctgctcattggtttcataaggaaggtgatctattttgactgacatcttgtttttcatgcaagtcttatctagtttcctagcattactattggtttaattatttactaagtttctgggttttgcttttttttttttaatatatgtttgggaatcttaaatatatctaattatatcttcagttataatgtttgtgtttgctatgatttttattctctaagccttaaataatgagattcagaaaatatcattaggtatagagtttattcaagcccaaagcttgaggatggccacctgggagcataggttcaagttgccctggatatacactgtgattagcagcagttacaagtgaatttttaagaaaaaaagcggtttctatgtttatttaccaagaatttacattaagataacgtaagctatcgattggctatacattgttctttgtatcacagatttcaggaacataaaaataatgggtgaggcatcaggtcaggaacataatgaatgcctagtttaaacaattgccctccccccagtggggggcatgagagtcaagtgactgaagtcccctactccagtctttctgggcctggtaaatcttgcatactgtgcatagctgactgctgagctgctttccttctctctaacatgaatttcttgaatgcggtttgtaatctggattaagatagaattagcccttataatataacaaggcatgtggttggccagagctaaattttaggtaatgttttaattgactttacggaaataataaaataacactcagactttctctattggaggttagggcaaaaggatggcttattggtaggtagttcctcacttactgcagaagtagaaaaaagtagaaaagtagaatttacttttttttttggtatgcctagggtttgaagaatgaggttaattcttgttatccaaggtttatgtatttaattgtagcttagctggaagttggctaaaacagaaaatatctgatcaataccatgtttggttatagtttgaattttggctggaattacacgtgtaaggctcttgagaactataaaaagccaaatcagatccattgcgaccatggatttgtgccatttagatttactaatatattgttgtgagtcctatctaatttaaggtaaatatgattgtattgaaaataatttaaaggaaattttaaagttaggtggttttcttagctaattttatgatcaagaacaatttaattattgttactacatctgaaatgatatatcagaaatacggagattttagagggcagggactgtgattattttgtttgtaattctcaacaaaagtgacttaaagcagattgtcattatgtactttaatgtttattctaatttcagatgtgtcttacaaaagtggttgatgttgatggctaatgcctattttgcttaataaaacggcatacaagtccaacttacttgaaaagaaatttttaaatgttattttcttacctgtcaccacaaagaagtaatacgtttgctatcctatcaactcagctgaccagtaagccacttgtagttgtgatattgttagcttttttagctttgggtaagctgataaaactagcctgcctctaattcctgtttataaaaatgtgtgatgaagtatcatatttatgtccagcttttccctttatttacatagagaatacttgctcaaaataccctttagtaatcatcccctctactttgaaatagtggagtcttctacaaattgtactttttctttaactgaatccattcaagtttaaataaaaggctacttccatttcctttaactctttctctgaactataaggctgttgactatacttaatttaacttcctactttgtaggacaaactcaagcaaccagtccttgtggactaataattgtaaaaccacaaacctaattcttaaagcaaaggaaatctgctttccaggtattttgcatttcatcctcttccaggtaaattattaaaacaagcaggaactagttaactttgccactgattgctgtgtgattgagttacttatctttttttcagtcattgggagtggaaactctaaaaattaatgaaagttatttagggtactaaaaaattacccaattttagagtgaaaatatcaagggaaaatgttgatgaaaataaatacttttgaggtgaccaaatgtgtatctttatacttcatgcctgactgtaagggaaacattgctttttataatgtaaactactcatcttgggaataatgaagtggtatagctaggagcaaagaactgatgttgataggagtaggggagtccttttcaattttaatactgtgtagagtggggatttaacaatttttctcagcctttttttttccttttttgaatgggccgagagattgaggggtggaactgaatgcagcctttctcatttatgatagtagatactcaggtcccagggctgctatttgcaaagtccaatgcaaaatgagttatgtggtagacctcgttcaaaaattaatagttgcaaggctgcaacagtagagcattaaactgagtgtggggctctccctatgtgactgtgtaagttggacacccatgaagctggtctcctaggcactttgtacagaaagaaagataaaagctgaataaatgaaactttggcttctcagcaattggctttctctaccccattcctgttttacacaagctagcatgtttttgttgttgttgttgttttctaaaaaaaggccctgattctttttcatttgaggccaaaggaaagaaaattatatttgcagtctttttatatgcttggggcttatgaaccttgaaggattagtgacaacagttataattgaatttattactaacacaggaacagaaaaccaatactgaatgttttcacttataagtaggggctaaacaacgagaacacatggacacaaagaagggagcaacagactggggcctaccttaagggtggagggtaggaggagggagataataaaaaaaactacctatcaggtactgtgcttattgcctgggtgatgaaatagtctgtacaccaactcccgtgacaatttacctatataacaaacctgcacgtgtacccctgaagttaaaataaaggtttaaaaaaaagagttgagtttatttttcttacacttgtgtatcctttggcatgtgtgcatcctcttcccacctcaccactgccagcacgacctccagcaccaactttttaatagtgatagaatgatgatttacctgttcgtgtcatgtttattcctactgtagttctgaatgagctcatagctaatattgtccaccaaacttaacacaggccaaccacttagagaagaaattttcttccctctcgtaggggtatactgtgcctcttactttgggtatagataccccagttgtttcactttgtcctagagataccagcaaccaattagaaaagaaatggattaaacaagacttttaagttattgggcaggtgagaatgattacaaataaaaatacttcggtggcgaatgttaatttagttatggtgtgctttatcaaagaagttccagatgtttttatgaaatctcattctcttgggtcatttatatcgtgaaggaaaaagaaaatgaaactcattgaagcaattattgtataaaatgggcagaaaggtggaaagagcaaaagattttaatgtcaaagtcaaaagtaaattcttaatcttctttgtataaaactaaataatggctcagaaaacagacttgaatttttatgtgttgtgttatctatttatttgctttgcaccaatctggtttagtgctttggcatgttgttgtcgtcatggtcattggtcgtcgtattcatagcatagcagtgtggtgttctttttgaggactcatgagtttattgtatttctctttcatatttgtatttgaccaagacaaatatcttactgaaaggtatattctattttttttttttgcatttgaccttacagctcaatttattctccgtatgagtaaaatattctcagtagcaatttagatcttttataaatcaggtaacttgaaagataacagtcttttggttgaaattgatcacttaaacagtttctgcccaccgaatagtaatcttaggaaggtttggatgactggatttgtttctttctatagaagcttatgcttgagaagaaaattaatactttctaaaaataattttttaatatatttaaagtatagaaacaatgttagatttaaaatactttgtaaagagaaaagagtgtgtgggttttttgtttttaagttccttggagttttttggtcactaacaagtgcaaataaaatcctattacaaaaaaaggctttgtgtaacagttatctatttggcagattattcatataaacaactctgttaaagctttggctgtttatcacagatactgatgagctgcattatattaaaactgaatgtgttagtgatctgtatttaatgttctagtggctcctggtacagtccagaacaaaactacttttccctctagatataataaaatctcttaagtgagaatattggtataacagacatgtttctacctcatccttttcatttattgaaattttctgtgtaaatcatccttttatgtagaggatcctatatagatgtcccctttttgtgcagttttaatatgttaaatactcaattttaaacagattttcccaaaggtatgggcagtatcacaggagtgggtttggatattggcattagaaaaactattgtaaaatatgttcatgtttcacctgctcaaaaatataacatttcaggagataataaatctagaattgatgaagatattaaaacactgaggcatttagatttcaatttccaaagttcccagatttttaatattttaactttgtgaataagtttctagggattctcagtgcatgagattctgtaaccttaactttggagccctgggttctagagatgattgatcagtcataagctggcagagttgtcctgctttccaaggttataataccttcaaatactcattgctacaaaaatgatggcattctcatttcaagtttagatctgatcattcataaaacagcctaaacttaagagtttccacagtccataaagcatcaaaagccataaaataattcttttttccctattaaagaaaaagccaaaaatatttctgtattttagaataaacatttccagttccatttttaaaatattaacaacatgtaaatttaaatgcttttgtaactgataaaatgttcttttgcatatttccctaccatcctcctgcccttcttcctcaatttgctttacacccctaacattaacattctgtgaacaaatttttaagggttgttataatgtattctatttgtatcctacagtaatttatttgcattttaaaaggagtttgaatacagtgtggcaattttgacaaccagcaagctcatcaaagtaagattctacctgtaatcttatgatacaccaaatgcctgctctattctgcctaacacagacaaggatccatctttacagatggaaagaatagctgacatctagtagcacttactctttgagttccctgaactctatttctagtgtatgaatcactcataacccacttaaattcagattgctcaccaaagcgattaggaaaaaggtttttcctactgggtacaaagcataaggtatttcactcttgtagttgttgtgaataacctagtttctgtacataagctggctggtcagtgatttatatctaggataatgaagtatgtgtgactgcagcaacatatttaaacaaatgatgcacaatgttgtacaggaatattacctgtattaaataggagtaaaacattttcattcataggctgtctaaatatcaatggttaaattactgagttttgctttatttttactccagaagtatttgttgagttcctactacatgcgaggctcttgactgagataactaataagatccttataagatttttctattccagagtttggttgtttagctttgaattacccattctttaatacctaacttgacttctagtagttctttacttattagactcttcttctaaggataaacagaaaaagactgtgtcctagattttacttttgaataggcaggtgacaggaagctgaaaccagtggcttcaatgagatttaggtttcttgtggttttgaattttctatatgacatttctgttatcattgccatttgactaaggaactatgtttactggttttgtaatagtagcatctattcttttggaatctggactttgaacaattcgtttcacagagtcattgaacagccagttccttctctcttacttagaatttttccagggaatttttcacatggcaggataatggaagaaaagccatttgggtaactcttctgttacatttgtatccctccccccttggatccctacagataaattcttaccttctcttcctgctaattgaccagcagcaccctggattgctatcatccctttgtccaaagaaatggtgtagctgtattcaaagacctataaaatgttatgtgctatctattgctacctataaaaaatacctttttttctttttaaaatcaggttgttttagaataaataaaggaaaagtcaattaatggaaaaatttcaagaacagttcacataaaattttggtctattttaatttttttttttaccttttcaaatcacattttaaaataagcagttggagaaaatgtaaaatgaaaaatatgtaaagaatagttagcattaaacatcagatccaattgtaaacttacgtgagataatatggatttatatttattttctagtaaaataaaacttatatgattgcataattgattattgtatatgcaatacaaattaagttcaaaaatgaaagttgagctttttttgtcctttcaaatgtagggccagcatacaattttaagagctatttattataaaattcatggtgaatcactatgaaaattgatttttccttgagcttttaattacattatccatattcccttacgaagttttccaagtatagaagacctacttaatggagcagtaatcaaatgcaaacttaatttaatgatctcaaataaaaggttctacttttctggaaataagattaaaccagatattaaaattatgtatgattataaaagtaaagattaccattattgtaataattgaccaatttagtactttcaagttatttagttacattttctcagttctagtttggtgtggtaaagcattatttgaaaaggcagtataggaagaatacagatagtattcttcagtacagataataccgctgtacagtacagataatattactgctattacagaatcagcaagttgaatgcatgcttcagggaatagggacatgaatgcggactttttctaactgacttagatggtctgtctgacctctctagaaaaatatgtgtgtatgtatattttgaaatatataaggaatgttaagtctttctcttcccctttttagccttagattgtaagcaaaagaaatcaaggtcaagatctggaagcaagaagaaaatgctaacattacctcatggtgctgacgaggtttacattctccgatgcaggtatatgcctatattgccaaatctgatcagtttcttcatactttgctttgaaacatattagctatttcatttgggatttttaatttgtggcagagtgcattctcaacaatcaagttataaatgaacttttggagataggcttaaaatcttaattcagctcacaatatccgtacttcaacaactaatgaatcaagttttttacattagccaatagtaatgtaaatctattatactgtgatttattaaagtagcttggccaggtgtggtggctcatgcctgtaattccagcactttgggtggccaagatgggtggatcacttgaggccaggagttcaagagcagcctggccaacatgatgaaacctcgtgtctactaaaaataccaaaattagccaggctttgtagcgggtgcctgtaatcccagctacttgggaggctgaggcaggagaattgcttgagcccaggaggcagaggttgcagtgggccgagatcgtgccactgcactccagcctgagcgacagagcaagactctgtctcagaaaaaagaaaaaaaaactggctttccttgtgtttatttggtttgtatggtttaattttgtttggtttgatgttttgttgtcttgagttctcgcttattgggaacacattttctctcccctcatagtcacgccttcttccgtactcacactcacacacaacacacatgaagaaacatagacacaatgccatttaaggaatgctaaactggggaagggtcttttctaaagaatgacatattttggagtaatagttgttgtttcaagtgaattaagatgtgtagatgttaattttaaaataataatgctcccacctatacaaagattactggagtttattatagctgttaataaacatatgaattgggagttttgatgttttattaaatcatttgactttagaaactttatcaattgctgtctttaaaatatgataaagtttattccttatgttttaggattttgtgtgaattagttttaaagaaagagaattggtcatgttaagagaattgttatctttctgtaggttttgtggcctagtctttcgaggacccttgtctgttcaggaagactggattaagcacttacaacgacatattgtaaacgctaatcttccacggactggagctggcatggtggaagtcacgtcactacttaaaaagcctgcctccattacagaaacttcattttctctactaatggccgaagcagcttcatagaaccaggaaaccttttaaatagccagtttgaattggatgtaaatttgaaattctttttttttaagccacattaaattatctgtttataaatactaaagcaggaaaatggggggaaagtgaattacagtgacatcagagcaaattgaatacttaaaacagtaagtagtctatatattttatatagggtggaagatgtgtttttaaggtttatgaagttttgttggttaactgtgttcactcagtaaaagagcagtacatgtaagcagccattaataaactgttgcacatggatacttatagacagacttattggacaattatgttttttgcagtgttaccagaatcaaggctctgtttattccccacaagacttgcatagaaaaataagatattatattttgtttgtatgtatttagtgttttgtataataccaagaaccgctgactaaatttactcaaattagggcattaaatatcatgtacttcatagtttgagactgttcactcaaatagggcagagtactattctatctagatgtgtaagtgttttttttaaaatcacatggaacggttttttttatactaaaaagtggagggagatttgtttaaacaagtatttctaaaagaaatatgtacatagttctggaaattatttgtggtaaggaaatattctttactccagttgcatttctcagacaataaagtggtgcatccatgctacctcctactttgtcaacaaagatgctatttaccctttacatttttgtatcataatagattttaaaaatctaatgttctttattgcaagacattcttttgttaacaggtttgtttctttttaatgttttacctaaaatttgacatgcttacaggacaggtttgcctcttactttatttaacattgtagaaatgtaattaataaacaatgctcactacacagtttagaatagacgttctcatttatattatcttccaaatttgatcagttagcaaaacttaatacaccaattaaaatatttctacatatgagaatgtttacaatttaaattttagaacttgttttggatgtgattatatgtacgaaaatcgtgtaacactatgctcatgctaagaaccgacataacagaattactgaaataaatgtgctgtgaggaatggaaaatatggtgcaggtgtcttggtcatgataaattgtgattctttttaaaaattttttccaaaaacaattaggtattttaatctgaaatcagattcctttacaaacaacaagtttttgtatgcaagcaccattttatttcatgtagtatggctaatactatagttgaaccaaggatatgcattgattctttgcttcgtatgtaaataaagttaaaaacagttaaaataaggagtattttggtagagtatatacatacctcactgccagtgaaattgctttcctatggtatatctccttaccagaaaaatctctaaataaaaaaaggtttaaagaaaattaaaatgtgaaa

SEQ ID NO: 1638 - DNA, 26006 bp, Homo sapiens
tgtgttaaatgggcttgccaacaatatggatgatttgaagataaacaccgatattactggtgctaaagaagaactcctagatgacaacaattttatctcagacaaagagagcggagttcataagccaaaagattgtcaaacatcatttcagaaaaataatacgttgactctgcctgaagaactgtcaaaggacaaatctgaaaacgccttaagtggaggccagtctagtctatttatacatgctggtgctcctactgtttctagtgaaaactttatcttgcctaaaggagctgctgttaatggaccagtttcacactcctccttaactaagacttccaatatgaataaaggcagtgtttcattaaccactggacagcctgtggatcagccaacaacagaatcttgttcaactttgaaggtagcagctgatcttcagctgtctacaccacagaaagcaagtcaacaccaagttttatttttgttatcagatgtagcacatgctaagaatcccacccattccaataaaaaactacctacctctgcttcagttggttgtgacattcagaattcagtagggagtaatataaagtcagatggcactttaataaatcaagtagaggtgggtgaggatggtgaagatttattggtgaaagatgattgtgtcaatacagtaacgggaatttcctcaggtacagatggatttaggtcagaaaatgatacaaactgggatccccaaaaagagttcattcaatttcttatgactaatgaggaaacagtagataaagctccacctcattctaaaataggtctagaaaaaaaaagaaagcgaaaaatggatgtaagcaagataactcgttataccgaggattgctttagtgattctaattgtgtacccaataaatcaaaaatgcaagaagtagactttctagaacaaaatgaagagctacaagcagtagactcacagaaatatgcattatcaaaagtgaagcctgaatcaactgatgaagacttagaatctgtggatgccttccaacatctaatttataacccagataagtgtggagaagagagttcacctgttcatactagcacttttctttcaaataccttaaaaaagaaatgtgaagagagtgattctgagtcacctgctactttcagtaccgaagagccatcattctacccctgtacaaagtgcaatgtgaattttagggagaagaagcacctccacaggcatatgatgtatcatttagatgggaatagtcactttcgccatcttaatgtcccaaggccatatgcttgtagagaatgtggacggacatttcgagatcgcaattcacttctaaaacatatgattattcaccaggagagaagacagaagttgatggaggaaattcgtgaattgaaagaacttcaggatgaaggaagaagtgcacgattacagtgtcctcagtgtgtgtttggtaccaattgccctaaaacatttgtgcaacatgctaaaacccatgaaaaagataaaaggtactactgctgtgaagagtgtaacttcatggcagtgacagaaaatgaattggaatgccatcgaggcattgcacatggggcagtggtaaaatgccctatggtcacttctgatattgcccagagaaaaacacaaaaaaagactttcatgaaagactctgtagtaggatcatccaaaaaatcagctacctacatatgtaagatgtgtccttttactacttcagccaaaagtgttttaaaaaagcacacggagtacttgcattcatcatcatgtgttgattcatttggtagtcctcttggacttgataaaagaaaaaatgacatccttgaagaacctgtagatagtgatagcactaaaacattaactaaacaacagtcaaccacatttccaaagaactctgctttaaaacaagatgtgaagcgaacatttggatcaacctcacaatcaagtagtttttcaaaaattcataagcggccacacagaatacagaaagctcggaaaagcattgcccaatcaggtgtaaacatgtgcaatcaaaacagctctcctcataagaatgttacaattaaaagcagcgttgaccaaaaacctaagtatttccatcaagcagcaaaagaaaagtctaatgccaaggcaaatagccactatttgtatagacacaaatatgaaaactataggatgatcaaaaaatcaggtgaatcatatcctgtgcatttcaaaaaagaagaagctagttcattaaattctttacacctgttttcatcatcaagtaattctcacaacaattttatttcagaccctcataagcctgacgccaaaaggcctgaaagcttcaaagatcacagacgtgtagctgtaaagagagtaattaaggaatctaagaaggaaagttctgttggaggggaagacttggatagctatccagattttttgcataaaatgactgttgtcgttttgcaaaaacttaattctgctgaaaagaaagatagttatgaaacagaagatgaaagttcctgggataatgttgagttaggagactacactacacaggccatagaagatgaaacctatagtgatattaatcaagagcatgtaaatttattccctttatttaagagcaaagtggaaggtcaggagcctggagaaaatgctactcttagttatgaccaaaacgatggcttttattttgaatactatgaagatactggaagtaacaactttttgcatgagatacatgatcctcagcatttagaaactgcagatgcttcattgtcaaagcatagttctgtttttcattggactgatttgtctcttgagaagaaatcgtgtccttactgcccagcaacatttgaaacaggtgttgggttatcaaatcatgtcagggggcatcttcacagagcaggattaagctatgaagcccgtcatgttgtatcaccagaacaaatagccacaagtgacaaaatgcagcatttcaaaagaactggcacaggaacacctgttaaacgagttagaaaaggtaagttctccatggggatgatttgggctgataggtctgtgttctaattctgaagatttaaaagttttttttgaatttagtctttattagaatcataattttatgtttcagaattaactcattttagggtggtcagtttatataagaaagtctgatattactcttaaaaatttttttctagctatagagaagtctgaaaccacttctgaacacacttgtcagctctgtggtggttggtttgatactaaaattggattatcaaatcatgttagaggccacttgaaaagacttggaaagacgaaatgggatgctcacaaatctccaatctgtgttctgaatgagatgatgcaaaatgaagaaaaatatgaaaaaatcttaaaggcattgaacagtcgtcgtattattcccagaccatttgtagctcaaaaacttgcatcaagtgatgactttatatctcaaaatgttatacctcttgaagcataccgtaatggcctaaagactgaagctctgtcagtgtctgcatcagaagaagaagggctgaatttcttaaatgaatatgatgaaacaaaaccagaactgcccagtgggaaaaagaatcagtctcttacactcatagaacttcttaaaaataaaaggatgggagaagaaaggaattctgctatttctcctcaaaagatccataatcagacagcaagaaagagattcgttcagaaatgcgttcttccattaaatgaggatagtccgttgatgtatcagccacaaaaaatggacttgactatgcactcaggtaagaggacgtttatgactatgctatacacagtttaaatgcagttcaattatgccttctttaatggaatctatgtggaaaatactttctcacaatcttcctgtttaagctgctttttttttttacagagcacagattggttattctactgtcatttctgtataactcatcaattgatgctcattagcactgagttctctgtgcctcttttcttggtctgaatgtaaggtgagaacaaaagcagaagaaaaccacacacacacacaataaaaacaacaaacaaaaagctgatctgtaaaaataaaacttgctctggctggaggatggttgtggatgggaggttgatgttcaaaagcatagcattattgaaaaggcatacctctgtcatatttttgccagttctccaaggtgatcatgttttcaagatttagctgttggtttttccactgcttaggtaaaacaaaacagactcttaaagctgaatggattggtgtctgttgtgattaacccaaagaaacatctccctctccaattcctcattgtattgcggaatagtttggttttggagaacagttgtgaacataaaacatatttgtttggggttttaggttttaagatagtgctctaatggaacaggacagatgatttagcttagtgctggtgcaccaatagtttttccttttgaaaggaatattttgtatgtattggcaaataatgtggcagataaagtagccaaactttattcagtattgccaagtgtggtttatacttttagactagaaaaattttaagtgttttttctagatttctttttgaaggttaatgttgaaggtttatgtaaatggtctcatgattagagctctaagttgaatgtgtcagaggtaatagttaatggattaataacgactaacattactgtaaagtaatgttgtttatttgctttggggcagacattgtgatatcccaaatagttgtaatgcagttttgatttaaggaaagataactttgtattgtaagtggtctggaaagcagtttatcttgtatgagcttctgtttaatccggctttttctttcgaataaagagtctctgaaagtcaatagctttcaatattttttcagaagggtaaaacgcagggaagatgtgttagctgtgttgaccaaggggtagtatacttcagagatggaaagcatatttgtggctatcacagtaatgctgaagaaaccagttgaaatgtgttgggggagtgaggattgtctgagaagttaggagtttcttattgtttgaacatgtttttcctgtgatgactaagatgttagcttgttgatcatttatttagcacaaagattttagcaaaaaactttaaatcattaactttcattattgattgcgcattcagagtaatgaacataaaataccctaaataaaatgttgtgtctaacagctgttcagtggtgtgttttaccaccttttctcccagccttcatcagaaagcctaatttagtattgagacttttacggttttgtgggtaaaacactttaattaccactttgtcaactagactttttaattctttttattggtaatgttgtaagctttgaaacttctcaacagaaccgtggtgttcaaatcacaggattgtattgtagtaggtttaagaaataatctgcgtaacacagaaatctgcaagaaagtaataataggtgtatatccagaggagctcaaaggttcaagtcactcctcgtctacctttccaaagagcatgagttgactctaaatactaactacaaactaataacagttaacttaatttcccctccttattttaagttaacctatttcattgaacgttttgaaaaccatctttattgtggtgcttttctacactctttaagctaagaaaatttcactttttgaagtgagaactggattatagttttcttttgaatgataggtatgcctgtgaagcttagaacatgtgtgcattgcaatacgacgtttacaagtgctgttagcctgtccaaccacttacgcgcttatgcacgaaagaagagtgctggacttttgactggtacaggtatgtttgaacagatatcacagcaagtctgtttgatacaatacactttttttttccccaccagactggtgttaattcagatcatatttatagctttctttggtaagctgcatttgagtctgaatacccattgaatttcagcaacttgtaaactgttagatgtaattctaagcaagttaatctttttcttttggctcttattgacttaatttgggggaaaaaaaattaacccaagaggtgtggaactttgagtctaccttaatcccatttcttttttagaatactatttttgatttttaaattgattttagattccagtaaaacacctctctttatagttctagtcaggctcagtggtgtgcccctatagtcccagctactcatgaggctggcaggaggatcacttgagctcaagagttagcggctataatgtgctatgattgtgcctgtgaatagtcactgcactccagcctgggcaacatagcataaaaatattgtagttctagcttggggaaatcctttattagaaaaggaaattatagggaaatttcaaaatgtagacttgattaggaaactaagcaaactaatgaattttcattagtctatagattagatctttgaaggggtgagccttaataatggcttgtgttgacaagcgaatagatttttcttttaatacttcttaaatatattaaggattaataaatttagctatgcacataagtgttaacatgcacatttctgtgttatttttggttggttagcccaaccttgcagatacctcttaatactgctcatctgtgaaaattttattagcttacttatatgtaatacgcttcttataacctacaaaatgctttgcactttcatttgtagtcttttaagctaccctgcttcagcaaatctcatttccctcacatcttaaaatataccctctttttgacatagatctacataaattcttttgcctaaaattctttccaatcattttatttctcttgctcttttttagatcactgcctcctgctttcttctagttgttttcccagcttttttgttcttcctcatgtcctagaacttagatccaatatgttcttgctttcaaaaaaccacttatatttatactagtgtctttcttctgcttctttgcattcttccttaacttgatatacaaatgaccagggatgaatgttgacaatttatattaaaaagagaggagtggggtgagttttagtctactggattaggcctcctactctgagattataatttttatataccctcacctttatcaggcttggcaagtgattgcagacattagaggtggggaacaataaaaataagagactatacaagtaggaaatcattattgttaccatacttgctaacttttattgaacatttactatgtgtcaggcactatgctatgcaatttacatgcataacatttaatctttacaacagccatacaagttgtaggtactggaattctcttaacgttttataggaaactaggacttaaagaacttaatttgctcaaacttacacagttaataagtagcaaggttgtaattcaaatcagggctatcttacctaatctttgtttttaatcactattctctaccttacacaggcggtctatttttgaatttcttatttttaaaataagaaattgaaataaaaataagcaatggaaaattcgaaaatgaaggtgggtttgtttatttatttatttattttgagacggagtctcgctctgtcacccagattggagtgcagtggcgcgatctcggctcactgcaacctccacctccctggttcaagcaattcccctgcctcagcctcccgagtagctgggattacagactcacgccatcatgcctggcaaatttttttgtatttttagtagagatggggttttaccatgttggacaggctggtctcgaactcctgacctcaggcagtctgcccgccttagcctcccaaagtgctgggattacagccgtgagccaccgcacccagcctgaaggtgggtttaaaatggggactattctggtgaagactgaataaataagagtctaattaaaaagagcagagatccaagaagtgcttaggcctaaattagactttagaggagttaatgttccattctgattattcaagcagattatgcaaatatccaataaggcaagatatctccagtccagattttattagtccattaaaaaaatgcttttacttcatctgaaaattctgcaaaacacaggattaattacttataaataactggtagtaaatctccatttaccaagaatgcacttatgaagattatctaaaaaatcttcattatcagagagaaaagtaatgtaggatgactgggaatatgtttaggtcctgaagaataaaagagggtgttattttaaaaatatgattaagtactaccaaaatattagaagtactaggaaatagaaagcgtgtgtttggcagtcctaggcaaagaaaaggaaaatgagaaactgaagaaagcctagggtcttattttccacacccagtagccacttttgagaaactttaaaaactaatgcttctttttcttggaaattctgaaacattttttccctcattaaaaaaaatcttcttgatcagtagagctatacagatgtctttgctgcttattcatgccaactaagaagttttttttcaagctttattaacttttctgttttccagatagagaattctgtattgtatttacaaactccacatactgattatcccccatatcaatatcactgttataaagcagtgttcctaaaaacctatggccctagaaggttccacttggttattataagtgattcattaattcatatgagtaacaggcatcatttttcaagaacacatgatcttttaatgaataaaatgcaaattcatttttataaaatcttaccttagtatatcacaaaattggaacaatgtaaagggaaagtagataggaataaagcctccctaaccatgtccagtatgtgtatttctagtttaagcagtcttaattcatgtagattttaagttgtgtggtccactcttgaatacaaagcttagataccctcagactaaatggtaaaggcctgcttttggttacctgtgatagaataaactttcaagccttcttagaagccacagctcctggtcttttctgtgggaactggtgaccttttgagggaagaaaaatatttcttctaacttataatctcttcaagtatcctgaatacactgaaaaggatatccctcttcttcccaaaatacctgtttactggtaacttaaatacttctaatgtgatggttctcaatctttactggggtcaccgacatctttgagaatttcatgaaagctgtgggccccatcccagaaacatgcacttatttgttctcagataaaaatttttgtgtgtatagactttgcgtatctcctgaaggctatcatcaatttgtctgatggcaaattgagaaaggagagatgccagaataaaaggaaagtagaaacagaactaggaatcagaagccttaagaagttcttttttttttaagagcagaagatgcttaaaatgcaagaattgcataatagcaaaactaattgtggggtcattatcttccctaatatttgtaaaaggaaccgatgggggaaataggaaagatttagaattgaagatttggaagaggtgggcagacttgggagagttaaattgtcataaaagaataatttcacagattaaagttttgcccagaactgtcccagtttatcttctgttgggtaggttcaaataaattgtttaataatttttctgtgtcttcacttgtagataatttatgaagctgttttacttcctttccccgatcaatctttatcaaaatagactagaatcaaagggtttattttatatcctatattgtaaatttaaggcagacttcttattcaagagtttattctagttatttatggaatgcagtaatggtaggggttttttttttttgagattttgttctctttaatgttttacatgctcatacagatttttttctggttaattttccatacagtttaatgagaacattatatagttttcattaaatattgaaattttataatgtagcttatattaattacttctggactttttattttactgattagctttttttgtgcctaatgttttaattaaatgatgtatttttatgctagccatattaagaacatagttctattaagttattaatggagtgactatacatactggtttaccttgttgtcacacctaagtactagtgcctcttttactctcataagtgtcctggattgaatgataaattaatcatcctggttattaaaattgctaaagcatttaaaattaaggtaaagcatattctatcaacctaatctgcaatcaggaaaaaaaatatattttgaggtcaaaataagagtgaatttcaacaggtagggaaagggaaatacagagtagagagaatgttgttaaaggaagtagatctgtcagatgaatgccacaatgcttttctatggtagatagcatgttgttatcttttgtaaagaagaaacaatgatggtagcagtcagcattttaattgagactttattttatatcttgaccacatgtacaaacttacattaatacaaacacacaattccttgtgtactcacctaaatgtactttaatattttcttttttattatattctttgttgtgaaaaattaatgctggtcatgagccagtaaattgatttgctacccacttaagaagtcactatcatagattgaagacactgccctaactgcctctttctcttaggggttggtactgaccaatggtagtagtatcttagatgtcataactcttctgtggcagcaggtgaattttctatactcattctatccacatttttctctctagatcacttttgtaaatcaaatgctaacctctgggacttaaagtaattggaaatttctagttactcatttaaaattaatgcaagaaaaatatttttatatttgggaggggcttcatttcattatcttcagaacaattttgtgtgtgtgtgtgtgagacggagtttcactctagttgcccaggctggagtgcaatggtgcagtctcggctcactgcaacctctgcctcccaggttcaagtgattctcctggctcagcctcctgagtagctgggattacaggcacacgccatcacgcccggctaattttgtatttttagtagagatggggtttctccatgttggtcaggctggtctcgaactcctgactttaggtgatccacccgcctgggcttcccaaagtgctgggattacaggcgtgagccactgcacccagcccagaacactttcttgatacgttttggaagtaaagcccaattgttgctattctacaacaaatgacttatccatcataattatttgacttttctgatgaggtcaataccactagtgcaatatattaacgtttttaaaaaatcaagtcagtgttttatttttcataccatctacttttaagtgtaatcgtagtaggtttcttttgcctgttttcagctttaatgatataattggccacacaggactgtaacaagtactaatgaacatatagcacagtatcaagtgctgaatgggtttgtaagccactagaaaagtcattcttatgttgtggaaagtgctatgggagcactttctgatgtgatagaaaaaatagtattgtgaaagcttcccaatgtgcattaaattatttgttcattcatgagtgtcactgtagtgtcttttaaaaataatatagtattgcatgtttgaaaaattgcatgttttcatagtggttcattcagactgaaagagtgtaagtagaaaattttgatcttcttattaagattaaactccaaatgagcaaacttgcttctgcttaaagcaaactccttgacaattcttccagactgggctgaggagggtatgtgaaaagtatgagacatgtctctgctgtcagagaaattaggaaaggattgttgacaacatacataaaactatcaaaaattgaaaactatgcaagatagtatacaactaaatggcatattggctttaagtgttgtaggagttcaggttgattattttagtctaagcctccttttgagggcagctgggaattgagattccttttttttctgatgcccttactgtttgtctcattgaattagagcttgtaaaaaacagaaaaaataaataaataaaagtagttcatgctggtatgcttcttgtgactttttaaatgcaagagaacaacaaaaccagcagccatacaaaattttattcattcaacaaaagtttgagttcttgtaccaagactgttcatcgctgagccagtaaagatactgcactccagctgcataaacataatataacccagtgggaaaagatcaagtatgccattacagaagggtttatatggtttcagccagaccctgaagttgaaggatgcagtagagttttaggaagacgagatgaagtgtagaatatttcaggcagagaagaacatagtgtggacacaaagggatgaaatttggacttcaagtgtcaggagtggaacttggagttcaagtgtcagaagatttggttacagatgtttggtaaaattgtagtgccagaaaggtggggttggtgctttgaatgcttggtaaaaaaaattaggaagtcattaaaggatgttttaaaaataaggaggccgggcgtggtggctcacacttgtaatcccattactttgggaggctgaggcaggcacatcacctgaggtcaggagcgtgagaccatcatggtcaacatggtgaaaccctgcctctactaaaaaaaaatacaaagaactagccaggcgtggtggtatgcgcctgtaatcccagctattcaggaggctgaggcaggaggattgcatgaacccagaagctggaggttgcagtgagccgagattgtgccattgcactccagcctgggcaacaagagcaaaactcctcaaaaaaaaaaaaaaaatcagcccagtgtggtggtgcgcgcctgtaatctgagctactcaggaggctgaggcaggagaattgcttgaacctgggatgtgcaggttgcagtgagccaagattgcgccactgcactccagcctgggcgacagagtgagactccgtctcataaataaatacaaaaggaaaataggccaggtgccgtggctaacacctgtaatcccaagcactttgggaggccgaggcaggcggatcacctgaggtcaggagtttgagaccagcctggccaacatggtgaaactccgtctctactaaaaaatacgaaaaagtagccaggcgtggtggtgggcgcctgtaatcccagctactcaggaggctgaggcaggagaatcgcttaaacctgagaggtggagattgcagtgagctgagatcatgctgttgcactccagcctgggcaacagagcaagactccatctccaaagaaggaaggaaggaaggaaagaaggaagtgaaggagggaggaagagagggagggcagagagagagagaagaaaaataagggaatggtatggttaaacttatattttaaaaagcctttcatgagacagagaaaagatgggtctttatatttcttagctataacttatttctatagtattgttcttcattaagagcatatatgtgtatacatttatctgcacagtaacgtatcatttataagtgattagcaaggtaacgaattatctgagttgagtaaattctctaggtgactgaagaatagtcctttaactgttaataacttgatttttcctaaccattttggtggttattgctccaaaatgttgttcttatttttgccttgagtagcttggatataatttaatcgagtattttgggtaacccttatagatactctactaattgttttattattccagcaagaattaggctatttctccaccatacaaaaaaatgatcggctgattttttcactaattcaacaagcacttttttcacctccaactgtgctaagtatgcagagatacattggatcttacaatacagtagaagcacatatatgcataactgtaatacaagacaaattgttaagtgccattggagaggtatgcgtgaaatactgtggaatttcagagaaagaggaagacactttcagctagactaggaactcccaaggcttttggaattagcatttgaatggaccctgatgtatagctaactgaaatggaaatgggggtcggggtggggaagagaaatgcctgaaagagggagcaaggtggaacaatgtgggaagtttataggaaatactaggaagtaggaggtaagggaattgagttggactggtaaagtgagtcagatagatgacatagaacgctagtctaagatgttggaattaactttgtagtggggaactatttgaatgcagaatttgtgtaatgcttttgaaattgctttttaaataaaggatttggcagagaggaggaaaaattgcagggtagatcattttaagagtcctgtaccaggtcagtgacattaagaatgtaaaggaggggtactagatgtatgggtaatattatggaaataaaataagcaggatatggtagattagagttaagagatgactcaagattttaaatctgagtgggaggaggatggttataccagtacagttaatcaatctgctaccatgctgtctggtagaagggcaggcttcattacttctctgtcatttactagcaacacttcaacatccagctatccactataacaaagtatcaccttaaaagcaggagatctacaaatttggaaaagagagctttatttcttaggaagcttgaagcctgcaggcttggaagtgtatcctcagacagagaccaaaagcaagcccttcaaaggaggaagggtgagacaggaagttatgttgaatgggttggctaagtatacatattcaacagattataggaggagctatgaatattcatgagggggtgcacacaagcttagtgtgcacactccatgttacatacatcccatgttcactttgagttggagacctaacatttaatcatagtaaaattaaggtttacatgtcaaaaggtgaaacagagttcataggcatcctatgtgcagccttcatggaccagctagaaccagttggtgatctcttatcagtaaggaatgctggtcagttcaaaaccacaaaaacagagtggagtctggcttctgagttaggcaattggttgatatcagtggggagcaagtcttttgaaagggttggtttctttttaactcttaggaaggaaagttttatggtggttagtgagggaggggacctaacgagacttgctttacctcctgtcccatcatggctgggaactcaatttttaaggtttctctggggtcaccttggcaaagaggagggtgtccattcagtctgctgtagaacttagaattttatttttatttctcaaaagcaaataaccacacttgttgaatcagtaagtttgtttttaggagaatatagcctaagagttacaccattgtagcataaaatacttaaattttatgatgcttgttttttgctgctcattggtttcataaggaaggtgatctattttgactgacatcttgtttttcatgcaagtcttatctagtttcctagcattactattggtttaattatttactaagtttctgggttttgcttttttttttttaatatatgtttgggaatcttaaatatatctaattatatcttcagttataatgtttgtgtttgctatgatttttattctctaagccttaaataatgagattcagaaaatatcattaggtatagagtttattcaagcccaaagcttgaggatggccacctgggagcataggttcaagttgccctggcatatacactgtgattagcagcagttacaagtgtatttttaagaaaaaaagcggtttctatgtttatttaccaagaatttacattaagataacgtaagctatcgattggctatacattgttctttgtatcacagatttcaggaacataaaaataatcgggtgaggcatcaggtcaggaacataatgaatgcctagtttaaacaattgccctccccgcagtgggggcatgagagtcaagtgactgaagtcccctactccagtctttctgggcctggtaaatcttgcatactgtgcatagctgactgctgagctgctttccttctctctaacatgaatttcttgaatgcggtttgtaatctggattaagatagaattagcccttataatataacaaggcatgtggttggccagagctaaattttaggtaatgttttaattgactttacggaaataataaaataacactcagactttctctattggaggttagggcaaaaggatggcttattggtaggtagttcctcacttactgcagaagtagaaaaaagtagaaaagtagaatttacttttttttttggtatgcctagggtttgaagaatgaggttaattcttgttatccaaggtttatgtatttaattgtagcttagctggaagttggctaaaacagaaaatatctgatcaataccatgtttggttatagtttgaattttggctggaattacacgtgtaaggctcttgagaactataaaaagccaaatcagatccattgcgaccatggatttgtgccatttagatttactaatatattgttgtgagtcctatctaatttaaggtaaatatgattgtattgaaaataatttaaaggaaattttaaagttaggtggttttcttagctaattttatgatcaagaacaatttaattattgttactacatctgaaatgatatatcagaaatacggagattttagagggcagggactgtgattattttgtttgtaattctcaacaaaagtgacttaaagcagattgtcattatgtactttaatgtttattctaatttcagatgtgtcttacaaaagtggttgatgttgatggctaatgcctattttgcttaataaaacggcatacaagtccaacttacttgaaaagaaatttttaaatgttattttcttacctgttaccacaaagaagtaatacgtttgctatcctatcaactcagctgaccagtaagccacttgtagttgtgatattgttagcttttttagctttgggtaagctgataaaactagcctgcctctaattcctgtttataaaaatgtgtgatgaagtatcatatttatgtccagcttttccctttatttacatagagaatacttgctcaaaataccctttagtaatcatcccctctactttgaaatagtggagtcttctacaaattgtactttttctttaactgaatccattcaagtttaaataaaaggctacttccatttcctttaactctttctctgaactataaggctgttgactatacttaatttaacttcctactttgtaggacaaactcaagcaaccagtccttgtggactaataattgtaaaaccacaaacctaattcttaaagcaaaggaaatctgctttccaggtattttgcatttcatcctcttccaggtaaattattaaaacaagcaggaactagttaactttgccactgattgctgtgtgattgagttacttatctttttttcagtcattgggagtggaaactctaaaaattagtgaaagttatttagggtactaaaaaattacccaattttagagtgaaaatatcaagggaaaatgttgatgaaaataaatacttttgaggtgaccaaatgtgtatctttatacttcatgcctgactgtaagggaaacattgctttttataatgtaaactactcatcttgggaataatgaagtggtatagctaggagcaaagaactgatgttgataggagtaggggagtccttttcaattttaatactgtgtagagtggggatttaacaatttttctcagcctttttttttccttttttgaatgggccgagagattgaggggtggaactgaatgcagcctttctcatttatgatagtagatactcaggtcccagggctgctatttgcaaagtccaatgcaaaatgagttatgtggtagacctcgttcaaaaattaatagtttcaaggctgcaacagtagagcattaaactgagtgtggggctctccctatgtgactgtgtaagttggacacccatgaagctggtctcctaggcactttgtacagaaagaaagataaaagctgaataaatgaaactttggcttctcagcaattggctttctctaccccattcctgttttacacaagctagcatgtttttgttgttgttgttgttttctaaaaaaaggccctgattctttttcatttgaggccaaaggaaagaaaattatatttgcagtctttttatatgcttggggcttatgaaccttgaaggattagtgacaacagttataattgaatttattactaacacaggaacagaaaaccaatactgaatgttttcacttataagtaggggctaaacaacgagaacacatggacacaaagaagggagcaacagactggggcctaccttaagggtggagggtaggaggagggagataataaaaaaaactacctatcaggtactgtgcttattgcctgggtgatgaaatagtctgtacaccaactcccgtgacaatttacctatataacaaacctgcacgtgtacccctgaagttaaaataaaggtttaaaaaaaagagttgagtttatttttcttacacttgtgtatcctttggcatgtgtgcatcctcttcccacctcaccactgccagcacgacctccagcaccaactttttaatagtgatagaatgatgatttacctgttcgtgtcatgtttattcctactgtagttctgaatgagctcatagctaatattgtccaccaaacttaacacaggccaaccacttagagaagaaattttcttccctctcgtaggggtatactgtgcctcttactttgggtatagataccccagttgtttcactttgtcctagagataccagcaaccaattagaaaagaaatggattaaacaagacttttaagttattgggcaggtgagaatgattacaaataaaaatacttaggtggcgaatgttaatttagttatggtgtgctttatcaaagaagttccagatgtttttatgaaatctcattctcttgggtcatttatatcgtgaaggaaaaagaaaatgaaactcattgaagcaattattgtataaaatgggcagaaaggtggaaagagcaaaagattttaatgtcaaagtcaaaagtaaattcttaatcttctttgtataaaactaaataatggctcagaaaacagacttgaatttttatgtgttgtgttatctatttatttgctttgcaccaatctggtttagtgctttggcatgttgttgtcgtcatggtcattggtcgtcgtattcatagcatagcagtgtggtgttctttttgaggactcatgagtttattgtatttctctttcatatttgtatttgaccaagacaaatatcttactgaaaggtatattctattttttttttttgcatttgaccttacagctcaatttattctccgtatgagtaaaatattctcagtagcaatttagatcttttataaatcaggtaacttgaaagataacagtcttttggttgaaattgatcacttaaacagtttctgcccaccgaatagtaatcttaggaaggtttggatgactggatttgtttctttctatagaagcttatgcttgagaagaaaattaatactttctaaaaataattttttaatatatttaaagtatagaaacaatgttagatttaaaatactttgtaaagagaaaagagtgtgtgggttttttgtttttaagttccttggagttttttggtcactaacaagtgcaaataaaatcctattacaaaaaaaggctttgtgtaacagttatctatttggcagattattcatataaacaactctgttaaagctttggctgtttatcacagatactgatgagctgcattatattaaaactgaatgtgttagtgatctgtatttaatgttctagtggctcctggtacagtccagaacaaaactacttttccctctagatataataaaatctcttaagtgagaatattggtataacagacatgtttctacctcatccttttcatttattgaaattttctgtgtaaatcatccttttatgtagaggatcctatatagatgtcccctttttgtgcagttttaatatgttaaatactcaattttaaacagattttcccaaaggtatgggcagtatcacaggagtgggtttggatattggcattagaaaaactattgtaaaatatgttcatgtttcacctgctcaaaaatataacatttcaggagataataaatctagaattgatgaagatattaaaacactgaggcatttagatttcaatttccaaagttcccagatttttaatattttaactttgtgaataagtttctagggattctcagtgcatgagattctgtaaccttaactttggagccctgggttctagagatgattgatcagtcataagctggcagagttgtcctgctttccaaggttataataccttcaaatactcattgctacaaaaatgatggcattctcatttcaagtttagatctgatcattcataaaacagcctaaacttaagagtttccacagtccataaagcatcaaaagccataaaataattcttttttccctattaaagaaaaagccaaaaatatttctgtattttagaataaacatttccagttccatttttaaaatattaacaacatgtaaatttaaatgcttttgtaactgataaaatgttcttttgcatatttccctaccatcctcctgcccttcttcctcaatttgctttacacccctaacattaacattctgtgaacaaatttttaagggttgttataatgtattctatttgtatcctacagtaatttatttgcattttaaaaggagtttgaatacagtgtggcaattttgacaaccagcaagctcatcaaagtaagattctacctgtaatcttatgatacaccaaatgcctgctctattctgcctaacacagacaaggatccatctttacagatggaaagaatagctgacatctagtagcacttactctttgagttccctgaactctatttctagtgtatgaatcactcataacccacttaaattcagattgctcaccaaagcgattaggaaaaaggtttttcctactgggtacaaagcataaggtatttcactcttgtagttgttgtgaataacctagtttctgtacataagctggctggtcagtgatttatatctaggataatgaagtatgtgtgactgcagcaacatatttaaacaaatgatgcacaatgttgtacaggaatattacctgtattaaataggagtaaaacattttcattcataggctgtctaaatatcaatggttaaattactgagttttgctttatttttactccagaagtatttgttgagttcctactacatgcgaggctcttgactgagataactaataagatccttataagatttttctattccagagtttggttgtttagctttgaattacccattctttaatacctaacttgacttctagtagttctttacttattagactcttcttctaaggataaacagaaaaagactgtgtcctagattttacttttgaataggcaggtgacaggaagctgaaaccagtggcttcaatgagatttaggtttcttgtggttttgaattttctatatgacatttctgttatcattgccatttgactaaggaactatgtttactggttttgtaatagtagcatctattcttttggaatctggactttgaacaattcgtttcacagagtcattgaacagccagttccttctctcttacttagaatttttccagggaatttttcacatggcaggataatggaagaaaagccatttgggtaactcttctgttacatttgtatccctccccccttggatccctacagataaattcttaccttctcttcctgctaattgaccagcagcaccctggattgctatcatccctttgtccaaagaaatggtgtagctgtattcaaagacctataaaatgttatgtgctatctattgctacctataaaaaatacctttttttctttttaaaatcaggttgttttagaataaataaaggaaaagtcaattaatggaaaaatttcaagaacagttcacataaaattttggtctattttaatttttttttttaccttttcaaatcacattttaaaataagcagttggagaaaatgtaaaatgaaaaatatgtaaagaatagttagcattaaacatcagatccaattgtaaacttacgtgagataatatggatttatatttattttctagtaaaataaaacttatatgattgcataattgattattgtatatgcaatacaaattaagttcaaaaatgaaagttgagctttttttgtcctttcaaatgtagggccagcatacaattttaagagctatttattataaaattcatggtgaatcactatgaaaattgatttttccttgagcttttaattacattatccatattcccttacgaagttttccaagtatagaagacctacttaatggagcagtaatcaaatgcaaacttaatttaatgatctcaaataaaaggttctacttttctggaaataagattaaaccagatattaaaattatgtatgattataaaagtaaagattaccattattgtaataattgaccaatttagtactttcaagttatttagttacattttctcagttctagtttggtgtggtaaagcattatttgaaaaggcagtataggaagaatacagatagtattcttcagtacagataataccgctgtacagtacagataatattactgctattacagaatcagcaagttgaatgcatgcttcagggaatagggaaatgaatgcggactttttctaactgatttagatggtctgtctgacctctctagaaaaatatgtgtgtatgtatattttgaaatatataaggaatgttaagtctttctcttcccctttttagccttagattgtaagcaaaagaaatcaaggtcaagatctggaagcaagaagaaaatgctaacattacctcatggtgctgacgaggtttacattctccgatgcaggtatatgcctatattgccaaatctgatcagtttcttcatactttgctttgaaacatattagctatttcatttgggatttttaatttgtggcagagtgcattctcaacaatcaagttataaatgaacttttggagataggcttaaaatcttaattcagctcacaatatccgtacttcaacaactaatgaatcaagttttttacattagccaatagtaatgtaaatctattatactgtgatttattaaagtagcttggccaggtgtggtggctcatgcctgtaattccagcactttgggtggccaagatgggtggatcacttgaggccaggagttcaagagcagcctggccaacatgatgaaacctcgtgtctactaaaaataccaaaattagccaggctttgtagcgggtgcctgtaatcccagctacttgggaggctgaggcaggagaattgcttgagcccaggaggcagaggttgcagtgggccgagatcgtgccactgcactccagcctgagcgacagagcaagactctgtctcagaaaaaagaaaaaaaaaactggctttccttgtgtttatttggtttgtatggtttaattttgtttggtttgatgttttgttgtcttgagttctcgcttattgggaacacattttctctcccctcatagtcacgccttcttccgtactcacactcacacacaacacacatgaagaaacatagacacaatgccatttaaggaatgctaaactggggaagggtcttttctaaagaatgacatattttggagtaatagttgttgtttcaagtgaattaagatgtgtagatgttaattttaaaataataatgctcccacctatacaaagattactggagtttattatagctgttaataaacatatgaattgggagttttgatgttttattaaatcatttgactttagaaactttatcaattgctgtctttaaaatatgataaagtttattccttatgttttaggattttgtgtgaattagttttaaagaaagagaattggtcatgttaagagaattgttatctttctgtaggttttgtggcctagtctttcgaggacccttgtctgttcaggaagactggattaagcacttacaacgacatattgtaaacgctaatcttccacggactggagctggcatggtggaagtcacgtcactacttaaaaagcctgcctccattacagaaacttcattttctctactaatggccgaagcagcttcatagaaccaggaaaccttttaaatagccagtttgaattggatgtaaatttgaaattctttttttttaagccacattaaattatctgtttataaatactaaagcaggaaaatggggggaaagtgaattacagtgacatcagagcaaattgaatacttaaaacagtaagtagtctatatattttatatagggtggaagatgtgtttttaaggtttatgaagttttgttggttaactgtgttcactcagtaaaagagcagtacatgtaagcagccattaataaactgttgcacatggatacttatagacagacttattggacaattatgttttttgcagtgttaccagaatcaaggctctgtttattccccacaagacttgcatagaaaaataagatattatattttgtttgtatgtatttagtgttttgtataataccaagaaccgctgactaaatttactcaaattagggcattaaatatcatgtacttcatagtttgagactgttcactcaaatagggcagagtactattctatctagatgtgtaagtgttttttttaaaatcacatggaacggttttttttatactaaaaagtggagggagatttgtttaaacaagtatttctaaaagaaatatgtacatagttctggaaattatttgtggtaaggaaatattctttactccagttgcatttctcagacaataaagtggtgcatccatgctacctcctactttgtcaacaaagatgctatttaccctttacatttttgtatcataatagattttaaaaatctaatgttctttattgcaagacattcttttgttaacaggtttgtttctttttaatgttttacctaaaatttgacatgcttacaggacaggtttgcctcttactttatttaacattgtagaaatgtaattaataaacaatgctcactacacagtttagaatagacgttctcatttatattatcttccaaatttgatcagttagcaaaacttaatacaccaattaaaatatttctacatatgagaatgtttacaatttaaattttagaacttgttttggatgtgattatatgtacgaaaatcgtgtaacactatgctcatgctaagaaccgacataacagaattactgaaataaatgtgctgtgaggaatggaaaatatggtgcaggtgtcttggtcatgataaattgtgattctttttaaaaattttttccaaaaacaattaggtattttaatctgaaatcagattcctttacaaacaacaagtttttgtatgcaagcaccattttatttcatgtagtatggctaatactatagttgaaccaaggatatgcattgattctttgcttcgtatgtaaataaagttaaaaacagttaaaataaggagtattttggtagagtatatacatacctcactgccagtgaaattgctttcctatggtatatctccttaccagaaaaatctctaaataaaaaaaggtttaaagaaaattaaaatgtgaaa

SEQ ID NO: 1639 - DNA, 344 bp, Homo sapiens
tttttttttttttgagacggagtcttgctctgtcacccaggctgtagtgcagtggcaccatcttggctcactgcaagctccacctcccaggttcatgccattctcctgcctcagcctccccagcagctgggactagaggcgcacgcagcaacgcctgctaatttttttgtatttttagtagagacggggtttcactgtgttagccaggatggtctcgatctcccgacttcgcgatccgcccgcctcggcctcccaaagtgctgggattacaggcgtgagccactgcgcctggcccagactggaattttttaaagccctaatttagcattagaagcttgcatatc

SEQ ID NO: 1640 - DNA, 174 bp, Homo sapiens
atcccagcactttgggaggccgaggcgggtggattacaagatcaggagattgacaccatcctggctaacatggtgataccccgtctctactaaaaataaaaaaaattagccaggcgtggtggtgggtgcctgtagtcccagctactcgagaggctgaggcaggagaatggcgtg

SEQ ID NO: 1641 - DNA, 122 bp, Homo sapiens
attctcctgcctcagcctctcgagtagctgggactacaggcacccaccaccacgcctggctaattttttttatttttagtagagacggggtatcaccatgttagccaggatggtgtcaatct

SEQ ID NO: 1642 - DNA, 191 bp, Homo sapiens
attctcctgcctcagcctctcgagtagctgggactacaggcacccaccaccacgcctggctaattttttttatttttagtagagacggggtatcaccatgttagccaggatggtgtcaatctcctgaccttgtaatccacccgcctcggcctcccaaagtgctgggattacaggagtgagccaccgcgccc

SEQ ID NO: 1643 - DNA, 344 bp, Homo sapiens
gatatgcaagcttctaatgctaaattagggctttaaaaaattccagtctgggccaggcgcagtggctcacgcctgtaatcccagcactttgggaggccgaggcgggcggatcgcgaagtcgggagatcgagaccatcctggctaacacagtgaaaccccgtctctactaaaaatacaaaaaaattagcaggcgttgctgcgtgcgcctctagtcccagctgctggggaggctgaggcaggagaatggcatgaacctgggaggtggagcttgcagtgagccaagatggtgccactgcactacagcctgggtgacagagcaagactccgtctcaaaaaaaaaaaaa

SEQ ID NO: 1644 - DNA, 14176 bp, Homo sapiens
cagctattcaggaggctgaggtggctagaccacttgagcccgggaggtcaaggctgcagtgagctgtgattgcaccactgcactctagcctgggcagcagagcaagaccctgtctataaaaaaattaaaaagctaccaagaaggtcctctgacacacacttggcattaaattggtggttatttgccctgtcattttcttctcttcaaggattcagtgactttcagcaagagccacccaattccataatctttattttcctgtttgtcccaaacctctacaagtcaatagatcgctttccacctgtatctcatcccagttccccacaagtgaatgacttagtgactggacaggtaccacatgccaggactattaacagtgatgcgggtcttcactccctcctggcgagtgaccaactccacaatccactctcacagcagcttcctatgaccacttgtggcaccaaatgtcttagatcaggttctctaaagcagagcctgagacagggattcagaaccatgtgattgacagtgtgatttatttgggaaacgcctttgagggagggaatgaaacaggatagagaagggagagagcttagcacggatgaaggctcagaaaaagtctagcttggcctgatccaagggtgccagagcagtcatagcaccctggagttttctccgctttaatcaaatgaaccaggtgttggggtgtagagaggaagtgactcctgggtgaggtgagatggctctcatctcctgagggcaattctccagtttctggagaacaagagctgtgagcacttgcagcccaaactcagagcagctggggatgggggtctcagcttggtagaggggactggacagggcaccacagtgtacaacacatatggtcaacaaatatttattgggcatttattgtaagccaggcaagtcagcagaaacggcctgagcagtgcccaagagcactcactcactctccctagcaaacaggctcagaactctctcacacatgtcatcctctttcccactcaaaactcccaccccaaccttcctggaaggcagggctaacaggacctcctgcctgcctgctcacgactgattactttcaatcccagctgcaatgcaaactgaaactcattctgtatatcaccactctacaggagaggtctatttctggggcacccagaagtcagcacacatactgctgggaccaggactcgtaattcgccttggtccaactccttctatgggtttagctgccctcattcctgtgggtaatacaagatcaaacagtccacaactttgcctgtcttctctgctcccctaaggtccctctcccttcgccgtaagatgtgactgaccagtacagtttctcctgaattgacaaactgaactactccttctaccggctaaaccctgacatcagtagaatcaaaccaaaaacaaggtagagtgtttcacagagaagtggtggattgaataaggcagcagaaacacataccatccagcccctgaacctgaattttgccaaaacagagatactttaagtccatttcttttcaaaggggttaatgctcaaagtgggaatagtgactagggtattctagtggttggaataataatttctagaaaaggttcattgctgaggtaccaaaacagacatcatgctaaggaattcttttactgtgcgcttccctgaatagatacgccgtcaaacaaggcagaagctacaaataaagcttacttctactgaactcatgaagctgttcctagtgtcagttttgagtttcaagtgaagactgaatgtcaactgcaggctttccgaattcctcgaccatgtccatccatggattctcttcttgtctagatttccaagcatgaagatgctaactaaagcatttctcaatggggaacacgaaaagatttctattattgtgggttctccggtgttcctaaaggctgagttataactaaaggatttcaacctatttgtgagtttgatggtaacgctggaaaaatgcttgaagttgttactttgctcattataggagtatggtttccctccaggaaggtttctctaaaattaagagctattctacaacagagacccctctacacttaaggtatttatgggatctgtcctctcatggcttctcaggtgtttaaagaggctacaactccagctgaaattcattccacattctttacattgaaaaggtttctcaccagtatggattctctgatgttgattaagatgtgacttcagagtgaagcctctgccacattcatgacattgatgggattttgtgctggagtagattttttgatgttgtttggtgtgggaacactggccaacattttctctacatatatcacattgatagggcttctctgctgtatgagttctgtaatgctgaatgaggtctgagctataaccaaaggcttttccacagatatcacactgataaggctgctcttgtaactcaatcttcttgtcttcaatcactgtcaagttccaactatatgcttcctcacagatgccatttttttcatttttctgacccatgtggagcacctgatgttcaattaggctaacgtactgaaaaaagatttccccacattcacgacactgatgggatttctctcgggagtggagtcgaagatgtccagccaggtgggaacgcctcccaaagcctttcccacattcgttacacttgaagggtctctccccactgtgcacgctctgatgctgaacaaggtgggacctcactctgaaggctttcccacataagggacaggtgtagggcttctcacctgtgtggacgcgctgatgctgagttaggtgcacgcgttggttgtagcttttcccacattcctcacacctgaatggtttctccccagtgtgtattctttgatgttgaataagatgtgcactctgaatgaagcttttcccacactcgttacatttatgtggtctctctccagtggaggattttttgtggacatatgggacttcactgtagttcatcctctttgaagatggttgtcctagtatctctttcatgggaattccctgctttctatccagcttgccttgaaactcacagccttctccaaaatcttgaacttgagaaacatttctttgggtttttccagatagttccatgtctgcttctgaatattctgaaattttcttcttaacacttaattttgtgttcttacttcttttgtcactgcctaaaaaaaataaagagcaagtgaaaatgtcatcagttcttttttttttttgagatggggtcttgctctgtcgcccaggctagagtgcaatgatgcgatctcggctcactgcaacctctgcctcctgggttcaagtgattctcctgcctcagcctctcaagtagctgagactacaggcgtgcatgaccacacccagctaatttttgtatgtttagtagagatggggttttgccatgttggccaggctggtctcaaactcctgactttgggtgatccacccgcctcagcctcccaaagtgctgggattacaggtttaagccaccgtgcctggcccatcagttcttttataaaggaaaaataaactgtcataaaaaatgttcatcagatgaaactatgatgtaacgggagtaacagaggtggatgtgtgtgtgtacttgatgccaacaggaatgtaaacaacaaacttttggaattttctgacgaaaagagcaagactcatccacaggatggcagaaaatatttgcaaactatgcatcagacaaaggactaatatccagaatctacaagtaactctaacaagtcaacaagaaaaaaaaaatcccatcaaaaagtaggcaaatgacatggagacagttctcaaaataatatatacaaatgaccaacaaacatgaaaaaaatgctgaacatcactaatcatcaggaaggtgcaaattaaagccacaataaggtactgccttactcctgcaagaatggccattattaagaagtcaaaaggccgggcgtggtggctcacacctgtaatcccagcactatgggaggccgaggcgggcagatcacctgaggtcaggagttcgaaaccagcctggccaacatggtgaaacccacatctctactaaaaatacaaaaattagctgggcatggtggcgggcgcctgtaatcccagctactcaggaggctgaggcaggagaatcgcttgaacccaggaggctgaggttgcagtgagccgagactgcgccattgcactccagcctgggcaacagcaagactccatctcaaaaaaaaaaaaaaaaaaaggccgggtgcaggtggctcacgcctgtaatcccagaactttgggaagccgaggtgggtggatcacgaggtcaggaattcaagaccagcctgaccaagacagtgaaaccccatctctactaaaaatacaaaaattagctgggcatggtggtgggtgccctgtaatcacagctactccagaggctgaggcagagaattgcttgaacccaagaggcagaggttgcagtgagccaagattgcgccactgcactccagcctgggcaacacagcgagactccatctcaaaaaaaacaaagaagtcaaaaaacaatagatgttggcatggatgtggtgaaaagggaacgcttatacattgctggtgagagataaattaatacaacttctgtggataacagtatggagacttcttcaagaaccagaagtagatctgccatttgatccagcaattccacaactgggtatatctacacaaaggaaaagacaatataccaaaaagactgtaagcgcctgtcttctgcagcacaattcacaactgcaaagatatggagccaatctaagtgcccgttgagcaatgagttgataaagaaaatgtagcaggctgggtgtggtgactcgtgcctataatcccagcactttgggaggctgaggcaggtggatcacctgaggtcaggagttcaagaccagcctgaccaacatggtaaaacctcatctctactaaacatacaaaaattagcaagggatcgtggtaggtgcctgtagtcccagctactcgggaggctgaggcagaagaatcgcctgaacccaggaggcagaagctgcagtgagttgagatcacatcactgcactccagcctgggtgacagagtgagactccatctcaaaaaagaaaaacaaaaaacaaatacataactgggtggtgagaactgacaaaaactggaagaatgagagtgaaggatgatgaagagggtatgcagtcagggaatatctgactaggagtcaggaaataaggcaaaatgagccaacaagaagcattgtcagagggtgggtgatacagcaatccctgcccccttcacccttagccaacattctagcctcagttttcctcccccggcatgtcatccttctcctttgggaatgctcatcacctttactatctgctacccccaccagaccatcggctgcatgagagcatggactgtatctctgttctggtcactgcagatcctgtgcaactagcaacacagactctcaataatatggctggatgtgcaaaacatgtattccccctttgatccagaaaaatgagggaggaccgggcatggtggctcacacctgtaactcctagcacttgtggaggccaaggctggaggatcgcttaagcctagaagttcaagaccagcctgggcaacagagccagaccccttctctacaaaaaatacataaattagctgggtgtggtggtgaacacttgtagtcccagctatgcaggaagctgaggtgggaggattagttcagcccaggaagtggaggctgcagtgagctgagatcccgctactttaccctagcctgtgtgacagagcaagaccctatctcaaaatacaaaaacgcccccgccccacaaaaaaaatgtggaaggcaagtgagtattcactgggaaactagccatagaaacaattgcagggaaggtagaaaacaaaagataactattttaaagcgattgctttttcaagtccaaagcgctattggtggattttccaaatgagggaatcatcgagtagaacgggaaaacactagctgagaggatagctcagctcaaacccagaactttaaagacactttactgacttctgtgccatggtggaagatgcagcgtggctgtaaacatcaaaggcagaattaaaaaaaaaaaaaaaaaaaagaaaaacattttggctggtcttagaatcatctgaagaatattagtaagggcctttaagttcacagcacagtttatgacgatctcattcacagataaatttactgtcatttgaacagatgtttaaaaatactggcccggcatggtagctcacacctataatcccagcactttgggaggccaaggcgggtggatcacttgaggtcaggagttcgagaccatcctggccaatatagtgaaaccccatctctactaaaaatacaaaaaaaaattagccaggtatggtggcaaatgcctgtaatctcagctactcaggaggctgaggcacgagaatcgcttgaacctgggaggcagaggttgcagtgagctgagatcgtgccattgcactccagcctgggcaacaagagtgaaactccgtctcaaaaaaagaaaagaaaagaaaaaaagaaaaagtcacaggcataaacagttatcgggacaaaagagaaaaaaattgaagttcaacaactgggaacacttgagtaaattacaatgccaccacacaatggcagactgtcagaaataaaaaggagggctgaacagccctggaaaatgtgtacgcttaatatttaattctgagtacgactacgtgaaacagacttataaaaaaaaaaggaaacatactaagtaataacagttctattagttagggtgatgtgattatgggtgatttattttttctttttattttctccaagcttcctgtactactgttattttattgggtttgtgtttgtttgttatttgagaagtctcactctgttagccagtctggagtgcagtggctattcacagacacatttatagctcactgtagtcttgaacttctgggctaagagatcctcccacctcagccttccgaggagctgcaactacaggcacatgccaccatgcccaggtaatttttaaatttttttgtagagacaaggtcttgctatgttgcccagggtggtcttgaatgcctggcctcaagtaatcctcctagctcagccgcctcccaaagcactgagattacaggtgtgagccactgtacccaggctattgttttaaaataagtaaaataactaaattgggaaaaggggaaagagagaaaagcatataagagagccaaatcctcatttactaccatagaaagtcaacagataacatttaaaattgatgagccaactaataatagttttattttaaaatacagaattaccagaaggaaccactaacagctgagagcacagccagcacagtggctcatgcctgtaatcccagcactttgggaggccaaggcaggcagatcgcctgaggtcaggagttcaaaaccagcctagccaacatggggaaaccctgtgtctactaaaaacacaaaaattacccgggcatgctggtgcgcgcctgttgtcccagctacttgggaggctgaggcaggagaatcgcttgaaccggggaggcagaagttgcagtgagctgagatctcgccactgcactccagcctgggcgacagagcgagactgtctcaaaaaataaatacataagaaccaaataaacgataacctttgcctcttcctaccccccccagtatcaccacccatctgtcctgttgtaccgtactaataaaacaccttttgcttttcgcctccatttatcccccggatataaactcctcacacgtacatctctgggatttctccctgaagtggcgttttaggtgttcgatcagatgcgaatggcgaccgaagttcttcccacactcattgcagccatagggcctctctccgctgtggacactgtggtgctgaaccaggtgggaactcacccggaaagcctttccgcacacctgacatttgtagggtttctcccctgtgtggacgcgctggtgctgggtgaggtgcacccgctgattgtagctcttcccacattctccgcacttaaacggtttttctccagtgtggatgcgccgatgctgaataaagtttgaggcttggaggaagaatttgccacaatcgctgcatctgtgccctctctcgccatgtgtgctttgcttagggctgatgtctgtgattgcatccagatcccttttctgggaaggattctgccttgatttccccacagtggggttgacctgccacctttgtaccatgcctttaaggtcactgacttctgcaaagtctggatcctgaggaacgctcctttcggtgtgttctggcgccacccagtgtgattcagagtcatcagaaatctgcttcactatgagctccatattgtccctggactcataacctgaaataacagagggagaattaaaaaatgagcttttccttgaatttgaagaaataaaatgaggggataatgaagagaaactgacatgtgctagggatccatgattctgtaaagggacttttacagtacagggatgggatgaaaaatattcaagcagaaaagtgagggaggttagggaaggaagagctggcaaaaaatgttcagaggaaggagactgaaaatcagtcattccactgaacgaagagggtctcctctcagtgtggcacttacaaatacctgtatcatgttaaatgttctcttgtgtgtgtgtgtgtgcgcgcgcgcgtgtatgtgtgtgttttgagacagggtctcactctgtcacccaggctggagtgcagtggggcaatcatggctcactgcatcctcaacctcttgggctcaagcgatcctcccacctcagcctcccaagtagctaggactacagttgcacaccaccatgctcagctaatttttatatttttgtagagatgagggtctcattatgttgcccatgctggtttcaaactcctgagctcaagtgatcctcccacctcagcttcccaaagtgctgggattacagacgtgagccaacgcgactgggcaatattcttttttttttttcttttgagacggagtctcactctgccacccaggctggagtgcagtggcgcgatctcggctgactgcaacctctgcctcccgggttcaagtgattcttctgcctcagcctcccaagtcactgggactacaggcgcacatcaccacgcccagctaatttttgtaattttagcagagacagggtgtcaccatattggccaggtggtctcgaactcctgacctagtgatctgcccgcctcggcctcccaaagtgctgggattacagacatgagccaccgcgcccagtcacgactgggcaatattcttaataaaactggatagcaggttatgcagctaaccccatcttcaccttcctcttcctgtgaattcatagcctagaaaagaaaggtgatctttctaggtttctcaatgcccaaaggatttcagtttggtatgaattaatctaaaagaaaaaagacattctttctatatcctgagaagaacctactactttcaagagctaggttaatgttcagcagtcactgatagaaccgtggatgtttcagtggctataattagttcctttgttcaactgtatcagcaagatactttactcaaaacactgatgttttaatatggtttgcagagacaaatcttcagtagttaacaaaaaatagagtattggccaggcacagtggctcatgcctgtaatcccagcactttgggaagccaaggcgggcggttcacttgaggccaggagttcgagaccagcctgaccaacacagcgaaaccccgtctctacaaaaaatacaaaaattatcagccgggtgtggtggctcacgcctgtaatcccagcactgtgggaggtcgaggtaggcggatcacttgaggtcaggagtttgaaaccagcctggccaacatgatgaaaacctgtctctactaaaaatacgaaaaaaattagccaggcgtcgtggcacacacctgtaatcccagctactcaggaggctgaggcacgagaatcgcttgaacccaggaggcagaggttgcagtgagttgagatcacaccactgcactccagtctgggtgacagagcgagactctgtcccaaaaaaaaaaaaaaaaacccagggagtatcatggcctattaagaatgtcccaagatgttttcatgaggagagttttctgtattatattagtaataagagctaaacatttgctgagtgctatgagtccagcactacactaagtactttacaattttatggtatatttaatccttacaatgacctttaagggagctaccataatccttttttgatatagtcagaagttataattcctaaactatgaagacaattttaattttaatttaccatatagctacttttacttaccttcctaaaaagacactgaaacagtaaaaacagggatataaacaaaaaaccctatcacaaaaccagactttttatgttttttcctccctcatttaactatgcagctaatcccagctaccatagtattttttttctcttttattcatatctactggtctcacacattgattgattgattgattgattgattgatttgagactgggtcttgctctgtcacccaggctggaacacagcagcacaatcacagcttactgttacttctaactccctggttgaagcgatcctcccacctcagcctctacaggcatgcaccaccacgcctagctaatttttgtatattttgtaagggtttgtctcactatgttgcccaggctggtctcgaactcctggcctcaagtgatcctccttccttggcctcccaaagtgctgagattacaggcatgagttcctgcgttcagcaggcagcctactcacttcctcctccccttgtctctcagtggagacatgtctctcgagccaaggtcagtccttcctccttcctgtaccccagatctcaccataccttcctgctttccagggatctcccaacatcagctaactgcccctccatttttttttttttttttttttttttttgagatagggtctcacattgtcacctaggctggagtgcaatggcatgatctcagctcactgcaaccttcacctcccggattcaagcaattctcctgcctcagctcctaagtagctgagagtacagatgcgtgccaccatgcccggataatttttgtatttttagtagagacaggtttttgccatgttgcccagactggtctcaaactcctggcctcaagtgatctgcccacctcagcctcccaaagtgctgggattacaggcatgagacaccacggcccagcctgtctgctcctccttgcctccatattctactctactagttcttctccagaagcatttaaatatgctgaaaatttctcccattaacaaaacatacgagccaggcatggtggctcacgcctgtaatcccagcactttggaaggtcgaggtggttggatcacctgaggtcaggagtttgagaccagcttggccaaggtggtgaaacctcatctctactaaaaacagaaaaattaggcggctgtggtggagggtgcctgtaatcccaaaattactcgggagctactcgggaggctgaggtgcgagaatagcttgaacccgggaggcagaggttgcagtgagccaagatcgtaccactgcactgctccctgggcaacagagcgagacactgtctcaaaaaaaaaaaaaggggaaacaaaaaacaatccacccatccaacccattactctttcagtgaccaggactctcttcccctttagagacaaagtccttacattcatctacaatagctttttcaaattccactcctttgcaatcttcaaagaaactatctcttgttccccaacacccctgccactccacggaaactgctgcctccaagactcatttacttatgttgtaaaaatctcacttccaaatctgatgggtactttctttgattttgacctctggtgatgctgttattaatagaaatccgcagatgtgaaaagaatctaacatggccttccgagagaagtaaaggaggcagaaaccactggccatgtaattaatgtagaatagtgtattgaagtgataaatacagatgttataatgaagagatagagaatgagaaaaacatcagaaactacacatttaaaactgcttagagaataccatagaaagaactatgccaagaacctcaaactctgaaatccattaggtacctataaagtaactgaaaaagataaagcaagagtaacaggctcaaataaacaagcaagctattggaaattaatttaaaaagaaaagaatttttaaaatttgcattaaatataacatttatactatatgagtaattcactgagctaaaaggccccatgaaaaatcaataatcataaaattattgatttaatcaataattttaaagcataaatttgatttttttccacaaaaattaaaacatcaaaataaaaaaagactaccaagatcccaatagattaatgaacagaggcatgcacaaataaatcaaaaagaggaaataaatataaataatatcaatagtaattaaaaattgaaaatttaaaagagcagagtcagctgtatacctgttaaataaaagcttgtgagtgaactaaaacggttaaacaatgtaaactgacataatgtttttcaaaagaaattttgcattgtgggcggggcatggtggctcacacctgttaatcccaacactttgggaggccaagctgggcagatcacgaggtcaggagtttgagaccagcctggccaatatggtgaaaccctgtctctactaaaaatacaaaaattagctgggcatggtggcacatgcctgtaaccccagctattcaggaggctgaggcaggagaattgctcgaaaccaggaggcagaggttgcagggagctgagattgcgccattgtactccagcctgggagacagagtgagactccatctcaaaaaaataaaataataaaataaatatattttgtagcgtgtatgtttgcatctgaagtcttccagtatgcctgatagagtggttcttctaaaagaatttactaaaaaaaggctaaaagctataatctccaaaatgtttgcaggagtgctgagatttttataactgctccagacagtacaattaaatattagcttccaggattataacttagttagaaatagggccagaaaattcaagaagcgatatgacaggtaaaatgtaggtgccaaggcgaacataataaaataggtatcagtgacttaagaatggtaatgaagtcctccaagtagctgggattataggcgcccgccaccacgcccggctgatttttgtatttgtagtagtgatggggtttcaccatgttggccaggctggtcttgaactcctgacctcaggtgatccacccgcctcagcctccggaagtgctgggattacaggcatgagctaccacacctggcaaaattatccaatctattaaacagtatagtaactaccaaaaatttgttaaagtccaaaggactcaagtgattctcccacctcggcctcccaaagtgctaggatcacaggtgtgagccaccacagccaacccactcttattttaaagcagtaaaaagttagcatctgctggattgcaaaaacagtccccccaagtactatcagtgtttaatcatactcttattaagatggaaatgatcagaataaactgaataagaaaaaaaaaatgaaggctgatttattcttttacaaaaaataaaaaaaagcaaagtcatagcacataaaacataaatgccattataagatgagccagaaatactctttacaagataacaaaataaacatgtcctaatccatgcagatgaaataatccttacccatggaagtaatactcccatagttctccttcctgtcatccctataaagggacttctgggactggtccaaatgcccccattcctccaggatgaaggatacagccacatcagccacctcttcaattttcaccaacttctg

SEQ ID NO: 1645 - DNA, 357 bp, Homo sapiens
cctgggctcaagtgatcctcccacctcagcttcccaagtaactaggtccagatgcatgcagcatcacacccaactaatctattttattttttgtagacggtggggcactggcagagtagggaggatctcactatgttgcccaggctgatcttgaattcctgggctcaagcaatcctcctgccttggcctctcaagatgctgggattacaggcatgagccacagtgcctggccttattctgcctattaaagacagcaccttttaatggctgttggtttaaagagtgtatgaaccaagcatgatggctcatgcctataatcccaacatttttaggaggcagagacaggagtattccttg

SEQ ID NO: 1646 - DNA, 124 bp, Homo sapiens
ctcaagaggctgaggcaggagaattgcttgaacctgggaggtggaggttacagtgagccaagatcgtgccactgcactccagcctgggtgacagagcaagactccgtctcaaaaaaaaaaaaaa

SEQ ID NO: 1647 - DNA, 3197 bp, Homo sapiens
gaaatgaaagagttggatccaaagaatgacatttcggaagacaagctctccgttgttggggaggccacggggggacccacgaggaatggtgccaggggtcctggctcagaaggagtgtgggaaccaggcagctggccagagaggccgcggggagatgcaggtgcagagtgggagccattgggaattccccaggggaacaaactcttagggggctcagtacccgcatgtcatgaactgaaggcatttgccaaccaaggctgtgtcctggtcccaccacggctggacgaccccacagaaaagggggcctgtccacccgtaaggcgtggcaagaacttctccagcacttcagacctcagtaagccccccatgccctgcgaggagaagaaaacctacgactgcagcgagtgtggcaaggcctttagccgaagctcgtccctgataaagcaccaaaggatccacacgggagaaaagccgtttgagtgtgacacctgtgggaagcacttcatcgagcgctcgtccctcaccatccaccagcgggtgcacacgggcgagaagccctatgcctgcggggactgcggcaaggccttcagccagcgcatgaacctcactgtgcaccagcgcacgcacacgggcgagaagccgtatgtgtgcgacgtgtgtggcaaggccttccggaagacttcctctctcacccagcacgagcggatccacacgggggagaagccctacgcgtgcggggactgcggcaaggccttcagccagaacatgcacctcatcgtgcaccagcgcacgcacaccggggagaagccgtacgtgtgccccgagtgcgggcgagccttcagccagaacatgcacctgaccgagcaccagcgcacgcacaccggggagaagccgtacgcctgcaaggagtgcggcaaggccttcaacaagagctcctcgctcaccctgcaccagaggaaccacaccggcgagaagccctacgtgtgcggcgagtgcggcaaggccttcagccagagctcctacctcatccagcaccagcgcttccacatcggcgtgaagccgttcgagtgcagcgagtgcggcaaggccttcagcaagaactcctcgctcacgcagcaccagcgcatccacaccggcgagaagccctacgagtgctacatctgcaagaagcacttcacggggcgctcgtccctcatcgtgcaccagatcgtgcacaccggggagaagccctacgtgtgcggcgagtgcggcaaggccttcagccagagcgcctacctcatcgagcaccagcggatccacaccggcgagaagccgtacaggtgcggccagtgcgggaagtccttcatcaagaactcctccctcactgtgcaccagcggatccacacgggcgagaagccctaccgatgcggcgagtgcgggaagaccttcagccgcaacacgaacctgacgcgccacctgcggattcacacctgagcgcctctgtgcagggctctcactggcggtgcccaggacggacgccagatggctgcgcgctttgtcagcagtgctgtgagaagttctcccctggggtggggactcggggtcaggggagctcaggaatgtggggttgtggaggggctggctgatcacacatgccccctccttactgagcctcagaaagcaagcccctcggtgtctgacgtatctggggacacttcaaggttcactgtagctgagccatggccgctggtaacagacatcagggttccagactagccctcttgagtaactgtcctagagctgggacaggtcacgcctgcctccacatctctgtttcttcagcgggaaagtggagctggtggaggggagggaggagacatctccctctttgtcagatacatcctggagtccagatgcagcttgtcaccatctgcattttctccgtgggttgggagcgtgagggccttcctatccctccacccaccgtttccctgcagtgcacgctggcagccaccaagctaggaagtggcaggagtttgccggttgtttgtgaggggaaaaatttttttttcagagttagcaaataacagtaactactgctttgaatgccaaagtttcttagagtggtctgttacgttttttaaaaataaaacttttaattaagggagactatgttattttaaacagtcttctgttttggccagttgtctggtcaaaatcggcttcagtgattgtgggaggggcaagaaggaaaagaaacagcagcaggtttgatattcagaaagaaatatgcatggattcaataagtatatacatctgagcacagattatttttatagtgatttttgcagctaaatgtgaaggcaactgtcttaagtcccttcctgctgctgtaacaaaagaccttagactgggtaatttataaacaatagaaatttgtcactcatggttctggatgctgggaagtccaagatcaaggctctggcagatttggtgtctgatggggtatgttcttcataggtagtgcttgtgtcttgatgtgtgtcttcacgtggttgtaaacggcagacttcctcaggccccttataagggtgctaatcccagtcacaagggccctgacctcatgacctcccaaaggtcctccctcttcatactgttacattggggatcaagtttccaatatgtgaatacagggaagcaccaacagaccatatcagtaacttcgagtgagtttcctaaggccgactgaagctctgtttacacataagagtgttccccaaagtgcactttctctggggccttttaggccatacttttaattttgttatttgatactactggttgctaatgttctggcatttccagttgttccacactccctgacactggtgtacacaaataaataatacagaaaaaaaattatatcagcaagcacattctgcaaataagaaaaacagccactcgggcacgtataaacaaggtggaccgtttttcaaattctggcagtcaagtgggcctcagggtgggtttgattcaggctctcatcattggagccatagctgtggttctctgtgatgctctggctctcccttcatacttcttaacatcatcctcaggctggcttcccacgtgggattgtggtggtttccagcagcgagtcttgatcagacattgctttagttgcatctgttgtgggaataaatgagaatatgtatgca

SEQ ID NO: 1648 - DNA, 727 bp, Homo sapiens
gggccaagtgcccatgcccacctctactcccagcatcccagcttccaaactcagcaggccaagtgaggcccgggggagggccgggctgggccagggagggctggtggggcgcaggaggggaggggctgcacccaaccctgcctgatgtctgcactgtcctcacttcaggctgatctacaagtgcgccatgtgcgacacagtcttcactcacaaacccctcctctcctcacacttcgaccagcacttgctgccccagcgtgtcagtgtctttaagtgcccgtcttgtcctctgctctttgcccaaaaaaggaccatgctggaacatctcaaggtacaggagcagagggatggggaatgggtgcttagctgtactgacctggggctggggccacatacttcagaagtggggggctttggcatagccaggccctcccccacaacagcaacctcccttgtctcctctcacagaacacccatcagtctgggcgcttggaggagactgctgggaaaggggccgggggtgccctgctgacccccaagactgagcctgaggagctggctgtttctcagggaggggcagcccctgctactgaggagtcgtcttcatcttcagaagaggaggaagtacccagctcccctgagcccccccgtccagccaaacggcctcggcgggaactagggagcaaaggcctcaagggtgggggtggggggcctggaggctggacct

SEQ ID NO: 1649 - DNA, 1670 bp, Homo sapiens
gtgatgaatacgtggcccacatgaagaaggagcatggcaaggtgagtgggccccaaggggagtaccatgggctgggggcagcattgggactgccagtgtgacagtggggacggggtcctggagcctggctctgacatctacccctgctctcctagtcagtgaaaaagttcccctgtcgcctgtgtgagcgctccttctgctccgcccccagcctgaggcgccatgtcagagttaatcacgagggcatcaagcgagtttacccctgcaggtaagtcttgctccccgcttcctcttcctgcccagcacgtgactctccctgtatgccaaagtacctgtgcacctgcgacgtgtctaagtggcctgatggttggggtctccctctgctctggcagccccctcctcagaagcaagggccctggccttcgggctgtgccgctgctgccatcctgtcctctcccatttcaggtattgcacagagggaaaacgcaccttcagcagccgcctgatcctagagaaacatgtccaggtccggcacggcttgcagcttggggcccagtcccctggccgggggaccaccttggctcggggttccagtgccagagcccaggtaggcagaggcccggcctgctgtgctagggctttgagtgggaaactggaaggcagagaccatggcctcaggaagcgagcatgggggtgccagggacagtaggggtggtggtaaggcccagtttcttccacttttcttcaggggccaggtcggaaacgccgccagtcttctgactcttgcagtgaggagcctgacagcacgacaccgccagccaagtcccccaggggcggacctggatctggaggccatggccctctgcgctaccggagcagcagctccacagaacagagcctcatgatggggttgagggtggaggatggtgcccagcagtgcctcgactgtggcttgtgctttgcctcccctggctccctgagccgacaccgtttcatcagccacaagaagagacggggtgtgggtaaagccagtgccctggggctgggggatggggaggaagaggcccctccatcaaggtctgaccccgatggtggagactcacccctgcctgcttctggaggcccactgacctgtaaggtctgtggcaagagctgcgacagccctctaaacctcaagacccacttccgcacgcatggcatggcgttcatcagggctcggcagggggctgttggggacaactagtctccaaggcctgggactgaccagccccttcctcttggagcctggttttccctactgctgcctgatccctcggctggggagttttcattaacattaatattttgttaattcctgtctctccaacctgaagaagaagagcatttgaggattattctagttatttgcaacctccctttgggtttggccctggagtcctagtagagtggaccctccattcctcctttctgagcccaacactaattaattttatgctcctgctgcagaacccccagtgtgggcctgggggtgggaggatgggacttaggtatgcctgctagacaggttcagggaaggactgatgggggtgtcatggatggacacacctctccacaattccttcaggcatggactggaactttcctcctctaggccgggccctgccctagtg

SEQ ID NO: 1650 - DNA, 6421 bp, Homo sapiens
gccaaaatgaatcatgcagtctaggctcagtaggatagtaaggctgttaaatgtctgataaattgggaaggaaaaaatatggagtcagtgaaacagtgggctccctaaagctgaagggcaggtgtaattggagtgtgcttaagtgtattggaaggctaagagctaaggtcatagtgcaatgggagttgatttcagatgtgtagccaatctgaagatgagatccagggtacagccacagaagtagaggaacaagtttaaacagtctgacttgtgatacagcagtgaacagctgaacctaatagggaagacattcaataaacaggtgagctgtatgtttttcctcaatgtttttgtaacccacacttctacttttcatatacctgaaaatctcacatttgcccctccatttacaatttcaaaattaagtatcatgattgaaattaatgaaagcagtagtaattttagaaggaaaaaatttattcagatgatgtgatagccatgtcactgttaagcctgaacttttctttcctgggtggtgtgaaaggtgcaagaaaacacaagctgcttttaataacactcttgcactgctttctccccaaagctagatatatcaaaacattaaaaaataaaaaagctttttaaggtgtaaggagcaaatggaatagtggataaagccttttcatctgtttagtcattttacacccaagtttctctggagtatttgcctggaagtttctaatcaaaaccattagactttgagtttcacaaactcctcttgaagctcttccagtgaggcctgcacatcggtatgaaacacattctttccaaaagctaccactggtagattttaagaacaagctcaggagcacatcactcaaaataattccaagtatttcactttttcccttcaaataacacttcatgaatctggtccttgaaagactagccaagaaaattagacatttttagcattagtttgctcatacatacatttgctatatttttatggttgtatttttggcaagttttgtttgatgtatttcataatgaacggcgaaattggtgtttgcccattgacatttcagtgtcaatgtattttaagcttcagtgtgttaaaactctgttgaaaattttaacttttgaaatgttcaagtatagattatttttcattgttcttccaaccttggggttgttctgtccacaagttcagcagaatccgtttttctttggcaaccaagaaacttcaatatgtaacagaaaacatggaatggcatttagatcttcaaaaagcagggcaaactggaatggaatgtactgtttctcacagtggtctatgctgacagcaaggctgaagatttccagtaggttatgggtaatcagtgaaagttcatgcttggtggtgacagctgcagtacatcttgaataccagttttcttcaatctttgccaaaaacccaaatttaacacagtttgctgtagtgccattaagatatactcctatacaatttcctccaactcggttcatttgatacagctgcaaaaatactgtctttggtggtcaagtagaaggctcacgaaaacagcacacccacagttttgaaagccttattctgaatgtaagcaaagtacagttttcttcatcagtagattcatctcaaccaacagcaataaaagatgagccgatttttttttttttttgagatggagtcttgctctattgcccaggctggagtgcagtggctcagtctcggcttactgcaagctccgcctcccaggttcatgtcattctcctgcctcagcctcttgcgagctgatgttttttaagatctgaagtttgatatatacagtcattaattcagagttaagactgcagaagtagatgaagaaattctggaattccttaatttatttgtggcagcactcagaatgcaaggtttcacaagtgtctccatttttttctcctttgcaattaaaagggctgtttaatattaagctttcacggcttggaagattcctgtgaatatttcaatactgtccagtcttaaagctgcagagaatcgggctttgcagaacactccactgtttttaatggcatgaatttaacagtgtttggcatggtgtcactgcccaacactttcagataactcaactgaagaagttgaccctatcttctgcaaaataacatgagtatatacttgagaaaagcctcaacatttttttttggctgccatttttagctacctcaaaggagataacagaaaaacaaggagtactgatgatggaagcatctggtccctcttgcagagtgatgaatgattttattggtggcagctgggtggcaggacaatccaggcatccagttatgcctgatccccaataagtgaaatctttgttcattttctttttatacacccgtctgcttcctaaaacctgacaccatttaatggtgcccttggtcaaatctaaatgatcttactttcataattctttgattctagcttgcagagtcaagacgaactctaactcatgggatggacaaactggaagatgtaaaataagtaaggctttctgggccaaaaagcctcttcttacagaaaatcaaattttaaaagaacattgacctcaaaacaataaaactgtcctggttatgcaatagaaatagctatataaatggaatcatatccttaatgaacacctcctgtggctacccaacttttcacacatcttactgattataggccttgctgtgaatgctttcttgctctatctgaagtattcccaccagagttgtttccaactttatttcctatattatgaaaaatgaagtttttttaacattgtaacaaagtatatgaaagataatgtatactgtattaaataaaccattatacaaaaatagttccttgtactgttaactattattatgactttggtcagtaaaattctaaatcatgcgactataatttacatgtttaccaatggaaggaagtgacaatgaactgcctaaagaatgaaagagacacccaggcatggtggctcacatctgtaatcccagcactttgggaggccgaggcggggggatcaggaggtcaagagattgagaccatcctggccaacatggtgaaaccccgtctacactaaaaatgcaaaaattagctgggcatggtggtgcgcacctgtattcccagctacttgggaggctgaggcaggaaaatcgcttgaactcgggaggcgtaggttgcagtgagccgagatcgcaccactgcactctagcctgatgacagagcgagactccagctcaaataaataagtaaataaataaataaataaaaataaaaaaagatttgtgtcttaactgtgcacttaacaatatttactataaaatgggggaaggggatgatgataaaagttagctgaggaaggctgggcacagtggctcatgcctgtaatcccagcactttgggaggcccaggtggtggatctcctgaggtcaggagttcaagaccagcctggccaacatggtgaaaccccatctctactaaaaatgcaaaattagctgggcatggtggcatgtgcctgtaatcgcaactactaggggtgctgaggcaggaggatcgcttgaacccgggaaacggaggttgcagtgagccgagatcatgccattgcacttctgcctgggcaacagagcaagataccgtctcaaaaaaaaaagttagaagagaaatggaaggttctctcttttcctcagcttcagtatactaaaacccagaagcataggacataagttttttccatgggatactttagttatcaccttgggtgaaaacatggtactaggatttgtccttcaagtcaggttaatgtaacagaggtagcagtgacttatggttagatttgtgccttaactgtgcacttcccaatatttgctataaaatgggggcaggggggtgataataatatctaatacatgaagcctgtaggacagtgctctgtgtttgtgttttgactgcaactcaaagaaagcaatatatttttagatgaagtatatacatgtatatatatataacttaaaagtttcataaagcagtacttacccttactatgttccatgtgttctaatattttctcttacttcattttgagataatgctaggcatgacccatttattttaagacacactaattggtcaaaaaacaatttgaaaaccactgctataggagaacacgaggaaatatattttataaactgtaaagcactactaagacgtgagcagcggctgctgcatatccaggtcaacctttatgggcctgaagacaacctctccttcgtttgggcactgctaggagtcaaatctacctagacttttggtaaggaagatggtactcatgctcattgtcattgagacaattatctaatgcttagaagtcaagactagaaagcaaggcattaaccatatcagcacccaaacaagggaagacaagttacaagaaagccaaataaaacagcaaacatttgtttagtgctttatggttaacatatatgatctcttttaatccttacaatcctagggaaaaagtgaagctcaaggaggttgacacctgcccaagactagacagtaagtggcagagccaggtcatctgatcctaaatcccgcactccttccactatgataaaataccaggaaagaaaagtgatcaggatatgaggcacattctgatccatcaaagatgcttatatgctttgcctttctctagaaggaaaacggaccccactgaaggtagagatgcaatcccagactttcagagggggggtgtggccaattgctatcagtagtttaggactcacatctggcatttctgtctaccaatacatctattttgacactgcttgtgctgaggtcccaaatgtctattatctccaagtactgtggctttctattcctatctgtacctgtcccagggaattggtcaaggactcacattagggagaaatgaagtactgggtatctgttactcacgtcccttacacttaggtagactgccagtattagcagtagtggtccgcttccagtgaccgtcatattatctgttcagcttcctctggggaagccaatctgccccaatcttcatggttttgtgtctccttttttacccatatgaccatctctctccaccgtgtctccctcatcaaataaagagaagtttagcaactaagtacctgaggaggtgggaaaggaatgctactcattcctcagctctcctagttacctttccactcccttcatccccccacattccctcatttctctcacctggtactcctgcaccacctcctccaaaggcagcacgctgtgctgtttgtggctcctggattctcggcacaccacacagatggcctctttgtccacctcacagaagagtttcagggcttcctggtgtttaaagcacatgccctgatcattactccggtttccccgataaggagtggggcacatctggcgaattatctggaccatgttggccagctgcaagttgggacgaaagctgcgacgtgtaaagctctttcggcactgggggcaggtgaactgccctggaaggggcaaggaaggaggcgggtggatgtcaggatacagctcttcatcttcgtcctcatcgtatgcttccagtatttcttcttctcggtagacatcaattctcaggtcaggtctcaagcctcctaggtaatagtcctgatcttcctcttcttcttcttcctcctcgtcccacatatagtctacgttgtcccaattagttataccactgtcaccgagccagagttcatcgtcatcttggtcttggaacaactcttcgtcagcattcccccgatacaacacctctcgaatggagccgtcccatccatccatggcccccaccgcttcctcgtcctcctcctcctcccattcatcttcctcctcgttctggtcctcctcgtcctccttactccacagctgggtcacacaccctcggcagaagttgtgcccacagctgatggacacggggtccttgaagtaatccaagcagatggcacacaccgcttcctcctgaagggtctgcatggggctgggagtagtggcataaccagccatcttaatgcccgccggcaggtgtagatacgtcagcttggagctgaggagcggggacgcgcctgcaggcctgcctccaaactactctggtgacccgaggctgtcctcaaccttgctcttcttcctcggggccgcaggggagctttgaccccctctctcagggtgcgaacgcccagatccagactcacagcctctctctgggatcggtggggacagagcaggctgcagcccccagctgctcggtcctgtcacgtctctcgctaccctcagggtgtgccctacactgcggcgtccgcctca

SEQ ID NO: 1651 - DNA, 1310 bp, Homo sapiens
ccaatctgccccaatcttcatggttttgtgtctccttttttacccatatgaccatctctctccaccgtgtctccctcatcaaataaagagaagtttagcaactaagtacctgaggaggtgggaaaggaatgctactcattcctcagctctcctagttacttttccactcccttcatccccccacattccctcatttctctcacctggtactcctgcaccacctcctccaaaggcagcacgctgtgctgtttgtggctcctggattctcggcacaccacacagatggcctctttgtccacctcacagaagagtttcagggcttcctggtgtttaaagcacatgccctgatcattactccggtttccccgataaggagtggggcacatctggcgaattatctggaccatgttggctagctgcaagttgggacgaaagctgcgacgtgtaaagctctttcggcactgggggcaggtgaactgccctggaaggggcaaggaaggaggcgggtggatgtcaggatacagctcttcatcttcgtcctcatcgtatgcttccagtatttcttcttctcggtagacatcaattctcaggtcaggtctcaagcctcctaggtaatagtcctgatcttcctcttcttcttcctcctcgtcccacatatagtctacgttgtcccaattagttataccactgtcaccgagccagagttcatcgtcatcttggtcttggaacaactcttcgtcagcattcccccgatacaacacctctcgaatggagccgtcccatccatccatggcccccaccgcttcctcgtcctcctcctcctcccattcatcttcctcctcgttctggtcctcctcgtcctccttactccacagctgggtcacacaccctcggcagaagttgtgcccacagctgatggacacggggtccttgaagtaatccaagcagatggcacacaccgcttcctcctgaagggtctgcatggggctgggagtagtggcataaccagccatcttaatgcccgccggcaggtgtagatacgtcagcttggagctgaggagcggggacgcgcctgcaggcctgcctccaaactactctggtgacccgaggctgtcctcaaccttgctcttcttcctcggggccgcaggggagctttgaccccctctctcagggtgcgaacgcccagatccagactcacagcctctctctgggatcggtggggacagagcaggctgcagcccccagctgctcggtcctgtcacgtctctcgctaccctcagggtgtgccctacactgcggcgtccgcctca

SEQ ID NO: 1652 - DNA, 131 bp, Homo sapiens
ttttttgtgtttttagtagagacggggtttcactgtgttagccaggatggtctcgatctcctgacctcgtgatccacccgccttggcctcccaaagtgctgggattacaggcgtgagccaccgcgcccggc

SEQ ID NO: 1653 - DNA, 449 bp, Homo sapiens
ggcagagccaggtcatctgatcctaaatcccgcactccttccactatgataaaataccaggaaagaaaagtgatcaggatatgaggcacattctgatccatcaaagatgcttatatgctttgcctttctctagaaggaaaacggaccccactgaaggtagagatgcaatcccagactttcagaggggggtgtggccaattgctatcagtagtttaggactcacatctggcatttctgtctaccaatacatctattttgacactgcttgtgctgaggtcccaaatgtctattatctccaagtactgtggctttctattcctatctgtacctgtcccagggaattggtcaaggactcacattagggagaaatgaagtactgggtatctgttactcacgtcccttacacttaggtagactgccagtattagcagtagtggtccgcttccagt

SEQ ID NO: 1654 - DNA, 2619 bp, Homo sapiens
cacaactgaacattcctgcaagaataaggcctagtgaatgtgagacccttggaagcaatttgggacataatgcagacttacttaatgagaataatattcttgcaaaaaagaaaccctataagtgtgataaatgtagaaaagcctttattcatagatcatcgcttactaaacatgagaaaacacataaaggagagggagctttccctaatggaacagatcaaggaatttatcctggaaagaaacaccatgaatgtaccgactgtgggaaaacctttctctggaagacacagcttactgagcatcagagaattcacactggggagaaaccctttgaatgcaatgtatgtggaaaggcttcaggcatagctcatctcttggtcagcatgagaatgctcataccggagagaaaccctatcagtgtagtctctgtgggaaagccttccagcgcagctcctcccttgttcaacaccagcgaattcacactggagagaaaccctatcgatgtaatctatgtgggaggtcctttaggcatggcacatccctcactcaacacgaggtcacacacagtggagagaagcccttccagtgtaaggaatgtgggaaagcctttagtcgatgttcttcccttgtccaacatgagaggactcatactggagagaaaccttttgaatgtagcatatgtgggagggcttttggtcagagcccatccctttataaacatatgaggattcataagagaggcaaaccttaccaaagcagtaactacagcatagatttcaagcacagcacatctctcactcaagatgaaagcactcttaccgaagtgaaatcctaccattgtaatgactgtggggaagactttagtcacattacagactttactgaccatcagaggatccatactgcagagaacccctatgattgtgagcaggcttttagtcagcaagctatttctcatcctggagagaaaccctatcaatgtaatgtatgtgggaaagctttcaaaaggagtacaagtttcatagagcatcacagaattcatactggagagaaaccctatgaatgtaatgagtgtggagaagcctttagtcgacgctcatcgcttactcaacatgagagaacccacactggagagaaaccctatgaatgtattgactgtgggaaagcctttagtcaaagttcatctctcattcagcatgagagaactcatactggagagaagccctatgaatgtaatgaatgtgggagagccttccgaaaaaaaaccaacctgcatgatcatcagagaattcatactggagaaaaaccctattcttgtaaggaatgtgggaaaaacttcagccgaagttcagctcttactaaacaccagagaattcatactcgaaataaactctaggaaccgtgaaattaaggaatttgcagaatgctttagctaaaatgttctgattcaggatcagaggattcttagagagcttgggaatgtaatgaattacgtgtgtgtttatacgttgtgtgtggagaaaactgccagtagacagattttttttttttaacataaagacacattctcagatctgattacagactagtgtaaaaacagctacatgtatgtagctggttggggatgatatgcctgtatgttggactttgcttttgaatatatgtatgcaggatatcatcaagtttcaacatcttgacttgtgacccccaatgtcaacagcttttttaaaaagcaaattcctgcagtaatgaccaaaacccattttaaaaattgcttgacaactgcactcaactgcagctcttacattaacttcaccatggaaaccagttccaactccaggaagtcaccattcaaagaattagatcaactagcccaaccacttcattgtacagatgaagactgaaagccaaagatgtgaagtggtttccacagtatgatacagcctataagggtaaagctgggttaaaaatgcaggtttcctggatttggggccccatggccttgccagtgaaaaggttatttttggactcagagggctttaaaataaattttaagatgtatcagatacacaaacatttaatgggcacctatggttggacactttgagaattcttaaaagtataagtgggagcaaaatgtatgcaaatttatcacaaactatttaaagcaacttcttggaggcttacaaaccacaatttaacagaaactgtagatgttgaactactagtgacttttttccccttttcccagttacaattatactttcagctaacatatgccagtttcacagaactattaagtccccttattgtactttttatggcatgcccatgaaaaagcactttcttaagcctacagtatcagatcaatgggaaaacaacagaaaactaagaggagaattttcccgttaattttcttgcagaaaagttaagtctaattgcccattgccataaattttgccttggtactcagagaagcaacatgcactggctcattttatgtgcaaagaaaagatttcaccatttaaacaattaacttggctaagtattgtgtctcacacctgttaatccagcaacattgggtgaggtaaaaggggatagaatggtttgacccccgag

SEQ ID NO: 1655 - DNA, 694 bp, Homo sapiens
aaagccctcccacatatgctacattcaaaaggtttctcgccgagtatgagtcctctcatgttggacaagggaagaacatcgactaaaggctttcccacattccttacactggaagggcttctctccactgtgtgtgacctcgtgttgagtgagggatgtgccatgcctaaaggacctcccacatagattacatcgatagggtttctctccagtgtgaattcgctggtgtgaacaagggaggagctgcgctggaaggctttcccacagagactacactgatagggtttctctccggtatgagcattctcatgctgaccaagagatgagctatgcctgaaggcctttccacatacattgcattcaaagggtttctccccagtgtgaattctctgatgctcagtaagctgtgtcttccagagaaaggttttcccacagtcggtacattcatggtgtttctttccaggataaattccttgatctgttccattagggaaagctccctctcctttatgtgttttctcatgtttagtaagcgatgatctatgaataaaggcttttctacatttatcacacttatagggtttcttttttgcaagaatattattctcattaagtaagtctgcattatgtcccaaattgcttccaagggtctcacattcactaggccttattcttgcaggaatgttcagttgtg

SEQ ID NO: 1656 - DNA, 3460 bp, Homo sapiens
ttcctgacaggcatcctagccaatcagtagggagggtctgagtagaattacccattgtcaaactatgtatcagataatagaagcacagccttggcattgtgtgttagctaatcatggtgcaccataaacaaggtgttttggatggtcagcatctcagaagggcagatctgccattgaatattccattttgcatcacagaggagagactaattgagctacacatattacatttcagcccccatgcacaattttttccctgcaaagaatgaagaatacttgggtgctgctgcatgccatccatgatgagagaaaggcaatgaatcctgctatgtggcatgcaaagaatccagtaggaaaggttcaccatcaatacgaccaatatcttgccccatgattcatatttagggctgggaaaatttatctatctttgggaggcagctcttgtgtaaaaggaatcaatgtccagttgtgcccaaattggtctgcatggtcaatgtcaacacaccaacaaaggttctggaagttcctttaggatagcccatgggagtcattaggggatggagcaggccactgaagcttagctgatgctttactaatagaaaagcattatacaactaaaataaattgatgtgtgtgtgtcttgctctgttgctcaggctggaatgcagtagtgtgatctcagctcactgcagtctctgctcccgggttccagtgatcctcccacctcagcctcctgagtagctgggactaccactgcatgccaccatgcccagctaatttttggatttttttttttttttaaagagatggggtttcaccatgttgtccaggctggtcttgaactcctgggttcaagcagtctatctgccttagccacccaaagtgctgggattacaggtgtgagacaccatacctagccaagttaatttttttaatggtgaaatcttttctttgcacataaaatgagccagtgcatgttgcttctctgagtacaaggcaaaatttatggcaatgggcaattagacttaacttttctgcaagaaaattaacgggaaaattctcctcttagttttctgttgttttcccattgatctgatactgtaggcttaagaaagtgctttttcatgggcatgccataaaaagtacaataaggggacttaatagttctgtgaaactggcatatgttagctgaaagtataattgtaactgggaaaaggggaaaaaagtcactagtagttcaaccatctacagtttctgttaaattgtggtttgtaagcctccaagaagttgctttaaatagtttgtgataaattcgcatacattttgctcccacttatacttttaagaattctcaaagtgtccaacccataggtgcccattaaatgtttgtgtatctgatacatcttaaaatttattttaaagccctctgagtccaaaaataaccttttcactggcaaggccatggggccccaaatccaggaaacctgcatttttaacccagctttacccttataggctgtatcatactgtggaaaccacttcacatctttggctttcagtcttcatctgtacaatgaagtggttgggctagttgatctaattctttgaatggtgacttcctggagttggaactggtttccatggtgaagttaatgtaagagctgcagttgagtgcagttgtcaagcaatttttaaaatgggttttggtcattactgcaggaatttgctttttaaaaaagctgttgacattgggggtcacaagtcaagatgttgaaacttgatgatatcctgcatacatatattcaaaagcaaagtccaacatacaggcatatcatccccaaccagctacatacatgtagctgtttttacactagtctgtaatcagatctgagaatgtgtctttatgttaaaaaaaaaaaatctgtctactggcagttttctccacacacaacgtataaacacacacgtaattcattacattcccaagctctctaagaatcctctgatcctgaatcagaacattttagctaaagcattctgcaaattccttaatttcacggttcctagagtttatttcgagtatgaattctctggtgtttagtaagagctgaacttcggctgaagtttttcccacattccttacaagaatagggtttttctccagtatgaattctctgatgatcatgcaggttggttttttttcggaaggctctcccacattcattacattcatagggcttctctccagtatgagttctctcatgctgaatgagagatgaactttgactaaaggctttcccacagtcaatacattcatagggtttctctccagtgtgggttctctcatgttgagtaagcgatgagcgtcgactaaaggcttctccacactcattacattcatagggtttctctccagtatgaattctgtgatgctctatgaaacttgtactccttttgaaagctttcccacatacattacattgatagggtttctctccaggatgagaaatagcttgctgactaaaagcctgctcacaatcataggggttctctgcagtatggatcctctgatggtcagtaaagtctgtaatgtgactaaagtcttccccacagtcattacaatggtaggatttcacttcggtaagagtgctttcatcttgagtgagagatgtgctgtgcttgaaatctatgctgtagttactgctttggtaaggtttgcctctcttatgaatcctcatatgtttataaagggatgggctctgaccaaaagccctcccacatatgctacattcaaaaggtttctctccagtatgagtcctctcatgttggacaagggaagaacatcgactaaaggctttcccacattccttacactggaagggcttctctccactgtgtgtgacctcgtgttgagtgagggatgtgccatgcctaaaggacctcccacatagattacatcgatagggtttctctccagtgtgaattcgctggtgttgaacaagggaggagctgcgctggaaggctttcccacagagactacactgatagggtttctctccggtatgagcattctcatgctgaccaagagatgagctatgcctgaaggcctttccacatacattgcattcaaagggtttctccccagtgtgaattctctgatgctcagtaagctgtgtcttccagagaaaggttttcccacagtcggtacattcatggtgtttctttccaggataaattccttgatctgttccattagggaaagctccctctcctttatgtgttttctcatgtttagtaagcgatgatctatgaataaaggcttttctacatttatcacacttatagggtttcttttttgcaagaatattattctcattaagtaagtctgcattatgtcccaaattgcttccaagggtctcacattcactaggccttattcttgcaggaatgttcagttgtg

SEQ ID NO: 1657 - DNA, 8891 bp, Homo sapiens
gggttttgagcctgctctttaggtaaaaggtctttattttgcaaaactggaaataggcaatttgattgcatgactccttaagttgcaccttttttttccttcagagttcctgaggatcaaggactagtactgacttgtccttaggagggttctttgtccacttgcacaaacaaccaaatcttgtgtatttacccatgagcaggatatcaagtttccaagccagaggtgatcttcaaattggagcaaggagaagagccatggatatcagagggagaaatccaacgacctttctatccaggtaaatgagtgagagtcaggcattaggaatgaatgcagttaatggcacaacttagggagggggagataccctccagcagctggcttgcgatctcctagatctgcataggaggctgaagccatcgcctggccgacaccttgtaggtctctcttcaaaagggtgctcatgctcttgctggattatttttcctctggtggcctctgattcccttcattaattagagatcccttctcttactcattcagaattgaactcccatatttcttccctgaattgaactcccgtatctctttgttgtgttgatctcccccatcttttccttgtttagtcttgctgctttcactgtcagatgccccagacttgtaggaaacacccacagccttccttgattctctctcccttgataacctgccttcagactatgtgccttgccaccatcttccttccatctcatgttcatgctgctttgactcattacctccctccacagttctgtagtatcctcatctcccagttcctcgcttgttaagtgctgcttagctttaggtctttagcttttcttgcttttctccctaagtgaccctgccttaaggaacctgccttctagcctcctttcttgattacctccttaacagagtacctgcctcctggtagttgcagctctttattctatgccatagactcagaagtcttccttatttgtaccatggttacttttatccttctcagaagtcacatagttcatattaaatacataaaatctaaatccgtcacctttcatcccccaccagtatgttttgctaccttgcctatttctcatttctacccttgcctattagaatccaaaggatttttaattgctcaggctggataccctaattagtttagtcttttatttcaacccaggttgttttcttcctatgagaagtagcttagattttcttgccttttaacttctactggtggcactgtaaaccaggcccagatttttaaattaattaattaattaataattttattgagacaggatctcactctgtcacccacgctggagtgcagtggtgtgatctcggctcactgcagtctctgcctcccgggctcaagcaatcctcccacctcagcctcccaagtagctaggactatagatatgtgccaccacacccggctaattttttgtatttttagtgaggaagaaacgaggtttcaccatgttgcccaggtggtcttgaactcctgagctcaagcaatccacccaccttggcctcccaaagttctgggattacaagcatgagtgaccacaccagcctaatttttttattttgagacagggtcttgctctgtcacccagggtgcagtgcagtgtctctatcacagcgccctgcagccttgacctcctgggctcaagcaatcctcttccctttgcttcccaaagtgttgggattacaggtgtgagccactgctgaggtcccagatttagattgctataatttccagttggaatagctcactctgttttttctttttataaatcaaatggatttttaaaattgtagctttattgaggtataattcacataccatgagattcacccccctttagagcatagaggtcagtggttttttcatatattcagatagttgtacaaacagcaacactatctaatttcagaacattttcctcacaccagcaagaaatgtcatacccattaacagttactccccattccccactcctctcagtacctggtaaccattaatctaatttctatttctatggatttgtatatcctggatagtttgtataaatggaatcatataatatggcactggcttctttcacttagcatgatgttttcaaggttcaatcatgttctagcatgtatcagtacatcattcttttttaccattgaggaatattccattgtatggatatatcacattttgttattcatcagttgctgaaccacactggattgattttatttatttatttatttatttatttatttatttattttgagacagaatctcactctgtcacccaggttggaatgcagtggctgtgatctgaggtcactgtaacctccacctcctgggctcaagcagttctcatgcctcagcctcccaagtagctgggactacaggcacgcaccaactcgcctggctagtttttgtatttttagtagagatggggtttctactaaactgctattggccagcctggtctcaaactcctagcctaatatgttcatcccacctcagcctcccaaagtgctgggattacaagcctgagccaccatgcccagccactggattttaatgctttatcttctttttttttttccgagatggaatctcactctgtcacccaggctggagtacaatggcatgatgcagtggcatgatctcgtctcactgcaacctccacctcccgggttcaagcaatgctcctgcctcagccatctgagtagctgggactacaggcacacgccaccatgcccggctaattttttgtattttaatagagacagggtttcaccgtgttgcccaggctggttgcaaactcctgagctcaggcaatgtgcccacctaggcctcccaaagtgctgggattacaggcatgagccactgcgcccagcctaatgctttatcttcttaaaatttctgacaaaccattgctattactctctgtactttactatagaaaatagaaactccctgatttaaaagttccctatcatacttccagtattatccttctattcctgctaaaacagatccccttaggttgaacttctcttaatattctctgtatgcagcatatctttttcctcattaggcaatatattctgcctatccaaagccatttgttctttgagttcaaaatctatctaatccatgagatgtgatatatactaatatttatttcttcctttcctgacaacaaatatcatttatatcatctacactataaaaactcagatttaataatatgccatctgatggttttacccttttctagttgccaaaagattgtcttgtttctcctcaagctctgtttattatggtattttaatatattttatctgtgtggcagagcatatagaaagcaatcagaacatacttgactgatcagtaagaaatctggttagcaagaaaacttttctcatttaatcatttccacaagcattttttgcatgtcccactgagaacaattcttaaaaaaattacaaggcattctctgtcctcaggagttgagttgattcttattgcagggtaaggagtttggggatttagggtcttattgtgatttcctctttcaacattttattaggaacattttcaaataggaaagttgaaaaaaattttacagtcaataccacatacctaccaccaagattatcacatttgttgttgttaacatgttattttatttgctttgttaacatgtgttttatttgctttatcatgtatttctttagccatctatcaatccatcttactttttgatgcatttccaagtaagttgcaggcataattacatttcacccctacacttttagtatgtatgtcgttaactagaattcaatttttttcagtttttaaaagaaaatgttatatgcagtgaaatgtacaagtcttatatgtaccatccagttggttttgacaaatgcattcacttgcctaacccaaattcctattgacatagaacatttccatcactccaaaaagctctctgcccttagtttttaaaggttatcgttcttaaaccctaaaaatcaatttgcttgtatcagtgttctgaagtaaaaacagggacttaaagatcaatttattagccagattgaaacaaattttttggtcaaaggaggtaattagtgtagaaccggagctcaaatagatgaaaaccacagtaccagttgtaaagacaaagatgatttgcatcctgatcaaggacctccttgatctccaagggttatactttacaaactgagaaaatgcagtatttcaaataatcttttcagttgtatcactgggtacagattttctccgcagcatttggagacctggaacctcagagttgacagtaaagaaattatgaaatggatatattaggaagacagattttgtggtggtttataaaaggataggaggcatggagagcatataggatcctaagatgggctgtgatcctgttccatttgtatctgtgcctaacacagtcctgctcgcttatttccttattttctaaccaaccctcctagatgggctttcctcattctctggacttaccacatactctgaatctgcagtcttcgctatcatttcttcacttttccttttctccattttgggtcgtcttctcaggatacaggagtaatttcaaaacagagtcatatgtaacttatatgtctttcttcattcctactctagcagtgtatttcaacaggaaggaataggggacttttgtactttggatttctttcagactggaagaccaggcctgaagtcaaatcatcacatttgcagcaggatgtatcagaagtatcccactgcacacatgatctcttacatgctacattagaagactcctgggatgttagcagccagttagacaggcaacaggaaaactggaagagacatctgggatcagaggcatccacccagaagaaaataattacaccacaagaaaattttgagcaaaataaatttggtgaaaattctagattgaacaccaatttggttacacaactgaacattcctgcaagaataaggcctagtgaatgtgagacccttggaagcaatttgggacataatgcagacttacttaatgagaataatattcttgcaaaaaagaaaccctataagtgtgataaatgtagaaaagcctttattcatagatcatcgcttactaaacatgagaaaacacataaaggagagggagctttccctaatggaacagatcaaggaatttatcctggaaagaaacaccatgaatgtaccgactgtgggaaaacctttctctggaagacacagcttactgagcatcagagaattcacactggggagaaaccctttgaatgcaatgtatgtggaaaggccttcaggcatagctcatctcttggtcagcatgagaatgctcataccggagagaaaccctatcagtgtagtctctgtgggaaagccttccagcgcagctcctcccttgttcaacaccagcgaattcacactggagagaaaccctatcgatgtaatctatgtgggaggtcctttaggcatggcacatccctcactcaacacgaggtcacacacagtggagagaagcccttccagtgtaaggaatgtgggaaagcctttagtcgatgttcttcccttgtccaacatgagaggactcatactggagagaaaccttttgaatgtagcatatgtgggagggcttttggtcagagcccatccctttataaacatatgaggattcataagagaggcaaaccttaccaaagcagtaactacagcatagatttcaagcacagcacatctctcactcaggatgaaagcactcttaccgaagtgaaatcctaccattgtaatgactgtggggaagactttagtcacattacagactttactgaccatcagaggatccatactgcagagaacccctatgattgtgagcaggcttttagtcagcaagctatttctcatcctggagagaaaccctatcaatgtaatgtatgtgggaaagctttcaaaaggagtacaagtttcatagagcatcacagaattcatactggagagaaaccctatgaatgtaatgagtgtggagaagcctttagtcgacgctcatcgcttactcaacatgagagaacccacactggagagaaaccctatgaatgtattgactgtgggaaagcctttagtcaaagttcatctctcattcagcatgagagaactcatactggagagaagccctatgaatgtaatgaatgtgggagagccttccgaaaaaaaaccaacctgcatgatcatcagagaattcatactggagaaaaaccctattcttgtaaggaatgtgggaaaaacttcagccgaagttcagctcttactaaacaccagagaattcatactcgaaataaactctaggaaccgtgaaattaaggaatttgcagaatgctttagctaaaatgttctgattcaggatcagaggattcttagagagcttgggaatgtaatgaattacgtgtgtgtttatacgttgtgtgtggagaaaactgccagtagacagatttttttttttttttaacataaagacacattctcagatctgattacagactagtgtaaaaacagctacatgtatgtagctggttggggatgatatgcctgtatgttggactttgcttttgaatatatgtatgcaggatatcatcaagtttcaacatcttgacttgtgacccccaatgtcaacagcttttttaaaaaacaaattcctgcagtaatgaccaaaacccattttaaaaattgcttgacaactgcactcaactgcagctcttacattaacttcaccatggaaaccagttccaactccaggaagtcaccattcaaagaattagatcaactagcccaaccacttcattgtacagatgaagactgaaagccaaagatgtgaagtggtttccacagtatgatacagcctataagggtaaagctgggttaaaaatgcaggtttcctggatttggggccccatggccttgccagtgaaaaggttatttttggactcagagggctttaaaataaattttaagatgtatcagatacacaaacatttaatgggcacctatgggttggacactttgagaattcttaaaagtataagtgggagcaaaatgtatgcaaatttatcacaaactatttaaagcaacttcttggaggcttacaaaccacaatttaacagaaactgtagatggttgaactactagtgacttttttccccttttcccagttacaattatactttcagctaacatatgccagtttcacagaactattaagtccccttattgtactttttatggcatgcccatgaaaaagcactttcttaagcctacagtatcagatcaatgggaaaacaacagaaaactaagaggagaattttcccgttaattttcttgcagaaaagtataagtctaattgcccattgccataaattttgtcttgtactcagagaagcaacatgcactggctcattttatgtgcaaagaaaagatttcaccattaaaaaaattaacttggctaggtatggtgtctcacacctgtaatcccagcactttgggtggctaaggcagatagactgcttgaacccaggagttcaagaccagcctggacaacatggtgaaaccccatctctttaaaaaaaaaaaaaaatccaaaaattagctgggcatggtggcatgcagtggtagtcccagctactcaggaggctgaggtgggaggatcactggaacccgggagcagagactgcagtgagctgagatcacactactgcattccagcctgagcaacagagcaagacacacacacacatcaatttattttagttgtataatgcttttctattagtaaagcatcagctaagcttcagtggcctgctccatcccctaatgactcccatgggctatcctaaaggaacttccagaacctttgttggtgtgttgacattgaccatgcagaccaatttgggcacaactggacattgattccttttacacaagagctgcctcccaaagatagataaattttcccagccctaaatatgaatcatggggcaagatattggtcgtattgatggtgaacctttcctactggattctttgcatgccacatagcaggattcattgcctttctctcatcatggatggcatgcagcagcacccaagtattcttcattctttgcagggaaaaaattgtgcatgggggctgaaatgtagtatgtgtagctcaattagtctctcctctgtgatgcaaaatggaatattcaatggcagatctgcccttctgagatgctgaccatccaaaacaccttgtttatggtgcaccatgattagctcacacacaatgccaaggctgtgcttctattatctgatacatagtttgacaatgggtaattctactcagaccctccctactgattggctaggatgcctgtcaggaactcattatgctactggttgtttggggatccccatagtggactactttcaggaatggcatgaattgtaaccaactgagtgctgcccccactgttacggaagtttataaaaccttagttccagaagacccaaaggagagtactggtttgtgtttggtgcttggcctagatccagccaccactctgaaactcatcacatcttcattgacagggagggagcccaggacatatgtgtggctcattgaccagaaggctttcttagtcccaacagccatgaaccatgcacttatggatacccagccttttagggctacgtgaaatgcatccttgtaacatcattgtattctttcaataaatagccttctgagttgaatgggagtcag

SEQ ID NO: 1658 - DNA, 3524 bp, Homo sapiens
ttttttttttttttttttgagacagagtttcactcttgttgcccagagctggagtgtaatggtactgtcccagctcacagcaacctccacctcccgggttcaagcgattctcctgcctcagcctccgagtagctgggattacgggcatgcaccaccatgccggctaattttgtatgtttagtagagatgcggtttctccatgttggtcaggctggtctcgaactcctgacctcaggtgatccgcccatctcggcctccctaatttttgtattttttggtagacatggggcttcaccatgttggccaggctggtctcgaactcctgacctcaagtgatccacccacctcagcctctcaaagtgctgggatcacaggtgtgagccactgtgcccagcccagattctactcctttctaattgtgtgaccttgagcaaattatttccgttttgtcttctgtaaaatggaatgtgaatagtgattatctcatggggtcgtgagggctaaatgaagaaccacatggaagtacttggctggtgcttggtatacagtaagcatccaatacatgttcatgacgataatgcacatcagcactcctggtcttgattttgctagggacatctcacaggcgggacttttcccaggccaccaaaggtcattccaccctctatgtcccaaagtctactatactatgtctctaccatctaggtacccacagtctatcctgactcatcaatgaggttccgtatccttcacaattttgggtgctatttgatttgtattcattgtcaaaatgattatggcaatacaaaatgaaacggcagaaaacacaaaatcacacataattggaacaccccaatcattgcgtaaatgattcatttcttcacgtctctgtccagcctttgtccttttgtgaatggatcaaattactagtactattttgaagcccttgtattttttaaactttacctccaaagcgctttccgtcttagcatatactctggatcagcacagtactgcagaagacaaacggatctagctaagtggccaatgtgaaacactgaaacagaatgctgaaataaaggccaggagcagtggttcacacctgtaatcccagcacggcggctcgcacccataatcccagcagggtggctcacacctgtaatcccagcacagtggctcgcgcccgtaatcccagcacagtggctcacgcccgtaatcccagcacggtggctcacacccgtaataccagcacggtggctcacacccgtaatcccagcatgggcagctcacgcccgtaatcccagcacagtggctcacacccgtaataccagcacggtggctcacacctgtaataccagcactttgggaggccaaggtgggtggattgcttgagctcaggagtttgagaccagcctgggcaacctggtgaaagcccatcactacaaaaatacaaaaaaaaaatttagctgggtgtggtagcggtgcacatgtgtagtcccagctaccggagaggctgaggtgggaggattgcttgagtccaggagatgaaggctgactacagggagctatgatcacgccactgcacttcagcctcagcaacagagtgaaaactcgtctcatataaacccagaaaagaatattaaaataaaaacaatgaacaatgaaataaaaagtaaagacacagaagtagttaagaaacagaacaccttttgtttaagcaactaaattaacacgtgatggttcttggcaagatcccatccatgacagcattcccgtccaccaatcttttccgaaagtctggagcttactggacgtagtgtaatggcaactcctcccactaaaaggccccgtcaggctgggcacagcggctcatgcttctaatcccaacactttgggaggccaagacaggaggatgcttgaccccaggagttcaagaccagtcttggcaatgtagcaagaccccaactctataatttttttttttttttttgagacggagtctcgctctgtctcccaggctggagtgcagtggtgcgatctcggctcactgcaagctccacctcccgggttcacaccattctcctgcctcagcctcctgagtagttgggactacaggcgcccaccaccacgcccggctacttttttgtatttttagtagagacagggtttcactgtgttagccaggatggtctcgatctcctgacctcatgatccacccgcctcggcctcctaaagtgttaggattataggcatgagccaccgcaccctgcctcccactctataataaatttaaaaatttgctgggcgtggtggtgcacacctatagtactagctacctgggaggctggggtgggaggattacttgagcccaggaagttgaagctgcagtgaggtatgatcacgccactggactccagcctgggtggcagactccatctcaacaacaacaacaaaatacaaaaatgcccattctcagagctttcttataagaaggtgagaaggtgacataaacccacttcttttcaaattatccatcacaacagggcaaaagataaccacatgtatgtgtcagagtactaaaaagtggcttacaaagcagcgtgcaattgctaatatccaataagatgtctgttctggtagaacgctttcccacagtcaatgattttataggttttctggctgctgtgagttttctgatgtgtgacaagggatgagctctggctgaaggctttcccacattcctgacacctgtagggtttctctccagtgtgagttctctcgtgcctcacaagggaagacctctggctgaaggctctcccacactgcttacattcataggggttctcgcccgtgtgagttcgctcgtgctggttgagagaggaacggtcactgaaggcctttccacattcactgcattcgtagggcttctctccggtgtgtgtcctcttgtgcaagatcaggtaagagctctggcagaaggatttcccacagtcttcacatttatagggcttttccccggtgtgaatcctctgatgctgagtcagcgatgagatcctgttgaaggctttcccgcactcaccgcacccgtagggcttctctccagtatgagttctcagatggcgcgtgagggtggagctgtgcgtaaaggctcgcccacactcctgacactcgtagggtttctcccccgtgtgaattctttgatgttcgctcaaagaatgcctccggttgaacaccttcccacactggtggcactcaaagggtttctctgccgtgttgattttgttgtggatagtcagggccataccgtggttcaatgactgcccattttccaaatacacaaacatcttccccccgtgttgaataaagtgactgttctggcggatggcatttccacattcattactttcacaaggtctccgatctgcatatcccagctgatggtggtttaagactgaatcggatgccaagcttgtaatatctaactcgctgccacacaagtggttccctttagagcttccctgtga

SEQ ID NO: 1659 - DNA, 6082 bp, Homo sapiens
cctcccgagttcatgtcattctcccgcctcagcctcccaagtagctgggactacaggcgcctgccaccacacccggctaattttttgtatttttagtagagacggggtttcaccgtgttagccaggatggtcttgatctcctgacctcatgatccacccgccctgccctcccaaagtgatgggattacaggtgtgagccactgcacccgccctttttttttttttttttttttgagacagagtctcactctcattgcccagcctggggtgcagtggtgtgatcacagctcactgcagccttgacctccccagggctcaagtgatcttcccacctcaatctcccaggtagctgggactataggcttagaccaccacacctggctagtttttttgtttgtttgtttttggtttttttttggtaggtccggggtcttgtcatgttgctcaggctggtctcaaactcctgtgttccagtgatcacctgcctctgggcctcccaaagtgttgggattacaggtgtgagccaccacgcccaaccagatctgtaattttttttttctttgagactgagtcttgctctgttgcccaggctggagtgcaatgccacgacctcggctcactgcaacctctgcctcctgggttcaagtgattctcccacctcagcctcctgagtaactggggttacaggcatgcaccaccacgcccagctaatttttgtatttttagtagagatggggttttaccatgttggccaggctggtctcaaactcctgacctcaggtgatccgcctgcctcggcctcccaaattgctgggattacaggagtgagccaccatgcctggcacagatctgtaattttttaactagaaaataaaatcattatcttgtgctacctctcaagtatactcttgtctttttcagaagccttgaagaaccaatgtactgatgtggggattaaagagggtccactttccccagcacaaacctcacaagtcactagtctttcctcatggacggggtatttactttttcaaccagtggcttcttcccacttggagcaaagagaagccctgtggatagaggaaaaaggaactcctcaagcctcctgttcaggtgagaatcaggcagatagaaaccattgggatggcagtggcatcgtgggaaacattggtcagagagctcttcacaaggccctgattctgtaaggagaatgccaagatccctttctcggacaccttcagttcattttctggcagctttctccttctctttactaccttacatgacctctctctggatacagagaaaagagtatctcattttcttgttttatttatttatcttaagacagggtctcactctgtggcccaggctggagtgcagtggcatggtcatatctcactgcatcctcaccttcctgggctcaagtgatcctcctgcctcagtctcctgagcagctgggactataggcacatgccatcactcccacctattttgtttttctcagagatggagtctcactgtgtttcccaagctggtcttgaattcttggactcaagtgatcctcctttctcagcctcccaaagtgttgggagtacaggcatcagccatgactcctggccccattttcttctattttttccccccattttcttcttgaagccattttgcctatgtttctagttgtctcttccctctttgctttcttgataattctttctctctgccagacatattctcccagcttaacagggtaatttctttctttttttttgaaacagtctcgctcttgttgcccaggctacagtgcagtggtgtgatctcggctcactgcaacctccacctcccaggttcaagcgattcttctgcctcagcctcttgagtacaggtgtgtgtgccaccacgcctagctaatttttgtatttttaatagagacagggtttcaccatgttgatcaggctcaaactcctgacctcaggtgatccacctgcctcggcctcccaaggtgctgggattacaggcgtgagccactgcacctggcctacagagtaatttctttctgcattgatatttccctgccttttcccatcactgtcaatcttccactgctgcatctcatcctcagtggccttccttgccacccatctctctttttcccatccttcccgcatgttcagagttgatatttgaacatcagtccgcacaggccttgtagatgtcagaaggacttctgtcccgctggttttcaagtagctgtttcttcttctaaaaaaatggtttccgcctcaatttatttcagattggatgactgtactaagaaaccaagactcaacttacaagaaggtggctttgcaggaggaaccagccagtggtataaatatgataaagcttatcagagaagatgggggatggaagcagttagaggacagccatgaagacccccaggggcttttgagccaaaaggcatcccttcacgtagtggccgttcctcaggagaaggctactgcatggcatggatttggggaaaatggtaatctgagcccagcccttgttttatcacagggaagctctaaagggaaccacttgtgtggcagcgagttagatattacaagcttggcatccgattcagtcttaaaccaccatcagctgggatatgcagatcggagaccttgtgaaagtaatgaatgtggaaatgccatccgccagaacagtcactttattcaacacggggggaagatgtttgtgtatttggaaaatgggcagtcattgaaccacggtatggccctgactatccacaacaaaatcaacacggcagagaaaccctttgagtgccaccagtgtgggaaggtgttcaaccggaggcattctttgagcgaacatcaaagaattcacacgggggagaaaccctacgagtgtcaggagtgtgggcgagcctttacgcacagctccaccctcacgcgccatctgagaactcatactggagagaagccctacgggtgcggtgagtgcgggaaagccttcaacaggatctcatcgctgactcagcatcagaggattcacaccggggaaaagccctataaatgtgaagactgtgggaaatccttctgccagagctcttacctgatcttgcacaagaggacacacaccggagagaagccctacgaatgcagtgaatgtggaaaggccttcagtgaccgttcctctctcaaccagcacgagcgaactcacacgggcgagaacccctatgaatgtaagcagtgtgggagagccttcagccagaggtcttcccttgtgaggcacgagagaactcacactggagagaaaccctacaggtgtcaggaatgtgggaaagccttcagccagagctcatcccttgtcacacatcagaaaactcacagcagccagaaaacctataaaatcattgactgtgggaaagcgttctaccagaacagacatcttattggatattagcaattgcacgctgctttgtaagccactttttagtactctgacacatacatgtggttatcttttgccctgttgtgatggataatttgaaaagaagtgggtttatgtcaccttctcaccttcttataagaaagctctgagaatgggcatttttgtattttgttgttgttgttgagatggagtctgccacccaggctggagtccagtggcgtgatcatacctcactgcagcttcaacttcctgggctcaagtaatcctcccaccccagcctcccaggtagctagtactataggtgtgcaccaccacgcccagcaaatttttaaatttattatagagtgggaggcagggtgcggtggctcatgcctataatcctaacactttaggaggccgaggcgggtggatcatgaggtcaggagatcgagaccatcctggctaacacagtgaaaccctgtctctactaaaaatacaaaaaagtagccgggcgtggtggtgggcgcctgtagtcccaactactcaggaggctgaggcaggagaatggtgtgaacccgggaggtggagcttgcagtgagccgagatcgcaccactgcactccagcctgggagacagagcgagactccgtctcaaaaaaaaaaaaaaaattatagagttggggtcttgctacattgccaagactggtcttgaactcctggggtcaagcatcctcctgtcttggcctcccaaagtgttgggattagaagcatgagccgctgtgcccagcctgacggggccttttagtgggaggagttgccattacactacgtccagtaagctccagactttcggaaaagattggtggacgggaatgctgtcatggatgggatcttgccaagaaccatcacgtgttaatttagttgcttaaacaaaaggtgttctgtttcttaactacttctgtgtctttactttttatttcattgttcattgtttttattttaatattcttttctgggtttatatgagacgagttttcactctgttgctgaggctgaagtgcagtggcgtgatcatagctccctgtagtcagccttcatctcctggactcaagcaatcctcccacctcagcctctccggtagctgggactacacatgtgcaccgctaccacacccagctaaattttttttttgtatttttgtagtgatgggctttcaccaggttgcccaggctggtctcaaactcctgagctcaagcaatccacccaccttggcctcccaaagtgctggtattacaggtgtgagccaccgtgctggtattacgggtgtgagccactgtgctgggattacgggcgtgagctgcccatgctgggattacgggtgtgagccaccgtgctggtattacgggtgtgagccaccgtgctgggattacgggcgtgagccactgtgctgggattacgggcgcgagccactgtgctgggattacaggtgtgagccaccctgctgggattatgggtgcgagccgccgtgctgggattacaggtgtgaaccactgctcctggcctttatttcagcattctgtttcagtgtttcacattggccacttagctagatccgtttgtcttctgcagtactgtgctgatccagagtatatgctaagacggaaagcgctttggaggtaaagtttaaaaaatacaagggcttcaaaatagtactagtaatttgatccattcacaaaaggacaaaggctggacagagacgtgaagaaatgaatcatttacgcaatgattggggtgttccaattatgtgtgattttgtgttttctgccgtttcattttgtattgccataatcattttgacaatgaatacaaatcaaatagcacccaaaattgtgaaggatacggaacctcattgatgagtcaggatagactgtgggtacctagatggtagagacatagtatagtagactttgggacatagagggtggaatgacctttggtggcctgggaaaagtcccgcctgtgagatgtccctagcaaaatcaagaccaggagtgctgatgtgcattatcgtcatgaacatgtattggatgcttactgtataccaagcaccagccaagtacttccatgtggttcttcatttagccctcacgaccccatgagataatcactattcacattccattttacagaagacaaaacggaaataatttgctcaaggtcacacaattagaaaggagtagaatctgggctgggcacagtggctcacacctgtgatcccagcactttgagaggctgaggtgggtggatcacttgaggtcaggagttcgagaccagcctggccaacatggtgaagccccatgtctaccaaaaaatacaaaaattagggaggccgagatgggcggatcacctgaggtcaggagttcgagaccagcctgaccaacatggagaaaccgcatctctactaaacatacaaaattagccggcatggtggtgcatgcccgtaatcccagctactcggaggctgaggcaggagaatcgcttgaacccgggaggtggaggttgctgtgagctgggacagtaccattacactccagctctgggcaacaagagtgaaactctgtctcaaaaaaaaaaaaaaaaaaaaa

SEQ ID NO: 1660 - DNA, 427 bp, Homo sapiens
agaaacaatttttaaaatttatttttatctttcctaggaaggttttacacacttttataaaaattaatgtttagaggactgacataggaaagcagcttccagttaaaaatagtgtgcccgggctcggtggctcacgcctctaatcccagcactttgggaggctgaggtgggtggacaacctgaggtgaggagtttgagaccagcctggccaacatggtgaaagccccatctctaataaaaatacaaaaaaaattagccgggcgtggtggcgcatgcctgtagtcccagctgcttgggagctgaggcaggagaatcgcttgaacccagaggcagaggttgcagtgagccgaaatctcaccattgcactcctgcctgggcaacacagtgagactccatctcaaaaaataaaatataattgctggaggga

SEQ ID NO: 1661 - DNA, 5386 bp, Homo sapiens
tgaggtgggagaatcacttgaacccaggaggcagaggttgcagtgagccgaggtcgtggcattgcactccagcctgggcaacagagcaagactcagtctcaaagaaaaaaaaaattacagatctggttgggcgtggtggctcacacctgtaatcccaacactttgggaggcccagaggcaggtgatcactggaacacaggagtttgagaccagcctgagcaacatgacaagaccccggacctaccaaaaaaaaaccaaaaacaaacaaacaaaaaaactagccaggtgtggtggtctaagcctatagtcccagctacctgggagattgaggtgggaagatcacttgagccctggggaggtcaaggctgcagtgagctgtgatcacaccactgcaccccaggctgggcaatgagagtgagactctgtctcaaaaaaaaaaaaaaaaaaaaagggcgggtgcagtggctcacacctgtaatcccatcactttgggagggcagggcgggtggatcatgaggtcaggagatcaagaccatcctggctaacacggtgaaaccccgtctctactaaaaatacaaaaaattagccgggtgtggtggcaggcgcctgtagtcccagctacttgggaggctgaggcgggagaatgacatgaactcgggaggcagggcttgcagtgagccgagattgcagcactgcattccagcatgggcgacagagtaaaaaaaaaaaaaaaattacagatcttacatttcccccaaaaatcgatacacaaatggtcaataaacacaggaatggatgctcgatgtcattggtcattaggggaatgcatatcaaaaccgcaatgagataccacttcacacatattagaaaggccataataaaaaatagtaagtgttgccaaggatgtggagaaattgcaacagtctgcactgctggtgggaatggaaaatatacatgctgatacaaaacccagtatggggctgggcacagtggctcacgtctgtaatcccagcactttgggaagcggaagtaggtggatcactagaggtcatgagttcaacaccaccctggccaacatggcaaaaatccatctctattaaaaatacaaaaacagtagccgggtgtggtggcgcatgcctgtaatcccagctactggggaggctgaggcaggagaatcgcttgaacctgggaggtggaggttgtggtgagcctagattgtaccactgcacttcagcctgggcaacgagagcgaaactccgtctcataaaaaaaaaaaaatacaaaaacaggtgtggtggtgcacacttgtaattccagctacttgggaggctgaggcatgagaatcacttgaactgcggaggcagaggttgcagtgacctgagagagtgccactgcactccagcctgggcaacaaagtgagactctgtctcaaaacaaaaaaacaaaagaaaagccagtatggcagttcctgaaaaagctaaattctaaacatagaattaccgcatgatccagcaattctactcctagtattgacccaaagcactgaaaacagtgactgaaacagatacttgtttgccaatgctgacagcaacaggattcacaacagcggaaaggtggaaacccaggcgtccatcaactggtgaatggatggacacagcgtgttgtatacacacgatggaatcttcttcatctatgaacaaagcactgacacaggctacaatgtaaatgaacactgaaaacatcacacccagtgaaatcagccagacacaaaaggccacatattatatgattccatttatatgaaatgtctgccgggcacggtgactcctgcctgtaatcccagcactctgggaggccgaggtgggcagatcacaaggtcaggagattgagaccatcctggctaacacagtgaaatcccatctctactaaaaatacaaaaaattattaaaaaattagccgggcatggcggcgggcgcctgtagtcccagctactccggaggctgaggcaggagaatggcgtgaacccaggaggcggagcttgcagtgagccaagatcacgccactgcactccagcctgggcgacagagcgagactccatctcaaaaaaagaaaagaaaagaaatgtccagggtaggcaaatccatagagatggagagtgactcatggttacaaggggctgaaggaggggctggggagggagaatttaacgggtacagagttttggttgaggataaaagttctggaaatggacagttgtggtggctgtagtacatgctgaatgcatttagtgccactgaactgcacacttaaaaggggtgaaaaaggcacattttatgtttatatagagatatatagatagatacgtgtgtgcatatatatatgtatatatactttttttatttttttgacagggagttttgctcttgttgcccaggctggagtccagtggcacgatctcagcttaccgcaacctccacctcctgggttcaagcgattctcctgcctcagcctcctgagtagctgggattacaggcatgcgccaccacgcctggctaattttgtatttttagtagagacaaggtttctccatgttggtcaagctggtctctcaggtgatctaccccgccttggcctcccagagtgctgggattacaggcgtgagccactgctgtatatatattttttgagacagagtctcgctctgtcgcccaggctggagtccagtggtacgatcttggctcactgcaacctctgcctctcaggttcaagcgattctcatgcctcgacctcccaagtagctgggattacagacgtctatcaccatgcccagctaatttttgtatttttagtagagatggggttttgccacattggtcaggctggtctcaaactcctggcctcaagtgatccacccaccttggcctcctgaagtgctgggattacagacatgaaccaccacgcccagcctacattttttatcacagtaaaaacatttttttttttaatgatggctctttaccttggcagaaagagtacaaatgctctgtgatatggttgagctgtctcccgacccaaatctcacctcgaattgtaatctccaatcgtaatccccacgtgtcaagggaggtacctgatgggaggtgatgagatcatgggggcagttcccccatgctgttctcgtgatagtgagttctcatgagatctgatggttttataaggtttcccctgctctcttccctctcttgctgccttttgaagaaggtgcctgcttccccttctgccgtgattgtaagtgtcctgaggcctcccgagccatgtggaactgtgactccattaaacctcttttcttgctttttttttttttttcttgagacggagtcttgctctgtcacccaggctggagtgcagtggtgcaatcttggctcactgcaaccctgcaacctctgcctcccgtgttcaagcaagtctcctgcctcagcctcctgagtagctgggattacaggtgcccgccatttttagtagagacagggtttcaccacagtggccaggctggtcttgaactcctgacctcaggtgatcacccttgtgatccctaagtgcttggataacaggcatgagccaccacacccagcctaggtggtactctttatagcagtgtgaaacggactaagacactctgactttgttcccaaggggaatcagagaagttatctatgcctgagctgagacatgcaattgcactgcagctccagctatcacgtactgaacaagtaaggtcatctgttctcagagaaaccagaccacgaaagccacaaaaccaggacccatgtctgtcttacttaccaatgaatcccccattcccagcatggtgccagacacatagtagatgctagatgacatggtttggctgtgttgccatccaaatctcaccttgaattgtaataatcccgacgtcaagggtggagccagggggagataactgaatcatggcggaggtggttttccccatactgttctcgtggtaatgaataagtctcacgagatctgacggttttacaaatgggagttcccctgcacaagctctcttgcctaccgccacgtaagatgtgactttgttcctcattcgccttccaccatgattgtgagccctccccggccatgtggaactgagtccattaaaccccctttcctttacaaattacccagtcttgggtatttctttattagcagtgtgagaacagactaatacaccagataaatgtgaatcaatgaacacaggaattagtgatgcttgccttacccagggagaccacgttcctgtagttctccagcatcacctctctgtacaggttcttctgagcaggctccagcaactcccactcctcctgggagaagtccatggacacgtcctcaaaggttactaattcctagaatatcacagcagttctgctcaagatgggtccatcgccacccacgttcatgggaggaggggtgaggttggtggcaccagggaagttgagaaaggtcaaggtgcaaagtccataagtcagtttctactagctgccttgtgggtgcttgtccttggcttaaaatcagagggacatacagaccctaggcccaccatcaacacaacaaggacgaccagcacacaggtctggatgaaacattttgcccatttcttattgaactggtgattctaacctctggatctctgagcctgacattcccatgtgagaatctccccctgctgattctgaaaatgaatggatgtcatggatatgccacttgcaagttatgggactgcaggtatattgctgacctatccaggacacagcctcctcatctgttcaatggaaagaagaattttatccaaagtgtgttgtcgtgaggactaactagttaatatcagtcacagcatttgctattgccatagtcagaagactgagaagcaatacccaacaaaaagcaggatggaacaggaccttcctcaaaactcacagttattagagattagttctctttgcttccatgactcagagttacacattacaaggcatggacaatgtaagaagaggaatctgcagccagtcgcagtggctcacacctgtaatcccagcactttgagaggccgaggcgggtggatcacgacgtcaggagatcgagaccatcctggcgaacgcagtgaaaccccgtctctactaaaaatacaaaaaaattagccgggcatgatggcgggcgcctgtagtcctagctactcgggaggctgaggcatgagaatggcatgaacccaggaggtggagtttgcagtgagccgagatcacgccactgcactccagcctgggcgacagagcgagactccatctcaaaaaaaaaaaaaaagaggaat

SEQ ID NO: 1662 - DNA, 245 bp, Homo sapiens
tttttttgagacggagtctcgctctgtcgcccaggctggagtgcagtggcgtgatcttggctcactgcaagctccgcctcctgggttcacgccattctcctgcctcagcctccggagtagctgggactacaggcgcccgccaccatgcccggctaattttttaataattttttgtatttttagtagagatgggatttcactgtgttagccaggatggtctcaatctcctgaccttgtgatctgcc

SEQ ID NO: 1663 - DNA, 427 bp, Homo sapiens
tccctccagcaattatattttattttttgagatggagtctcactgtgttgcccaggcaggagtgcaatggtgagatttcggctcactgcaacctctgcctctgggttcaagcgattctcctgcctcagctcccaagcagctgggactacaggcatgcgccaccacgcccggctaattttttttgtatttttattagagatggggctttcaccatgttggccaggctggtctcaaactcctcacctcaggttgtccacccacctcagcctcccaaagtgctgggattagaggcgtgagccaccgagcccgggcacactatttttaactggaagctgctttcctatgtcagtcctctaaacattaatttttataaaagtgtgtaaaaccttcctaggaaagataaaaataaattttaaaaattgtttct

SEQ ID NO: 1664 - DNA, 2558 bp, Homo sapiens
tgtttcacaactgcccagagcaaagtatttcaatgtgataaatatttgaaagtcttctataaatttttaaattcaaacagacctaagataagacatactgaaaagaaatctttcaaatgtaaaaaacgtgtcaaattattttgcatgctttcacataaaacccaacacaaaagcatttatcatagagagaagtcctacaaatgtaaagaatgtggaaaaacctttaattggtcctcaacccttactaatcataggaaaatttatactgaagagaaaccttacaaatgtgaagaatataacaaatctcctaagcaactctcaacccttactacacatgaaataattcatgctggagagaaactctacaaatgtgaagaatgtggtgaagcttttaatcgatcctcaaatcttactacacataagataattcatactggagagaaaccttacaagtgtgaagaatgtggcaaagcatttatctggtcctcaacccttactgagcataagaaaattcatactagaaagaaaccctacaagtgtgaagaatgtggcaaagcatttatatggtcctcaacactaactagacataagaggatgcacactggagagaaaccctacaaatgtgaagaatgtggcaaagcttttagccagtcctcaacccttactacacataagataattcatactggagagaaacgctacaaatgcttagaatgtggcaaagcttttaagcaactctcaactcttactacacataaaataattcatgttggagagaaactctacaaatgtgaagaatgcggcaaaggttttaatcgatcttcaaatcttactacacataagataattcatactggagagaaaccttacaagtgtgaagaatgtggcaaagcatttatctggtcctcaacccttactaaacataagagaattcatgctagagagaaaccctacaaatgtgaagaatgtggcaaggcatttatatggtcctcaaccctaactagacataagaggatgcacactggagagaaaccctacaaatgtgaagaatgtggcaaatcttttagccaatcctcaacccttactacacataagataattcatactggagagaaaccctacaaatgtgaagaatgtggcaaagcctttaactggtcctcaactcttactaaacataagataattcatactgaagagaaaccctacaaatgtgaaaaatgtggcaaagcctttaagcagtcttcaatccttactaaccataagagaattcatactggagagaaaccctataaatgtgaagaatgtggcaaatcttttaaccggtcttcaacttttactaaacataaggtaattcatactggagtaaaaccctacaaatgtgaagaatgtggcaaagcatttttctggtcctcaaccctaactaaacataagagaattcatactggagagcaaccctacaaatgggaaaaatttggcaaagcctttaatcggtcctcgcacctcaccacagataagataactcattggagagaaatcttacaagtatgaataatgtgccaaagcctaagaaaaccctcaattcttaatagatataagattattcctactggagagaaactacaaacctgagagaggcgctaatgcttttgacagtacctaaaactttaaagaaaatcattctgctgaaaaatcctagaaatgtgaagaatgtgaaaaagcctttaaatgattgtcacacttgattgtaggtaagataattcatactggagaaaactaccagtgtgaacaacgtggccaagcttcgacaatgctcacaccctattgcacaggaaagcatttatacttgagaagaaatgtacaaatattggcaaagtaaaaaatccattaacacctgctcacatcttactcaaaattgtagagttcatagtaaataaaagcattaaaattctaattactctcagaagatctgtcagaaagtatgtctttaaagtatagaagagcatttattttgaaaaaaacattacacatatgaagaggattgtaatatctttacttgtaccacagatcttattgtacacattttatactagagaaaaaccctcaggcagttgttaaaattttgttgaacatcagggagtttaagaaaaccctgcaagtataatgaatttggaaaaacattttttcaaaaactacaaattataaaacaccaaagtgttcatactaaaatatatttttgcagatacattaaatatgaaagatattcaatccaaaattaagtctatgtaaatatcagggaataattcacagtagaaatatctagggcattcaagctttagacattacactaaatcagagtgctgagtatagaaaataatacaaacagatttgtctaaacatttgtatataactttaaaaatagaatattttttggagggttataattacattcaaagtacttttttttgaaaatacagattttttttaaaagtgaataatgtgttcaactcttaaattcatgctgtttcatcattgctggtgtattcatatgtgaaagcatg

SEQ ID NO: 1665 - DNA, 2558 bp, Homo sapiens
catgctttcacatatgaatacaccagcaatgatgaaacagcatgaatttaagagttgaacacattattcacttttaaaaaaaatctgtattttcaaaaaaaagtactttgaatgtaattataaccctccaaaaaatattctatttttaaagttatatacaaatgtttagacaaatctgtttgtattattttctatactcagcactctgatttagtgtaatgtctaaagcttgaatgccctagatatttctactgtgaattattccctgatatttacatagacttaattttggattgaatatctttcatatttaatgtatctgcaaaaatatattttagtatgaacactttggtgttttataatttgtagtttttgaaaaaatgtttttccaaattcattatacttgcagggttttcttaaactccctgatgttcaacaaaattttaacaactgcctgagggtttttctctagtataaaatgtgtacaataagatctgtggtacaagtaaagatattacaatcctcttcatatgtgtaatgtttttttcaaaataaatgctcttctatactttaaagacatactttctgacagatcttctgagagtaattagaattttaatgcttttatttactatgaactctacaattttgagtaagatgtgagcaggtgttaatggattttttactttgccaatatttgtacatttcttctcaagtataaatgctttcctgtgcaatagggtgtgagcattgtcgaagcttggccacgttgttcacactggtagttttctccagtatgaattatcttacctacaatcaagtgtgacaatcatttaaaggctttttcacattcttcacatttctaggatttttcagcagaatgattttctttaaagttttaggtactgtcaaaagcattagcgcctctctcaggtttgtagtttctctccagtaggaataatcttatatctattaagaattgagggttttcttaggctttggcacattattcatacttgtaagatttctctccaatgagttatcttatctgtggtgaggtgcgaggaccgattaaaggctttgccaaatttttcccatttgtagggttgctctccagtatgaattctcttatgtttagttagggttgaggaccagaaaaatgctttgccacattcttcacatttgtagggttttactccagtatgaattaccttatgtttagtaaaagttgaagaccggttaaaagatttgccacattcttcacatttatagggtttctctccagtatgaattctcttatggttagtaaggattgaagactgcttaaaggctttgccacatttttcacatttgtagggtttctcttcagtatgaattatcttatgtttagtaagagttgaggaccagttaaaggctttgccacattcttcacatttgtagggtttctctccagtatgaattatcttatgtgtagtaagggttgaggattggctaaaagatttgccacattcttcacatttgtagggtttctctccagtgtgcatcctcttatgtctagttagggttgaggaccatataaatgccttgccacattcttcacatttgtagggtttctctctagcatgaattctcttatgtttagtaagggttgaggaccagataaatgctttgccacattcttcacacttgtaaggtttctctccagtatgaattatcttatgtgtagtaagatttgaagatcgattaaaacctttgccgcattcttcacatttgtagagtttctctccaacatgaattattttatgtgtagtaagagttgagagttgcttaaaagctttgccacattctaagcatttgtagcgtttctctccagtatgaattatcttatgtgtagtaagggttgaggactggctaaaagctttgccacattcttcacatttgtagggtttctctccagtgtgcatcctcttatgtctagttagtgttgaggaccatataaatgctttgccacattcttcacacttgtagggtttctttctagtatgaattttcttatgctcagtaagggttgaggaccagataaatgctttgccacattcttcacacttgtaaggtttctctccagtatgaattatcttatgtgtagtaagatttgaggatcgattaaaagcttcaccacattcttcacatttgtagagtttctctccagcatgaattatttcatgtgtagtaagggttgagagttgcttaggagatttgttatattcttcacatttgtaaggtttctcttcagtataaattttcctatgattagtaagggttgaggaccaattaaaggtttttccacattctttacatttgtaggacttctctctatgataaatgcttttgtgttgggttttatgtgaaagcatgcaaaataatttgacacgttttttacatttgaaagatttcttttcagtatgtcttatcttaggtctgtttgaatttaaaaatttatagaagactttcaaatatttatcacattgaaatactttgctctgggcagttgtgaaaca

SEQ ID NO: 1666 - DNA, 706 bp, Homo sapiens
ttaaaatttttaaaaatatttattcagaactcagaaatgtatagattttacacgtttgtataaaattttttattatgaccataaaaatgaccctgtaatcaataacattgtaaatttaaaaataactaaaagtgtacaattgaattgcttgtaataaaaagaataaatgctagaggtaatggatatctcatttcctctaatgtgattattatatagagtatgcctgcatcaaaatataccatatatggcatacatatatacacatattatgtatccacaaaaattaagaaaaataaatttaaatgtgaaaataagaataaaaatttaacccataggaacaatattctttaacttattggcaatttaaagccactggcaaaaaagattgctagagatgtcagtacattatcttaccaaatagtgtattgttaccatcttttacctacatccttgagtaagggaataggttaaagttagtggcataagaacacttcattgaattcacaatagtatttaatatgttaaaaatgttgaattgaaaagctaagttcacacataatttataatttaaaaatagactgcatattatttcatagaagtacaattaataaaataacatatgactaacttaattttaactaaaattaagaatgcttttcattcataataatgcagaggaatattattctgaacacctacctcatgc

SEQ ID NO: 1667 - DNA, 706 bp, Homo sapiens
gcatgaggtaggtgttcagaataatattcctctgcattattatgaatgaaaagcattcttaattttagttaaaattaagttagtcatatgttattttattaattgtacttctatgaaataatatgcagtctatttttaaattataaattatgtgtgaacttagcttttcaattcaacatttttaacatattaaatactattgtgaattcaatgaagtgttcttatgccactaactttaacctattcccttactcaaggatgtaggtaaaagatggtaacaatacactatttggtaagataatgtactgacatctctagcaatcttttttgccagtggctttaaattgccaataagttaaagaatattgttcctatgggttaaatttttattcttattttcacatttaaatttatttttcttaatttttgtggatacataatatgtgtatatatgtatgccatatatggtatattttgatgcaggcatactctatataataatcacattagaggaaatgagatatccattacctctagcatttattctttttattacaagcaattcaattgtacacttttagttatttttaaatttacaatgttattgattacagggtcatttttatggtcataataaaaaattttatacaaacgtgtaaaatctatacatttctgagttctgaataaatatttttaaaaattttaa

SEQ ID NO: 1668 - DNA, 3659 bp, Homo sapiens
ttctcttcttggcagcactgggcacattcataaatgttgtctatgatctttctgctctgcagaggcagggtgccttcatgcacttctgaatccttactgtccatgccatagtttccagaagatagacatgtccaacggtatatgtccaagaaatgtgaggtgcagctagcccccatgagtcctttgggtctgatggaggcacctccttgagaagtctttcttccctgacacatcctttagttaactccatgctcctcaccatgggtctccacagccttgttgcgctcagtattgtaggctcaaaaaacatttttctgaatgaatgtagaacttgaagactgcctctcctctgaacagttgccacgtccagtgctctcagcctggaatcctcttccttcttcattcacctgttcagtttatttcaaaatttgagggattactaggtgttacactcttactgggcccagggattacctcctccagagagcctttctgacccttccattaggggctcctcttccccatggctactgtaccgaggtggacctctgagcccccagatcaagacggtcccttgagcacagaaaccagctctgattcatctctctgtgcttggcaccagcctcgttcaggaaacacccatagaaggcaccatcttcttacggaagagaccacctctggggcagacagatcctggttgggattctagatctgcacttgatagcttggccaagttcctttctctctatcaatttcctggagtaaaacagcctgccgagtctaaatatgaggttctaaactacctggctggtttgccaagatagtcattatccccttaaccccaagggagagcaaggaaagataggccacttaatatctggtgctttgtagtccagggacctaaggaaggtgggaggagaagaagttacagtgagattcatctttatctgccccaggcttaggtcctcctctccctcctagtcctcagtcacctagaatacagagcctgaaaacaagaactaagtactggtgttttatttggagaggtgcaaacccaaggcattggaagtgagaaaatggaagaaaggcgggaaagaatgggaagtaacgtaaggtgatgtatttaataggctggggtgggcactgcttcatgacaagccttgcagaggtcacagtagttctgtccaccggctacttgggaggcctccccattgatggtactgttttggagagttggtgccatgcagcaatttatgaaaggcaggggaaaagggggaattgatttgcctgagtctcacctatctcccattttccactagtcaaaaaaaaaattttttttttgagatggagtcttgctgtcacccaggctggagtgcaatggcacaatcttggctcaccgcaacctccacctcccgggttcaagccattctcctgcctcagcctctcgaataactgggactacaggcgcacgccaccatgcctagctaatttttgtattttttgtagagacagggtttcaccatattagccaggctagtctcaagactcctgaccttgtgatccacccgcctcagcctcccaaagtattgggattacaggcgtgagccactgcgcccggcctcaaattttatcccataaatattaactcccagccagacaccatggcttatgcttgtaatcccagcattttgggaagctgaggtgggcagactacttgaagccaggagtttgagattagtctggccaacatggtgaaaccccgtctctacaaaaaatacaaaaattagctgggtgtggtggtgcgtgcctgtaatcccagctattcaggaggctgaagcaggagaatcgtttgaacccgggaggcagaggttgcagtgagctgagatcacaccactgtactccagccatggtggcagagcaagactctgtctcaaataaataaatttccccacacttctaagtttgctagcagcaacttgggatgccagatcccatgccctatgccagggcattccatccaagtctgtaaagtggtgggaagaaacagaaactctgggtacatggccagtgagtgccagggagaatgatgcagtatatgtgccacgtctaatacagtccaaaactagttttttcattttctggaagaaacaaagcatagtgatccaagaactttctcaaggtcacatggatattaagtggcaaattcaggatttgaaaatagtctggctctggaaactggattttatgtagcaagcaaaggagtcactaaagggttttaagctggggagcgacaagaaataaagagcattttaatgaagctcccagtctctactgtgctccacattcgcatctgactaaactccagcagaagcaggtggccccagagaggttaagggcatccgagacagggtttgaggagtctctggctccagagctccgtgtaggcttcaacactgatccataatcttcctgtcttcatctaatcctacacccaccaaagagaagaactggtcagaggcaggtaggatctgtgtagaaaagccagaatgaggccggctgcggtggctcacgcctgtaatcccagcactttgggaggccagcgtgggcggatcatgaggtcaggagatcgagaccatcctggctaacacagtgaaaccccgtctctactaaaaatacaaaaaattacccgggcctggtggcacgtgcctgtagtcctagctactcgggaggctgaggcaggaaaatcacttgaacctgggaggtggaaggtgcagtgaaccgaattgcgccactgcactccagcctgggagacagagtgagactccgtctcaaaaaaataaaaaggaaaaaaggaaaaagaaaacccagaatgaggagaggagactgacctaaggaccagcagcaggaggactgtcctgctctccattgttgttgttggcctgtgggtctgagggtcccggccgatgagtcttctggtgttgcttgagatggtcagacctcatgaactcccggctgcactgatcacatttatatggtcgatatctggtgtgtacccgcatatgtcgtctaagctcatcagaacggaagaaagaccatgaacaactttcccagttgcaagaatatggcctctcacctgggaatgacaagggagagatggaatttagaatacagtaggaaggaaggggtctaactctgtgaggcagagcagtccaggttgaggattcaaaagggaaggtccagggaaccagggaggggcaacacaatcaggagtgcccgccccagtcatcttggcacagtcctcctgtatggcaagtcgggggggccagtctagcttagttccaagcttggaagatgaaaggctcatcccaaacaattacccaccagtggcccaggacaaatctaaagcccagagactcctccatccccaccccacctgacacctccttcacctgtgtgcttgcgctggtggctcacgaggtgggagcgtttggtataagcttttccgcagttctcgtagttgcagcagtaaggccttgcctctgaggagccccttctaccagtcccttcctgaggcctggagttcttctctactgtctgtggagcaggtccgggctgctctggtagaaatgggccttcttgagagtctggctgactgacaa

SEQ ID NO: 1669 - DNA, 232 bp, Homo sapiens
taacacaagtcaggaacctggaagtcacccttggcctcaccctcacctaacaaatccagttaactatcactttcctacttctccctacctccactctcacaccctagccaaagccaccttgactctcacctgaaatactgctatgtcccttcctctcccttacatccttgctctaatctaatctccatgttgcagccaaagaaaacacttaaccttatctctccatcttgaa

SEQ ID NO: 1670 - DNA, 232 bp, Homo sapiens
tgttgcccaggctggagtgcaatggcgtgatcttggctcaccacgacctctgtctcccgggttcaagtgattctcctgcctcagcctcctgagtagctgggattacaggcatgcaccaccatgcccagctaattttgtatttttagtagagacggggtttctccatgttggtcaagctggtcttgagctcctgacctcaggtgatctgcccaccttggcctcccaaagtgct

SEQ ID NO: 1671 - DNA, 8353 bp, Homo sapiens
tttcttgtaacacaagtatatttgtgctatagctgatgtgtatttgtggcttacacttggtgagccctcatgtgctggccatcagttctaagtgcttcacatttatttatttaatcctcagaaaagccctctgaggtaggtgatgcccattttacagataaggacaccgaggccctgagagatttttctgaccttcccaaggtcacttaggtagtagatggcagaggtgggatttaactcaaggtagactggctccagagcctacctctgaatcctgacgttgtacagcttctccacttttgtgttttcattgttataatgaaaaacatgcgcacaaactttctaatcaatctttagatgcatttatttggagagaaacttgcaatgggatagtttccaactttcaacatccgagtaacggtctcatattctgggactctgctgccacccaatggctacaggcagtattgctgcttgttgtgtacacgctgatggcggctgaggctcgagtggcaccgaaaggctttctggcaacgttgacactgataaagtgtctcctgggtgtgaactctcaggtgctggttgagatgggcactgaggacaaaagctttgccacacacattacaggagtaaggcttctcccctgtgtgaattctctggtgctgtgttagatttgctttctgggcaaaggctttcccacattcaccacatctgtagggcttctccccagtgtgaactctccggtgaatagaaaggcatgagctctgggtgaaggctttcccgcattcctgacaaacataaggcttttctccagtgtgaattctctggtggcggacaagctcagcactcaggccgaaggccttcccgcagtaatcacatacatagggcttctcacctgagtgaattctctgatgcttagaaaggcatgagctctgacggaacgttttcccgcattcgttacacaccaacggcttctttctggcatgagttcgctcatgctgaacaaggtagtttctctgggtgaagactctgtcacacttactacatttaaagggattctctccagcgtgaattaactgatgttttgagaggtgtgcactgtggctgaaggtctttccgcattcgttacatttaaaagggtgctcctttgtgtggaaggactgaagtttgataagggaggcactgctgatggctttcccttgctcaccccatttatacagcctcactctagagtggattctttgatggtgaatgagccgagtactttggccaaaggctttcccacactggtcacattcaaagggcttcactcccctggtgtgaatcctctcgtgctgagttaggtatttgctgcagctaaaggttttctcacatttgttacacttaaagcacttctctttctgttctgggttctgatccaagatcttcccactcacaaaaaatccttgtttttctctggcgtgaacactctcgtggcacttcagggttgagccgcaaatgaagcgttctccgcactcctgacattcatatggggttttgacagtgtgcattttctggtgttgcacaaggcgattgttatcgctgaaagtctccttgcattcagcacagctatagggcttttctgcggtgtgaatggcctgatgtcgcatcagatgtgagggccggctgaaactcctgacgcattcctgacatttgtggggtctgtagcctgtatgaattcgccgatgttcattaaggtgagtgtgccggtggaaggccttcccacactcactgcatttgtaaggcttctctccactgtgaaccctctgatggatctttagggtagagttatgcctgaaggatttcccacgttcgttacacttataaggctcctctccagcatgaagagcctggtgttcaatgagcagcgaactgtgcctaaaaatcttcccacactcctgacactcagaggtagtttttgcagcgtgagttttctgatgttggatgaggtgttttctcaagttgaaggtcgcctggcacttggaacactcatagcgtttccgagtgtggatcttctggtgccgagtaaggtggaagatccgggtaaaagccttgccgcattcgttacagttgtaggacttactatctgtgtgagttttctgatgctcaccaggctgtgtgtcatgactgggtgggtggtcactatcttgactcttacatggtttttctccagtgtgagttttctgatgccacaggtatgtactctgactaaaagttgtcccatattcattacacacatagaatttgtagcccgtgtgagttttcggatacacagaaagggaagcattccggtcaaaaccttgctcacactcttgatggacagtgggtttctccctagtatgagtgatccagtgctgggtaagacggtaactcccactgaagcttttcccacattcactacattgatatggtttctccccttcctgaacagaatcctgctggctgtggtcggagtaggagaaaaactcacccctatattccttagacttagctggtgtgagggtcttttcagaaacattatgcaccatggaatcttctcccgtggaaacggtggacacaggactgagtcctctctttaattcatgactcttgcattccgtgggactttccccgttggtggcaatatcagacctcagaagactttctggatcgcctagcaaactatctaaccaggtgtcctctatacaggcttctccgaaattggagttccagaagccatccttggataacatctctataatctcctgggagaatccttcttcgaagaaatcctccatcagaggagagttcttggtctcagtcacatctgaaagagcaagtgcaaatgtctcctgttcactaagggtgagaacacagacaagagcaagtaggggtgatagatcttgagtccagcctatccatcaagggacccaaaggggtgacccatgtggaactggcatcacagaaaacagacagagcccattcccaggagggtcaagaagggagttgggaaaccatagggttcaacgaggagggagattctaccattaccttcacacctaagtgactgaccaagttccctaaaaaatcgcctggactcacctgcttctactctccactctatcctgtactgtcaccaaaatcttcctcctcatatcctgcatcctctatcccagacaacaccccgctctccccacaccaccatccatccagttctccatgctagaatcctgggagtcaacctcctccctacctccctcaacttggcactattttcatttggtctctatcgaaatgtctcaactcccttcctctcctctctttatcactgactcagcatctgaccccaggctgctcattggtctcctgtttgtctgtctctctctctctctagtcttccacactagccctaaagggctttgtagttaatggatctgactatatcactcctctgattaaacccttccatggcttcctgcctggagaaaagaaatgagtgtattagcccagtgttctttgtgctgacctcatagaactcttgcggttccctaaatccaccagactttctcctctgtgcctttaatggtccctcatgctggatggcacttcctggactaactcctctaagtcttttaatacccagcttatcacccttctctgaaaggcttccctgacaaccccatccccattctgctttaagtcccctgccctgtattctctgaaaaccagctgagcactgaccatcctctaccataacaggttatgaaagggtctgacccctgacccttaccagaaggtaagttctttaatggggaccttccactgctcatccatccactgccacagaggcggccacgagaaagattcacaggacagagtaattcccattcatggtatgcttgttcacaggcaggagtgcctcaggcactctgttacactcgacaacctcctgtaaggtaggcacgtttctgctttcttacaggtaagtgagcagaagactgaggatttgaacccctctgactatatatatatatatatatatatatatttttttttttttttggagactgagtcttgccctgttgcccaggctgaagtgctgcacgatctcagctcaacgcaacctctgcctcctgggttcaagtgattctcctgcctcagcctcccgagtagctgggactgcaggtgccctccaccacgcccagctaatttttgtatttttagtagagacagagtttcagcatgttggccaggctggtctcgaactcctgacctcaagtgaccggcctgcctcgccctcccaaagtgctgggattacaggtatgagccaccacgcctggcccccatattcttaactaccaagctgtatgctctctgggatccttcacaaaacatgaatgtcactgctctgctgtatgcctccagtctccccatctctcctctcctccatcatcataccttttccagcctgtcccttgtgcagttcttggctcaccatctgagtatctatgagactgcttaaagtctctctgcctggaattaaaacttgcaaatgaaagccttctgaaaccacatcttgttctgaattgtcacctttgcctctgctcatctctcccacagatatccagctcactctcctcaccacacttgtgctcatgttgttccctcggcctcaaatgcaccaacagacatgtaataggcaccccttatatgccaagcatgatgtcaggagctgggaatacagggtgaatcagctaagccctgcttccaagagcggcatgctgttaaaggggaaagacgcttatgtggtaactatgcaactcaagtgtcactactagaggatatggaggtatatttgttagtaaaggcatggctacctatgtttggaaacagccaatatgctgaggtgacagaaacagaaagcagaagttgtgagagcctgtgcatgagttagtcacctatgaggaacactgatgtgctgaagaggaggctgcagaggcctcatgtacacgagcctgagcgtggtgagccaagaagggagctgcagactgactggatggggtacagcctgagattcctgtggtctctggttcagggccctgcttctcatgctggggacgtctctaccatgggtaataccccaggaatcctcaccacctaacctgatccacctggaggaaccccggcttgggagatggcagggcagatgctcttggcagcattcaggcctgggcttaagttactccctgatgtggccatctgctatgccccagggataggaaggaaaaatgggcctgaaggaaaggaggtaaaagaagtagaatgagggtcaacacactcagggagcacaaggcaggaaagtagagagaccaactgagagagtggagggcgtacccttgttgagtctggaaggaaagaggaggagctgtggagaggcaccaggataaccctgtgctgaagggcaaggtagagagaccccagagtgagggtctataaaaatgtcctgatccccccagctcccaggacaaggggatggaagccagcgagaagcagagtgaagtcctgaagctgagcgttgtaatgtctcggtagacctgtgggaaagctggctgcagcctcaggatggaggtctggaagacagaaggtacacaaggggcccctctccatccactcaccagggcttgttgcttctgggcttcctcctgccagaggctccagatcttcactgccatctgggtgggaggtcaggttgggtcttggggggtctgcagggagagaaaagcattgtcacccaaccaggacatggaggaccatccagacactcagtgagaacctcctggctctcctgacttttctatgctttatcctgcacgtggctcctgtgtgtggacgaggtgctgcactgggcgactctggggatgcctgtcctgtagggttcccagtccagtgatggagagggagccaaacaatcacaatccagggtgatcaaagctgtgacagctggggctggggatacaaaggacttgtgacagctctttaatgggcaggatctgccaggtggagaggcacgtacttccttagccattcatgatttattcactgacccatgggccacacattgcctgaggcctccatgggccagggacagaaaatgtcagggtcccagagcccaagcagtcctgagccataccctccacaagcttccccaaggaagggaacagagtcaccatccaggagggatacaggccacagcggagaaaacgccactgctgtctttgaagactgagaagccatgagtcaagcaatacaggtgacctccagaagctggcaacgggccaggaaggactatctacgtgctggagcctccagaaggaacatggtggccctgccaacacctcgcctccagcccagccacatgcatttggaactcctggcctccaggactgtaacataataaaagtgtgctggtggaagccactgtgtttgtggtatgtgtaacagcagcaataggaaacggatacactactcatacattcacacaaatgggtgaaggggcagtcgaggtaaacacacttcttactgtgggctgtagtttaaaaattcaaaaagacactgaggtaggacctcccacgagatgcttcttagcacacactggccagtctggagaaagtctgccccaatgtgatgagattctatcaaatgatagtttccaccgtgtgttatcttttacttctttcatcttttggagtaaattatttttctggttcttcaaaaagaaagaactgaggcaacagagagggaaaatgagttaatcaggtgacactgatggggagctggggtgatatggccttggagctgcacagaccttagctggagtctgggccctgctgctgtctcactgtgtgacactggtgtgcagaagagggcgacacagcaggctggctgctctcctgggaaaagcctgctggcaaggctggatttcaggggggtaccgtggtctccagaactgaagagacacgctccctggacctaaactgtgcaaacacggtggcttacacctgctttccttctggggggctggaattttggaatgtgccaggcagaggagcccacatgaccagcccccagtaaaaaccctggcactgagtctctgatgagcttccctggtggacagcatttcacacgcgatatcacattctacagtattgctgggggaattaagcatgtcccatgtgactcccctgagagaattctggaagcttgtgcctggcttccttggactttgccccatgtacctcctccctttgctgactgtgctctgaatcttttcactgtagtaagtcatagccatgagtctgactacaggatgagtcctgggaatcctagccaatcactgaatctgtgggtgctcctggggacactgacacagctgggaaggtgactgccactcttttaacctcagtttcagaccaatcggcaaaagagggacaacccagcttcttcatggggtgactggaggattgaacaagcaagtcctaagagctgctactcaatcattcattagtttagagctgtctgctgggccctagagcaggtactgttcgttccaaacactggggacacgccctgtcctcacacagctcccgctctgaatgatacaatggtagttagaacgtgagggagcgacagacaagatgagtaggagaggaggtatggagttctaacagggtcccaggttaaactttaaaaatgtaagccctgagagccacttaggcagaggggagggcaactggaagactttgaagtatcagcttgaagaatgactgactacaagtaggaaagtggtgaagacaaggctggggaggcagataggggccagagcagggtttcccaggcttagcactactgacactggcgtgggccaatccttggttgtggggctgtgctgtgcactgtaggatgtgtggcagcctcccttggttccaccagctagatgctagcggcacgctgcgctggcccaaggagtaacaatcaaaaatgtctccacacattgccaatgtctcctcggccagctgagaactgctgggctaggtcatgctgattctgaggagcccaggagccaggacttcaccctgtgggtggtagagagcatgggtgatcaccaagcagggcagtgagtaggcccctggggacaggcaacactcacccagcaggaagaggtcctggcaattgtccaacgctgtgtcccagaacgtgtccccctgttccagcccgagctgctcccagtctcccaaggtgaagtccatgccgacatccttgagggtcacaaattcct

SEQ ID NO: 1672 - DNA, 9618 bp, Homo sapiens
aggaatttgtgaccctcaaggatgtcggcatggacttcaccttgggagactgggagcagctcgggctggaacagggggacacgttctgggacacagcgttggacaattgccaggacctcttcctgctgggtgagtgttgcctgtccccaggggcctactcactgccctgcttggtgatcacccatgctctctaccacccacagggtgaagtcctggctcctgggctcctcagaatcagcatgacctagcccagcagttctcagctggccgaggagacattggcaatgtgtggagacatttttgattgttactccttgggccagcgcagcgtgccgctagcatctagctggtggaaccaagggaggctgccacacatcctacagtgcacagcacagccccacaaccaaggattggcccacgccagtgtcagtagtgctaagcctgggaaaccctgctctggcccctatctgcctccccagccttgtcttcaccactttcctacttgtagtcagtcattcttcaagctgatacttcaaagtcttccagttgccctcccctctgcctaagcggctctcagggcttacatttttaaagtttaacctgggaccctgttagaactccatacctcctctcctactcatcttgtctgtcgctccctcacgttctaactaccattgtatcattcagagcgggagctgtgtgaggacagggcgtgtccccagtgtttggaacgaacagtacctgctctagggcccagcagacagctctaaactaatgaatgattgagtagcagctcttaggacttgcttgttcaatcctccagtcaccccatgaagaagctgggttgtccctcttttgccgattggtctgaaactgaggttaaaagagtggcagtcaccttcccagctgtgtcagtgtccccaggagcacccacagattcagtgattggctaggattcccaggactcatcctgtagtcagactcatggctatgacttactacagtgaaaagattcagagcacagtcagcaaagggaggaggtacatggggcaaagtccaaggaagccaggcacaagcttccagaattctctcaggggagtcacatgggacatgcttaattcccccagcaatactgtagaatgtgatatcgcgtgtgaaatgctgtccaccagggaagctcatcagagactcagtgccagggtttttactgggggctggtcatgtgggctcctctgcctggcacattccaaaattccagccccccagaaggaaagcaggtgtaagccaccgtgtttgcacagtttaggtccagggagcgtgtctcttcagttctggagacacggggtacccccctgaaatccagccttgccagcaggcttttcccaggagagcagccagcctgctgtgtcgccctcttctgcacaccagtgtcacacagtgagacagcagcagggcccagactccagctaaggtctgtgcagctccaaggccatatcaccccagctccccatcagtgtcacctgattaactcattttccctctctgttgcctcagttctttctttttgaagaaccagaaaaataatttactccaaaagatgaaagaagtaaaagataacacacggtggaaactatcatttgatagaatctcatcacattggggcagactttctccagactggccagtgtgtgctaagaagcatctcgtgggaggtcctacctcagtgtctttttgaatttttaaactacagcccacagtaagaagtgtgtttacctcgactgccccttcacccatttgtgtgaatgtatgagtagtgtatccgtttcctattgctgctgttacacataccacaaacacagtggcttccaccagcacacttttattatgttacagtcctggaggccaggagttccaaatgcatgtggctgggctggaggcgaggtgttggcagggccaccatgttccttctggaggctccagcacgtagatagtccttcctggcccgttgccagcttctggaggtcacctgtattgcttgactcatggcttctcagtcttcaaagacagcagtggcgttttctccgctgtggcctgtatccctcctggatggtgactctgttcccttccttggggaagcttgtggagggtatggctcaggactgcttgggctctgggaccctgacattttctgtccctggcccatggaggcctcaggcaatgtgtggcccatgggtcagtgaataaatcatgaatggctaaggaagtacgtgcctctccacctggcagatcctgcccattaaagagctgtcacaagtcctttgtatccccagccccagctgtcacagctttgatcaccctggattgtgattgtttggctccctctccatcactggactgggaaccctacaggacaggcatccccagagtcgcccagtgcagcacctcgtccacacacaggagccacgtgcaggataaagcatagaaaagtcaggagagccaggaggttctcactgagtgtctggatggtcctccatgtcctggttgggtgacaatgcttttctctccctgcagaccccccaagacccaacctgacctcccacccagatggcagtgaagatctggagcctctggcaggaggaagcccagaagcaacaagccctggtgagtggatggagaggggccccttgtgtaccttctgtcttccagacctccatcctgaggctgcagccagctttcccacaggtctaccgagacattacaacgctcagcttcaggacttcactctgcttctcgctggcttccatccccttgtcctgggagctggggggatcaggacatttttatagaccctcactctggggtctctctaccttgcccttcagcacagggttatcctggtgcctctccacagctcctcctctttccttccagactcaacaagggtacgccctccactctctcagttggtctctctactttcctgccttgtgctccctgagtgtgttgaccctcattctacttcttttacctcctttccttcaggcccatttttccttcctatccctggggcatagcagatggccacatcagggagtaacttaagcccaggcctgaatgctgccaagagcatctgccctgccatctcccaagccggggttcctccaggtggatcaggttaggtggtgaggattcctggggtattacccatggtagagacgtccccagcatgagaagcagggccctgaaccagagaccacaggaatctcaggctgtaccccatccagtcagtctgcagctcccttcttggctcaccacgctcaggctcgtgtacatgaggcctctgcagcctcctcttcagcacatcagtgttcctcataggtgactaactcatgcacaggctctcacaacttctgctttctgtttctgtcacctcagcatattggctgtttccaaacataggtagccatgcctttactaacaaatatacctccatatcctctagtagtgacacttgagttgcatagttaccacataagcgtctttcccctttaacagcatgccgctcttggaagcagggcttagctgattcaccctgtattcccagctcctgacatcatgcttggcatataaggggtgcctattacatgtctgttggtgcatttgaggccgagggaacaacatgagcacaagtgtggtgaggagagtgagctggatatctgtgggagagatgagcagaggcaaaggtgacaattcagaacaagatgtggtttcagaaggctttcatttgcaagttttaattccaggcagagagactttaagcagtctcatagatactcagatggtgagccaagaactgcacaagggacaggctggaaaaggtatgatgatggaggagaggagagatggggagactggaggcatacagcagagcagtgacattcatgttttgtgaaggatcccagagagcatacagcttggtagttaagaatatgggggccaggcgtggtggctcatacctgtaatcccagcactttgggagggcgaggcaggccggtcacttgaggtcaggagttcgagaccagcctggccaacatgctgaaactctgtctctactaaaaatacaaaaattagctgggcgtggtggagggcacctgcagtcccagctactcgggaggctgaggcaggagaatcacttgaacccaggaggcagaggttgcgttgagctgagatcgtgcagcacttcagcctgggcaacagggcaagactcagtctccaaaaaaaaaaaaaaaaatatatatatatatatatatatatatagtcagaggggttcaaatcctcagtcttctgctcacttacctgtaagaaagcagaaacgtgcctaccttacaggaggttgtcgagtgtaacagagtgcctgaggcactcctgcctgtgaacaagcataccatgaatgggaattactctgtcctgtgaatctttctcgtggccgcctctgtggcagtggatggatgagcagtggaaggtccccattaaagaacttaccttctggtaagggtcaggggtcagaccctttcataacctgttatggtagaggatggtcagtgctcagctggttttcagagaatacagggcaggggacttaaagcagaatggggatggggttgtcagggaagcctttcagagaagggtgataagctgggtattaaaagacttagaggagttagtccaggaagtgccatccagcatgagggaccattaaaggcacagaggagaaagtctggtggatttagggaaccgcaagagttctatgaggtcagcacaaagaacactgggctaatacactcatttcttttctccaggcaggaagccatggaagggtttaatcagaggagtgatatagtcagatccattaactacaaagccctttagggctagtgtggaagactagagagagagagagacagacaaacaggagaccaatgagcagcctggggtcagatgctgagtcagtgataaagagaggagaggaagggagttgagacatttcgatagagaccaaatgaaaatagtgccaagttgagggaggtagggaggaggttgactcccaggattctagcatggagaactggatggatggtggtgtggggagagcggggtgttgtctgggatagaggatgcaggatatgaggaggaagattttggtgacagtacaggatagagtggagagtagaagcaggtgagtccaggcgattttttagggaacttggtcagtcacttaggtgtgaaggtaatggtagaatctccctcctcgttgaaccctatggtttcccaactcccttcttgaccctcctgggaatgggctctgtctgttttctgtgatgccagttccacatgggtcacccctttgggtcccttgatggataggctggactcaagatctatcacccctacttgctcttgtctgtgttctcacccttagtgaacaggagacatttgcacttgctctttcagatgtgactgagaccaagaactctcctctgatggaggatttcttcgaagaaggattctcccaggagattatagagatgttatccaaggatggcttctggaactccaatttcggagaagcctgtatagaggacacctggttagatagtttgctaggcgatccagaaagtcttctgaggtctgatattgccaccaacggggaaagtcccacggaatgcaagagtcatgaattaaagagaggactcagtcctgtgtccaccgtttccacgggagaagattccatggtgcataatgtttctgaaaagaccctcacaccagctaagtctaaggaatataggggtgagtttttctcctactccgaccacagccagcaggattctgttcaggaaggggagaaaccatatcaatgtagtgaatgtgggaaaagcttcagtgggagttaccgtcttacccagcactggatcactcatactagggagaaacccactgtccatcaagagtgtgagcaaggttttgaccggaatgcttccctttctgtgtatccgaaaactcacacgggctacaaattctatgtgtgtaatgaatatgggacaacttttagtcagagtacatacctgtggcatcagaaaactcacactggagaaaaaccatgtaagagtcaagatagtgaccacccacccagtcatgacacacagcctggtgagcatcagaaaactcacacagatagtaagtcctacaactgtaacgaatgcggcaaggcttttacccggatcttccaccttactcggcaccagaagatccacactcggaaacgctatgagtgttccaagtgccaggcgaccttcaacttgagaaaacacctcatccaacatcagaaaactcacgctgcaaaaactacctctgagtgtcaggagtgtgggaagatttttaggcacagttcgctgctcattgaacaccaggctcttcatgctggagaggagccttataagtgtaacgaacgtgggaaatccttcaggcataactctaccctaaagatccatcagagggttcacagtggagagaagccttacaaatgcagtgagtgtgggaaggccttccaccggcacactcaccttaatgaacatcggcgaattcatacaggctacagaccccacaaatgtcaggaatgcgtcaggagtttcagccggccctcacatctgatgcgacatcaggccattcacaccgcagaaaagccctatagctgtgctgaatgcaaggagactttcagcgataacaatcgccttgtgcaacaccagaaaatgcacactgtcaaaaccccatatgaatgtcaggagtgcggagaacgcttcatttgcggctcaaccctgaagtgccacgagagtgttcacgccagagaaaaacaaggattttttgtgagtgggaagatcttggatcagaacccagaacagaaagagaagtgctttaagtgtaacaaatgtgagaaaacctttagctgcagcaaatacctaactcagcacgagaggattcacaccaggggagtgaagccctttgaatgtgaccagtgtgggaaagcctttggccaaagtactcggctcattcaccatcaaagaatccactctagagtgaggctgtataaatggggtgagcaagggaaagccatcagcagtgcctcccttatcaaacttcagtccttccacacaaaggagcacccttttaaatgtaacgaatgcggaaagaccttcagccacagtgcacacctctcaaaacatcagttaattcacgctggagagaatccctttaaatgtagtaagtgtgacagagtcttcacccagagaaactaccttgttcagcatgagcgaactcatgccagaaagaagccgttggtgtgtaacgaatgcgggaaaacgttccgtcagagctcatgcctttctaagcatcagagaattcactcaggtgagaagccctatgtatgtgattactgcgggaaggccttcggcctgagtgctgagcttgtccgccaccagagaattcacactggagaaaagccttatgtttgtcaggaatgcgggaaagccttcacccagagctcatgcctttctattcaccggagagttcacactggggagaagccctacagatgtggtgaatgtgggaaagcctttgcccagaaagcaaatctaacacagcaccagagaattcacacaggggagaagccttactcctgtaatgtgtgtggcaaagcttttgtcctcagtgcccatctcaaccagcacctgagagttcacacccaggagacactttatcagtgtcaacgttgccagaaagcctttcggtgccactcgagcctcagccgccatcagcgtgtacacaacaagcagcaatactgcctgtagccattgggtggcagcagagtcccagaatatgagaccgttactcggatgttgaaagttggaaactatcccattgcaagtttctctccaaataaatgcatctaaagattgattagaaagtttgtgcgcatgtttttcattataacaatgaaaacacaaaagtggagaagctgtacaacgtcaggattcagaggtaggctctggagccagtctaccttgagttaaatcccacctctgccatctactacctaagtgaccttgggaaggtcagaaaaatctctcagggcctcggtgtccttatctgtaaaatgggcatcacctacctcagagggcttttctgaggattaaataaataaatgtgaagcacttagaactgatggccagcacatgagggctcaccaagtgtaagccacaaatacacatcagctatagcacaaatatacttgtgttacaagaaaggaattagtaatctgtgtttactgtagttaatgttcttacaatgtatcgcttttaatttaagttttccttttttacagtttttctccagcactttactcttcttaagtgcctggccttttttgtccctttatctctcctggtttttttcttaagccccagaaagccaaaaagaacatgtaaactcttcacctcaactagctacaaccttccactcctaacctcccaagcttctcacttaaagaggactccctatcccacaaacacatgctccctcttcctatgaccttcctccatttaacagtgttggttatgcaataagacacccaatttttcatgggagttgacaccaaaacacagctggattccatcaggaaagctgcattgatcagggtgttaaccgcatatgaaacaacccatatggaagacatacttaggggtcaaacctgtggtgtgtggaagtgaccactgggatgtcatcattcaccatttatccaggatggccgctcaccaggcaatttgctaggctcgggggcgggtagtatccatacactatgcactactgctctgaagcttctggaatcagaaatgaacccattttcatcgacgattgctgttagttgacaagtgacatcttgaaaatgccacattccctcatgtcacaggaagttctgggatcaccaaggattgttggagagtccagtgagatggaaccacacaaccagttccctaccagtgtcttgtcagctctgggtgtttgttccctgccactaagtggctcagtcacacctttgctgaaacacagtagtcttatgaaaagcactggacacatactttgaatacctttcatattttaggtgctgaaaatggtgagggagtgagtgctctgcacccttgggcttttcaactcttgcacctggagttctgctggttaagtttgttaaacttagttgaaactgggaacctgttggctaaccattggggccttacactgtttttcaaatggttgcaacatttaacttctcgcacatggttcccgtcctctggagctctgtcttgtcggggagatgggcatgttgtataccaaaagagtgtacaaagtgttgcagggctgtgacacaatagggactctatggaaaactggcagccattgggtgtgggggcagtctgtaaatcagtcacctgtgttgctgcaggccaaggtagaaacgccctccgtgtgtgcatatttgttggttctctgattaaagttttgagtctaaaa

SEQ ID NO: 1673 - DNA, 23071 bp, Homo sapiens
caagtttctcctctagagaaagagcaccctctactgccaatatctggtattgcttatgttttaaatttcccatagatttccgaagttgcttgagactgctagcctctatgtcttgctttaataatttctgcatttctcgagaaggacatccaggatcaagtattagtaagcataatgttcggttttttttctcttcaattccaataacagttcgactgtgacctatcaaaagatttttaagttatacatacgtcacatctatttacagttatacaaatagtctctgtatgtatgttgtgtgatcatatgtgtgtttagaatataaatacagtcagactctgacacatatgtatctaagttctcctaagacgtaagagtttagttctacttcagttttttcatttaactttagttttctaaaggcttcattaccaaaaaaaacatttttattctgccaaatattttacttttcctttcccaatcctttgatccttcttattcaaattatctcaaatgaaagaacaaaaactgttctagaacaaaactctcatgattccaaaaggtaaacaaaagtaaacccataaatgctagaatatcagtggagggagcttaatctcttatagtttatattcctaaacaatgaaattcctaacatttacttctgtttattcctgtcaatccaaaccatcattcataatttaccaagtatctatgtgccgggtactactccaagcacgaaggtatataacagcaaacaaaacagacaaacgtgcctgtgttcttggaacttatattctaataggaagagatactctataaatgaggtaaataagtgaagaaaatgccagcggtgggatgctgggatgagttgtacgtgtttttgacacagcctcactccgccgcccaggctggagtgcagtggcagaatcatggctcactatagcccccaactccaaggctcaagtgaccctcccacctcagcctcctgagtagctaggactacaggcatgtgccaccacacctggctaattttcttatgtttttgtagagacagggtctcactatgtcactcaggctggtctcaaactgctgggctcaagcaatcctcctgctttggcctctgaaagtgctaggattacaggcatgagttaccatgcctggccttgagttctacttttaaggtaaggtaaggtcagggaaggcctcactcaagtgacatgtgggtaaagacccaagaaggtaagggatgaacaatgaaggacaagtgaactaaacacagaaaacaagaagtgcaaaaggtcctgaagatgtcaggaatatcagtcttaattacccaatgaagtattgtagaaatatcaatcttaattacctaagaaagtattgtactgtcaaaggagctctgaaaaattaaacagattaatgtcataatactccctgctattatcagaccagcctggccaacatggtgaaaccccgtttctactaaaaatacaaaaattagccaggtatggtggcaggcgcctgtaatcccagctactcaggaggctgaggcaggagaatcacttgaacctggaaggtggaggttgcagcgagccaagattgcaccactgcactccagcctgagcaacagagtgagattctgtctaaaaaaacaaacaaacaaacaaaaaaccttaacctgtctgaaagcaacaatttgttatcttataaacaacattgtcaaatatgagttatattaatactaaccttgatgctgaagatagataggaggtttagatgtacacactacctttggactcccttctccctctgaagaataatagttcaatatccattcaaataagcgagggtgtgtacccaaaggaccagttgatttgtgaaaatcaacaatatgacacctattaaaaattgacaaaatgcacatttaaagggcattttaaaatattttcatcgatggagttatcaaatacaacaaattcttagtttagaactaactgtttctagccattactttcctataaaagaagaaaagtaaatataaatttttattacttatctaaaaaactcctttttgtgggggataactatttaacaattctccctatttaactatttaactattcctctaactagctaactatttaaataacttcataataagtctgctgactaacctaaaggttacaaacattctctgatatataaaatctccatgaatagtaaataatgaccatacttgatttttaaaaagtcatctacacataattttttcacagcttttattctagtttctaaccctgatgatcagaagctgatttctgattttaattcctcagtagccattggtatatataaaatagatcctaaatacttttcctgtcggtctctcaaatctctataacagaaaatacttgtaaatcatagaaaaatgtgtgtgtactcaatctatacatctatctcctatttgccaccggaccaccgtggtattcttccttcaagaggaagtcacccttgaataaacatttttttaaccagaaacactgtttatactactcaacaactgtttttaaaaggtcgggtataactaaaagcatttgatagctttatcatcactttaaactacagcacagatatcctgttcttgtttctcttggcaataaaatctctaaaacatccgaattgctaacctcagcctcagcaaatttaatgctggtaacttacagttggttactgggttttaagtgctcaaataaacttctggataaaccgtttaaaaagaatgttttggggttagcagtttgcatatttacatttagaatactaattaaacagtaccctacaggatataactcatagagagagcaacagaaagacatgtaaataactactaaacacactcaggatatattaataaaaaagctttctaaattatttaaggtaccaagaaagaagctggacaaaaattacggctgggtgcagtggctcacgcctgtgatcccagtactttgagaggccaaggcgggtggatcgcttgagcctaggagttcaagaccagcctggacaacatggcgaaaccccatctctactaaaaatgcagaaaaaaaaaaattagccaggcatggtggcacatgcctgtaatcccagctactcaggaggcaaaggcacaagaatcacttaagcctgggaggcaggggttgcagtgagccaagatcgcgccactgcactctggtctgggtgacagactggagacagactctgtctcaaaaaaaaaaaaagaaaaagaaaaagaaaaaaattactttaaaactcaaaacatgatagagtataaataatctcaaagtgtgaacacattggcaaaaagaaaaaggagaaaagcaggaataaatttagagggcattaaaatagttctttaaataattcaagaaagttattatacatacacacaacattagtttttctatgttaatgaaagaaatatttttatttctgaatctaatcaatcaatgtggtaaaaagaatgtgatacactggttaaataacttagaaacaaacataaaagaaaatataaagccataaagcttaacgcaaacattccattaaacacgatcacagacatctatctctatttcctcttaaaaacccaatgacataatactgaaggaaaaaatgatttaaacacccaaggacaaagagaatgggaatagacaggaaaagagctcacatcttcagaaaatggaaagcaccacagagaacatataaaagtaaataaaagaaaatggagaccgtatgtttcaaaatcagagagaggctgaaagcttagaagcataaggtttgagaacagtgaggctaaaaatatgagattaattaaaagtttgcttagaaggcaaatcacaccttaactctcccctccactaatgtaggaactctaggtaagagagtgaaaaactcttctctggataacttctgggaaaagatctctctatataacgatatttgagagttccccaaccaaatagtaaccttccgccttccacctaagacttttaaataagtctgctaatctgcaagctctgtgcagtcctacagcactctaatcagctttttaatgtttcattcttcactctctgaatggacaactaaggatttccaaaattaaaagaaagccttcaaaatagaaaagactaaaacaaacagatatgaaaaaatactaatatcgaacaaacaaaatgcaggcaatagaaagaaaacattggaagaaattttgcaaccataaagaaaatgatgctatgaaattaccccttaacataatgggtaaaataaaaatttcaatacagtaattgggggataaagttgagtaaatctagaaaatagagaaaaagcaaagatttttaaaaaagagacatgataaacttagaaggtaaagaagcaggccgggcgccgtggctcaagcctgtaatcctagcacttcgggaagccgaggcgggtggatcacctgtggtcaagagttgagaccagcctggccaacatggtgaaacctcgtctccactaaaaatacaaaaattagccaggcgtggtagcggaagcctgtaatcccagctactagggaggctgaggcaggggaatcgcttgaacccaggaggcggagcttgcagtgagccaagatcacgccactgcactccagcctgggcaacacagcaaaaactccgtctcaaaaaaaaaaaaaaaaaaaaaaagattagttcagtggccaactatcaatagttccacaaagaaaacagagacattataattatcaaacaacaatagttaacctctgaagtcatgctgtatgccagtcacagttctaagtactttattatcccatttaattgtctaactactattaataccttcttttatcaatagtagacctaagtacagacaagttcattcattcagctattaagtaggaaagctatgaatcaaggttaggcagtctcgctccaaagttcaagctcttacctactatcctagatggaactaagatcttagacaactcacaattccagattcaaagagaaaaacaaatgcccaacacaatgaatcaaagccccacaccccatggtgaaatttcataatatcgtgaaattatgatgggctaagagaaggttggaataacttccacagaaaataaataggttatacattttaaaaatgagactacacacacacacacacacacaaaacagtgaaaaaatgctacatgacaatagctgtagatctagaaggcaaaaagtccagattggagcaaagaggacagaatgctcaagaaggatgtgtccgagaataaggagagcctcagattacatgacaggtagagtgcaaaaacttgaggccatgatgtcgtcacatattatagtaaaagagaaaaggaaacacaattattaactcaagaaaaattataaatgattttagaaaaaatcagcaacaagcaatatttacacaattgtataataaaatctgactttataaaatgatgtaaactctgattttaataaaaaccaagatttaatcatatcagaaggattgaaggtaaacaggtataagatattaaaacagactatctgaaactcataaaccaagaaacagctatgaaagcataccatttaaaaacaatggaagtgacagttgcctctgagagacagaacttgagggtagagaagagcacaagatagtgaataggctgctgattttcattgctacttaatttagtgctacttaattttatttttaaactatctctttgctaaaaaataaaattttacaaaacaaagctccccgataaggaaataacatttatttaggttttaaggtacatactttacccttagggaggtcaggagtatatatacttcacatgctccaatccaggcctttgttccctgtaacctgttattaagttgagaggccccctgaggatcaaaaccttccttccatgcatcttcaatcatagattgaatttttggaatgcaaggaatcaacatacctaaaattacacaagcaaacatgttacatgactgttaataaagtactgaataatatttagcagtgtattatgtactcggggaactttacggtttttaagacagttattcctgacatcttctatcattttctcttcctctaaccagaattcaggtttcttatataaatatccactaactgttaaagctattaattgtgtatgctatatcattctatatcatatgtattttatcagatgacaagttcagagtactagatttcacataccttttaagcaatcgttgtaagcatcattttgtaataatgatgaaagtagcatttggaaatttctgtaaccacaaccccaacctttgtcgcctaaagatgaatgaaagtgatccaccactgaagaaagccacacccgtctcacatctgtggcagcattctgataatacctatgaagtgcttcaataattcctaaagtagaaaagagattcagaagcagtcattatcacctttatattgctatctcatacatttttaatatcaacctctccttcacgcaccatacctaaatcctgttaattccatcttcttcaccttcttcttgctataaccttagtttgtgtccttgcttgttactacagtccaagtttcctaacactagcatattatttattacagttcattgaaattttctgcatctgcagggcccagcacataaagtacaactgttgaatgaatgttcttcttgtgtctccattttattgtatagactactggagatcactcagtcttaatcaatttgctcccaatcaaaaaatattaatagctccctattaccaatagttttaatttttttgtaatttaagattttattttgcagattttgcaattttcgaagcatgagaatacacaaatgttttcatttaaaaactcttgacttcatgaataataaacatatctcatactccaatacgctaaatttcaaccctttagtaacatattccattttgctatttggggagattaattaatttgtttgagacaacagaagacaacttttcttaaggcagaacaataggtttaggaatcttattaatagccttataaacctaattagaatagttctaatctatgttatatgaagtctacagaaagctatccactgtcttatctttatttcacactactcttcttgctgtaattttggctgtggcctaactgaacacattaaacataatttggcccatagagttttattaaattttcaaattcagtatttgctaagtactttttaatacacctggcactatctaaatgctaagtacaaaaagataaatatgataatatcctttaaaatgtcatcgaccccaactataacaagtgctataatatggaaaaacaaggtgttaggacaagggacatctgactcggcccctttcctgcttttagtatattctccttatgtttcaaaattatagatccttcacatgctactgtcttcatagaccctttttctgattctaccctatttttgtgtccccaaggtaccagcaacattcagtcacagaatactataattctttgtgtatatttacatactctacagactctgtgaagcctatgggtagggagatcttattatatgccccataactttctcatagcatgtggcaccaaagacaataactaaattctttttgcttgaatgaagggtttcctagaagaaaatgggtttttgtctttaataaagacaataaaagatcaataaataaaaacagttaaatgaaccaatagttgtagctgtgccttgcaccatgaaaaggtgaaatactgatcactgtaaccacttccaaagaacttagaaagacttgaattcaagaaaaacaacaattaaaatagtatataactgagtactaaatgttgtagcatggaatgaatgggtaccctaggaattcagagaaagaaagctaaatgtagattttaatatcatagactttgatgaagagatcaagatttgaggcagccctttaagaatgaggtggagtaggggacagaaaaaatagaaaggaaagtaataaacattctagtacattttagtatatatgttacatatcagatggagagcaacactgtcttagcaacatcatgcaactgctttagggggaaatttccttatactttttattccttagcacctaaatgtctttagatattttccacagtaaatttatcttcagttaaattatattctgttgttaaaattataacaagattgcagtatataagtgaagactctttaaatgatagctgcttaaattaacacttgcataattaacgaaaaataaaaatctctgccactaaatcacttctatattacaggacagtgtgcttttttacagacatatttaatattttcttcctgtatcctaatgaatcatatcacacatctggaggatgctctatgctatagtgagaacttttttacatggagacccctgaagaaatataaaggcagcctttagaaacagaatcatggatatatgaaaatctataatatatagtatcacaaataggtggagaaaatgcagattcaataaatggtagtgaaataaataagcataatatgtacttgctataaggactgttataaacaaggagaaaataatcagattcctatcttctccctcctccctccaacatacacatgcaaataaattctgggtggatttaaaatcaaaatatgaaatgcaaaatataaatatttgaagaaaacataaaggtatatatttgtgatcttaaagatgggggagttacttaagacacaaataataaatagaaagattgagaactttgattacattcaaattcaaaacttctgtctaattaaaggcactatatataacatttaaacacaaaccacaggcctgaaaaagatatttggatttcatataactaatgaaagaatagtgttctgaatacttaacagtctcctataaatcagtaagaacaaacaactcaatagagaatagagaaaggaagagaacaggtaattcgttcaagaggaaactaactcaggagtaatccagaaaatgcaaattaaaacatgtatcatctcataacctgttaaatagcaaaaatttaaaagtgtcaccatactatgtgtgaaatacactggtgtgaatgtagattacaagcactttggaaaacaattctataataaccttaacaacgttgaagatttgcacgccctttaacttagcattccagttctggatgtaatactagagaaacgcctgaagtagacatgttcataaattataagagtagaaaactggaagcaatctaaatgtttatcaatatgaaaacaagataagttagctataattagctacatccagttctggatgtaatactagagaaactcctgaagtagacatgttcataaattataagagtagaaaactggaaacaatctaaatgtttatcaatatgaaaacaagataagttagctacaattcatacaaggaaatactacacagcagctaaaatgaatgaagtagaactgtaagaaccaatatatttgagcaaaacaatttatagcatacatgttgtatcccatttatatataaacacctgcaaaatattttatggaaatgtacatacatggtaagagtactaaagcatgtatgagactgataaatatcaaacttgggataatagttcccttgtggggagggcaaattagaattagaaaaagtgtacataaagggctttgaatacctatcaaaggtgttgaagctttaaaaacttttaagtaaatatggcaaaacattaagattcaaaaaatctgggtgacagtaacaaagttgtttccataaaaagtctgttaatatactaatatatacaaagaaaaaaattttaatactcatcagaaaaaagccatattatggggcaaggaagatttgattaggaataaccagctgtgtaaccttgctttggcaaagtcactgtaacttctctaagcaacagtgacctcatttggaatatataacagtacaggagaggatgttttgagttaaatgatacaatgtatatagagttgttagtgtctaaaaatgtacaaacaataaaatagccaatagccatttgtggctatcgagaatttgaaatgtggctgcccaattgagttgtgctgtgaagtagaaaatacacaatggattttgaagaatgtataaacaatgtaaaatgtctcagtaatagttttaatgttgattacatgttgaaataataatatcatggatacactggtttaaactatttaaattaacttcccctgttccttttcacttttttttgttttttttttgttttttttgagatggagtttcgctcttgttgcccaggctggagtgcaatggcgcaatctcggctcaccgcaacctccgcctcccgggttcaagcgattctcctgcctcagcctccctagtagctgggattacaggcatgtgccaccacgcccagctaattttgtaatttttttttagtagagatgggatttctccatgttggttaggctagtctcgaactcccgacctcaggtgatccgcctgtctcagcctcccaaagtgctgggattacaggcatgagccaccgcgcccagcctccttttcacttttgttaatgtggagccaggaaatttaaaattatatatgtggctcacattatatttctcttagcactctctagagcatagctttttaaatgtcaagtaacataatataaaagtaaatttttaagtgaattatttatcataaaaataattcagaagttttaaaacaatacatttttaaaaaaatatttgtgcacagattatgaaaattaagcaaaattaaaatgattctgattattacttcagtggtataagcaatattaaaacaatgactctgatgtttaaatactcaccggaagtttttgtttttccatcgtcaaaaccaagagctaatgattccatcatatcagcttttctcctatgaaattcagatggaggcattcttcccctatttacttctatctccatatttcgtagttgttgttgtttgtatcctccagaattatctaaaccatattgtctctattgaacataaaaataaatgacttaatttttacatccctgtaactctatgaggatggaaacttattaaaattttatttggaaacatgttgaaacattctggtttatagactttatacaagttaacttaaagatttttacaaaaactaataacacacacacacacacacacaaaaaaaaattattgacttaataagcaaccacttctttataatcaatctccagggcaagagacttgcttttcctgtagtagggaaagcagaggatcctgtctttctacctcaggtattgggagatgcagaagagttctgaatgcattgctgattttttcaaggaaacttgtcagtccttgttatttggttcccagtctagtccataaaggcctacttaatccataattcatttagtcagtcatgttacacagtaaatgaactatgttttgtacactggacagaaatctcaaatagtatgtataaaactatggaaaaattgtctatggaaaagttttcacggaaacttttctacagaaaaattttctgagatctaaacaactaacttgcaaaattacataacctccttaaatattggaaactttttgtattgatcatgttttaaattacataaggcataaaagtcttaagaaaagccaattttctttcctattttgcaagtattgtgagtcaccagtgagaaaaaaatcctacattaggtcttccaaagcacattctaagcaacaatactcatgtgagatgtctgagaaaaaaagagaggtcaaacaagtctggggaaattgtgatatgtacatgcacattagtatattaaaggctttgagaagtcccaaagtatacaaacctgtttaactgaacactttcaaacctattcaactgtaaaccctttttatgtatgcactatcctatcatcactaaaaaaagaacatttaaaaactataagcaataggccaggcacggtggctcatgcctataatcccagcactttgggaggccaaggcaggtggatcacctgagtttaggagttcaagaccagtttggccaacacggtgaaaccctgtctctactaataatacaaaaaaatgagccaggcatggtggtgcacacctgtaatcccagctacttgggaggctgaggcaggagaatcacttgaccctagaaggcggaggttgcagtgaaccaagattgcaccattgcattccagcctgggcgacaagagtgaaactccgtctcaaacaaacaaacaaacaacaacaacaaaatctatgaatctatgagcattattagcacagataacactacagtctacaaattaggactgaaaaaaggaaaaacagacattaaaattttaaatgcattaaaaatataacagatgctaccagtttagtccaacaggtaaaaccacccacctaagataaatgaagcctcaaatatcatttaaaaaaagcattttcccataaaatagttgtaaatgtttgaaattgcaatctgtaaaataatttaagactcaggagacattaattctaagtataaatttcgcttccaagcatctatacaaacacttaaattctgagtcttggtttcctaatttgtcccatcaacttacacaggtttgaatgcaagctttatcactaattagctgcctgacactgagcaaattacttaaccattctctgtctccatttcttcatctgaaaaaaaagggggcgtgggagggcctaaagtaacttcttcatgaatatgttgcaaagattttgagatattgtatgtgaagtgattacccctgtgcctcactagaatgaatatttataaatggtgtctgttacaaacatgtataaattttttttgaataataacaaggacaaaaataatacactggaaagcatatttgaaaaataactttaccaaatcaaaatattataattgttattaatctttgtacctgcagcttctgaaattcttctatttcttgtcttgattcttcagatctcctctttctgtcttcttcttgctgaagctggtgagccaattgtagatcaccagaacactggactctatccatgcctgttaggtattgttaatgttcagaataaaataactgttgcaatcaaagattatttattatttaatatatgtttttaaaatagagtaaatgctgttatttgccatttattcatgactgtgatgatatggaactgagtacaaatttagcaaaacttagaactgctttggtaaggaataacctccatctaaatgacaactaacagtcactgttttttgttttttgagacggagtttcgctcttattgcccaggctggagtacaatggtgcgatctcagctcactgcaacctctgcctgccaggttcaagtgattctcctgctgcagcctcctgagtagctgggattacaggtgcctgccaccatgcccagctaatttttgtatttttagtagagatggagtttcgccatgttggtcaggctggtctcaaactcctaacctcaggtgatccaccagcctcggcctcccaaagtgctgagattacaggcgtgagctaccatgcccagcctcactaagtgtttaaagctgtgacaagcacttttcattaattatatcatttgatctttgtaacaatcttatgaagtagttattattatttactgaggaaaccagaattttaaaacgttaagtaacatcctgcattgatactccttaacataactaaggcagattgatttttcaaagaaatactaggggagaaaaaaaaaaaaataaagagcataaaaatacacatttacaaagtgcaggtgttagataataatttaattacagtttggcccccaaaaatggtaaaactttgcaacatctcatcctgcatcttctctactcggtgtcccccagatccatttgtcagtggcttctggccactatcttgtctccttaaccccatgacctgatggtttaattatatcactgactattcttcctttcctttcaaagttctcagctgctgctacatcttcctatttggtcacccttccattcttggggatatacaagtcacactcaatgtttagtgtcccctgaggttatctacagtgatttacttagaccatatctttttcttattacccactataggtttacactgtaatatacgtgctcatacaaagcctatcataaataagagtaagaattagcagacattcagaaaccaccagagcagggaacttttccatctttgccccaataatctcatatttggcttagggtgagtgagcagtaacattgtccatgaacaccgatactggtactaggatcattgatactggacactaaagacctctgccttaacagaagctatctacgtaccttaaaaaactgaaatagggtaaaacacaattggtttctcttgggatctactttttattttcgttcagtgggcttctaacattcatataggatttttccacttctaagccaccataatgattatttaaacaatgccactattaaaaaacataggggagaaaggaaaacttttatagaatcacaataaaaccagtaagtcatttagaagctattcaagcagctcaagatgcactgaaagatgttttggttatatagttcacattcatttgtaaaattttatgtgccatatggcagttttctagttcaacaattttcgctgaccaaatacaatattcagatacttctagctgctaaagaaatggcctcaacttgtaaataaaacacttttaaaggaaaagatgtattttaaaatattttttccatatcacaaatctaaaaattagatatgtgtcctagaaagtagaaattaaatgatatttttatcttcaaacatataaacataccttgctgaaagctgttttcttccaaatgcaagtcaacatgttcctgaagaatatggtaatttgtacatatgagcccacacataggacaatcatagagtggttgatcacagtctgtatcagagatataattaagttgtttttatttttttattttaatttttttctttgctttttttttttttgagacagggtctcactctgttgcccaggctggcgtgcagtggcaccatcacggctcactgcagcaatcctcccatctcagcctcccaagtagatggggctaaaggcatgcgccaccacgcccagctaatttttttttttttagagatgagatctcactatgtcgtccaggctggtctcaaactcctggactcaagtgatccttctgcctcagcatcccaaagtgctgggattacaggcatgagccaccatgcccagccaagttggttttatttttataacttttagattttttcaccccatgtcaaagactgtctaccacctattaaccttatataagtaaaagctctttgtagtggatttaaaagctatttttctacttctagggtcgagatagaaggctgagcatagcacaaacctctcataccactccaaaaaaaaaggaaatattaataataaatattcagatctgtagtcaaaacaagagaagcagaaaggaaaaccaaagtggtaagtagggcccagtctggatatgggtttttaggactaaattctcagcacccaacagagtggtaaggtgctgaacttaaacatccagcataaagctgggaattggggtaatactgtctacacaggagcaggagattaaagagctgcatccatcacatagcactgcaggcagacaggtctagcttgccaaaaacagaaattgttcctctataagaccaagacctagcagataagggacatagaagagggacccagaattgtgcatatacacagagtgaaagcatagagcaatctgtatatgtaaggcctggtctgaaagcagagactgtgaacagccagtgtgaaggaaccatgaaactgcttcacagggaagggatcatataaaactcccataacagatgaacactaaaatttgaattgctaaactcactgggggctgcaatgccaagaaaaacagctaagaaatctacaaactgaaaaagttacctgtgaagaaatggagctacagtaatccataataaactgtaaaataagtatgttcaaaatgctcactgaaataaaggagggaactgaatctttgaaaccaggacagaaagttactaagaaaaaatagaaagatgaagaaaatgaaaatattaagatgtaatcattggaataaaaaattcaatggcaaagctcaagagaaaatgaagtattaagtactcagaaaatatttccaaaagcagcagtaagaaataatggtatacagcttccataagtaatgctggcggatgtaagagaagtctttcagccagttctctaccataaaatgccttagagccagagccaatgccaaggaggcctttgcttatcgctttgatcatcacactactgcaagccaatccctccaccccttctagttttaagtgataaccaaccttcctcaacattagaccacactacacctcatatcccagtatacattttttaccaccagaatctaaactaagcctcagaggttagccatcatcatccaatggagtcatctagggctgatgtaaccaccaacactgttgtgtcaatgaatccaatctaattgttcagtggcagtgtcttaacaatctttaaatacctgaaggacatctgctaatctgacccaagctattacccctcctattctcccaatacctaccacaatgccctcagaaataccatcggtcatcagtcagcttctctatacacaaaatctttctctggatattcacttcaccttcttgacttaactaaaatctggttggttcatgacaccccattttctctacagccccctaacacacaggcaacttttctttcacaattcagggccctagaagtagaagaggcatcccctttgctccctttcaccactgtcaaacctgttttaagccccatttttgtaataactcatgtcaccataatatggcatcatctacctttcttagtgcctaatattttctgaagtcttagacactcctttcatttactaaaaatgttaacacctggatcaaaaccttcttttcctagcccctatactatgatcattcttagcaacttcaatatccatagaaatagttctatgccttcatttccaacaatcttttcctttaccctaatttaccaaccgaatgacaaaaattatacccttaatttatcactaagtgaatctctgaaatctcaatttcaaatatcactcccaaacacctatccttctacctcacttcttttaattctaccactctaaaaagtgtttgacctaactaaaacctcctatatagaatatacaaaccctatttttctgtcattcattacccccctcatgtttttctttactttccagcccagattccacatatcttctctatatgataatcattcccttaaaaacacctgcaaatccacctgttccatttactataactgaacattggttaaatctagctatttacctatttcacttctgtacttctaatgacaacaggtcttttttaaccgcaactaaacattcagactcctaagactaccaaaattcaccagtttactggtcctgagaaacttacaggaaatgttgtgtcagcaaaggattgtcaggcatttttcaatacacttgttttttttccttgcagcagtccataaattttcattattagcagataataaaatgatctacttagaatactcaagggaattaatgtagaattattaaaattcgttaacaggccagacgcagtggctcccacctgcaatcctaatgctttgggaggctgaggaaggaagactgcttgagcacaggagttcaagaccagcctgagtaacatagcaggacctcatttctattaaatattaaaaaaaaaaaattagctgggcgtggtggtgcaggcctgtagtcccagccccttgggaggctgaggcaggagaaccacttgagcccaggagatcaaggctgcagtgagccatgatcatgccactgaactccagcctgggtgacatagtaagaccttgtctcaaaaaatataaaataaaataatattagtaatagttgaataagactagatacctcaactatctataaaaattgatagtgtttctataaaactgcaaaagtttcttagatgagagggaaaaaaatctaatttacaaaagcaacagaaaatataaactatacagaaataaagctaacacaaatgtgcaatgaaaaaacaacacaagcctgggcgcggtggcttacgcctgtaatcccagcattttggggggctgaggtaggtggatcatctgaggttaggagttccagaccagcctggccaacatggcgaaaccctgtctctactaaaagtacaaaaattaactgggcctggtggtgggcagtggtaatcccagctacttgggaggctgagacaggagaattgcttgaacctgggaggcagaggttgcagtgagcagagatcgtgccattacactccagcctgggtgacagggcaaaagtccatcaaaaaaaaaaaaaacacacacacacaaaattgtattaaaggatacaaaagatgacctgaattaatggggagatgtactttgatctaatttaaaacaaaatgacaacagagtttttatgaaacttgataatatggctttaaaactcaaagaaaagaaagaatgagaaggtctaagttgatgatgaaaatgaagaacgagggaaaaactgtcctatctgatgttgatgacattttacaaaatagctattaaagtggtggtgtaataagggaacaaaagtcacatagataaatacagcagaagtaagagaccagaaactggcccacacagatatgaaaatgtaataaaaaacagaaaccatattataaatcagagatatatctggtttctgtacagggaaaaactaaaaattagatcccaagttcacaaaatatacacatgtacacaagtacagacacacacacacacacacacacacacaatccagaaaaaattttaaaaagtgaaaatataaaacattaaagtttttagaatatatgagaatagctttttgaattcagagtaaagaatacttttttagacaatacatagaaaacaaaaataaaattcaaatactgcacaaaattcaaggataagcaacatcttatggaatacagctgaaggattagtattgaaaatatattttaaaagcaactgaaaaaaactcaaaaaatatttgacaatatacagttgaaaaatgcatgtaactcaagtgtacaaaaaatgtaatatgcagttcataatagaggaaattaaaataactatacaaaaaaagattgatttcataatcagagaaatgcattaaaaaagaatgtagacactgacttcataccttttacatagagtaattcaaatgtatcacagatctaaatgtaaaatacaaaactatcaaacttctagaagttggcaaagagtttttagacacaccaaaagcatgatccatgaaagaagaaattgtcaagttgcacttcattaaaattaaaaacttctacttcatgaaagacactgttaaaagaataaaaagacaagccacagactaagagaaaatatctgcaaaatacacatccaaaaaagaacttgtatccaaaatacagaaaaatttttcttttttttttttttttttttggagacagggtcttattcagtcacccagagtggagtgcggagtgcagtagtgtgatcatggctcactgcagcgtccacttcccaggctcaggtgatcctcctatttcagcctcccaaatagctggggctacagacgcaagccactaggcctggctagttttttggtttttttttttttttttgaagagacgagcttttgccacattgcccaggatcgtctcgaactcctggactcaagggatctgcccacctcggactctcaacttgctgggattacaggcatgagccacaacacctggctccacaaattcttaaagttcaacaataagaaaaagacataagatcctaaatgtgtacacaccaacaatagagtctcaaaatacatgaaacaaaacctgacagagctgaaaggaaaaatagataaatttacaattataatcagggatttcaacaaccccttctcaaaaattgatagaactactagacagtactactatagaaaacaagcaaggatataaataatctgaacataaacaacaggatctagtgacatacatataacattccacccaacaaagcagaatacacttttttttcccaagtatccacagaacatgaccaagatagctcgtgtcttgagccataaaacaggcctcaacaaatttaaaagaactgatatcacagagagtttgttctccaatcataacagaataatggagtcaaaatagaactcaatgcaaagtcagagagtccaggacagtccagatgctactgggttagtgacaataaaaagaataccctctggaaactagacagaaagttccaaaactactctcaatgtagctgaaacattttatatctgcattaaaattcttttccataatgtacttttatatttcagtaacagcaaatgaaaaatgttatagacataaaatggatttcaaaacacatctgtagtaagctgacttacaaaccaacttttaaaataccacatattaaattgaggctgtaaacttataatttataatgaaatgaaaactttaccttccaatggaatgtctaaaagattggcatgctttgttttcacatgagtttccatatcttcactgtgctcctctatttttccacagaatggacattcaggaggactgtatgttgtttcataaacagatccttttatttcggtcaggctggactgtttttccctacttttcaggaattttctagattcagttaagttctctgaatagaagccttcatgttttaaagtactatctttagtcaggttttgagctgaattttttggatgattagatgcacaacctgaaagaatacttgaattaacttccattccacactgtagggtgttgtctttcttgttatctgaagttccatattgtactgtatttatcctctcaaagtttctttcaagtgtattctgctcaaaatgagctgtttcgatatgaaaacacatttcatcataattcacacctgacaacttgcaaaatggacatataatttcactttccatgtgaacaattaggtgagctttcatgtctggttctgaggttactgtttcaccacaaatattacaggaaagcatggtattgacaagtagctagaaaagaacataacattaggtttcaaagatttgaagaaaaaatgtgtttcataaaatgatttgagacaattacttggtctttaacgctggattattttgatgaagaagttttcaatgtacttactgttcctcaaatacaaaaacttatttataaatatcaaccaaaatttcatttatttttttttaaaaaaaggcaataataatgaatacaagtaattttaaaaataaaatatttcaaaaaatgtctctggcccaaggtggagaaaaaataacgtttaaaaaattgtccaggtaagataaatcaggtaagaaaaaaatgaagagaagaaacctatttatcaactgatatatctaaatactgaatactgaagctgattatattgaggaggtaaataaacacatcttacaagtagagtttaacactgtaaacttagagtcttacatgtatcaagtgctatttaagtgctattattgtaatttaagtactattattatcgctctacacataaagaaattctggctcagacaggtcaccacaagcagaaaaaggtggaagccaaaatgccaaccccgtcgtgctccacagcctgtactctcagccccaagaataaaagcagaagtggtatagtagaaaaaagcacttattccagagtcaagagaactgggtaataatttcagattcatcattttgggtaaggaatctcatctctctgaggttcagtcaaagactactgtaaaatccaaaggtagttatttttggattttatggacaaataaagtactgactactgacataaaagtgttaaaaaaataattttaaaaaaagcaatcacttcgccaccaccttcctactacaggtcatcgttcagctaaagactatttaaaatcaaacaggaaaagtaatgacactatcacttcatttaaataaatttacctttaaaatacctccctacattgtccttatttttttcatttctctccagacaaatggatacagtctctgattttagaaggcagttctcccgagcccccagtgggattaatgtcacacccggagtttcttctcttccggtggctgggacacggtcagacacagaatgatgaacttggacatggactcagattaagcgggtaagagacaagagagtacccaggtgcctcagaggaagcgagtgagaggcatgaaggacccagtgccaagctaggtacgtggtgggtgaggtcagaagaccgcaaggccgagtctcccaaacgttccgcgccaaaggcacaagccaggcacacgaaactagcaggcactaactgggtcaaagctttgggcctggggaataagggaggggaccatcaattcttaccggcccagaggccagcagctgccacactgagctccgctaggcttcccctttgggcctcgctggcagacgagtgcgtgcgcggcgtccagtacctctcctggcctgatgactgaggccaggccttcccaatacgcagagtttcacagttaaccgaggaaagaattaggaacttccaacaccttggccctcagtacctcattcaaaagcacttccttact

(The sequence listing continues in the following parts.)
